United States Patent Application Publication US 2007/0083945 A1 - sequence listing, part 13

SEQ ID NO: 82660 - DNA, 408 bp, Glycine max
  unsure (1)..(408): unsure at all n locations
agctntgatgtttgtgttgaatgcattaaatgtattcataccacaagcatgatattaggtgcatatagagctacatacatcttggaattgatacatacggacatttgtgggccatttcatacgccttcatggaatggtcaacaatattttatatcattcataaacgattactccagatatgcatacttgtttcttatacatgaaaagtcacaatctctggatgtgttcgaaacatttaaagttgaagttgataatcaactcaacaaaagaataaagtgtgtcagatctaaccgtggtggtgaatactatggcagatatgacggttcaggtgaacaacatccagagccttttgtcagacctagaggaatgtggatcgtccacagacaccatgccgggtcacctacttga

SEQ ID NO: 82661 - DNA, 475 bp, Glycine max
  unsure (1)..(475): unsure at all n locations
agtatgagtactgagaaaggatcnagaaattgtgtgcgatctgctctcaccaccacatttctgagcaactccttcttcaatatttctatgagggacttacaaacatggaaaggagtatgattgatgctgccagtggtggagctcttggtgatatgacccctgctgaggctaagaatttgatcgagaatatggcttccaactcccaacaatgcagtacacgagatgatgctattgttcttagaggagtccatgaggtggccacagattcatcttcatttactgaaaatgacaagcttgaaggagaacttgatgccttggtcaacctagatactcagcttgccatgaatcagaaatctacacctgttgcaagagtctgtggtctatgttctttagcatatcaccggacagagttatgtgcttctttgcagtaatctagagtcaatgagcaacctgaagttatgctganacattatat

SEQ ID NO: 82662 - DNA, 160 bp, Glycine max
agcttggagatgcaatagtgctaaggtcactgtgtctatttattcacatcgccgacaatgaacaaagggggctgtctacatgacaattaaaatctaatagtgccactcctcggtcctatgtctggtcttctaactacatgctgacataacgagtgcgcat

SEQ ID NO: 82663 - DNA, 473 bp, Glycine max
atcggttctgtcacacaggatggcgtgatcactggctgacatattctcaattagctcagctgcttcttttggggtcttcaactgtatttttacccctgtagaagtatctagcagctgcttggttagtggtctcaacccatctatgaacatattcaataggattggctctaaaaacccatgggtgggagttcttctcaataaacctctgagcctctccaatgcttcactcacagattcatcaaggaactgatgaaatgaatagattgcagcttgtccttccgcagtcttggactctgggaagtatttctttataaacttttcatcaacttcttcccaggatttaagactgttacttataaacgagtgaagctagctcttggcctctcctgcccatgagaatgagaataggtagagtctaatagcttcatcttgcacaccaacaatcttaactgtggtgcatatataaatgaaca

SEQ ID NO: 82664 - DNA, 419 bp, Glycine max
ttaagtcacctgcaggctgcaggctgttctaatacacttctaaagtcatttaataagcttatccttctttgagagctaaccatctacgacgatgcaaatttgagtaagtggacagacacactatttgctagactgttatgatacttgcgttcaaaggagtcctgctcggatgaataatacaagtcattattcttttcgttaaataagtttatctctataatgactgttgacgttaaactttaatggctatggatcgccataatagactaacactacagagctattctttaatgtgtgagtagtggacaacaaatacttaaggtatgatagctttaatagacacaactttgtgaatctactgcagctctcaaaatgctcaattgagaacgacactttataactacatattatctcaaatt

SEQ ID NO: 82665 - DNA, 505 bp, Glycine max
  unsure (1)..(505): unsure at all n locations
actaagctttgatgattcactgcttctagctcctgcatggcaccttgtaattctttcctcacctctgcatatatctccaacaaggcctatgtaatctcttctatggtgcctgcaacctctccatttattataagctctttgtctttgtatgctgcttctggttcggacttgagcttatcaagagttnttgacaagttactgactattgatctggccttttcctctgcagcagacacggcttctaatttagattttgctctcaagagcttgcaactgaggtttcgaacttttgcaccaattgtcgattccgtgttctttaaatgattcgtggatgcactcacatgcttcagctcatttcttgtgacatccatagatgccataaacttataaccgtcgtctctaatggaagccaagtctttcattgctgctcctattccttctcttgtagcctctaacacaccaacatctcttgataggcttcttctataactccatgctctcacca

SEQ ID NO: 82666 - DNA, 468 bp, Glycine max
  unsure (1)..(468): unsure at all n locations
caagctgagaaccaatatatagcattttttacttatgaaatatatcatgagataatgagaactataccatatcaatatcatatctctgaactgccagtgtcatatgtggcgccaataacacatcagcctgcataatacaactattacttagttagatatgccttttcaggttggaagattaagcaattaacttcaaaatatcagaaaatttcagtggtccagctagattgttacattaatcaattcaagcatcataaacatcttaaatgacaaagatgggcatgaaaaagataatgcatataaaccttagatgattatgaatgtgcaacaagatgcaaagatatttaaatntcactctcaaaggagcaagaatctcaaagtagaaagaacagaataaagctttgaaaactatatttggcacacactgaaatttcataactatgatggacaagaacataagatatattt

SEQ ID NO: 82667 - DNA, 440 bp, Glycine max
tagctagtcggtgaagagagatataattgcttttgcggaagagacacagagaacaagagagaatgcttctcaacgagggaaaaaaatgcttcttatttctttaaatgaagggacaaatagacctttcattgaattgctgggtgcaccaccaatattgctgggtgcacctagcatatcccaacaaagtacttgctaaataaagaagtgggtatgccccgacaaaagacgcaaggcttggccggaaacaacgccatcaatggacttagcaaagtgcacttgtgggctatatatcacatttttaaccacaaccctaaggttgatgagttcttttccactaatgagttttcttaacctggcattgcatcactatcatattttaatatatacaaaaataattaattgcacactcattattatacatctcaattaaacatatatta

SEQ ID NO: 82668 - DNA, 463 bp, Glycine max
  unsure (1)..(463): unsure at all n locations
agcttgtggactataccttcgaccatacactgtcgtgtttctgtctcggcccggatntaaagcgggttgcagtaccggctccgcttccctaaccgtactggaggcggttgccgaggctctatcctctatggttttctggagttttaacatgacctccgagatggaagccatttgatctttcaaggccgatagatcggccttcatctgttcctgcacgccctcttcattatccattnttctggatcgagtgatataggggtgccttggtgtntcttagttatgatgaaattcctaaagaaataaacaacggtgagtatgccaccaaaacatgagtatgcaaatggatgatcggagcacttgatccaccccagagttctagatagcgtgatgagccataacttctcatttataataagactaagcttcatctaccaagatatcaaagggttcaaagaactaacat

SEQ ID NO: 82669 - DNA, 466 bp, Glycine max
cgcttctacaacatgaactcgctaagcgagcgcgctgttcttagcgagttcatcaaaattcattgcagatatgcgtttccagaggaacttgctaagctcacctaccacactaagcgaggtcatcttgtgaggatgaatactcatcctcctattgaaatccttgtggctaagcgaggctgaatcgctaagccaaaataactcagagaattttgagttgaaaacctagcgctaagccgtgtgtaccagagctaagtgcatatatgtgcgattgcttttaggcttaacgagctatataggtcgctcagcaggtatatctttctcctttaagatccgctaagcgaactatgtttcgctaagcggtatgtgttgttttgtgaacggccactaatcgaattcgatctagcttagcaacctttatgttactttcaacttaactcttgtaaatgctacattctttccttgatat

SEQ ID NO: 82670 - DNA, 401 bp, Glycine max
atgcttaatcctttaaaataacaatatgactatatgatactcattctgctggattaatgttgttagtgttttctcaagaatatgctaagtcataattaaacattaattatatattacaaactcaatctgtcttttcaggtataatacattagttaaataaaaaattagtaattatgtttgtttaaaattataatcactattatttaaaataaagacaccattattattaatttatgacattatgaggatcattcaaaatatatcttctaacttttaatcaaatattaaatactttttagaatttgtgtcctttataaataaaggtttagagcttcatatttgacttgacaataaattcgaggctgaaagtatttctctaccctcgaaataaacctatttga

SEQ ID NO: 82671 - DNA, 309 bp, Glycine max
agctagaatatccggttgcgtcacctattattgtggacgtcatccatgtcacagatgctatctgtgttaaataggaatacgctcacaacagctcatacaatactatcctgaggcctcaagtgtacatcctgtggtgccttatgatcgagctcactcagattagtggtgtcctgctcagtgctcactgtcgagacagtaaacctgttgagctggtgtgagtaatgaatctatcaacgcgaacttgttgctgctgcccgagtagtagagccattaatattatgctagctgagtatctaattttgaagttca

SEQ ID NO: 82672 - DNA, 53 bp, Glycine max
caacgacctgactggtgaaaccgctgagtcactcgtcttactctcgtcgtgga

SEQ ID NO: 82673 - DNA, 436 bp, Glycine max
caagcttatttcatcatatcttatgttaataacttcttcaactaccaaggttcttgagttatacactctgagtgcctttgaagtttgaaagtatccaaaaaatatctcattatcacttttcgagtcaaactttcccaagttgtcctttgtgttgagaataaaatatttgcatccaaatggatgaaaatatgttatgttgggtttcatcccttccataattcataaggagtatttttaaggttaggtcttatgtaaattctttattgaagataacaagtagtattcactgcttcaacccagaagtgttaagggttgaatatcaataagcatggcctagcatctctgtagaaatctataatatttcaattaccctgaggggtcttggtgtgaaaattggaggattcatttcttacaaacaatcaaactgccattcaat

SEQ ID NO: 82674 - DNA, 370 bp, Glycine max
gaggaacatggcggtctactatatatagtttgatgagttcaaggacaaacttgtgagacgccactatgatgaggagttgactgattatggtgaccgcaacatctctggtgccattgtgaaggaattatacgccaacctctatgaccccgaggaccaatcacctaaacatgtgagggtgagaggtcatctgattaaatttaatgaggatacgctcaatactttcttgaagacccatgttattgtggaagaggcggaatcactctgtgcttattccagaattgcactcctaaagcctgaacctcaggagttggctgctagtctctgtatcccccggaggggatttgagcttaatgctgatggcaacccctga

SEQ ID NO: 82675 - DNA, 358 bp, Glycine max
gtggttaagctatgcacggaactggatgtcaaagttgttgatctttctaatgcactgcacaagagagatgactggatgaatgcttgtttcacgtaagcttcttgactatatcgttctctcccccgccccccatataccacaaaaattccgaacgctgtcatattgcaatctaattgtttaatacccaaatccttccctagctcttttccagtatcttgagcgttgaatcttccatcttataagcatactgactgatgcaatcttctgattaatttagacctgcatcagttacttgctcgcaagttgtagaatctcttattatccttttcactcactggtttgcatgtccatacaattc

SEQ ID NO: 82676 - DNA, 385 bp, Glycine max
  unsure (1)..(385): unsure at all n locations
agctntcanaatttactaagtaaataaactgatcataaaaaaactgtactaaaaacacaaactgaaagtaaagtgtatctaaagagaaaaataaatganagtccagtcaacaatcatcctaagcaacagtgggctcgtcctgagctggtgtaggctcgccatgaggtgaagaaagagcatcctgngctggctgtggtgtctcctgtgctgttgtaggccaaggatcctaggtactctgcactgcctgtagatctgctgcataatcagtgtccttggtgcctttttcaccctcagagacctccacgacaggtgaagtagcatgtgaaacctgttgggtcacctctggagtggcctcacgagtaacctcttgctctggctaagactc

SEQ ID NO: 82677 - DNA, 381 bp, Glycine max
ctaagcgtggcaatggctcgacatgatacatgtcagggcttggcttgttttaaagataacagggatgccccacattatttccatgacacagatgctaaaatgatgatttggaaattttatgcacaactggtcatgcatgcgcctatgtggacgctcaagtgtgaaatttgctatggccatgtgagactaaggatcatgattcattggctgtattgtaaatcaacccaatgtatgcaaaagatgctatgttatcaatacgtgcattcaatcgagtgcatattgggcgtccgggaaaattttcacagcattcaccctctacgtgtatacacatgtattttttgaaaaatcgatgatgatcaatgaattgtttcaaagaaaagt

SEQ ID NO: 82678 - DNA, 479 bp, Glycine max
  unsure (1)..(479): unsure at all n locations
agcttactggaacaattccatccacgctttctggtcttccacgtcttcagaaantgtaagttgcctatgctttcaccatttcctcttctatatcaaactgcaatgtataagtgtaaaccaaataacatcatgtatgtatcagcttacctttcttacaaaacatattttgttgtatttcttaatcaatacatattcatttcaattttttaagttctaggtttataaaatatgctataaaatcaacaatatttttaagacacatcttttcttatgacaggtcatntgcaaacaattcattgagtggatactgtccttctaccatctggcaggacaggagcttaaatggaactgaacgacttatcttgtaagactcgatatgatagtcacacaacatttcttactagattaatttgcatttggnggaatgtatatgttcactttatcttcatctgattatctgacagtgtgtgctgaacatc

SEQ ID NO: 82679 - DNA, 408 bp, Glycine max
  unsure (1)..(408): unsure at all n locations
tattcatgtaaatatgtcattagttatctttgtatagatccaataaattatatcatctatgtgtttagtcctgtcgttaatcgatgcctctattatcccatcctttattagtatgtctatgatcataccaagcctgtgtctaaggaatactactagaagtatattcctactattgctttcgctgaattcagtgtctcgtacactgttcttgttccatagacactaattntctatattctgaacatgcacactatgctttgagaagccctcactcaccctccactcctctctgacccaccccgaactcgctcttcctccatccgagcgagccatctcctattgtcctcacacctaaaccctcactagactcctctttaccacgagccaccgagatgcaccatctatgct

SEQ ID NO: 82680 - DNA, 448 bp, Glycine max
  unsure (1)..(448): unsure at all n locations
agctnngattgtgagttgattntagccttagtttcactttggttattagtcaattcgattaagaataaaatcccaaagaaaaatgttcgattgattttttttttattattttatttaaagatatttttttattattatattattattttgcctctttttggttttaaacgtggttacagcatgaaagatcagtcggattctattctaacagagattaaaagatattataactcacatgatcggnggaaatttattttagttttttattatgcgagaaaatgactaatataaatggtcaaagcacgtcataaaggggtacggatagctaacgaaataaagataaaagcacgcgaaacaagtggggaccactaatggcacatagaatgaattgagaggttcaattttgtgaacttaccagttgaagaccgaagaacgacgaataacgatg

SEQ ID NO: 82681 - DNA, 449 bp, Glycine max
agcttaataagatcatgttcaaacgaaacacattaatgcttcctagtcaagccttatactagagaaaggaacaatatacaaaagtctgaactaaaaaattaaatcaaaaatgaccttgattctattagaaacattatgtcaaacacttcataagcaaaacaaatctctactattaaagcacgttaaagcaagactaacatcaccagaaaattatgaaacatatatcatattaaaatcttataactaatgtggtaccgcatcggaggagcgggatcgacgaagatgggggaggagatggttttggtggagatatgcattcgactatagtggtgcacattgctattagttggcggtcaaagttggtcacggggaagttggtgctatgatatgcatgactttatggagttgggtgcgggcatgttgtcagaatttgaatttaattgactcaa

SEQ ID NO: 82682 - DNA, 462 bp, Glycine max
  unsure (1)..(462): unsure at all n locations
agctngatgagataaacaaggctgaagcagatttgatcttgaatggctatcatgggagctgaactgcgaggtcataagcctggagcacggaatagattaataagttctcggcatctctcctctcattctgacccctttggatctgtgtttgaagatgactttagtttttgttaatgttatttatctgattgtttattgaaacaatatacaattttagagcatatacctataaggtaccattcatgggtgtattggacatacgtgtagcttctagttgctattgtaacattctgttgaaagatatgtcatatggaccagttatggatcaatattcgaacagagcttactcgttattatattaacggttaccactctaattaagtcgcgtccatacttataatggaaaatgatttattatgattacttaacgtctacggactgtcaatcaattgcatccttatt

SEQ ID NO: 82683 - DNA, 482 bp, Glycine max
  unsure (1)..(482): unsure at all n locations
tactaagcttcaggctaagtctccatgtagctcccactatctctaatatgttctctgaggaaatcatgatttctatgctttctcgttgttagtttgagcctttcttaatatctcttgtgatttggataccattattggatttttttgcatttcctttgaaaaacccttgaaaatgagacattataaaagtcgcctttttatataatggatttcatttttgcgacctttgctgaaccctaatcacattggcgggagcagaattttaaaatgatgtgtctttgatgtggaccccanatacaccattttagtcccttttaaaaatttaatgggtatctgaccccgaatggtaatattaacattagctttgaaaactatactgaatngtctttgatttgatatatagagccctgtgtttggaccaaatgacatgaaccttaaagatcttataacaacatcacaacgaaataacagagagatattat

SEQ ID NO: 82684 - DNA, 398 bp, Glycine max
agctagtacgattatggagtacccgttacatgtgtgactaggtggcggtcgggcgatggtgctaactaactatccacatacacaaatcacacataaatccaccatccccagttgcccaccttcaactgagctcacgtactcccacgtagctctaatactcgttcctctcaacaccgggtccccatcaatccctccaagctgtcataacatccaagaaatttcaacatccaaacatcatgaactatcaaaactaaacaaatacagggcagaggcagaaaactctgcccagaacacaaaccactaccacaactgttcttattcaaatacgccaatcacatacgttttggtcaattcattcaccgttggatcgactcaaaaactttactggagggtcctag

SEQ ID NO: 82685 - DNA, 414 bp, Glycine max
aacataaaactagcttgggatggcttgccatgagagatcctatggttttgtaatgagcggatttgatcatacttctacgacgactgatacaactggcgcaaatgaagagggtgagacatagggagaaacccatgctgtgactgccattcctatacggccaagtttttcacccacccaacaatgtcattactgagccaagaacaaacctccatcttacccaccacccaggtatacactaaggccatccctaaatgaaccacaaagcctgtctatcgcacttgcaatgacgaaaaccacctctagcacacaccacaaaaacaccaactataatgaattttgaccccaaaggctgtttggttaccccaaatttcgtggcatatgtaaacttgattcatatccacgcgatattcaatg

SEQ ID NO: 82686 - DNA, 452 bp, Glycine max
  unsure (1)..(452): unsure at all n locations
catgcaagctngcttctacagaaaccaccataatactgttccaangcattagctacatgattcactgaagtctcggcctggcttctaacttcaagatccgccatcattctcaatgctcgcttcattttctttacaaccttgggcctttgcatcctcctttactaactatgagatatagctccttgaggatcttgtacgctctggatcttctctatcaatggatacatttgtttcttgaagatcaatggcagtggaatggagaatgaagaaagatgatcggagactccactttatggagaagatgagttaataacaagctcaccaccataggaagtcatggataacagcttgaatgtatgacatcattaatggatggagaatgatagatgaacaccaaatttttgcctcaatgacgctgaactctgagtgtattctaaatgatcacagtgaaa

SEQ ID NO: 82687 - DNA, 393 bp, Glycine max
gacgtggaaagaatggtccttgatctgcccgcacatattatttataagattcaaggaattagagctccctatagctctagccatgatgatttattggaatggagcacctcatatggtggaaataatcctacatgagatgcgcatgtaattttgacaaatgctcacaacgctgaagagaataactcgtttagaagtatttggacatggggaggcttgtagcgaataaaatatcttctgtggaaagctgggcaagcagatttacctctcacacaatacaggcactcgacaatggatcggagaacgcttttccttttcgctgtgtatggagaacgaagaaagccttttacatgcaccaacggattgcatgtcggtcatgaatatttcgcacaatct

SEQ ID NO: 82688 - DNA, 393 bp, Glycine max
agactatgcaagtctcgttgatatttgtatattaattacaatattcttcatactcctaactataaatatagtttacaaataaaaaatgtataacttaacataataaatgattagagactaaaagcatatatataaataaaattaaggatcaaatgaaaaatatatatttgtagagactacaattaaaattgactacaatgagtacataattattaatacgatttttgtaattatatacgtgtaatataataatgtagattaattattgatcttacacttctaataaatcaatatcaatcttacctaaataatacgtattcatttttgttaattactctaatagagaatctaaagtatcttatggaaaaggttgaggattgatttcatatcatg

SEQ ID NO: 82689 - DNA, 429 bp, Glycine max
tacaaggtctcgttatatagcactggcggattatgtagtattccagaatgccttattttgcactcaaactcttattgaacgtaattgctaattaacttcattgtgactgtcttttcttccactaggagtgagcagatgccatcagttcactgccaattgcgtgtgtattaattcagttgagatcaacaaaataaaagaaataattgattatctcgaaagtgattcgcacaattttgactaaatttatgagagtttgaatttgctatttgacaaaatttatgcatttttcaaaattcagtttagatgccatcagtgtggctttctgacacaaattatgagagtatgaatttgctatttctaagcatttttcataatattcttaccacagcatgttttgaggttgtaataatatggcacaacatttttcta

SEQ ID NO: 82690 - DNA, 369 bp, Glycine max
agcttgagaaagtccttctgattctgattatacatttttgactcgataacatgagatgaaatacagagattggacctcctgttaattgttatcaatgaatagcttaaacacttgtgcttgagtgaaacagaagccatgagactgtggtttgagctactttccatgaatctgccttatgaataacctcatctaattggattgtccacattttgttctcctttttgtctaacagcatattccgtgaaaacaaaggatatggacacattgcttcatctttctcattatgcaatcaatgaattttgatgcatacacccctatacataatcactgcgtgttttaccacttgaggacaagtgagttgttatcttt

SEQ ID NO: 82691 - DNA, 363 bp, Glycine max
  unsure (1)..(363): unsure at all n locations
agcttatgcgcatatttccctacgaacgttcacttgcacaagacatcctattaactaagaaaaatgcacccatatacaatcaaggtagcttcattacctagattatttacatgtacttccaaggtgtatttgttatttacatcacacacgcctccttggctaaatttacatacatgcatactcaaagcatttcggggtaccaaaaattgcacatgcgctcatcttggtatttctaatacctatacatatacaaacttcatgatgaatcttgactacctacgcaataaggtgctacatatcatgctnttnnttttttttttcaagttntgcttcctaaagccacttgcaaattcaaacatattt

SEQ ID NO: 82692 - DNA, 384 bp, Glycine max
  unsure (1)..(384): unsure at all n locations
agctnggagatgcaatagtgctaatgtctatgtttttatataatccatattgacgacaattaacttggggtcttgtctttatgatattcaatcctaacgtgccaacctgtttctacttcggtctttggccaaagtgtacaaagatatgcatgttgattaatacgaacgattcaccacctataggatatgaagagacttctggcgtattgctatactactgacttttgaatctgatgccacgctcactctatgatatctactacaatatctacgatacagagttccttctaaatagataggtttctgcatttaacaacttccaatattcaaacttttatttcactaatatcttcggttcactgaacattctattaaacttgaaga

SEQ ID NO: 82693 - DNA, 375 bp, Glycine max
  unsure (1)..(375): unsure at all n locations
tggtttgtgtttatgcttgagtttgtgtttgaggtttgtgttttggaagaaaaactataagaanaagttttgggtttaggtgtatgtttctcttcatagagtttggccaacgaaatttttctgaggagtcatgtaagtgattgtgcaatgacatcccttctgatatcatgttttaatcctcccacaaagcaatccaatagagcttcttgtgtaattccttgtactcgattagctaaagccgtgaactgcacgtaatatgactgaactgaaccaattttagcgagtttaaacaactgagatctatgacattcataccgtgatgggccaaattctgtctctaaggctcgcgtaaaagcaatccatggtctgaatgaa

SEQ ID NO: 82694 - DNA, 421 bp, Glycine max
  unsure (1)..(421): unsure at all n locations
gcttatggtgaatgttctggagtcgttttatctcttctgccagatatatttcgactgaacgacaggtcatttaatgcattggaccattaaacgatctttcgattcttttgaaaggagagaatacattaatgcattggaccattaatgatctcttggtttctgaaagaggtgacacaccttatgtgctggttttacgtctttaaaatccacgtttaaccaattaaagtgaaaaggaccatctcaaggcgttggaccttcaaaatggtttttacgtgatgacaaaggcttgtgttatgaattgatttaccctcagttcactttggtattatcaattcattaagatagatatccaacgaaaacgtccgatgattattattatttattaaagaatatcttctatatatatatatatnttgctctt

SEQ ID NO: 82695 - DNA, 433 bp, Glycine max
  unsure (1)..(433): unsure at all n locations
tctanactaaagcagatctcgaagaatcttgaaggttggtatgttggtcttgcatgtattggaacgagtttggctgcttgttgaacaattatttctacctttaatggtggctttatctttgttggttatgaatacttatttcattgtctttgatattgttaattgtaccaactcttaaccatatcttgttgatggcgtgtgcttttattctctgcgtaactactcttatattgtatttagcatacattgatgaatggttaatttccttgcttcctgattagttgctacaattgtgtgtatcaattgcgttgtatgactctttttttacgctcttcttggcctataaatgactacctctaattcattggttactcaaactctctattgatctttttctatatagctatccaaaatctaacacacacttgggctt

SEQ ID NO: 82696 - DNA, 490 bp, Glycine max
  unsure (1)..(490): unsure at all n locations
agcttgcccagagaaggagtccacggaggaaatgcttaccacctcaaaagactggaaagcggtttctaatgtctcctctgtggcctccgcataaggcatagaggatgggcagctcaccaagagtcttcctcgcctgatacgataaccagatgcccttaaactacaaatttcaacttttggtggagtgtagagggaacaactcccactgagtggatccacggtcgccccaacagacagctgtagggggggttaatatccattatttggaaggtaacttgataggtgtgagggcctatctgtactgggagatcgatctctcccctaaactctcagcgggtgccgtcgaaggcacgaaccaccattgaactcggctttaagtgggaagcatngaatggtaatttctctcaagtgctcttacgcatcacatttaaactggaaccaatatcgatgagcactcctgctatgatatggtccatacacttgactgatc

SEQ ID NO: 82697 - DNA, 442 bp, Glycine max
tatgcgtgtgaattatgaagcatcaacaagaatcaagccaatgctatggtgcaagcaatcaatggggcaaaacacaccaaatgattatgatgatggatggctcaaattctcacaaaggtaaactcatcactctcaaactgagctttcaaaactatcatgacatgtagaggagaatcaaggatttcaagtcacacaatgtcaagaacttttattttcaaaacaattacccatttcttgaacatatcctataattcaaagaaaaacatgcaaagtcgtacatgcacacataattgacccacaatatataactaaaaatgcgacgaaactaacaacattaactaattaacacaactaacaaagtaacaaaaccaacagaactagctaaaccaaagaacactcctccccatacttaaacaacacattgtgctcaatgatcacaatt

SEQ ID NO: 82698 - DNA, 406 bp, Glycine max
  unsure (1)..(406): unsure at all n locations
gcgcaagcttgtatcatattcgaacaacaataacttttcactctgtagtctgattgagtcctgtaatatatcgtgacgctcgaatnttacaaccgaagctcgtagcaaatttgaacgacaataacatttcactcggaagacctattgagtcccgtaatatatcgagacgctcgaattataagaccgaagctcgtatcacattcgaacgacaataacatttcactcggaagtcctattgagtcccggtatatatcgtgacgcttcgattttaaaaccgaagctcgttgcatacttgaacgacaaaacattctactcggaagtcctattgagctccgtatatatcgtgacgctcgaaatttataaccaaggcttgtagcaaatatcatccgaaatagcatttcactcg

SEQ ID NO: 82699 - DNA, 190 bp, Glycine max
ctaagctacggcttaaactcgagcgtcacgagatatgacgggactctttcttacttctgagtgaaatgtcattgacgaatgagattcgcctcgagcttcaatcttaaaaccagagcgcttggatatattaccggactcaatcggagttacgagcgaaatagtattgtcgtaagcacacgctgcgagcttc

SEQ ID NO: 82700 - DNA, 431 bp, Glycine max
  unsure (1)..(431): unsure at all n locations
agctntatatggacganagtgcaaaactcctatttgttggtatgatgatggagaagcggtacttcttggacctgatatgctacaacagattaacgaacaagtgaagttgattcgagagaagataaaagcatctcaggataggcagaagagctattatgatagaaggaggaaaccattatattttcaggaaggagaacatgtgtttttgaaggtttctcccataaccggagtcggaagagctctcaaggctaggaagttgacacccaagtatctaggtccatatcagattttgaagaagattgggcctgtagcttatcatatcgccttacctccgagtttatcgaatttgcaccctgtgttccatgtctctcagctgagacgatacaacaccggattcatcacatattctttgcagtggacgacgtacaggt

SEQ ID NO: 82701 - DNA, 323 bp, Glycine max
ctgtctatactgtgttgattatgagagttttgccttttgcttaaagaatgtacacgtaaactaactttcaatgttgcttgcagaatggcccacgacttgttttaacagtcttatgacatgaatcaaggactattcccttcgattatacaattccgtttacgattgctgtacaccagcttcgcttctaggccatcaaaggatggtcttttctccaggagcgacgcgattagctcatggacgacaaatattctgattttcaatatgaaatagggcatcggcggtgggcaccattggttactcctatagtccagtttgatccataa

SEQ ID NO: 82702 - DNA, 397 bp, Glycine max
  unsure (1)..(397): unsure at all n locations
agcttccattgttgagtttgtgcttcccttttcacgctttaattcactccccacaggtaagtgcaatgtcccttgggtatttggctctccattgatgtgatttggcgctttagttgcttattttttgcaaaattcgagaagcaatntgcatctgaatccatgcttgttttgtggagttgagaatttgaatgagaaggccttatgcctatgttgaattctgaagcaatggggcatgccacattgcccccattctcttgcaatttgagttcaaacatgctcccatcaagtgctcggngaaatgccccaatgatttatgaatatgatcttgcaaaattgggatggtggggctgttctatgtatgtagagacagcatatgaaagccaaatatgtgcccgaa

SEQ ID NO: 82703 - DNA, 340 bp, Glycine max
ttaacctaaggtttcaacgtgagaatgtagtgatattagtggaaaactgcgatgctttgatgatttgaaaagccaaatctggatctagtggtgattggaggttatagcgacgtaatcctagtttaaaatgtcattaatgactgcgggaaagcttgggctgtgcataggatgaatatgatagaccaaagtgaaggcctgagccatttctatggtaaattgggtgttgagaagtcaaattttgattcagtagagtcttcttcgtacaacaagttgagcaagtgtagattaatgttatagacttgtgtgagacgagagtttgctccacaattaccccattctc

SEQ ID NO: 82704 - DNA, 438 bp, Glycine max
gcttaacattcaatttgagggtctcgatttattactgtactcaatcagacatccgagatataagatattgtcgtttgtattagctcagagcatcaacatctaatttcgagcgcgtcgatatattacgggactcatgcagacatccgagcttaaagttattgcctgttgaatttgcttcgacaatcaacattcaatttcgagcgtcctgatataatacgggactcaatcagacatccaagtacaatagttttcgtctttgaattagcttagagctctacctttcaattttgagcgtctcgatatattactggactcaatcatacattctagttataaataattgccggtgaattagctcaaacttctgatttactatcagcgctccgattattacagactaatcaacattgattaaaattattgcgctgaaattgctaa

SEQ ID NO: 82705 - DNA, 340 bp, Glycine max
  unsure (1)..(340): unsure at all n locations
gtgacacttaantactaagctttcgcagattcaacgacaataactgttgtactcatatgtttgattgagacccgtaatatatctagacgatcgaaattgaagtttgaagctctgagctaattcaaacaacaataacttttctgctcggatgtctgattgagtcccgctatctattgagacgctcgagattgaattttgaacctccgagctaattcaaacgacaataactttttactcggatgtccgattgagtcccagattatatggcgacgctcgaaattgaataccgaagctttgaggactttcaaacgacaataactttttactccgatgtttgatt

SEQ ID NO: 82706 - DNA, 458 bp, Glycine max
agctttaacaaggctagtcacctatatgttttttatacttgaaagtaatatgacatattttatgaagatctcggatagcaatattttgcgcagtatacatcttaagtcaacacccaggttttgtataaacctgaaaacttattgccgaggaatgtacaaggggtagtagggtctattctgcataaagagtttacctggcatctgaataaaaatttatggtgattgcagtatgctggattatgtcatttcttcgggtttttaattaaaatggtcactagtctcattcatttttgcttgcttatataaatgagctctaattgattatattcctagtttaagacattcttaaggaagaacagaatgttcttctgcttctcatgagtggttttaattacaatgggcactggtatggattttgactatttacacaatggtgagtcataaatgtctaatgcaag

SEQ ID NO: 82707 - DNA, 430 bp, Glycine max
  unsure (1)..(430): unsure at all n locations
gttgcatacatgacctactcactgtaggcacatattcttattcttatgaatattcgnctgtacgattattgaaagttatgcagagtgaaaacaaacaaacacatcttttgcttaaaattagaaccaacagtggcttggtcggacaaataatactgcgtgtaacaagtttagtgtagagcatatgatgtagagcccaaagaggcattggctaatgcatgtaacttgttgaagatagcagaacttggggggttgagacaaactaatataactatctgtatcgtatctagttgcttttctcttctatgctctaaatagactcaacgcttgaatatgatttttttcttttgacaatctttgatgttttatacaacatttaaagctatcatctggaccattttcagaaatataagctctaatcttttacatttta

SEQ ID NO: 82708 - DNA, 430 bp, Glycine max
agctgacagagaaataaaaactatttgaactatatttccatctgtgcaagaattgaactgcgcactaagtcgcattgcaatacatctctatttgaaatttactctgagtacacatattcctagggagattagtacaataatctatgatgttagcacattaatcaagatgtttaagataagattcaccagtctggcaaaaaataggttttatcattttatcctatgtctactctagccatttttggttaaaatttcaaatgcaaaaccacccacttatggctagcttgtgcatggtaaccatggtcatcataggtgtcattcatgctcgtatatgagcttatactagcctaacccattactcatattaacctattctcttcctttgacaaaccttcaggacggaaccccattttcttttcttcagcttata

SEQ ID NO: 82709 - DNA, 352 bp, Glycine max
  unsure (1)..(352): unsure at all n locations
atatttaccgagctggaaagaaaatcttcctacgcagatgatggtgaaactattcaacgaatatgctcttcaagaggtgagtgggctctcctaagaagcgagttaccgcgaaaggatctaaacaagatgatgtcttatgtgtgagcgcaacgaagatacctttgatcaatgtctttatactatggcacactgccactgacctcttgttctatgcagatcatgactatgaggactagacaaaaatgagactacatgatgacgcccaaacanatgatgctctggatctcaagaaaggacctactattggtgatggcagaaccatattgtaatgatatgctcagatctggaaaag

SEQ ID NO: 82710 - DNA, 398 bp, Glycine max
  unsure (1)..(398): unsure at all n locations
agctntgaaatgcatatttatgctatatataatttaagcaacttactctgtatataataaggatattaaagtaatttaatatggtagagaaaatatttatttattttactcacagctaaccattaaattattcatttttaatttgtagcaagttttacttgcaagtatagtttttttttttggtcatccctttattcaagtgtcttgtctggtgctacttcactgactcaacaaaaaaaaaagtatttcttaatacttcaagcgataggtgataagcttttcgtataaagagtggaggtatgatgcaaaataaaacaattaaatcaatgtgaatgggagctccttgcataactttgggtctggttgagtctcatagttctatagagtggtactaatat

SEQ ID NO: 82711 - DNA, 462 bp, Glycine max
  unsure (1)..(462): unsure at all n locations
tcgattggatgcatcatgtaactaacaaaagaacatgatttatttccattgattgaatcctgcatcatgcgagtaacaaaagaacatgacttatttccattgattgaatcctttataggcatagttacaattgtatacatatacaaaaaaataatttaaaaaacaaaagtataaccaccccactctgctatgccccctaatttcaccctagaattctacagtcagctcataaaaaaaaaaacgaaatcaacaccatttgctaaccgaaaagcaaaacagcaatttcaagatacaaacaaaatcttcaattctgaccttcattctagtctttctgcaacctanaacaaattcataggagaaaatgaataatcaagaaggaaacacggcagacactggtaaaatagatcgtgtgcttatcacccactcagacttcaacatgggttctctatcctaacatgggat

SEQ ID NO: 82712 - DNA, 434 bp, Glycine max
  unsure (1)..(434): unsure at all n locations
agcttccatcaggngggggtatgtttattggatgatatgtggttgtcggccatgcttgatgatgtattttggccatgcttgatgtatatacatatattgcctaattcttgctttatttttcaaatattcaaaatgcttttaaatcttcattttctgttctcgaaaaaaaagagacaaaaacagaaaaagagtgaagttgaataaatgaagtcttgtttcgaggactctgactagtttgaagacttggttgattctggagattttgggtttactactctttctgaatttgcatttattcccaattgctcctctcttcctttgggttatagctaacttatcccatacttttctctaccttggtcctggccgcataacaaccataaaagaccttttgatcctcattgtgtatgtgttggcgagtacgttggcaattt

SEQ ID NO: 82713 - DNA, 316 bp, Glycine max
ctcttattcatgctaatattgcagtacactgtcacaatctaattatgtccacccgccccccctcccaaaaggaaaaaactatttgaaggactaataaccctaattttgcaataaattgtctaccctaattttgcaataaactcacaccctaaattcaatactatttgaaggaaagacattttttgcataataatggtttagtaagtggtggtgaattgtttcatattcgattcaagaggggttgaaaatatctatgtctgttataaacacatatagagaaagcattaagtatgttaaaggaccagaggataaaatg

SEQ ID NO: 82714 - DNA, 393 bp, Glycine max
gtcacctgaggcatgcaagcttctgtggggacttctttactcgcttttctatctgacattcaccacagattctgtcttcttatattttcagagcgggaatgcctataacagcacctttgtcaatgattctttacatgcctcttaagagcagaagttcaaatctttgatgccatattctgacttcatcttctatggaggatatacatgtggatgattaactggattcttgatgtgtccatagagtacacgagtcctttgatctgctgcccttcattataacttcactcttcatatttttaccaatcattctgactatgcgaagttaaattgaatccttatcacacaactgactgatgctgatcaagtttgcatcagtaccttcaccatcagtac

SEQ ID NO: 82715 - DNA, 398 bp, Glycine max
tgtgagggtaccctattgaggccgtcttacatactcttattcccttaacaatcccccaaattaaggacttatcataacttgaaacccttatgctctcttagaatcctaaaacatggtcaaggatatcacaattaggctcacgggtttattcaaacaaatcattattacttctggctcaacaagagtgccaggcataaattcatcacaggttggttctttggctaagaggttaaaataaaaagaagcatagccttgatcatatccaccttatgcacataatctaacagtataagaatgatgctgaattaggaatttaaaatcagacattctctcataattaagttcacacagctcaccgggacaagataaagttattcgcttaccataccatgatctct

SEQ ID NO: 82716 - DNA, 307 bp, Glycine max
gatccccacagtcacctgcagcatgcagctttaataactttaatttttgctgaggtcttatccttcacatccactacggtggaaatagctctcatttaaaggtcaccattatctgtaatccctagttctgcactcaccaattcatgaccttgaaaggcttaagaccctaatcaactctttatgatcttataatgataaggcaattatctgaaaaatctctcactaatacaaactgtagtgtgtcacgtcactgaaatgattctttgctacactgtcatgagacacacacataaatatgccatgattc

SEQ ID NO: 82717 - DNA, 440 bp, Glycine max
  unsure (1)..(440): unsure at all n locations
agcttcttgaggaagctacatgagctgcctcgtgtaaaacnctgcgcggccttcagtgggcgnttgagaggtgtcgaaaattggtctccactttacaacacacttgttcacgatctgaccgttgggatcttcgataaaatgtctggagtgcgcgtgatatttaccgcgtccaattaccattttcacttgggcgtctctagcccctgctttcgtgtaagctaagataaacaccatttcttgttctttctctacttcaaacccattttaacattctaagcactgtttcttcatcccatccaccatatgcaccaataccgttattgtcgcgtagcaccctcactgataggaactcttaactgaactgaatttccactgtgccggggtttggagagacaaaccctagttgccttcgttttcttgggtacctggtctctctgtct

SEQ ID NO: 82718 - DNA, 455 bp, Glycine max
aagcgtgacagagtatggaggaatggttcatggataacggagctgaatacgcgtacatggctacggagaaagacaacgtggcatcggttaagttgttcacggacaaatgcgggtattcaaagttccgtacaccgtgcattctcgcgaaccccgttttggctcaccacgtgagaatctctaacaaagtcacaatcattgagctctcaccgaatgacgccgaattgctctaccgcagcaagctcgccacgacggagttcttcccgcgcgacgaggactccgtgctcggcaacaggcttagcctgtgcaccttcctcgccgtcccgcgtgttggctcgtaccagcccgacacgtggtccggctcgggctggttttataggacccaccaccttcttggccattctcatcgtgtggaactgcaggatgtgttcacgctcgaggtgaaaggcgtgtcgcgc

SEQ ID NO: 82719 - DNA, 464 bp, Glycine max
  unsure (1)..(464): unsure at all n locations
acagaattattatgaggctatgcgacttggaattgatccntatgatcgaagntatatactctataacataggccttatccacacaagtaacggagaacatactaaagctttggaatattattttcaggcgctcgagcgaaacccattcttaccccaagcttttaataatatggccgtgatctgccattacgtgcgactatctccactatagaaagaataaagaaaagaacaagcaaatccacaaatactaatataataaatactagaaataaaggctttctacatatacatatatcgtccaatacaacgatgtttatcatgtgtagcaaagaatgaatactcatagaagttcaaatatgatgaaataatatgtctcataccccctttctatggaaaagatctattgataaggaagcacgtaggatcattactgcgtttgaacgaacaaaaaactgctacttatt

SEQ ID NO: 82720 - DNA, 477 bp, Glycine max
  unsure (1)..(477): unsure at all n locations
ggcagtcatcagataaaaggaactaagaccacatagcattgatgctcgtgtggtggctggccagctgtgaactttgattgatatatgggatatggcctctggtaatcgattaccaagggtgggttatcgattacaaggcttaaaaatgaagacgagaggctaagatggtctctggtaatcgattaccaaggggtgtaatcgattaccatgcttgaaaatgaggtcaagaagctaggagggcttctggtaatcaattaccaaggggtgtaatcgattaccaggtgtaatcgattaccacgcacgcagcttgttgnggatgcctctggtaatcgattaccaggctgtgtaatcgattacacagaggaacatgccactggtaatcgaataaccagtatgtgtaatcgattacacagtgcatttttgcatgttcatgatctgaagttgtgtatncngagttcggtctctggaaataattac

SEQ ID NO: 82721 - DNA, 484 bp, Glycine max
ggaccataaaactaagctagccagcgtgtaatggaccatttaaatattggagcacattgtctaagtagcttataaactccaattacccgaaggatctcacattcatcatgttgatcattgttcaatgcttaaagcatttcaccaattgccaatagaagcaagctatccagtagtgttactaccaataaaagttggcttccaacctaccatcacacctgttgcaatcctcaacacacgtggggatcactctactgttgaacctagattgatggtgctagttcaatgggcgggcctatcctctgatgacactttttgagaagaatgagcgtagttgaaagccacctatcaccttgaggacaatcgtgttttagatggcatgggggatgataagaatggaatcatggaccaacaagataccacatgcactaatgataggaccaaaaggaagatcactccaccacaacatctagataatatgtgtgaa

SEQ ID NO: 82722 - DNA, 61 bp, Glycine max
tgctcgcacagattctctctgttcataaaatgttttctactattcgctacttcctctattc

SEQ ID NO: 82723 - DNA, 421 bp, Glycine max
  unsure (1)..(421): unsure at all n locations
tctctacgatagccgcatctctcaatgagctggtgaagaagaatgtggcgtttacttggggtgaaagacaagagcaagccttttctttgctcatagaaaagcttactaagtcacttgttctagctcttgcagacttttctataacatttgagctagaatgtgatgcctttggagagggagtaggagcttgattgttacaaggtgggcacactattgcttattttagtgaaagacttcatggtgcgcccctcaactacctcacctatgataaagagctttatgccttaataagagccctncaaacttgggaacattaccttgtctccaacgaatgtgtcattcatagtgatcatgaatcgcttaagtacattagagggcaaagcaagttaaacaaaacgcatgcgagatgggtcgactacct

SEQ ID NO: 82724 - DNA, 422 bp, Glycine max
  unsure (1)..(422): unsure at all n locations
agcttggttcgaggtacttacccgttgaagatctaagatctatgaagaacgaatgaagaacgtcgaagaacggctgaaacctttgcgaaattcctcatggaaaacgttacggaaacgtttcggaagcgcctcggcttagattttcttcacggaaacaattttttcaagcaaattctaaagagagagaagtgccaaaggggctgaaccctnttcttcttcacttcctcccctatatatagcaaaataggggaggtagttgccgcccagctctgccaggcgagccaaggtgcttcctccaaaagcaacagccttctggaggagtattctggagggcccaagtgggcctgtgtgctattagcacccgcattattactaagtacactccccttttgctttttttggtgattgtttttcgtaaagta

SEQ ID NO: 82725 - DNA, 346 bp, Glycine max
cgaacgcgcgtagcccaccagtctttcatagtagaatactggttatgtgtctactattgtcatcattatttttctctgacattgaggtgccacttgagctgccaagtctctccacctttgggcgtattcttttgaaagattcatgccccctttatgcacatgttctggagttgcatgctattcgaagacattatactgacactgccctacgaacgcgaccactatgtccttccaagaatggactcgggaaggctccaagtttgtgtaccaaggaacagctaccccagtaagactttcttggaaggaatgtatcaacaaatcctcatctttttcgtatgccccccat

SEQ ID NO: 82726 - DNA, 450 bp, Glycine max
  unsure (1)..(450): unsure at all n locations
agctntgccatagatatgactcttgattcgctgaattcagatctcttatcacaagattgccagaatccaggagttctgccacaggattctgtgctgcttttgaagaccttgtgcaccaagcaaccatgttgttgtgtgtaaggaccaaattgccagaactgtgtagtttcaagtcggcagaggaatcattgattgggttgccaccgtttgcaacccacacaacattgtcaactggaatattcttgtaccgaataccgaggtagattctgttgggatatccaagattgaagaaaccaagctcgaacattccatgtggggaagaaactatggtctttccattactganggattggaactgtgaaattgatgatctgtctggtactatggaaactacaagagatgggacaaatagtatatatatgaaactcttcacggaaagaataaacttca

SEQ ID NO: 82727 - DNA, 402 bp, Glycine max
aggactgaatgaagtgtattctttctctaatgagtatcatactttataccctctttatctcttatctggtagaatccatagcagccgacaaatcatccaattcacagtttcagaccctcagtcatgaagaaaccatagtttccccaaatggagtctttgaacttggctttttccctctgggaaattccaacaaaagctacctcgcaattcggtacaagaactattcggatgaaacctttgtttgggttgcaaacggttcctacccaatcaatgactcctcagccaagttgacactacacagttctggcagtattgtccttacacacaacagcaatcaggtttggtccacaagttctctatgagtggcacagaatccattggcagagctattagactctgcaa

SEQ ID NO: 82728 - DNA, 333 bp, Glycine max
  unsure (1)..(333): unsure at all n locations
agcttggtactcttaactcaattctccaccttattctgttcacttcttcagctcttggtttttcccaaatctactttcatagtgcctgaattctgcaacagtaatatcaacactcctctcttttgttcaggctttatttccccaatggccgcttgtggctatatatctgctgccaacttcaattatctcgttggcgccagatacatatccaaattcgcttcttcagacgccacantttcgttttcatttggcgggagcgactcaatgggtcttactttgcgacccgctccgattcgtgctcctaagaggaaccatctctctcccttgcgtgtc

SEQ ID NO: 82729 - DNA, 464 bp, Glycine max
  unsure (1)..(464): unsure at all n locations
gttggcgcctacgctatatattatactcgtataataagaatttgcactaaaagttctggggtcattcggccactcgatgttgaaccttgcattgttggcgaatttgtgacctctaaaagcctttcaatgctgtagcataactttgtgtattttggtttacgtaggaacttctcaatatttagccatccaagaagagtatctatttttttcttaaccaaaattaagttcgagctttagattttacttaaaaaagaattaattccaatcacttaaatagttgaattaataggagattcatacttagtagtagatagatattattcacgccttcaacgttgcgggtaaaataaaagaaacagataactgcggagggaagactcaagaaacaaactattttaatggtaggtcagcattattaaacctgtgccttgacttanacagtatgttacacaatatcaacattc

SEQ ID NO: 82730 - DNA, 454 bp, Glycine max
  unsure (1)..(454): unsure at all n locations
agcttattcgacatctttctttgcatcaaaaagtttagaattaacatctaacatggttntntcatgagggggtcttgggcctatattatcctcttcatcataagtagagattcatccattttactatagttcgagatccttgaagttcatttttaataatagctctatttcaccattcttctatgcatttctgcatgattgtcccatgtcaaagtccaccatcattctataagatgagttggaagttgttgtagtttcaggttattatttttcaccaatagatcttcaagaagtatttccatcttgacttggatctagcatgtagtccaactctacatcataagatagaaatgattctggtacctatatcttattgggtccttaaggcttactacatctacttcttaggatatatggtcttataatagaaaaactatgatggttttttaaactc

SEQ ID NO: 82731 - DNA, 463 bp, Glycine max
cgcaagtgcgagctaactatgatatgaatctcgctatgtatttcaaccatcctaagataccctggacctctaatatgaatttcagacatctagaggatcgcttttaccttgtatggatgcacctctatttctttctggctaacaacacagccgaacaatttttcaaattataccctaaacgtacactttgcaagattcagccttaacctatatttacgcagtcgcccgaacaacttccacaaattgactaggtgttcctcctctgtccttgatttggcgatcatgtcatccacgtagaccttgatctctatatgcatcatgtcgtggaataatgccaccatggcctgctggtatgttgcctcaacattcttcatcccaaatgacatcaccttgtagcataaggatccccatagagtgatgaaagttatcttttccatatcctccgatgccatctttatcttat

SEQ ID NO: 82732 - DNA, 462 bp, Glycine max
  unsure (1)..(462): unsure at all n locations
tgcttgtccacacgacactctcacttatggaaccatgctgagttcgtcgagaccactcggttgtgcacgtaacagcccccctcccataggtgatcagcttgggagcccaaaggtgttccctaccaggtgacaagccccctcagtacaaagtacactcagccatagtaactctatttcctgtgtcgtatgagctatgatcacgaccaaaagttagtgccaaagaccatggaccaattaaagcgcctaagcatcccctcagaaatgcttagattctctaaccacactagtcacccacgtctgggcaatccgacaaggtcagtgcactctacccnccatgacatacactccatacgacgtatgaacgtggccaaaagctagtgccaatatatgtagtgacagtgcccctcacgacatacacaacttcatgtgacaaggcttataacacgcatctcaatcatatca

SEQ ID NO: 82733 - DNA, 439 bp, Glycine max
  unsure (1)..(439): unsure at all n locations
tgacatgtcacactacaccactacgctattattaattacctcttangccaaaatctcatacccttcactctctagaactactccaacagtctatacgcatacaacaacacgcttgaatgatatatcgctggttcaacatgagaagacctaatgcaatgaataaacaaaacccttacctctactggaaagcaccgattgcgtcaatcaacactggagggcgacgatgatcgacttgtaacacacaaaagcactgattgcgtcaacgaacagtgaagggtgactaagaacgacaaccaccaccactgggagagcgatgatcgacgtggacctagcatatgaacgctatccttcaaccatatgacgaagagaatggtangagggaatgtatctctgtttcaattagaactaaaactatcaaggatcagattgatactatata

SEQ ID NO: 82734 - DNA, 347 bp, Glycine max
  unsure (1)..(347): unsure at all n locations
aatgcaaatgccactatctgtggggaagaattattggtctctaatgcataatgacgtcctttggatatggagtcccatactattcatcactgagggagtgatgattgacttaactttggcggcgaacattatgctacttaaggtacgaagacccttgctatacaatatacccctccctaacactctagagacagngctgatcattcatcttgaagatattgaagatgattgactcgcataaaggctaaagaaacatgtgatcctttgcatcatcaaacattcacttgatccttgtctacaccattccataccccattattaaaacaaatccgtatctggtgtaaata

SEQ ID NO: 82735 - DNA, 465 bp, Glycine max
  unsure (1)..(465): unsure at all n locations
agctnggntattattgttgccttggttgggtattttttgttgttcaaatgacgaaacaaataaatattcatgcctccaaaaccaaccaattaagaaacacttatccatcatcatcttccccgaatgccattagaacttgtaagtagtgtacagggcaccaccatcaacaaaaccacagtgccctctatgaaacacgaggattgtcatcttccaagaacaccattagaaccaatagcagttccaccacagcaccatcttcatgttaactttntcctcaacttttccccctctccctctttgagctctgactggttcattttaacccaatgttgttaatgatattatgctggcctggtgggttaaagaagataaaggtaagaagagaatctacaaatattctctttggaatgtgaactactcttgattttctattaattgtctaaactactgatgtaaattataata

SEQ ID NO: 82736 - DNA, 462 bp, Glycine max
ttcctgctttacggccttaaatctaagcttcggcagcgtcatggtgaatgtaggccacttcttttctttatctaattcgctgggtatccgacttaggatggctcatcaaattacagatgtcagggaaagattagatctgatagctgcagatgggaataagttgggtcttgagaagattgaggttgacctcacgcttgtgctaaggagagaaatgacttattcccatgtggatgcttcaaatgtgattggaagggagactgattatgaagaaattatcaagctcttgatgcaaccccaccctgatggtgatgggtatggtgatagaagtctgtgtgttattcccatcaggggtattggagggttggtgaagaccacacttgctaagtcggtgttcagtgatcagaggatggatgaacttttccaactgaagatgtgggtttgtatctctgatgaatttgacat

SEQ ID NO: 82737 - DNA, 385 bp, Glycine max
  unsure (1)..(385): unsure at all n locations
actccagaatccagaatcaagaaaagacttcatccagattagtacttaaataggttttcaaaacattgagtagcacaagaatttttcataaaatcttttaccaaaagagtttactctctggtnatcgattaccagaaggtagtaatcgattaccagtagccagcattgttttcaaaactgatttacaaagatgtaatcgattaccaatgttttaaaatgttagatttcaaatttcaagagtcaccacttgtgtttaaacattntcaaaatcatttcaaacttgtgtaatcgattacacaatacttgtaatcgattaccagtgtttctaaatgttttgattntcaaatttaaacatgaagagtcacatctattgatgtgtaatcga

SEQ ID NO: 82738 - DNA, 286 bp, Glycine max
accagcttcgtataattgtctaaagatgatgaggaatgagaaatacctacttatttccatgccacactattttgccttccataattctgcaatcagtagcgtaacagtcttgaaatctttacgaaagctccctaaagaagaaaataacttccgtaattgtaagatcaagatatactttcctttcataataacctgtgggtgtaatattgcataatgcaaggttactgcagccctcatataaagcaaaaggagttattggggtgacatataacaataatgaaatcaa

SEQ ID NO: 82739 - DNA, 394 bp, Glycine max
tcatattatccagcatcttaaagaaacaatctcattcgcaattgattaacccagaaaaggacatagaatgattattatattgattcatcgaagctctacagcccctggctagtcaagtgatatacctaatgtacttgatggtgttgttctttgtctttgctacaaatgtcttcacataactgcaataatattaaacagaattataggtctggaaaactaacctgtgcatcactatctttctcaattaattccatatttctctgaatgcaagcagcatcaccacttgaacgattactagcagcattattatctgcagtggcttcaaccttctgttgtgcaacactctcatcttgtggaccattaatgcctgtggttgactgacagagaaaataat

SEQ ID NO: 82740 - DNA, 225 bp, Glycine max
  unsure (1)..(225): unsure at all n locations
accatgctgaactgacactccatgcacacgaaccaagcacactttccaatcaaggtttcaactgcgaaatcgctagcggccatcagaatatcaacataagatatgatttgaggcaaccctctgagaggggacaacgacacaggggaatnactaccctatcctatatcgcggagcgtccaaaacactaagagcattgcaatgaacaaagcatgagtaccaacaact

SEQ ID NO: 82741 - DNA, 362 bp, Glycine max
cacatgtggtactaggtggctgtctggcgatggtgcacaacaagttttccacatccacaatgcgcgcataaacccaccatcccctattgcccaccttcaactgagctcacgttctcccacgtagcccatatcctcggttctctcaacaccgggtccacatcaattcttccaagctttcacaacatgcaaacgaaacaatattctaactgttcaagctatcacaaccaagcgaaacagagcgaaggccgaatactctgcccaaacaccaaccaaatcacaagttttctcacttaaagaccccagtaacaattccttcgatccaattcgtttaccgttggatcgactccaaattatactggaag

SEQ ID NO: 82742 - DNA, 207 bp, Glycine max
  unsure (1)..(207): unsure at all n locations
atgaaccacgaccaacatgatggtgattgggcaacttatcttcctaagcttggccaagcaacgacctatggaagcgataggggttgaagggcttgaacctcacgatagagctcangagttatgccagagatgaagcagctttacctgaaatgtcagagtgaggtcaacaattcagtttacaagcctctcaaactccgtgaggcaatc

SEQ ID NO: 82743 - DNA, 267 bp, Glycine max
tgcagctaattttaacatggagcgcaggttattcttctttctaactcttgcctcggatgtacgattccgccaataatagagcgatacgcacgatattgaacagttgtggctctcgagaaattcaaagtgacctgactttgcactcgagtggacgaatcaagagcaagctatatcgcgatgctcgaatttgaaaatggaagcgcatagcaagttcaagctggcgtagctataggactgggatgtgccatccctgccctaaatgtatca

SEQ ID NO: 82744 - DNA, 408 bp, Glycine max
  unsure (1)..(408): unsure at all n locations
actcaagcttgaccggatgtatgatacatcttcttcaacccttgtcattctttactccatttcatttaagcgcatatccacttgcaattccaaagtatcaaacctctcaccaacaaaggtttgaagaccatcaaacctttccaaaatcttcgaaagaagagatgaatcttctccctcatgtctttcttcaccaacatttctagcacctttctttacccaagagccatcatgctccttaatataactaaaggatgctatgactgaagcgcctataacgaatgatctctngattggaacatagggttcagaatcaagagggatgttgaagtgttgaaggaaaagggtaataacatgaggataaggcacatgtgcattcaatcgcaatgccttatgcatgcgatatctaac

SEQ ID NO: 82745 - DNA, 398 bp, Glycine max
  unsure (1)..(398): unsure at all n locations
tatgataaatgtgatccacgtcaactagaagatatatcatgtatatgaggctgtgattcaacaatcggtgcttctttcatattgtcatcctcatgtgtggccatgaagatatgtctcattaaataaaagatctatcatgtaatttagttcctaatcgctacaaaaatcttaccgtcacattattattgttcacgagaatatgtaacattgtgatttttgtgatgattaaaaatcatcagattttgtgatctacattatgtaatggtttgacctccacagttaaatattattatctctangtggcaaacgttgttcaattgtaacacatcatataaaatgaggaactaanaatcaacatctaaaatagagggactaaaaactaaattttaatatttact

SEQ ID NO: 82746 - DNA, 232 bp, Glycine max
  unsure (1)..(232): unsure at all n locations
ctagcttgtctctactaaataatctgtgaantngatgctaattgggatcttttgttagtcatataaaattcttatatttggttgagaccgatacttcattaatgtcactcttattttaatgtgggtttcaagtttggctcactgtttttaccttttcgccattcaatatattaccacanatgggtggcaatgtgtctgtcaaacttatcatgaatgaaaacaatgagaacac

SEQ ID NO: 82747 - DNA, 461 bp, Glycine max
  unsure (1)..(461): unsure at all n locations
gcttattatgtcactaacatntatgatttgtcttgtctcangacaaactgctagttcaagcagtggagataggcttgatatcagtgtcccagaaagtgatgtcaaacggatccgagtttgatgtggcaaatttccgttagacgagaatgatgcataatattgatatctacctcatcagttcaatggagccaccgctcagatgccactagtaatttggctttcaacatagtagtaaatgtaaattgtagtcatatgagaaataacagcaacgtattctttaatctacttttttttagcatacttttcactcttggctaaaatttgttgagactcacgaaattacgagtgatagtagttaaataaaaatcgagacccatgtcattntgtgagtcctaagtcctaacanatttcagttaatggatagtatgagaaacgttgcatatgatcttcgtattctatgt

SEQ ID NO: 82748 - DNA, 272 bp, Glycine max
tgattggttagaagagcactaactgtaattaaattaacattgaatttaggaatgtatgcaacattatgcaagattaaggtattggttaagcaaaccgaaccaatggcaaggatatgtataacatcattgttaggcagagtgacagttttatcaaaaacaagttggtaagataaaaaatgatgaacggaacaagaaatatgaatgctggcaccataatctaatagcctacattcatgaatacaattataagtggatgttagaaggatcatacc

SEQ ID NO: 82749 - DNA, 457 bp, Glycine max
  unsure (1)..(457): unsure at all n locations
agcttntanngtgtattngactaattggtatttatgtgtactcgacttattaaggtttagtgttacattaccaattaggctttagggttatttgacaaaatatggtttcttgacaaattgggattaggggtatttgaaaaataagggttgagggttacttaacaaattcagtttaggggtatttgactaatgagggtgtatgggtagttgagtaattaaggttagtattagttgaccaattagggtttatgtgtgtttgactaattacggtatatgggtatttgaaaaattaaggtttagtttacttgaccagttacggtttagggttattngacaatttagagttattngattaatcacggtttaggggtatttcgaaaattacgattcatgggttactcgacanaatggggtttatgcgtgtttaactaattanggatatgaatactcgactaat

SEQ ID NO: 82750 - DNA, 444 bp, Glycine max
  unsure (1)..(444): unsure at all n locations
tctcgaatgcctacttcgccgataacactcctgtcttctccatttctctctctctctcaatggcatcccttcgctcttcaattcaatataaaggccgttgcaacattntttaatataataaataaatcagaaatttaatcgttgagcaacggacacttgcttattgaatatcaaatcccgctcccctccctctcctcaacagcaaatagtattttttctttttgtttccggcaaaatatatacattcctattctgggtaactataaatgtcatataataatgttatattaaatattatacgtcataaatgactattttaacattttaagaataacaatcaaaagacaagttttaactacatatatttgaaattgtntagcaatatatatattatataaaaattccgattcattattcagcagaagaatgtacattatatagtct

SEQ ID NO: 82751 - DNA, 471 bp, Glycine max
  unsure (1)..(471): unsure at all n locations
gtcacctgaggctgcagcttaggctgctcgattgctccaggtttctttatggaanggcaaaggtctgtatggtggttagcagaggagcacaaagcacaaacccttgcaataggtacagatttctgattcaaggccagctgggttaccaagttaaccaatgcatccagtttgccttcaagcttcttagtctcagatgatgcagctgagtttgtagctacctcatgcactccgctaatgactatggcatcatttctggcgctaaactgctgagagttggaagccatcttctcaattaaatttctggcttcagcaggagtcatgtctccaagggctccaccactggcagcatctatcatacttctctccatattatngagtccttcataaaaatattggacaagaagctgctccgaaatctgatggtgagggcaactggcacatnagtttttaaatcgctcccagtactcatac

SEQ ID NO: 82752 - DNA, 391 bp, Glycine max
atctaaaacccctctattagtggatatccagggttgagaaatgaaaatgagaatatggtaactttggagcaaactctcatcttaacacgtctatacattaattaaacttgctcaactggtgtatgatgaaaactcaccgatcaaaattgacccctaacacccaattaccctagagatggtcttgcttcacctttgccacttgattttctcattgctcatcccaagcttttccacaagtcctatatgacattttaaactacgattaactcactttatactctcatttacactaaccccagatttaacttctctagccctcaaaatctcacactttttacctacaacattgtcattctcacatttaaccctaagttaactatctcccttcatc

SEQ ID NO: 82753 - DNA, 356 bp, Glycine max
ttagaaactcagctttgaccgcaggcttcgagaagtgctgttggttagaatgaacacagagaatggtgatgacatttgttgggcctcggcaacactaggctttgatgactatgctgaaccaatgagaacgtacttgcatatatatagagaggttgaggtagaccataattttaaggtcaatcttcaagaaagagagaattatattctctgaagagaaagacgacgaagtatttcaatcgagtaatatatgggttatgttcttatgaccaattattattcttattgcgaaatatcaaataatcacaggcttgtataatggtagaacattactattcttggaatacatttcttgtctt

SEQ ID NO: 82754 - DNA, 230 bp, Glycine max
atttggactcaccatgttcactagagcagacatggctttaactttttcagacagcttcaaattaattccatttttcattatcaaattgatatgaagcacatgatcaaatctttcaggttttattatagtacagagattagtttcacatgaatggatgttcttttaatataacccatgattttattagattatgtctcaaggttaattaaaaaatcacctgtcattattat

SEQ ID NO: 82755 - DNA, 323 bp, Glycine max
  unsure (1)..(323): unsure at all n locations
cactttttaaccttaaatttgacaaagtgtgattatctttacaaaactaacaaagatattctcaattcatttgcaggtttttgaacttgatggcattctcaaaaatcatgaagacatatgacatggtctcatttggttctgaaagattatatatggcaacagtcttttcacttatgttctctagtacttgcttaattattgtttaccactttaggtcactacaacaaatgtatgaagggagtatacttaaaggtggntgatatatatcttatcttctgtttatacatgtttcatatatttccattatttacaatntcattaca

SEQ ID NO: 82756 - DNA, 291 bp, Glycine max
  unsure (1)..(291): unsure at all n locations
ctcagcttctgttataatntcgagcgtcttgattattatgggactctatctgacattctagtaaaaattattgtcatttgaatttgctacgatcttacgttttaattactagcgtctcgatatactacgggccacaatcggacatcttagtaaaaaggtattgtggttgttatttgctcaaagcttctgtttacaatttcgagcctctcaatatattacgggactcaattggatctcggagttaaaaagaattgtggattgaattccccacgagccttctgatcttgattt

SEQ ID NO: 82757 - DNA, 418 bp, Glycine max
  unsure (1)..(418): unsure at all n locations
gtaactatcgttcctacatggccaaatttctcactagctcaacaatgtcaatactcagccaatatcatcccttctcattacccaccaccctatcagccaagaacacctaatcatccacaaaggccacccctaaattagccacaaagctcacctgccacataattgatactagacaccacccttatcatgaaccaaaaaccaaccagggaaggaattttccagcaaagaagactatagaattcgccccaattntggtgttgtatgctaacttactaccatatctacttaataatgcaaatgtagccataaccccagccaaggttcctcaacctccatttttccaaggatacaactcaaacgcaacatgtgcttatcatggaggagtcctgnggcattccattgagcgttgatgacctta

SEQ ID NO: 82758 - DNA, 269 bp, Glycine max
agaagcctatctatgggaagcaaaatcactctcattaattcagttttatcagcccttactaattaattactatctatggggggcaacatggaagcaaataagcctaactattgtgtggctggggataattaactctacaccaaatatcctacctttctatttaatagcaatcacagaccttttattttattttacacattaagacctcgacatttaaataaaattttaacaactagcctgatatgacaaaaaaggaaataactcactac

SEQ ID NO: 82759 - DNA, 307 bp, Glycine max
taacataatggttcttggcttcactatggacctcgtcatatcagcaataaagtgtttttcagctttagtcaatcgccccgcatatggatgtccaactaatgacttggccaattcatgattatgcactccacaaatcaacttcaccatccagtcttctcctccaaccactggcttgcaacgaagcttgaagggacacccacatttcctagtcccaatgtctcttctgataaattcttttttcctacacttatactcgccactcctttcacaaccaattaacacaaacgtagtccttcctctactacct

SEQ ID NO: 82760 - DNA, 318 bp, Glycine max
  unsure (1)..(318): unsure at all n locations
ctctcatagtctttagatntgggagccaattcaatccttgtgttcggactcttagccacttatgatagccgtcgatgctcccattactgcttcccctaagctctctgtcctttcttcacaccgcatcacatgccttgtgaactccttcgagtaccctcgcattgnggtcactgaaaccccgtgtgatgaaaggcgtgatgctttcgtctgatggcactcctctcatggggtagccaaattgtcttatggcgaagacgggattataattaatacaaccccttgttccatcaagggaacatttggacatccttcgcatga

SEQ ID NO: 82761 - DNA, 359 bp, Glycine max
  unsure (1)..(359): unsure at all n locations
aactctgataaaatagtttcaactcaagacaaatcgtagacatagctaaaaagtgaaaatgatcatgtaggctgagaatgatgtctctgaacttaatagtaggatttattaacttatagatggagggaaagactaggtagatgttgagaactatttccctttggatgatctcctttctaaacttactcttttttcctctattatgaatgttgnttttcctctattcatttagatcattctctgctttcataatttatagttatgtcctttggggatctttctaatatatatgaccgagaatgaattttctgcattgacctattaatacatcatactaccattgtcagctaccactatta

SEQ ID NO: 82762 - DNA, 316 bp, Glycine max
  unsure (1)..(316): unsure at all n locations
gcttctagtctcaatttgaacgtctcgatatattctccgtttctttcggacatccagaggaaaagntattgtcctttgaacttcctatgaactctcggtttcaatctggagcgactcgctatattacgggactcaaccggacagccatgtataaagatatcggcattgtcataatgtcacagcgtcggatctacatggtgagcgactcgatatattacgggactgcatcagacatccgagatcaaaggtattgtcgtgtgaacttgatacaaactaccggtttgaatctggagcatctctcgatcaatagcgaaac

SEQ ID NO: 82763 - DNA, 441 bp, Glycine max
  unsure (1)..(441): unsure at all n locations
agctntgatgggattgcatgccagaatgttttctattctgatgtttaaatcctatgctctaagtccactatttgtggtagtttgaaaattttaagatcattttctccaatatacttttttcatttaatttcaaagtacatagttttctaggttttttttttcttgttggaatggtagctctttatctttgacactctgaggtgcatcaattttgcaaattgctgctgagaagatctcgtctggttaagggctaagatggcctctatgactgctccatttctcagacatagtatgatttattgcaggaaggtaaatgcagcgtttggatgtcttacatgatgttacgagtgatttgttngttctccttgaacactagtgctgctgtctcccatacctggacgtgcatcagtaaatagatgcttgaaatcaagtaacatatta

SEQ ID NO: 82764 - DNA, 276 bp, Glycine max
tgtttctataaaatcagaaaaaataatgctctcaaaagacgcttaaggttattctctagagagaaatctgatattcattcatagaacacagctgcagtatgctacctggtttattaatacagcttacaaaagtcatagctgaagttgcttctaccagacagcttaataactcatctacccatcataaattcacagtctaataacacactccagcaagtactagtaaactgcataaagcgtaataataaatgcacatcacaaagtgcaacaactaca

SEQ ID NO: 82765 - DNA, 381 bp, Glycine max
  unsure (1)..(381): unsure at all n locations
taacaaaactgtgaatatgtttgctgaattgtgatttgagtgtttcttgttatttgataccattgagaagatgtgagaagagtgaaccaacatctctttgagattattgtgcaagtatagttaagcctaatggattccttgagttattttgtgtgacttgatgtgctaaattttttacaagaaaaagtacaaggaactttgttacataagacttgattaagaagaattgttaatttgtatatgagaattagaacaattgcttgaaggcaagcaaaactcanatgtggggaggttgataaaccggattttgatttcctttntatgtgtaggtctaggcctatggtgtgcatttatgantataaatgggtggcagaactcaca

SEQ ID NO: 82766 - DNA, 320 bp, Glycine max
  unsure (1)..(320): unsure at all n locations
tccttaagaagattcctaaagaagctagagcttagctacacacacctctctaatagctaagctcacctccttgagatgagaagctagagcttagctacacacccnctataatagctaagctcacccctatgacaaaatacatgaaaatacaaaaaaatttcctactacaaagacaactcaaaatgcctcgaaatacaaggctaaaaccctatactactagaatgaccaaaatacaaggcccaaacgcaggaaaaacctattctaatatttacanagaatagcgagctcatacttagcccatgggctcgaaatctacccta

SEQ ID NO: 82767 - DNA, 464 bp, Glycine max
  unsure (1)..(464): unsure at all n locations
agctngaccaactntgtatgaataatttcttgttacaagctaaattntagtggataactctgataaaatagtttcaactcaagacaaattgtagacatagctaaaaagtgaaaatgatcatgtaggctgagaatgatgtctctgaacttaatagtaggatttattaacttatagatggagggaaagactaggtagatgttgagaactatttccctttggatgatctcctttctaaacttactcttttttcctctattatgaatgttgtttttcctctattcatttagttcattctctgctttcataattaatagttctgtcctttgtggatttttctaatatatatgaaccgagaatgaatttttgcattgacctattaaaaaatcatactaccattntcagctaccactattacgccttgatttattaatgtcatgtgaagtataattttggatgaggattat

SEQ ID NO: 82768 - DNA, 359 bp, Glycine max
  unsure (1)..(359): unsure at all n locations
gattctagatgctaatttcctaactaacgcttacttgtatttcattttcagaatattgatgctttctatcaggtgcactcatgctttgtatcatggatctcctctaggccatggttntcgaaagttcattgaggtatttgtccaactctaatattgcagtccaattagtatttattattaacataacattctacaagatggtaattattattttaatcacctaagaatttggacagcaaacaatgtaagtgtagactagtagtaaaactgagtgggaagtacactagttattttttcttgaagctgtctcatgtcatgaagctgtctgttnggacaacaaacagcacacttagctttca

SEQ ID NO: 82769 - DNA, 370 bp, Glycine max
  unsure (1)..(370): unsure at all n locations
atacatcgagacgctcganattgaatggtgaagctctcagccaaatcaaacgacaataactttttactcggatgtctgattgaagtccgtaatacatcgagacgctcgaaattgaatgttgaagctctcagcaaattcaaacgacaataacttctttactcagatgtctgattgagtcccgtaatatatcgagatcatcgaaattgaattctgatgctctaagctaattcaaacgacaataactctttgctcggatgtctgattgagtcccgtaatctattgagacgctcaaaattgaattctgaacctcagagctnaatcaaacgaccataacgttttactcggatgtcttattgagtcccgtaataca

SEQ ID NO: 82770 - DNA, 239 bp, Glycine max
tttcgagcgtctcgatgtattactagactcaatcagacattcgagtcaaaagctattgtcgtatgaattttgttagagcttcaacattgaatttccagcgtcttgatatattacggaactctatcagacatccgacgtaaaagttattgtcgtttgaattaagtctcagcgtcataattcaatttcgagcgtgtaaatatattacgggactgaatcagacatccgagcaacacattatt

SEQ ID NO: 82771 - DNA, 470 bp, Glycine max
  unsure (1)..(470): unsure at all n locations
cttaagcgactgcggctgcagctgaaactattattaaagtaattgtttcacacttcaatagatggtgtctgtaagcaattgaaatttataccaagtcaattctaaaagtttttagaactgttcattgtgattctcacattagctcgctgtaattaaatgcatttatatttacgagtttttaaaattgtgagtatagttcaattacatttagaattacttatcaaatgagattatgtggaaaatattatcattaaggttatgttaaaataataataattcatttttggtacatattatatgctcttgtagtagcaatgttaagaaaaatgttttgagaaatagcttaagttatatttttgtgtctccttataaccaaacaaaataataagttnttagtagcatcatatgcatnntattgatggacattgctatattccttgacgtgaatgtagcatcatatgcacttatat

SEQ ID NO: 82772 - DNA, 299 bp, Glycine max
ctgtcttcttggctaacaatcacataagaccatctttctcaaacaacgtgtcttcgcatcacgataacctcccattctcactatctctcacagacaaaatggaaaaggacatttcatctgcctttgcttctcacagtaaaatcattctcataacacaaattcaattcaacaaacacgtgcatcatgcaccttaacccatcatgagccacaatcatgattccaacagatttattatgtttattgacatccttacccactctcaatcttatgtttgctctaaatccctagtccataatatg

SEQ ID NO: 82773 - DNA, 340 bp, Glycine max
  unsure (1)..(340): unsure at all n locations
atttgacattagtatagtagaattgcatctgtctattggaaaaagaaaaatatacatacctgtgcatgttctacatattttgcattttgtgcattatgcattatcattcttcacacactaactgtttgacatattgcattggtatttntaatggtattatatagaatatgtgtgagtagtagtgttntacattgagtagtagagcaaagtagtagtgaaacaaaatagtattgcagaggcatagttaatgcattgtgtgtcgcagaagtaaatcgtcttgtggagtttggctgcacaacttgatgtccaaattatatcctcaatactgagccaaaataat

SEQ ID NO: 82774 - DNA, 455 bp, Glycine max
  unsure (1)..(455): unsure at all n locations
ngctccctaccggngctaatttgcttatgagatatgtggctntacaggatattacgtgtcctctttgtggtaatcacagagcttgtggagagagcccaaaaaatatgcatataaaaaatatcttgtacatagaaaatgacggaacttctaaggggccagaggaacctaaaaatatcttttcatttttttaattactaatatgacacactatttttttttaattgctatgtatgttacactaaaaccgcctatgggcttatagtcagcccctagcccaggtaaaggaaaagagttgagttaggctccttgacaaccaacataaaacttgccaaaacctcaactatggatcacttacaacagattcatactaatactanngttgtactcggaagtaatgcattgtatggctcaaacacagcgttaaatgagatagtcaatgtatcagcattcagatg

SEQ ID NO: 82775 - DNA, 438 bp, Glycine max
  unsure (1)..(438): unsure at all n locations
nntaacatgtgcttggaagagaatgaattcatgggatggttgttgttccttcaactatgcattataaaatctttttttggaatgaagatagtaagttagaatttgtcgaaataaatcaaacttcttatggngtttatgcttcatttgttgatgaaagtgattagacattggcatttactgcaccttttgatatggggaactcatactatgtgaacaagaagactgaagaagatgcaaataagttcttctgttgggattctaaaaggggatttttggtgattaacaaggccgttgaaaaaatggccaccattgaagaaatatgagttcttcaacaacgaatttgagctntatgggtcaaattatggcctatatgccctttggaagtgtttacagaatatgtgtgttggtttcatacacacacttgattattataatcat

SEQ ID NO: 82776 - DNA, 362 bp, Glycine max
  unsure (1)..(362): unsure at all n locations
agatgatgctntaatggaggaaaagaaagagagaaagggggagcacgattattgaatgaataaaagacggagagaagtggaacttcgaagtgtatctcataagactttcattcatcaaagttacaacaagtgttacatatgcttctatntatagactatgtagcttccttgagaagcnttcttgataaaacttccttgagaagcatatttgagaaagcttccatgagaagctagagcttagctacacacacccctctaataactaagctcaccttcttgagaagctttcttgagaagattcctaagaaactagagcttagctacacaatcctctctatagctagctcacctcctgagatgag

SEQ ID NO: 82777 - DNA, 422 bp, Glycine max
  unsure (1)..(422): unsure at all n locations
gatctttgagcttctatgatgtccttcaatggtgattnttcaccatggagatgcagcggaagacaaatgagaagaggtgagaggaggcaccatctactaaagaataagccatggaaaaaagaatttcgccaccaagaatgtgccttggataagaagcttggagatgatgcttcaatggaggaaaagaaagagagagaaagagagaggggggagcacgaaattgaaggaagaaaagagggaaagaagttgaactttgaagtgtgtctcacaagactctcattcatcaaagttatgacaattgttacacatatttctatttatagcctaggtcactaactaattgtgaatttcatttccatttcatgtgaatctaagaggaatattccaagaatatgccacaggcatcttagcatattcctttt

SEQ ID NO: 82778 - DNA, 392 bp, Glycine max
  unsure (1)..(392): unsure at all n locations
tttggtgctctaaattgttggagtgtgctcaaatatatggggcaatattgatttgttttcctgcttgattaggttgaattatgggttggtatgagatgtgccctcgcctataatgcatattgaaacaataggacatgccacattgtccccgttctcttgctattgatgcctaaacgcgcgctcaccaagtgttctgtgaaatgcctcaatggcattagcgtgtgactcttgtaaggagacaaccnatggggtattttggtttcgcatatctcttatttcttggatatgtatcattcccgaaaagctatattaatgccacattatcctagcttgaactgaatttatcacaataaaaaaaaaatccaaatgagtgtattggtaattcccttttt

SEQ ID NO: 82779 - DNA, 451 bp, Glycine max
  unsure (1)..(451): unsure at all n locations
agctntactagcagatttagtaatgacccactttcttataatttttatgacttaatgccattaacctagggaattaaaaaaaacttaatggctgagtgtaactgaaattgtggcaaccaaaagtcacccccaacagccaacaagtcagccaccatttggtctcccaaaaggctgatgcctaggttgccaattgggcccttattacaacttgaactaaacctaactaaagcccttttagttgattaacccaaaacatatttttggtcagccaactttacaaggattgggccattatttagacaaactaaacactctataattgagacaatggggtgtcatttagtcctccttcatgtgggccatgatacaactcacaaccttggactgttcttccttgaacttgggcttgtattcgaatagtatggacagcacttgttgaagagcttccttt

SEQ ID NO: 82780 - DNA, 393 bp, Glycine max
tctgggacctagccatggtataagtctccatagaggccattgcctccctcgcccagtattatgatcagccgttgagatgctttacctgtggggacttccagctgtcacccatggtggaagaatttgaagagatcctatgatgtcctctagggggaaggagaccatacctcttctcacggttctatccctcattagctacaatgtcaaagatagtacaaatcttcgcgcaagaattataccatggaaagaaagtcagaaatggtgtggtttgaataccgagaaaatgtttggaggcgaaagcaagaaccatcgcaggtagatgcgaatgggccccggtcatagacattctcgcactggtgatcatatgaggagttctctttacaaaatggatgg

SEQ ID NO: 82781 - DNA, 450 bp, Glycine max
  unsure (1)..(450): unsure at all n locations
atggctagacatgatacatgtcttggtttggtttggttcaaggataaaagggatgccccacattatttccatgacacaaatgcaaaaatgatgatttggaaactttacgcaaaactggtcatgcatgcacctatgcggacactcaagtgtcaaatttttatggtcatgtgatgctaaggctcaagattcgtttcctctattttaatcaacccaatgtttccaaaatatgttcttttatcaatttgtgcattcatccgagtccatttcgggcgtccggngaaatttcacagcattcacccttcaggtgtagacacattttccaaaaattggttatgatcaatgaactttttcaaagaaaagttggaaatcgtctcttttaaaagncatgtggttnttcacttaacaactaattnttcttttttttcaactttttcttacttgccctttttt

SEQ ID NO: 82782 - DNA, 302 bp, Glycine max
actcaagctatgatggtgtcaagaagaaatcacatgtctgtcatcatcaaattgtggagaatgtgaatgtatgtatacatgattttgatgatgtcaaagaagaaccaaacaatgctacttcaaatgatatgcctttgcttcaagaataattcaagattgctttcacacaacaagcctcggtttaagattcacttaagaccaagcctcgccttaaaacaaagtgctttcaagacatgcaagactcttgtaatctattaccaagaagtgtaatccattaccacaagacagggttgagagatagc

SEQ ID NO: 82783 - DNA, 396 bp, Glycine max
  unsure (1)..(396): unsure at all n locations
ccttcacacccgacgaagacactgagaaaaacttatcttctcctttntggacaaagcatggcaagctgggggcaagtaaattttgttaccatcagaccttggatgcaattgtgatcgtatccccatatcaactagatcttgacgggtattcaagccatccttcgtcttgccttgaatgttaagaagcgtccctatcacactgtcacatacatttttctccacatgcataacatcaatacaatgtctaacatctagatcagaccagtacggaagatcaaagaanatggacctcttcttccatatgcaactcttactgttatccttcttttgggtctttccaaatacagtattcaggtggtgaaccccgtggtatacctgctcaccagtcaacggtat

SEQ ID NO: 82784 - DNA, 280 bp, Glycine max
gctatgatggtgtctagaagagatcacatgtttgtcatcatcgaatatggggagaatgtgatatgttgtatacataaatttgatgatgtcaaagaataaccaaacaatgctacttcaaatgataagcatttgctctctagaatcattcaagattgcttcaacaaacaaagccttgtgtcaagattcactaaagaccaagccttgccttaacacaaagtgcatttaagacatgcaatactctggttatcgattaccactaagtgtcatcgatctaccacaa

SEQ ID NO: 82785 - DNA, 424 bp, Glycine max
  unsure (1)..(424): unsure at all n locations
gcttgtgagaatacttcaaggtcccattatgtagtcaaatgtcctaatngagtgattataaaaaatattaaaaaatcttgatttatagactttcatatgctatcttttgagaaataaaaaatactataaaataatgtttgtgtaataattaggataattaatactatactaatatgacatatacatctttacccattcaactattccttctatcccaaaataattatggtcattaatgaatagataaaagaaagtagtagttttataaaattaaccttatatcatcattgatttatttataaattttgtcatctactgctaatattataagaaatatatgtgacaaaataattaatgttacattaaaaaattaaaatgataattattttgaaatacaaatattctgttatacgataattataac

SEQ ID NO: 82786 - DNA, 342 bp, Glycine max
gttgctgataaccgtgggaggtgtggtctgggttattagcctacaaatgctgacaagaggaggatttctttatagaagagagaaagaagcttagctcgtttataagggcgaggaccacatatggagagggtccctatttgtcacatcaacgagagctttgtcggtgcacgatggatgcatgaagatcaagttgccatgttggacgaagaaaccaaccaagattatccaaattgtgtgcaaccatgttccccgggctttgaattgtaaaattatcatatcatggagcgacctgagatttttgtgtcggatccaatgtaatcaagtagtttggaccctattgct

SEQ ID NO: 82787 - DNA, 382 bp, Glycine max
gctggatttcctttgctccggaaatctcttttttctcatgtgaacccaaacccaatctgggggttggaaaacaacctttttgcaccccttgtttacttgtttagcattgctctcattcgtctcttcaatttgggccttgactctttcatggagctttttcacatagtctgctttggcttgttcttccttatgcttaaaactgaaatattaggcattggcggcaaatccagaggagttagtggattgaaagcataaactacctcataagaagaacaactagtggcgctatgcacaaccttattataagcaaattcaatgtgaggtaagcaaactctccaattcttaagataaatcaatccatggagaattctgaattggtaaa

SEQ ID NO: 82788 - DNA, 417 bp, Glycine max
agcttacccctatggctggcctccggacttctctccctctgccgccccggaagaattaagccaagcccctaccttcgaggggcaactcccaccttatgacgactatccccggcaagacgatgaggaaggagatacccatctcggccccctgctccacctcaaagatccatcctcccatgaactaccccaaccaaacatagtccgccatatcccggcttcacccacgcccgtaaaagaatctattcccttcgcggaagataagggaaagattgatgcgcttgaagagaggttaagagcagtcgagggcctcggcaattacccattctcggatttagcggacttatgtctcgtgcccaacctcgtcatccctcccaagttcaaaataccagactctgataagtacaaagggacgacatg

SEQ ID NO: 82789 - DNA, 465 bp, Glycine max
tctaagcttctgagaaacttccttagaagcttctttattaaaacttccttgagaagctagagcttagctacacatacccctctcataactaagctcacctccttgagaagctttcttaagaagattcctaaagaagctaaagcttagctacacacacctctctaatagctgagttcaccttcttgagatgagaagctagagcttagctacacaccctctattatagctaagctcacccccatgacataaaacatgaaaatcaaaagaaaagtccttctacaaagaccactcaaaatgccccgagatacaagggctaaatcctatactactagaatggcagaatacaggcccaaacaaggaaaacctattctaatattacaagaaagtggatcaccttgccctgggcttaaatctccctatgtcatgaaacctacgcctcttatagcttgcctagctttgagcctt

SEQ ID NO: 82790 - DNA, 461 bp, Glycine max
  unsure (1)..(461): unsure at all n locations
agcttgctggcccggngtgcccnctatatgttatagccaattcctataagtacaaggtgcttccgaatgcatgaaaatgactcttaataagtacatttgtgaaattcataatgctctatatatcccgttgatgtgcattggtaaagacaacacccagacatattgctgcttatgatgagccactgtctaaggtgtaatacttcaagttccatggtttggcaattggatagattcatataatcatattatttcattaatggctagtagctagacacactttaaatttgtgttgttggtcactcactagtctaagtccaagggctctctgagttccttttctagttggttctactttctacatattactgattcaatagntaggtctgaggtaaagntatagttacatattttggttggttaagcanatattngattngacgatatgtcttaaatatcacaat

SEQ ID NO: 82791 - DNA, 407 bp, Glycine max
  unsure (1)..(407): unsure at all n locations
tgatgtttgtgttgaatgcattaaaggtaaacaaaccaaaagcaagaaattatgtgcatatagagctacagacgtcttataattgatacatacgaatatttgtgggccatttcatacaccttcatggaatggtcagcaatattttatatcattcatagatgattactccaaatatgcatacctatttcttatacatgaaaagtcacaatctttggatgtgttcaaaacatttaaagttgtaagtgaaaatcaactcaacaaaagaatcaagagtgtcaaatctgactgtggtggtgaatactatggcagatatgacggttcaagtgaacaatgtccgaggccttttccaggtatctagaggaatgtggaatcatcccacaatacaccatgtcnggatcacctagcat

SEQ ID NO: 82792 - DNA, 252 bp, Glycine max
cgtccttggttagacatgaatgatacaagatatgtgaattgtatgattcaattcgggcaaaaattggatgagggatagtgtgatttcaaaaatctgcactttatgcagaatattgctgtcaaataggtgcagcagaattttggctttgtgcacaaagtgttgtgtatttgctggttgtggaaagagtcctcacaattggttcttcgacgttttctatcagatcccaacggtcataatgtagaattatgtgct

SEQ ID NO: 82793 - DNA, 464 bp, Glycine max
  unsure (1)..(464): unsure at all n locations
catgcaagcttgaccagttggatcttaattcattgtgttttgttgntgatgagaaagtggaggagaaggtaatgattatacattctccaaattgcacggcagcattgttttggactcatctatttagttcttgaaggatggatgaggaggtttactgagaaaaagtgataatatagttcaaacatctgtttgttgttttacaaacacaacagcaaaggtctttttccactgggttggattggctacatggatcaaatgacaccattgtngttatgttaaagccaagcttttagaatatctggttattattctaaaatcgaaatcctttcctttcttttcattggtttcttctttggggggtgcatggcggtagacagaaaaataataaaaaaactagtatcctaacgacttgtagtcatgttcatttgcgtggctggcattaatatacattttgagtcacttgc

SEQ ID NO: 82794 - DNA, 318 bp, Glycine max
  unsure (1)..(318): unsure at all n locations
atttgggggaattacttcttgacccttttgaggcatagattcttctgtgtcttgtgatggtgttgaagttgaaccctcatgacctacttgtattttactatcaacttttgttatagtatcttntgtgcaaatatcttcttgacccttttgagccttagactctggtgtgtcctgtgatgaggttgaagagcctcatgagccaacttgttttactatcaactntngaatagtatctttgtgggaattcttttgaccctagactctgtgtgtctttggtggggtgagttgagcctcttgacaacatgttttactttcact

SEQ ID NO: 82795 - DNA, 434 bp, Glycine max
  unsure (1)..(434): unsure at all n locations
ctggagccttatattactgtttgaccgtatacctatntggtataaataataataaaattgattaaccaaaaactaatctttttcaccaaatttggaagacttatgataaaacaaagtaaagttttaaattgaaaaatgaaagcaaactaaaataaaaaaaggtttaattaagtttttcatacctggaatataggccgttttcatattactacctaacattcattttttttcaaccaagtacttgaaaaaattttcagtttcattttactacatgccgttagtcgcctttcgttaagtaataacgtgacaaatggagtatcatgtattgtcatggacacctcattaccccatcatcaccttcaatgatgtggcaattatgtctcagtgacaagccgtgatgacgtgtcactctgaatgtcatgtcatcacttaat

SEQ ID NO: 82796 - DNA, 461 bp, Glycine max
  unsure (1)..(461): unsure at all n locations
actaagcttacatagaaggtataagaggtataatatttcacaatgcatataatctaagaataaaacttgttaagttctttaataaagaatctcacacaaaaatatatatactaaaagaaatcatcattgaaaagaaaaatccaaaataataacttgctaatattaatttatttaagtccttccccttcctttntggtcatcatcattaactctagttcatcaagaataaattaacaattttaagaattttattctcatcaagtgatccaaattcatctcctacaatgtcctacattntagtttcctcttgatggtattgnanngaaattcttgaaaggagacgaagattggtataaacaaatactagatcctttgtccaatgaggtgtcaccttaattctttttatagaatgaatgaaagaatatgtgctccaatttttttacaacttgaagatgatcatg

SEQ ID NO: 82797 - DNA, 429 bp, Glycine max
  unsure (1)..(429): unsure at all n locations
ctctatatcatttatcttaatatatcatctttggttcgcccaaaaaaaattgataatgtaaaatgattttatattaatatccaatcataatttatcatatataaatggtgaaagtggtgattttcattgataatatcataaaaatcatatcaacaataatatgtaactgaataataatataaaattattttatcctatgcatgaccattaaattcaaacttttaaaaaagactaattntaattgaatccaaagcatattntagtcttgagaaattcgattatttatttttgaaggctaaatgatattnttttgtccttcatcttattntttggttcaatttaatcttttctcttttaaaaaaattattntagtcatttatgttttaaaaatgatgcaatttaatttattnntttgctcctttctattat

SEQ ID NO: 82798 - DNA, 414 bp, Glycine max
  unsure (1)..(414): unsure at all n locations
tctcagctttgaaacctttgctctggatcatacacaattggaatcattaccattagtaaaactctttggtaaaaggttttgagaaaaattcatgtgctactcagtttttgaaaaaactttttaatacttttcttgattgagtcttctcttgattcttgaatcttgagtcttgaatcttgatcttgattcttggaacttgaatctttgaaatcaaatttcctcttgaaccttgaagtgtatcaatcctgaactcattctttgattcttgagatcatcatcttntgtatcatgaagtgttcttgacttttgagctttttgtcatcacctttgttacccatcaaacttcttttgatcaatcttgattcgcatgaagcttgctactacatctgtaaggccaagtttctacagatgttt

SEQ ID NO: 82799 - DNA, 351 bp, Glycine max
  unsure (1)..(351): unsure at all n locations
aaaaattactttctactttattttaattacgataaaatatggtttaggtctttctaaaaatactaatggtatcttattttttatttttttaaaaagattatgaaaaaaattagtgaaaacatatttttattatcttctatgtttctattntatttttacaattcatatataaacttttaaaaacaaaaaataaaatgaaaataaaataacattttaataactaaaagtgaaaataaatggagtgtataacttctttntttgtgtgcgttcaatgataaaaaaattcaaacctaaaatttgatttaaattactcanatctttcacccattggctgaatctagtgtatttaca

SEQ ID NO: 82800 - DNA, 421 bp, Glycine max
atgcgcatatttccttacgaacattcactcgcacaagatattcttctatcttataaatatgcacccatgcacaatcaaggcactttcgttacctacattatttgtatgcacttccaaggtgtactacctacaccacatgcatttccatggctaaatatacatacatgcatgctcaaagcctcttggctaccaaaagttgcacacatgcaaactatatgatgaatcttggctatctatacaataaggtgctacatttcatgctctattcaagtgtgtttgctacctaaagccgcatgcaaattcaagtatattttctttcgctgaccaaaattgattcaaattacacgtatttatgtagggattttcttactaacatgcacaaattatatattttgtgagactgttgataccaaaaatacat

SEQ ID NO: 82801 - DNA, 387 bp, Glycine max
  unsure (1)..(387): unsure at all n locations
agccccttcttttgaggggcaactcccaccatatgaaaagtatcccgggccagacgatggggaaagagatacccatcttggtcccctgcttcaactcagagatccgtncccgcatgaactaccccaaccaaacatagttcgtcataccccggtcttacccacacgctaatagaatctattccctttgcggaagataatggaaagattgacgtgcttgaacaaaggctgagagcagtcgacggcctccgcaattagacattctcggatttagcggagttatgtctcgtgcccaacatcgacatcgctcccaagttcacatgagctgactttgataatacaaaggtacgacatggtcgaaggggcatcttcggatgatttgccgaaaga

SEQ ID NO: 82802 - DNA, 474 bp, Glycine max
  unsure (1)..(474): unsure at all n locations
aacatcggattcaaagaacgcaatcattcgatgctttcaatagtcatagttggctcgcttgaacataggaggcttgatcatagcatatacttctttcataatttcaaggatgtttactcctctactatgtcgagagcataaccgagaggctgaactctaacaccaattgaagtacctgaaacacactataagggaggttgtgtaacgacccgacttgtcactacggtatgcacactctaataattgataatattaatattttgtcttttataaaaagaactcccttaatttttgcttatgaaaatagatgtgatgttgttacaacatatattcatccaacaacacgccattacttaagtgaatatgcataattacatagaaactataattcggtacatgtcatacacataacgaanattaatatgtcatatatataattaaaatccagttgtacattttactcacaaaataaac

SEQ ID NO: 82803 - DNA, 392 bp, Glycine max
  unsure (1)..(392): unsure at all n locations
caaaactgcagaacattacgctattgggacttagcaaattgccctcttcgaatatatttttaatctggctcatgtttacccgcgttatatatgtatattctcttcaaatatactnttcgtttttccgtttttgtgtgggttgttagatggttagagatagtttcaaatgaaatatgaaccaaataaagagtagtgattgtttggagtatggctagtgttagataaaccatttttttttgcaccgcgtgtttatcttcttgcttcttggcacatgtgcttaacttgtgcatgtgttttgtcattcttgggctgactggtctcttacaacatctaangggtggagatgactgtagacaagatcgtcttgcccttcaagtgatagcactacttag

SEQ ID NO: 82804 - DNA, 474 bp, Glycine max
  unsure (1)..(474): unsure at all n locations
gcttcaatctgcagcaaactcgatcgactcactttactnttatgtatccttaatctatgactcaatttgcgtgcgttatcttcttccccttcgtcaaaatttacacgtgtgattctcgttcgtcctagttgcgcggagagcttgatacaagacttggacaaccaagttcgtccagtgccctcatcagacatttctatccaagtgtgagtcttcatttggtcttctttttttatattcaaatgattattggttcttctgactctattatattgttntggaggtatcagcaacccttggcgtatgagtgcgttatgataagcgtgacaagtttgcgtacactgtgagtgcacagaaaacattttctgtcactgttgacggcttgctcaattataaaacaacggtggatgtgatgttgacaaagactttaaagaggtagttacatgcacctcatttccttcttatacttcattatat

SEQ ID NO: 82805 - DNA, 358 bp, Glycine max
attcgaattaaaaggtattgtcattggaaattgctcagagcttctgttctgaatttcgagggtctcgatacactacgtgacacaatcggacatccgagaaaaaagttattctcgtttgattatgctcaaagcttctttcctgaatatcgagcgtctcgatacactacgggacacaatcggacatccgaaataaaatttattgtcgtttgattttgctcagagcttcttttctgaatttcgagcgtctcgatacactacgggacacaatcggacataccaaaaaaagatattgtcgttagattatgctcagagcttcttttctaaatttcgagcgtctcgataactacgtgacacaatc

SEQ ID NO: 82806 - DNA, 482 bp, Glycine max
actcagcttacgaatctgcaagcaaaactccgaatcgactccaacttctactctcaggtgatccttaatctatgactcaatttgcgtgcgttatcttcttccccttcgtcaaaatttacacgtgtgattctcgttcgtcctagttgcgcggagagcttgatacaagacttggacaaccaagttcgtccagtgccctcatcagacatttctatccaagtgtgagtcttcatttggtcttctttttttatattcaaatgattattggttcttctgactctattatattggtttggagttatcagcaaccctcggcgtaggagtgcgttatgataagcgtgacacgttgcgttacactgtgagtgcaaagaaaacatttcctgtcactggtgacgggttgctcaatttaaaacaacggtggatgtgatgttgcaaagacttatagaggtagtacatgactcatttccctcttttactccatatat

SEQ ID NO: 82807 - DNA, 292 bp, Glycine max
  unsure (1)..(292): unsure at all n locations
tctgcttcctgtcttaactntagctaattataaaatcattcaaaccaactttcatttttattctgctttcaagagtggaaatttttaattagctactttgaccgacatgttggcagaagataggggacactgcatatgaaccaagtacaaagtcaaggatatgctgcaccatccaacatgcttgtctattggcgttagggctctattgacacatgatagattgaacttgtccaacaaattgtccactgaccatagctaaactagacaaaaacattatttacacattttttta

SEQ ID NO: 82808 - DNA, 278 bp, Glycine max
tcctttattaatatatatgtgaggggtagagggtgtcacatttgacatcttaaacttcgaagggatgatgacgtcacgaactatgcataactctgccatgttagcaaaaccatgatctctgtctccttcaatggcccttagcctttcctttatatgattgaatatttccctttccactatggcaagagggagtcttcccactacaaaaggcaagggttctggttgtgggtggtattgacagccccccaaaatgtttggcatgggtacgccacaaaatg

SEQ ID NO: 82809 - DNA, 458 bp, Glycine max
  unsure (1)..(458): unsure at all n locations
agcttccccaaatccagaatacatttttttcatcacaaactatcacagccaagcaaaacagggcaaaggcagaaaactctgcccaaaacaccaaccaaaatcacagcttttctcacttaaagaccccagtaacatttccttcgttccaattcgttaaccgttggatcgactcgaaaattttactggaagtctctagtacataaacctacattttgaccggtgggatctactagcaaacatccagaactcattctgcactactctttccacaaccagcaaaacatagcatttttctgcacttatgcaaaattctgctgcacaatttcacagcaaaattctgcataaagtgcagatttcgaaaaccacacttcctctcatccaatcttgcccaaatcanatnctacaagtcctaaatcatgtatcaatcatgtctaaaccaaagtcaagcttcaaaccac

SEQ ID NO: 82810 - DNA, 337 bp, Glycine max
tctacttatgtggcagggcgggcttacttcacctgtttgtcttcaacgcgaactttgaccattgcgctttcttcccgcaatgcttcatttcatgtctgcctgagtgggcttatagcctaaaccatacttcccacgattttcttgagtatttatcaagctagttatgccgacgctgttttttctaaacccatcccaggttcaaaaccgttccccaacataacttgggccatcattaccgctgcatccgacagacaagggtgcccaaagacggagttcactgacgaaatgctgaccaccttataagactggtaagcagcttctaaccattcttttgcgg

SEQ ID NO: 82811 - DNA, 415 bp, Glycine max
atttaaaacacaattatataaatttatacattagataaaaattaatatacatagttaccaataaaaatattatttatatttacttatataggacacatgttaggactaaaagactttctgaaaggctggaatttaacatttctaacaaaaaatagttttttataaaagcttaagtctagtttatttgcaaaaaagtatgaattgacctgcgtttgatataggctaaaccaaaagcccctacagaatggcttgacctaattccatctctcctaacaacccttaaagcatcaattaggacagcataagcaagctaagctagggaaacattccaagtaacaaaatctcattagtagaagctttagtattagccaaccattctatgcatgcattatatagatagaaaacatgttagaaa

SEQ ID NO: 82812 - DNA, 396 bp, Glycine max
agcttcatggtcaatgcttgatagtccattattatctgttctaagttgcttaaccaattgggcacataagacaatgtcctacccacttatctctaaaacatagaggtcaacattgaattggcggctttggatcatcaattgcacattcttgtacatgcggtcacaagtcaaggactccccattgcctaccaaaaccttcaatatagaagtcgggatcccttctaggcccaaggcattagtgacaccttgttgaacgaagttgtgggtgctctgactatctacccatatatgaattgggtagtggtccacttggcccaagattagaagggtttgatttgaaggtcttgaaccatccaaagcatggaaactcaattggactggttaggcctccaaaat

SEQ ID NO: 82813 - DNA, 361 bp, Glycine max
  unsure (1)..(361): unsure at all n locations
tgtaggattatggngtacccatcacatgtggtactatgtggcggtcatgcgatggtgcacaacaagtttttcacatccacaaagcgcgcataaacccaccatcccatgttgcccacctccaactgagctcacgtactcccacgtagcccatatcctcgtttctctcaacaccgggtccccatcaatactcccaagcttccccaacattcaagtaattcaacaatcaaacaacataaactatcacagccaagaaaacagggcaaaggcagaaaactctgcccaaacaccaaccaaaatcacagctgttctcacttaaagaccccagtaacaattccttcgttcaattcgttaaccgtggatc

SEQ ID NO: 82814 - DNA, 231 bp, Glycine max
  unsure (1)..(231): unsure at all n locations
agcacagagaactccagaaaaataactcctttagcttctctgcttcaaaacctttcttcttctttgttacgaagacccttcttcttctntgcttccgaaaaccccttcttcttctaattcgtatccattatctctggcgaagctttcttattttcagataacaacttgctactcctttcatcatcaacctcaccgtatctctgagccttgccgttgttctccgtgagtcca

SEQ ID NO: 82815 - DNA, 190 bp, Glycine max
tgatgatgaaaggagtatccacgttgttatctgaaaataagaaagcttcgccagagataatggatacgaattataagaagaaagggtcttcggaagcaaagaataagaagggtcttcggaagcaaagaataagaaaggttttggaagcagagaagctgaaggggttattttttctggagttctctgtgct

SEQ ID NO: 82816 - DNA, 412 bp, Glycine max
  unsure (1)..(412): unsure at all n locations
tacacacacccctattataactaagcttacctccttaagaagcttccttaaaaataaaacgggataccataatgcaataaattaaaataaacatcaatttataattagtagtattttagggtggtacagagaaggaagaagatgagagaaagagactttgaataatattatcttgaatatgatgtattacaatgtgatattatgtgcataaaacttaaagcactanngccttattataccaagtataaacaacactaacccttaacattgataaaaattgataatgctataatttcacaaaagccaagatcgcctgtataaagtcatataaagaatatcanacaaaaggaaatgactaatggcagtttaactaatatgatttagatgcttaacagatgcatagcatactatg

SEQ ID NO: 82817 - DNA, 442 bp, Glycine max
  unsure (1)..(442): unsure at all n locations
gatctttaattaaactcgtctctagtgattccttaacacttgattacctcttgcctcaccacttgatccattgagtaattcttgcatatagaatactcaacaacaaagagattattagccttaaataaattatactcaatggtattctcatttatgaccaaggaagtttatccttctttacacttatattaacattaacaatatctttgaaggggttacctaggataattgggatgttagcatcttcctctacctttaacaccaatatatcatgtgggataaataaattgaaataaacaanataacacacaacgataaggttgaattgtgtgtttgtgatctttaaaactntataaaacctgcaccaaatattcanataacaaggtggatacaatgtgaaaaactcaagtcactactagaaaataggccattaacattggtt

SEQ ID NO: 82818 - DNA, 405 bp, Glycine max
  unsure (1)..(405): unsure at all n locations
acaccggncacgtgtctactatcattgtgataatctctttctctgtttttgggggtgctacttgagttgccaagcctctccatctttgggcgtgttctttgaaagatccgtccccccttttgcacacgttctgtagttgcatcctatccgaagccatatcagaattgtactgacaccgcctaacgaaggcaaccattaggtccttccaagaatggactcaagaaggttcctaagttagtataccaggcgacagttgtcctagtaagactttctcagcagtttctcatcttttgcgtatgcccccatcttccgacagtacatctttagatggttcttggagcgagtagtccccttgtactcgtcgaagtccggcactttgaacttgggaatgaccatgtttgggta

SEQ ID NO: 82819 - DNA, 278 bp, Glycine max
tacaatacagagagcatgagaaagaaagcgagaattagagagagaaagggccagtgcgctgcccaataagataagagagacaaaaagcatgaatttgaaaaggtgaaaccattcaaaatcgtctatgcattgggttcaattatgatggtttcttgaataaccgtccttaaatatacaattccaagacaactgtttgaaaatcgtctttgtaactaatgaacttaaatacaaaattgccatgacattatcttcaaagacgatatctgtcaaccatcttt

SEQ ID NO: 82820 - DNA, 279 bp, Glycine max
ctctactttattggtggaagcatcaaccatcagacaaagattggcttcttcttcactgtctagtggaatgatctccaggatgatccattgaatctggaggagttcttatttttccatatttttctgatatttcttgtgatcagactcaactcatcatcttcttcatcagattcattgtgttggatcaagtggcctcagaataattaagaagggggggtgaattaattattcctaaacctttactaattaaaaaattactattctagggcttttactatg

SEQ ID NO: 82821 - DNA, 452 bp, Glycine max
  unsure (1)..(452): unsure at all n locations
tctgtcctaactggcatttttatcaatatatgtcagtaattgctcatagtgatgttgttgattatttccccaaacttctccaccgagatgtcatgcaccatgtgcgcctcacttcatattttcatcaacaacttcctatgaggctcataatgcatgggcaaccctaataaagagatcctggctggaattttattcaattgttcgattactttgaattcactctgctaaatgattatcagaaattctgttgcttcctcagcaaatatttctttcttgcttgacctctctctctgtacgtttttcgataggggtctcgttattcttcatatggcctattttcttcctttcaaccatattatccttcgcttattccttatctgtcgaccttgccgatagcttaggaggagtaaanacactgtcactacaagtcatgccactcatatcggaaatat

SEQ ID NO: 82822 - DNA, 380 bp, Glycine max
  unsure (1)..(380): unsure at all n locations
aatgtcattctttgacacaactggctctggctagaatttgagtcgcgtgagtcttaattaacatttaacaccccttttcacaatagtttctgctagtaaacaacataaagtagtatattcttttaaatactagtgtnttttaacttactgtcctatgaaatggttaggtatctactgatatactttgggttgatatctcaattccaatgttggtgaacttcgtcatggttgcttacttctcagtaaccagcatcctcattgtaacatgccaaaatgcttgggaaacggtcttcctcttaatcccactgttctggctgaataactggtatcgggtatgatatgtctactcactcttatttgaattctagtctttaaatatg

SEQ ID NO: 82823 - DNA, 478 bp, Glycine max
  unsure (1)..(478): unsure at all n locations
atgtgcaccattaagttatcacatacaatatataattatatacatttataattatattngatatgactattatacttgaagtatcaaataagaattattaaagtgattgaaatataattcttatttattactttntattgtgtgatatgatgtgacaacctatataattaatatcaagaaaataattattaaatgttgacattaatattgatattataggtcaataaaatatttcataatatatctatcttaaaaattagtttataataatgaatatcataactacttnttagggtaaattaagcttagttctttaatttattttttagactcaatttgattgtttaatatattcgattcaatttaattgtttatttttnttaaattgatcaatttgatctttcgagtagattataaaaaacacattttatgttagtttaaacttgtactaatggtatattttctaaaataataaatt

SEQ ID NO: 82824 - DNA, 403 bp, Glycine max
  unsure (1)..(403): unsure at all n locations
ttatcccctcaatttaggggattttcaaggcttgagaagtgaaaatgaaaatggggtaattttggagcaaactcttatctcatacaagtttataacattaatctaaactcgctcaaactggttntacgacgaatactctaccgaatcaaaatttgactcctcaacacccaatttaccctagaaatggctcttgccttcactttggtcactcattgtcctcctttgcacagcccaagctttcccacagtcctaaatgacatttcaaactaggattaactcactttaacctccaattaccactaaatccagatttagctttcaaatccttaaagcatcacactgttccactcatatcactacattctcactgtttaaccctaggttaactctacccttatctcta

SEQ ID NO: 82825 - DNA, 409 bp, Glycine max
gcttctccccttatttgctataaatagggaaagaagaaagaagtatatggtttagccccttaggcacttctctctctctcgaattagctgaggaaaattagttccgtgaagaaaatccaagccgaggcgcttctgtaacattttcgtgagtaattacgcgaagattctcgaccgttcttcaagattcaccgttcgttcttcgttttcttcagtcttcaacgggtaagtacctcaaaccaagctcttcaattcattctatgtacccgtggtggtccacatatttgtgcatgtatatttattctggggttccgctactttttatacccccttttgacgtgcttaagtcgcttatataagtcatttctcgcttaatctaacaataaaatacagtttcaccgaacatttgaat

SEQ ID NO: 82826 - DNA, 392 bp, Glycine max
  unsure (1)..(392): unsure at all n locations
aggatgcttcaatggaggaaaagaangatatagagaattagaggcggggcgggggagcaccaaattgaacgaacaatatacgaatagatattgaactttgaagcttgtctcacaagactctcattcatcaaagttacaacaagagtgacacatgcttctatatatagactaggttacttcctggaaagctttctcgagaaaacttcctttgagatattatagcttatctacacacactcccttaataactaagctcaccttcttgagaagatttcttgagaagatacctaatgaagctagagcttacctactcacaccccctacgatagctgaggtcacccccatgccaatatacatgaaantataaaagatagttctactactaagactac

SEQ ID NO: 82827 - DNA, 443 bp, Glycine max
  unsure (1)..(443): unsure at all n locations
ctgcagcttaaagaagtgtgggacatttcttatgcagagctngaaagagcccgggtagtcaaagagaagttcaagtccatagccatcaaagtctgaagagagtatgatgaactaagggacgtcaatatggccaccgctgaagccttggaacgagaaaccatgaaggctcgaaaggaagaacacgaccaaaacaaagttttgaggggctttatagggcagcaatagtgagctcaagctccgaagaggtgaaaggaatcatcacgggtcaagggcatgatcttgaaggacgagctaaaggcttgccttaagtcgaaaagaaatntgtcccaacagttaagcgagactgaagggaatatgtgggccatcatcgatgagtgcaaagagaagctaaatctagcggcgactcacgagcaaaggctagaggatgagtacgccaagatatc

SEQ ID NO: 82828 - DNA, 423 bp, Glycine max
  unsure (1)..(423): unsure at all n locations
tgagcgtcactctacgagaggtactactctagccttctcatatttcttaaatattctcggatctggagatgcaaacgcccaggttaataatttaatattaataatcattccatgcatgaatcatggcaacggacacaactactttgtangaattagttaccttttatattggtcgatatgaaaccatttcaactacatttaataatataaataacataataattcaactgaaaatgtcttttattcaggtaatgcattttggctttctgtcataaaccttttcagcctagttgtttattattattcattttcagtaggattatactatntatattggttaaataaataaataagcattaatgtggctgcaaatatgattgggtagctatagccaatntctagtcatttttttaaaaaaaatta

SEQ ID NO: 82829 - DNA, 302 bp, Glycine max
cgagacgctcgatatgaattccgaagcgctcaccaaattccaacgacaaatacttttaactcggatgtctgaatgagcccctgaatatatcgaaaagctcgaacgtgaatgtttaaactctgaacaaattcaaacaacaataactttgtactcggtagtctgattgagtcccgtcacatatcgagatgctcgacatggaataccgtagctctgagcaaattcaacaatattactttttactcggatgtccgattgagtcccgaaatatatcgggacgcttgaaattgaatgtagaagctctg

SEQ ID NO: 82830 - DNA, 394 bp, Glycine max
agcttgagatgaggaagtgttgaagggtgaatctttctgcttttattgatgaccacagagtggtacctggagatatgtcgtgggggtcaggagaccttggggacgtcaggtggggtgctattgcccaaaaccaagcttgaccaatcccgacccaacccgggcatagtcggtcagtgagaacctgtgatgtacctaaacaggcgagctcctggcagtcaacagataaaaggaacaaagaccacaaagcaaggaggcttgtggtggctggccagctgtgaattttgtgtaatatgtggattatggcctctggtaatcgattaccaagggtgggtaatcgattacaatgcttaaaattgacgacaggaggctaagatggtctctcgtaatcgattac

SEQ ID NO: 82831 - DNA, 299 bp, Glycine max
  unsure (1)..(299): unsure at all n locations
tgaagtgaggaagtgtggaagggtgagacttcctacttttattcgctgaccacagagtggtacctggagatatgtcgcggnggtcatgagaccttggggacgtcaggtggggtgctattgcccaaaaccaagcttgaccaatcccgacccaatccgggcatagtcagtcagtgcgaacctgtgatgtacctaaacaggcgagctcctggctgtcaactcgatcaaagaacaaagaccacaaatcacggaggcttgtgtggtggctggccagctatggatcttgagtgatatatgggata

SEQ ID NO: 82832 - DNA, 437 bp, Glycine max
  unsure (1)..(437): unsure at all n locations
agctntatactctatgatcacatcccagtggcttaaatattggcttagtaatattctaattgattaanaaaaagttataggttgtatacttgtaattgcatttaattccaaccaagacacgaggaccaatcaagtcatggcttgaggagttatttccatcaacatgtttctaattaatttgaacctttataggctgacaaagccattgcagaaattgaggcaaagtgtggccaaaaaattgaagaatgaaaagaagaacaaaggcagcagttgatgcgcattgaagatgaacacacgttgctcataagcatagaanaagtcttgaattcgaaattattggctgcttagaaatattctatcattgcattctattacatgggatcataagtgttctgatttgtcttagctatatttctaatacttaatggtctaattaa

SEQ ID NO: 82833 - DNA, 309 bp, Glycine max
  unsure (1)..(309): unsure at all n locations
cttggtggtgaagctccttcttctatggcttattccctaagggatggtgcctaccctctcttcttctactatgccttccgctgccttcatagaagctccacaagcaagcttccatcaagtggtatcaaagcacaagagcttctattaggtgctcctttaacctacattaatgcnttgctttaccttctcacatgtcttgtgctaaatgttgtaacatgattctttagagtttccaccgattaaacttgctatagaagctaaaattgattntctatggttcaaatttcttgttcttgttcttgaaccatg

SEQ ID NO: 82834 - DNA, 269 bp, Glycine max
cagagtggtaccctggagatatgtcgcgggggtcaggagaccttggggacgtcaggtggggtgctattgcccaaaaccaagcttgaccaatcccgacccaacccgggcatagtcggtcagtgagaacatgtgacgtacctaagcaggcgagctcctggcagtcaacagataaaaggaaaaccagaccacacagcaaggaggcttgtggtggctggccagctgtgaattttgtgtaatatgtggattgtggcctctggtaatcgattacc

SEQ ID NO: 82835 - DNA, 407 bp, Glycine max
cacactatcgtatctccggccaagctatcctgaaagaagtgtatcaacagctcttcatctttagagtgggcgcccatcttacggcagtacattttgagatgtgttttgggacaagtcgtccctttatacttgtcgaagtccggcactttgaacttcgagggaataacaacatcgggtactaagcaaagatccgtcatgtctgcgaacggatagtccccaaattcttctacggccctcaatctttcctcaaggagatcgagcttcctcctttcttcaattgctgggggcggccctttcatggacagaactattggtggtactgcgatgttgggatgaggcaacgtgcctggtgccggcccttcggggatcgggggatagaactcgacatccctccgagcataatcttg

SEQ ID NO: 82836 - DNA, 415 bp, Glycine max
  unsure (1)..(415): unsure at all n locations
tcctcttgaatcttgaagtggtcttgattctatcttgaacatcttgaactcattctttgattgacccttgagctttttggcatcacctttgtcatcatttttggtatcatcaaaacatctttgaatcaatcttgattcatcatgaagctttgcttctacacaaaagtgggtaaaagccatgcaagaagaacttgaacaattccaaaagaataatgtcaagaagcttgtagaactaccctaaggaaaaaaagcaataggttccaagtgggtattcaaaaacaagtaggaaaaggcaagtaaggttgtgcaaaataaggcaagattagttgccaaaggctactcacaacangaaggtatanactatacaaaaacctttgctcttgttctcgtctagaggaatacgtatntactttca

SEQ ID NO: 82837 - DNA, 262 bp, Glycine max
gctggagttatattctattgctcaactactttaaactcactgtgttggatgagacgaaagaactcatgagcctcattcaaggtgaccgtcttgtcttggagaccttccttcttttcagcgtcctttactaccggcggatacacttcttttgagggggtggccgcgcctacggactcttgggacatgggcgctttccccttggagggcaattccgccgagtgagggggagcgaacacctaaccactgctggttacgccactaa

SEQ ID NO: 82838 - DNA, 425 bp, Glycine max
  unsure (1)..(425): unsure at all n locations
aatagagagaatatgattattaaacacacaaaatgggagtactaagtatttattatctatacttaacagaaaatacttataccactaccaaataaccaccaattggaagaagttgatacaatttacacaagttttatacacaaaagttagtcgtattcaccgactaacagtcaacaagggtgttgcccttgctccttgatgtgccatcattttcttctattntctaaaccctttttgcaccattttaattactaattggtcttaattgtcaattaattacgcagttttattatttgggctcatttagctaattggatgtttttaatctaatttcaggaattaatgaaacattgggcttaatctggattntgggtgtggacttgaagagggcaaataaagcagtgcttaccttagttaaattctaa

SEQ ID NO: 82839 - DNA, 385 bp, Glycine max
  unsure (1)..(385): unsure at all n locations
cgatggtgcaaaacaattctccacatccacaaatcacatataaacccaccatcccctattgcccaccttcaactgagctcacgtactcccacgtagctcttatcctcgnttctctcaacaccgggtccccatcaatcctcccaagcttccacaacatccaagttattcaacattcaatcatcacaaactaacacagccaagaaaacagggcaaaggcagaatactctgccaaaacacatacaatatacagctttttacattaaataccccataacattctcttcgtccgttcgtaaccgtggacgactgaaatttactggcgtcttagacatagtctacatttgaccgtggattgctaaaatgtcaaaccatatgccacctttca

SEQ ID NO: 82840 - DNA, 324 bp, Glycine max
  unsure (1)..(324): unsure at all n locations
aaccctgccaaatgagagaacaagcatttttgccatctgattcacaaatgacattttaaaaccaatattccaaaccatattaagaccatgctaaatgggtaatgagaatttgattattttcaatgtgtatgtttactatcctaatattgaaaggttttttttaatctaaattcaccgaatttttttcttcacttttttaatccaactaaacaagtaaaaaaaaaaatattctttcttctcaccccaaattttatcaatccaagcaacacatattcttantttaaaataaccccttattnccttttttaatttctttctactcta

SEQ ID NO: 82841 - DNA, 493 bp, Glycine max
  unsure (1)..(493): unsure at all n locations
actcagcttcctgcctaagataatcccgttgatccattntttcaaagtattatgtcttgttcatgacactcaaagcacaaaatntatccaccacaggaaactttcaactaaaccattatcttctccacctaaatctccatccatgttaactcattttactaactacttgtttaaatgaggttcggatatttatgtcatttattatacacgctcaacatatcaaaatgaagaanaaataaactctgttgtttgggagatttatgtcatttaatatacatatatatatatattttctttttttaactttctttcctatcaaataacctaaaaagaatctcactttgngcttcttttctttccctttttcattcttcttaagtgataggttgaatcttgggtttttcgtagtatgcaagtgcgctagagttccgttgccgttggactaagagaatgaactcattcaacccttagcatgatgttggtccaaaacact

SEQ ID NO: 82842 - DNA, 333 bp, Glycine max
tttcttttgttggcttggatgggggaagatcctcatctctggcagcaccagcaacctctctacaacttgcaccatcccaattagaatcagaatcatgtacaggcacaagaccagatggatgagaagctacaactccgtcaaccaaatccacagcctttgatttcaagccagaaaccttcacagagtgagggtcatcagtgcgtgcggcatttggtgatgcagaggttacgggcggcggagccggcagaacaggtggtggagacgatggcaatggtggtggaacaccagaaggaacgtggtaattcccaacagttgaatggaaatacactgatg

SEQ ID NO: 82843 - DNA, 398 bp, Glycine max
  unsure (1)..(398): unsure at all n locations
gcttgtctgtccaatttatgatacctttggagaagacgacatggctgacaaaaacctgnggtggaagactaagaaacttagcgatgtttgataggctggaagaagaattcatgtgggaaggaggagaagagattaaaccaaagtatatcggtggagacatggtgtttctcatgggacttactaaagcaagagcataacaactatgcagagatgaagttgaaagtggattatcaatggagaaatggagcccgagtttaaatcctgaatttacgttggtatgggtgatatgctgggggattccgctctaaccaagggatgtggaaaacatcacgaatattgtgaaagtgattgggtaagtggtgggtgtggatgaacatgtacgagagttacttaaattg

SEQ ID NO: 82844 - DNA, 421 bp, Glycine max
  unsure (1)..(421): unsure at all n locations
ttttctttcatggcttattccctagnggagggcgcctcctctcacctcttctcctttgtcttccgctgcatcttcatggtggaaaatcaccattaaaggacctcattgaagctcaaagatccagccttcataaaagccccacaagcaagcttccatcacatagtctgatatcgcataagacacaatttttaacctttgtatatatttgcatttaatcaaaattttaaggctcctgattcatcttaagacataaatgtcttttgacttaacatgcatgctaatatttntagctttccaagccattattctcatttatgaaactctatcaggtaaaactaagtattctcaacttgccaggtgataatactatcttgcatagactttgagaattttaactangtactaaatatttgcatactaa

SEQ ID NO: 82845 - DNA, 445 bp, Glycine max
tcccgacccaacccgggcatagtcggtcagtgagaacctgtgatgtacctaaacaggcgagctcctggcagtcaacagataaaaggaacaaagaccacaaagcaaggaggcttgtggtggctggccagttgtgaatttttgtgtgatatatgggttgtggcctctggtaatcgattaccaagggtgggtaatcgattacaaggcttaaaaatgaagataggaggctaagatggtctctggtaatcgattaccacggtgtgtaatcgattaccaggcttgaaaacgaggtcaggaagctaagggagcttctggtaatcgattaccaggggatgtaatcgattaccacgcttaataagggagctgggagaatgtggaagcctctggtaatctataccacactgtgtatcgattaccatatgaatggtcactggaatcactacctgta

SEQ ID NO: 82846 - DNA, 393 bp, Glycine max
  unsure (1)..(393): unsure at all n locations
tgtcattgtctctccgcctgctccttccaaactatcttcgttatcgtctatgccactgttgtctcgcccttgtggcttatgtccttcaaaagacacttcccctgttgttcttgtgcctccagctgagccttaatctgatgtggttcatactgttccagcaggtcaccctatggtgactcgtgctaaagctggtatctacaaaacctcgccactttgcatatataactacttatcgaccatcttctcttttacatgcattatacaccacttctaagcctaaaggtttaaatctgctgcaagcatcctaactggcttgctgcatgaatgacgaactcacagccttacactccaacaagacttgggaactngttccntaaccacctaacactaaca

SEQ ID NO: 82847 - DNA, 452 bp, Glycine max
  unsure (1)..(452): unsure at all n locations
gctgggagaggatgcttcaatgaagggtaagttagatggagagaaagagagaggggggagcacgaaattgaaggaagaaaaagggagagaagttgaactttgagttgtctcacaagactctcattcatcaaagttacaacaagtgttacacatgcttctatttatagactaggtagcttccttgagaagctttcttgagaaaacttccttaagaagattttttgagaaaacttctttgagaagctagagcttagctacacacacccctctcataactaagctcacctctttgagaagcttccttaagaagattcctaaagaagctagagcttagctacacatacctctctaatagctaagctcacctccttgagatgagaagctagagcttagctacnacccccctataatagctaagctcatccccatgacnaaatacatgannatacaaa

SEQ ID NO: 82848 - DNA, 246 bp, Glycine max
  unsure (1)..(246): unsure at all n locations
ngagatgaggaagtgttgaagggtgaaacttcctgtctttatttgtgaccatatagtggtacctggagatatgtcgcggtggtcaggagaccttggggacgtcaggtggtgtgctattgcccaaaaccaagcttgaccaatcccgacctaccccgggcatagtcggtcagtgagaacctgtgatgtacctaaacaggcgagctcctggcaatcaaccgataaaaggaacaaagaaccacaaagcag

SEQ ID NO: 82849 - DNA, 417 bp, Glycine max
  unsure (1)..(417): unsure at all n locations
tagacagaaccatcanaattaagttgaatccaatcaaaggattgtgaccacccattgatccccgttggacagaaccaacagatttgtagcaaccaaagcttctcaactgacaaggcatcacattaacagcaactaaacaaatatcgaattcagctttttcttatcaatacaactgaaaaggagaatttagtatctaaatcaacttagtgcgattcaaattattagaatttgcagtcccataggttcagagttgtataaaattaatttataccaataaaggaagttaaaatacatatctaaattaaatctcaagcatgcactntntattngattntattagaaattacaattattaaattcctaactntagccgataagaagaaaccaatgtttattcgtggactgatttacaacaca

SEQ ID NO: 82850 - DNA, 404 bp, Glycine max
  unsure (1)..(404): unsure at all n locations
tcctgcgaaggcaaacatntggaaagacagttntagtggtacattactcttaaagcaaaaatggcatataacctcctcccataaatacaaacatcaatgtaaatttagagcaagcttatgcgcctatttccttacaaacgttctcttgcacaagacatttaaccgaaaaaatgcacccatatacaatcaaggcagcttcgttacctagaatatatacacgtacctccaaggcgtatttgntacttacatcacacacatcttcttggctaaactcacatacatgcatactcaagcattttggggcaaccaaaaatgcacatgtgcacatcttgggcattttaatacctacatacgcanactacatgatgaatttgactatctacacaataaggtgctcatttcat

SEQ ID NO: 82851 - DNA, 443 bp, Glycine max
  unsure (1)..(443): unsure at all n locations
gcttgtgatatttttactatatatgtgtgtgtcttcgtttatctctacctgtttaaaaatgtgataattcactcctcatgtgttgtttatatttggatcatgtgatgatcttaaaccttgtgtttgtgagagcaaatgactaggtgaattactttaagaaaccttgtgatggaggactccgagacacaatattttgatagaatgtaacattggaacaagagtttttattttaattgcatgacgtatcaaacatgtcattttactttatttgataaacttgaacagtcttgttttaagtcataaatatttctaagaaattttatttggtaacaagtgaagcgaatgtgaacattacccacgtggactgatttacgattntattgaataaaactgattntaatagattccgcattctatatatgctnttttcattcatatgtatg

SEQ ID NO: 82852 - DNA, 375 bp, Glycine max
cttatttaataagctaaagaaaacttacaataactaaggtcactcaagtcatttccataaatccatatacgcttgtataaatgctccctagaagataaatttgaggaacttgtctatttctccttttgtgtgattatagtcttttatctttgaacttttgctgaactataggttatctgcaactcatatgatatggaaccatatttcagaaaaggatgagagactctgcacctaccggcaatgtacttgagcctttaaatgctgccagagaagttgttggggatgttgattcaataagtatgtgattccttatcacaacttctttttcttcttcttctaattaggggttgatctctatttcattctttttgcata

SEQ ID NO: 82853 - DNA, 361 bp, Glycine max
  unsure (1)..(361): unsure at all n locations
cttttagtcataattagtatcaaaagctagtattgatgaaactataagagaaaaataatgacacattttaaatctatttttattatttaataaattttgcatgatttaacaagttatatataaattttacttaacaattaanatatattaaaaagtatatatgtgatgtattattaacattaattcttttggtctaaaaacttagtgttctaaggagtatagcagatataaaagttgtttcataaacactaatagattattaggtgccaaaaaaggaatagaaaaaaaaaagtctcgacctcatgntaaccatgtccagaactagttgaatattttggccagtgatggcagtatactatgg

SEQ ID NO: 82854 - DNA, 385 bp, Glycine max
  unsure (1)..(385): unsure at all n locations
atggtactgctcanaaaataatgtcacaactntttccacaactcgtgcattcattgttattaagttatgggccaattataagaatctntcatggtatatacaaagnttttatcaactttctttaaattcttaaccttctctcatatctttagtcagtccccagccatccctaatcaaataactaaaggatcaaattccaaacatacatattccttcacatacctaacctgatcttctttatgagtttgaaagggaattagattcagctgcctctaaaatgtgtcatgcaccataagtagatcacaaattaagtgaaaaccctaatggttgcatgaccaaattaaagcatgcttttctacgtgaatatntgatcctgtcaaacaac

SEQ ID NO: 82855 - DNA, 359 bp, Glycine max
  unsure (1)..(359): unsure at all n locations
ctcactacaagccttaagtgaaaaaccatgatattaccatatccttaaggaattttggagctttggaattgttttgggaataagtgtggggggtttttgtttcattggacaacttgttttgttggctatgcttcatgatgtattttgggccatacttgatgtacattgtatattggttaaatgttggacatgctgaatgaaatgttgtttctcanagcctaaaaaaaaaaaaaaaaaaatcgaanaaaaaaaaaatttcggaaagaaaagaaaaaaaaaaaaagaaaagcaataaagttgagtgaataagatcttaaatggcacangaatgatgaaactcttggntctactcttcatgt

SEQ ID NO: 82856 - DNA, 374 bp, Glycine max
cctgttattaatgatgatatcatttgcaccatctttgatctgtattgtaattgtcaaattgaactgtgagctttataaatattatctccatttaccctgcttaggttataggagagcacattggtttaagataattttgccccacatttgggggagtttgttggatggataaatttaaaggtaagaaactacagtacacatagcaaataaataaaatgttatgtgttaacgaaaagaagaagaagataaagagaaattcaaataagtgtgtgctattcaaacaaagtcaagtgaaaggctagtgaatgggctaagtggatcgaacagacaaactgcgttagtctaggatttgtgctttcttagaactcaagctt

SEQ ID NO: 82857 - DNA, 361 bp, Glycine max
acatgtctaggtatccaaacccttacccttattaatctctatctacctgcaaaaccttttcttggtggtctcttatcaaaattggaagtttacttcggtaatctagggttgtattaaaaaaaccatataggttaccagagtaaagctcttattctaatagaaaaataacactatacaagtacctaaagaaaaagatattagttttgtctatttaatggttgctaagtgctaacgaaattgaacatcttactagtcatggatttcttggagttttcaccatccacaatagcagcagctgcactgttatgggtaacaaatcaatgtgcagatgagaagacatcagagtgcttccacaagaata

SEQ ID NO: 82858 - DNA, 362 bp, Glycine max
attggaagtgcggtagacagactatgtggttgatttaaggatggcctttgtggataactgggtggtggggtaaggaggaggtctgttattggctgagtaatgacattgttgggttggtgggaaacttggccgtataggaatggtattcacagcatgggtttctccctctatctcaccctcttcatttgccccagctttctcagtcgtcctattacgatgatcaaatttgcctcttatcggatccacttcgatctttatgctggcgaagaccacatctgtataacttgaggtgtgtatcccaccattttttttataatattaacaccggtcacgtgtctactatcattatgatatctcttttt

SEQ ID NO: 82859 - DNA, 396 bp, Glycine max
  unsure (1)..(396): unsure at all n locations
ctctaacactttctcacaccataggaagggactaagagccaattgatagaaatcaatttgagtggtagcggaactgacaagtacttggttttacccatatgaaccttcttcatgggaatntccaatcacaaagggtgggttaccattacttgtttggtttcaagtggcttgattcccattcccttcaatgtttctaatatcatattcctacctaggggttttattaaatgatctcctaagtctacttctgacttcacataatctatnggaaatgttccatcttttagcagctgcttaaccacattatgtctcaattgtatatggttaatttttccattgaatggtttatccttagccacaactatcactgactgggaatcataatgtatacatatt

SEQ ID NO: 82860 - DNA, 468 bp, Glycine max
  unsure (1)..(468): unsure at all n locations
gcctctntgttgggtagatactactgaacatcttgatgtaatattctcactatctatntaatgttatttctctgtgttcattgcttctatttatgcttattttacatgcttgtagcttgatcacccattgtatgtgtagataggctttntagtattggaaaatgctataaaaccttagaatttgatagagcaagctagaaatttgtatgtctaggaatgaagtgcagtgatctagtccattttacactgtaggcttagtgcatctcttttagaacaaagtttgtgagaaattaagaacaaagtctaaagagagttaggctcattcatgtgagaaatcatggttngagtagtttctcagtgtaagaacactacggtaaccttaaatagagaanaacacgttctatacatcacgagaaattaagtangacactccctaatgcnntttgacttgatagtttccctttatac

SEQ ID NO: 82861 - DNA, 228 bp, Glycine max
  unsure (1)..(228): unsure at all n locations
acttttctcttttcaatccaacctcgattctttccccggcaaacaccacatccgcaaagctggacggcatgtaacccactatcttctcataatagaacactggcagagtgtctaccatcatggtgatcatctctctctcaaccatgggaggagctacttgtgccgncagatccctccatcggtgcgcatattctttaaaggtgtcaccctctttcttgaacatattct

SEQ ID NO: 82862 - DNA, 465 bp, Glycine max
  unsure (1)..(465): unsure at all n locations
actcaagcttcctcgtggcttctntgagaagctntctcaacaagcttcttttataagctatatccttatctatccacacccctctattaactaaattaacttccttaaaaataattacggatgaaaataacgcaacaaataatcaaacatcaaacataattactaataatatatagatatatatatcagggtgttacaactctcccacccttttagaaatttcgtcctcgaaatttaccttactcaaacaaggatgggtgagcttcttgcatctgactttctaattcctacctggcatcttctcctgatgcacctccccagatcaccttgaccaacggaatctctttccctcttaaagtgtttgttcgcctatgctcgatcctcaaggcaatgtttcatatgtcaaaatctccttcacttgtacatcatccaattcatcacatggcatgatcacngatatactta

SEQ ID NO: 82863 - DNA, 358 bp, Glycine max
  unsure (1)..(358): unsure at all n locations
tatctcgccccttatacatnatatctctcagggtattgatgggnttaaaataactaagtcttttggggcctaatttgctaaattggatccctctgttctggctgcctctgcattttcctgaattgctgccattgtaggaactcgttcctctgttatagtgggttgcagggtttgttcctccgtatcaacctttgtggtctctcattatcgtccctcactctctcgctcaacctctctggctctgctctctctgnatctcattctctcgtgagacgttaatagccaccgagagccaacgtgagcaccactatcgcaagtctcggcctttacgcagatctgctaccttagccaccgtgag

SEQ ID NO: 82864 - DNA, 243 bp, Glycine max
  unsure (1)..(243): unsure at all n locations
cccaactctgggaagactattttgcatcagagcaatgagatgatccacactgcgagattacaaggactcatatatgaacttctgctgaactatacgctatctacttgaacttacccttaccacccttactctaatcatgatgacagagtctggactatacggcaatgtacgtgantcatgaataagctccgcagcattctgctgcgatgttcgatgaacaatgaacacagtccttatcgacgg

SEQ ID NO: 82865 - DNA, 302 bp, Glycine max
atgaccattccaatttctcgagagcttgcggtgttcatttcgagcgtctcgatatattatgaccccgaatcggacatctgtgtgaaaacgtatgaccattcgaatttctcgagagcttccggtggtcaatttcgagcgtctagatgaattatgtccccgaatcgaacattcgagtgaaaacttatgaccattcgaatttctcgagagcttccgttgttcaatttcgagcgcctcatatattatgtcccgaatcgggcatccggtgaaaagtgtgaccattcgattctcgagagcctccgtgt

SEQ ID NO: 82866 - DNA, 468 bp, Glycine max
  unsure (1)..(468): unsure at all n locations
tcccaagttttaagttcttcctcanaactgttctaagcaaagttcccaaagtcctattaacaacttccgtttgcccatcggtttgtgggtgacaagtggttgaaaataacaatttagtgcccaacttgctccacaaagtcctccaataatgacttaggaacttagagtccctatcactaacaatgctccttggcaaaccatggagtctcacaatctccttgaaaaacaaatcagccacatgggaagcatcatcaactnttttacatggaataaaatgagccattntagaaaacctatcaacaaccacaaaaatggaatctctaccattgcttgttttgtgcagcccaaaacaaaatccatggataaatcaatccaaggatccctccgaattggcaatggagtatacaatccatganggcttaccttagacattgcctttnntacatacatgcaatgttcacaaaattt

SEQ ID NO: 82867 - DNA, 399 bp, Glycine max
  unsure (1)..(399): unsure at all n locations
ctatntatcttttcattctcttctccctttgccaaaaagaattcgccaaggactaaccgcctgaattctttttgtgtctctcttctccctttttcaaaagaacaaaggactaaccgcctgaattcttttgtgtctcccttctcccttgtcaaagaattcaaaacgacacagtctgagaattcttttgattcttccctttccctaatacgaaagtgttcaaaggactaaccgcctgagaattattttgtatccccattcacaaagtatcaaaggtttaatagcttgagatctttgtcttaacacattggagggtacatcctttgtggtacaagtagagggtacatctactcgggttggactgagaacaagagagggtacatccctttgtggatcagtcta

SEQ ID NO: 82868 - DNA, 455 bp, Glycine max
  unsure (1)..(455): unsure at all n locations
gacactatgaaactaagcttcctaacatccaagcaatttcaacatccaaacatcatgaactatcaaaactaagccaaaaacagggcagaggcagaaaactctgcccaaagcacaaaccaataccacagtttttcttattcaaataccccagtaacattctcttcgttccaatttgttcaccgttggatcaactcgaaaattttactggaggttcctagtacataagtctacattttgaccgttgggatctgctagaaaacgttcagaacccaatatgtacaaccctttccacaatcagccatgcataagcattttctgcacaagcacaaaattctgtgcacatttcaacagcanaattctgcataatagtgcatattntcgaaatcactctttcctttcatccaatttgcccanattagatcctacangtcctaaatcatgtataaatcacacct

SEQ ID NO: 82869 - DNA, 357 bp, Glycine max
  unsure (1)..(357): unsure at all n locations
actgttattttcctggcttgctactggtctttaaggaatagtataaaactgggcagggttgaacatgtgctggaatattgtttgatgtaaaaaaggaaactgaaaaatcgatagcttctttcattccaaatccagtatgtacttatatcccatcaatatcataattcgtaatgacaaattcataaatggctaatcctatctctgctggatgtgtcggctgactgattcacaataaagttaataaaataatctactgaccatttttcttgtgttgtgttcctttccttttcacctctaccatgtcacgtaatactgaatagacgagtgaatggagatcantatgcccctatccatgca

SEQ ID NO: 82870 - DNA, 367 bp, Glycine max
  unsure (1)..(367): unsure at all n locations
ngtagagtgtccatcacctactctnttcctaatgcaccttgttacctagtcttccttagcagcattntgctcttcaaaactctatatggctcgccaccataatgaccatctangatgcaccaaaaatggaaggaggacatatacaggaaaacagaaaacaataaatctaaaaatttcaagatacagagtatggttaagaaacagtaagatttttttaatgttntttatttattaaaaaaagttgaaaaattaaaaaaacatgagaaataagtagtaacactaacatattataaacagaaataatccaatgatctatcataataaaatattaaagcgtaaagtgcgaaattnnaacgtaaaaatacta

SEQ ID NO: 82871 - DNA, 434 bp, Glycine max
  unsure (1)..(434): unsure at all n locations
tttgtatgcaaatgcttatattgatactaatcggctntntgaagatgctatctttatangttggactcggcttagacaatttgagaaggacttcacagtccactataatcagtggtcaagtaatattagacaaggttttttggttntgtagagggagtgcacatagttcagcaatacttgtacaccacacaagtagacctatttgactacttatgtactacatataatagtccatacctttgtaattagtacctctggtactttatttcaatatattatatttatctttgctgatcaaaaaanaaaaaaaaacaggccacccaccatattatccacgcaccaaggtttgactatttttcaaaatgtctcctattantaaattgtggtgggtgccttacagtatgcttcattcctcagcctgagatcagtttctt

SEQ ID NO: 82872 - DNA, 392 bp, Glycine max
  unsure (1)..(392): unsure at all n locations
ntagagggtattgactaattagggtttattgtactcgacttattatggtttagtgttattcgaccaattatggtttagggttatttgaaaaagtacggttgcttgactaattgggtttaaggatatttgacaaataagggtttaaggttacttgacaaactcgggtttaggggtatttgactaatgagggtttatgggtagttgagtaattagggtttagtgttacttggccaattagggattatgggtatttgacaaattanggttacttgactaattagggcttatggatatttgaggagaaaatgactattatcttgatagtggcctgcacaaaaattgcacgaatgacgagaaaatgagtttgttgcagtaccaaataccttaaatac

SEQ ID NO: 82873 - DNA, 446 bp, Glycine max
  unsure (1)..(446): unsure at all n locations
agcttgcaaggactatagntggtgtcattgagtcttgccactcccttggagtcatgcatagggatctcaagcctgagaattttctctttgttaatcagcaagaagaatcccctcttaaggcaatagattttggactgtctgcttttttcaaaccaggtttgtcaaaatgttccattgtttcttccccttgtgcaattaacatctatcttcagtagtttgctttaggttcttattatcaagagagttgttatggtatccaaagaaatctaaaggttttgatacagttgtttttttgagccaatagttgaatgaagttggtacaccaaagaaaagagaggcaaaaagagtttctcagtagtcagtaccaaatcccttaaatttccaagggtagaatttatcttttatcnaattcttttgtgggccagttgatttgatcaatatccatt

SEQ ID NO: 82874 - DNA, 397 bp, Glycine max
  unsure (1)..(397): unsure at all n locations
ntatttacctctaacttaataaaaatatctcataaatttaatttatttcaaattaatgtcaaataaatgctgtcgtttttactttacatattataaatcctatagtttatgaaaagttgaattcgaatggaatttgaatttggtcacttttcccgttttccatccatggaatattttatatgacatgatatggacatttgatgaataataatatcgctactaattatgaagatatttcacgttatttcacgttgaaaatctatattggttgtataacaatatcaataanaaaagacggtgtggtgacatnatttanattataatgaagtatattacatcgatttttaattatttaaatcaatcattatattgatgaaaatttatttgatctgtggga

SEQ ID NO: 82875 - DNA, 344 bp, Glycine max
  unsure (1)..(344): unsure at all n locations
tttaggttttgcaattcccagttttactattcacgtagcaataaaatttggtttcttcttcaatctgcaattnttgtttctaactgataatggaaagctaagtctccagcattgctttctcttgaggatcaagcacaactctctttgagggtttattattactatngaattctgatcagtttttcctcttcagcaattactctgtatttgttgctattaatccatgcatgcttagtgcttgactaantgtctctgcgcttaatttacatctatgtttaatgatcagtttcgctcatgattaaatggtgatgtgtggcttaatcacataatgactgcctttatgt

SEQ ID NO: 82876 - DNA, 372 bp, Glycine max
gagaaaaaatgtctgtttcaaactcggagattgggtttgggtgcacatgagaaaataaaggtttccgaaacaaaggaaattatagcttcaaccaaggggagatggaccatttcaagtgcttgaaacaatcaatgacaatgctgacaaagttgagctgcccggtgagtataatgttagttccaccttcaatgtctctgacttatctctatttgatgcaaatggagaatccgagttgaggacaaactcctcttatgatggagagaatgatgaggacatgaccaagagcaagggcattgatccactcgacaagggctagagcaaggaaagccaaggaagtcttttcacaagtgctgcccatactatttgaataca

SEQ ID NO: 82877 - DNA, 247 bp, Glycine max
  unsure (1)..(247): unsure at all n locations
caaaagagaacaagttcattacggctctactagggaaaagatgatgattagaaccttatgaatcagatggcaataacattagcatctttgcttatagcattattgctttaccacttttcaccgacaaaccatttttttcccgaaacgaanaggagaggagcatgcataacttgaaaacataagttaatcgaaacaagtgatggtgttntgattagctacaaaannttgttttaatatttatatactc

SEQ ID NO: 82878 - DNA, 447 bp, Glycine max
tggcacattaatgcaaaacaaagaatataatccctgtttccttttttctaatgcacttctttagcaaggtacacacttttctgcctctctcaagtcattaaaattccctcaggcctcggggcatccttaactgcaagacaagctaacaagaaaattcacactttcgcaagacttctttcatcacggaataaacacaacaacaaaagtcttatcccaatgggtgaagtcgatcacataaatcacacaatgccattgagcttaattaaagaccaaattcttaggaatattattcactgtgaagatccacttaacaatttgctatcatcttttcctcaattaatgtcacaccaatatttcctcacacacatcatggaataaacatattcaagaaaaacactaatcctctggcccctgagacatacaattcaaatacaaaacacgcccaca

SEQ ID NO: 82879 - DNA, 383 bp, Glycine max
  unsure (1)..(383): unsure at all n locations
atatatataaacaaaatggagcttttaccataaaaatatttaataaggaggtatttaataaccgaggaataaataaaagaagttatttgggattggctaaacggtaagacacccaatttcaaacttcacatgttcctattttcggtacctacactatgggattatttatttacttattatggtattgatatgggagattggattaatttggtgctaattaatcttgattgaannaattaactgattattntaatgtggttttttttctttcatttatggtnttttatcctcaaaatttaaattaanaattttattaaagataattaaatatatacgcctatgggtcacatgctacttcacttataaaatacatgatacatact

SEQ ID NO: 82880 - DNA, 460 bp, Glycine max
  unsure (1)..(460): unsure at all n locations
tactcaagcttaatcaactgtaaattgacggtgtgagattctccctggactctctaggggtatatttccttggcacccttaatcatgttcaatttgttggtaagattaggtcttttaatccaaaaaggaaactaggttaccatgtgagagtaatttggataaatgaaaatagttttggttgttatatgcatgagtatatcgatgcttgtttgcaacaatgtattataaaatagtgcctaccacatagagagtggctatgcaatctggaatgcatcaagaagtcttagattgcgtgattgcattctctagcaccaaagctattgcattaaaaaattactacatacccaatattactgtaaagaatggaaacantattactttgtgcaaaagcagtctaaagctactcttgtatcatggacctcatgtatcaaaagcaaatacaaatgggtatgatgttgat

SEQ ID NO: 82881 - DNA, 394 bp, Glycine max
  unsure (1)..(394): unsure at all n locations
tatgaaattttatttcgctggcttcctatggtttactttggatcggaatccattaaatattaagtggtttcggaaatggcttttgaccatttttctggtctggttgaagagattctcaacttttatgagaattagttttggctattggttaaggatatgtttgggttttggatttctaaattccctttcatgaatggttggttactttgcaagtatgttggatattaatattttttttctgaaactcaattntataaaatcaaaacttgatttatttctacaatttctatctacaaacttaagtttaatccaactatgaacttagctagaanannaattaaatattgttagtgagaanaaatagtctataatatcttcatagaagaaaatatta

SEQ ID NO: 82882 - DNA, 427 bp, Glycine max
  unsure (1)..(427): unsure at all n locations
actcagctgacgctgacagtgataggccaggtagtgggtcatgtatatccttactgggagagcttcaagtacacataaagataatttccatagctatttagggatggtagcttgagataagaatgatattttgtatcattattggaaagttgtaccccaagctttgaagaatttgatttgggatgacattgtgatatgtccactaaaccatataagttttagtaattggttgtatttaagtttctaaatggttattttgtggtgtaggccacattggatattccagaatcatccaatgctaagaagaaggtcatttcattggtggcaacactctggtggcaatttaagccaccttgacctctaattgtgtatatatagacaaggagaaacaagatgattagactccttgtaatangtatggtctgga

SEQ ID NO: 82883 - DNA, 167 bp, Glycine max
atatatcagtgtagcttcagttttgtgttgagtatatagggaagaagaaattaggattagatggaagtttcctgacgctgggtgggttaaacttaattctgatggttcagtgcatggcaacaatgggcctgcaaagtgtggagtcattatagatgatagggggagat

SEQ ID NO: 82884 - DNA, 436 bp, Glycine max
  unsure (1)..(436): unsure at all n locations
atttcttgatagaacaatctatcaattccacatacccaccaaggactccacgttatgatcaccctgcgttgaagcctctacctctcaaactatgcagcactgacaccaaagaagaacatgaaaaggagaaaacttctgtgatgttgagactcacatcacagcaagttgagaaattgaagaagaaagccaatgatgaacgacctacaaaagatggtattacgagtaaacatacagaaattgattatttctaaacacccccaccattntatcaatacccattggttntctggctttntttttatatcatattatatgatttattatatctagggatcaaatgctctccaacaacatccctctcacacttttctatatttctcattntcattttcgntntaatttaagctctttctctttaattctcttcctctctcta

SEQ ID NO: 82885 - DNA, 166 bp, Glycine max
aattcactaatatacgcttagtggtccctaattgcgctaagcgcacgagcacgaacaaggccacctatttaagcctgaaatcagattttagagcgggagtttggactgggattcggagctttacatgtctagagattctagagagagaaagggccaagttctagag

SEQ ID NO: 82886 - DNA, 434 bp, Glycine max
cgagagattgatgaacatcttcgctttcttccgcttattgtacacaaatccttttagtgtttagggtttgaaaataaatgcattcttaaatctaacgagatgatgaaattgaaagggcaacctggtgcttttaaactcttgccttgacatgatccaagtgttgcacccattatggatcaaatataggcagccttaacttgcatttgcaagagactggatctagagtcaaacttgtgacccttgatttcatactgaaacaaggctcatcctaatctgagaatatatttactcaaatttatagtagttcgatcttggatatggattattcagtgattcttttttgtctctctgaacttgcccacaatatgtatctgatatttatttgcttcatgcctttctttctctaaataactgagataattcacgttgtggac

SEQ ID NO: 82887 - DNA, 413 bp, Glycine max
  unsure (1)..(413): unsure at all n locations
ggaaatagattcagtgcagtcacattttcatgcattncaattattntatatttgttctaaatttcagtagttcaattttgaacaactgaaatttggaattcattttttaaaattaattggtcgaaataaaatatgagttattcaatcttcatttgatagttccaagttactaaatgcattgaaaagtgaacgcagaggatctgatcctctgcctcagtctttcagtcaatgataggtattctcacacaaccttccaagctagcttgctccaatttttgcaaaatgcctcaatcctaatagtattaaatcctatgtaagagtcacaacataagttacataactgaagaagtataaattttaatattattttctaattaccctttannaaaaaaacaccaaattcacataacgat

SEQ ID NO: 82888 - DNA, 458 bp, Glycine max
  unsure (1)..(458): unsure at all n locations
taagttagaaagtctcaactactaaggggttcttcttacaatcttatatcatgcaagagagaaagttntcccttgtctcanaatgtgggttagtagtagtgactcactttgtagaccttttgggtttctcttcatctatggaatctatggagagggagtgaaccttggagagctcatggaatccatgtggagattcacatcaagagtatgagaagcaatgagggactgcagggttgttataactgagttagggttcggtgatccacttgctaaccatgttcctcanacagattctatgtcatgtatcgatgatctatggtacacatagagactttcaagccatggtgatgaaaatgttgatgaactaatgatgaacggacacgtgagaaatgtgtttgttgaccccgagagatttatggatataataatgttcaaggtttgcggttgcctatgaaaaa

SEQ ID NO: 82889 - DNA, 461 bp, Glycine max
  unsure (1)..(461): unsure at all n locations
agctggtctntaatttcgtcattacactggttttaaaatagcacatcaacgcatatagaacaacaacatgtttaatgatgaccattaaagaaagctcgtaaacagttatatgttatgagataacttattaattgcggctttgatatgcatatcaagtttcctacgcaacgaacacaaccaaacaacaacatgttgcctgggacacaaaagtacgagctgccaatgtgccctacatgtcatgcacattacatacgtatacaccaaaacatcatttcaagtattattcttaaacatgacttactgatggaagtaaggtccaacgtacacctctcggtcagattccttaagccatctttcaagatattgttggcactcgctgcgtctatcctttgaaaccaccaatgactgtgactcaaggaatgcatacatggaaccttgacccaagggttgactncactcat

SEQ ID NO: 82890 - DNA, 431 bp, Glycine max
  unsure (1)..(431): unsure at all n locations
tataagaacaaaaatgcctcaatcatttccaaatatgcatgtgtattangaagcatcaacaagaatcaagccaaggctattgtgcaagcaatcaatggggcaaaacacaccaaatgattatgatgatggatggctcaaattctcacaaaggtaaactcatcactntcaaattgagctttcaaaactatcatgacatgtagaggagaatcaaggatttcaagtcacaaaatgtcaagaacttttattttcaaaacaattacccatttcttgaacatatcctataactcanagaaaaacatgcaaagtcgtacatgcacacaaaatngacccacaatattaaactaataatccgacgaaactaacaacattaacaagataacacaactaacaaattaacaaaaccaacataactatgcaaaccaaagaacact

SEQ ID NO: 82891 - DNA, 378 bp, Glycine max
  unsure (1)..(378): unsure at all n locations
tatcccatgagcatgtccacctacttaaacggtatattcattaatcttaaaagaatgaaacataatgtctcagtgagtactctaagaactctaggttgactctatattctagaaatcattttcttaactatcatggnttctctttttcttttcttaagcactttatctaacaactattatcccatctctatatcgtttatatctccttggaccataccttaaccttcacttaggtacctaaagttgatcaccttgaccatctctaaggctactagtattctatgtcacctgttcgctttcggcaagtgcactatatcgcacaagtagtataaaacggtaagaaccgagtatcgaactcttcaaaaactttgtgtactt

SEQ ID NO: 82892 - DNA, 447 bp, Glycine max
  unsure (1)..(447): unsure at all n locations
taattcaccattgttgttacctacttctataagggacttgttcttccttagttccctaatcttttgtttagctctgtcactaattttgaaaggtttgaataaaggtttttctatggggatatttgactgagattcttcaaaagattnttgtgtacgaagtgtcttggttttgatagactcctaaaatttgcaaatatttattggtataattagcctgttccatgaggcttttgatgtctttagaagttatctcttcgttaacatcttttgtcttaaatggactagccatgacaggtttattattactgtctttgacctttggtagttgatattgtgttgtgggaggtaattccgattggattaactcaccatctttgatttaccaattggtaattacatttgttggtggatcacctatgatatcttgtttccacgggtaatttatat

SEQ ID NO: 82893 - DNA, 419 bp, Glycine max
  unsure (1)..(419): unsure at all n locations
tctganattntgngctgagtgaggagagagaacgtggcttttattttaaaaggctntttctctnttattttttttttaaaaaaaagatgtgccacatgtcttcttttgagtggagcaaaaaagggcccactttttctcttgatgtgactcatactcagtcacaagaagtgaaaaatctgaccttttgaaatgctaaaatcttgcctcgatttgcgtgccgtttctctagttctagtccctcgcgtttctctgcacccgtcggggccagttttcgaaagtaggcaatatatatatatcaaaacgctcataatgaaacctcgagcatnggtcagagggttggttcgttaaaatttaagtngcacgcaaaancgatattttagactaataaatgagaataatctatactatccagtatggat

SEQ ID NO: 82894 - DNA, 315 bp, Glycine max
  unsure (1)..(315): unsure at all n locations
acactaaaacccccttcgtccacaactttctcaggtcttcaatcaacggacttagataaacatcaatgtcatttcctggctgtcttgggcccaatatcatcatagaaaacatcatgtatttttgtttcatgcacaaccaagggaggcaaattgtaattactagtagaattggccatgaactatgtngagtggcttaaattccatatgggttcattccaccactaggtagtccaagcctaagatttcttgccttctttgccaaatctagatacaaaccatcaatcttcttccagtgggagcaatcagccggatgac

SEQ ID NO: 82895 - DNA, 391 bp, Glycine max
  unsure (1)..(391): unsure at all n locations
aactagatgccttggttaacctggtaacccaactgttcatgaattaanaatatgcacctgtcgccagactctgtggtttatgctcctctgccaaccaccacatatacctttgcccttctgtacaacaatctgaagcaattgaacagcctgaagcttatgctgcaaacatctacaatagacctcctcaacctcagcagcaaaatcagccacaacagaacaattatgacctctccaacaataggtacaatcctgggtggaggaatcatcccaaccttagatggtcgaatccttcacaacagcagcaacaacaacaacaaccttanttttaaaatgttgctgtgccaagcagaccattgcgttctccaccaatccagcagcaacaacaggaaca

SEQ ID NO: 82896 - DNA, 446 bp, Glycine max
  unsure (1)..(446): unsure at all n locations
agcttaaccatttgaggattcatctaatattatttattntcgaagcccgtgagcgaaaatgccttttttttttattncaaagtgaatgaaaatatgttntgtcaatcgaaaattaatcattttaagcatataacattcatctaaattctttnttatgatatttttcatattaatatgttaatagttttattttattaataattcatcttaaagggcaagttatgaacctactacatctattctctaacaaaatgtcttgtcaactaatcggaggcaattaaggacaacatcatgccactggcttcctagaatgcggttagaacaatgagaacagaaatacgagattgccatatggaacattgntatttgtccaatgattacacaccagtaaatatttaacatctccgatccacactatcttctatttacgtactgctagtactata

SEQ ID NO: 82897 - DNA, 385 bp, Glycine max
  unsure (1)..(385): unsure at all n locations
ttggaccttgaacaagcaaacctctcctctttcagaactatgctatgngcacgcgactggtcccattcttcccttcgcaacttgagttcactattgctaccccatagagctgcgcgaaatttgttccggccatactcttccttgcgagccctcttggtctcttgttcaagggctcttgcggtaattgcattctcttcccgtaacccggcgcactccttccgaacgtgtgtagcagccaacttgaacttcttcttggcgagttttgcctttcctaactcgctantgagagactggacttactcgtcctcttaccgtgcttcaaaattctcttcgctgacgacttttaacttcgcgagccaatctaaacctcgtatgcgaactttca

SEQ ID NO: 82898 - DNA, 485 bp, Glycine max
  unsure (1)..(485): unsure at all n locations
agcttatcccagtggtgtaaattacactcttcatcatatatataatcagctnttcctgataagtagacagcaaaaggcccacatttcctgattcgaggaaagaagcctatctatgggaggcagaatcactctcattaattcagttttatcagccttacctatttatttactatctatggggggcaacatggaagcaaataagcctaactattgtgtggctgggggataatttaactctacaaccaaaatatcctactttctatttaataagcaatcaacagacctttctattntctatttttacacatttaaaactcaaacatataaaataaaaaatatataacaaactaacaaagataaagacaaaanaaagganatataaactcacctcacttggtgctgctgcccatcatttcactctcacaacanataggaatcatgtacctgcatggaagaaatantcacacaacacacaatgatcagaa

SEQ ID NO: 82899 - DNA, 385 bp, Glycine max
agcttctccatagactaaagctagttcataaactattactagtttatgcatacgttaaaaattagcttttggagaagtaatatgagacagcttctactcattaacttatggagaagctttttctttttaattgtcttctcctattagtgcttatagaaaagcttatccaaacaaggtccactatatattctgcaatctggtactgagccatatatatggatggtggttttggacatttggatttgtgtagttgttgttaataacaatgatgcttatgcctttgggcatgggtttggactaattgtatcaaactatgcttgtgtatttggaatttgggggaggatttccacttgcttactgcattcttacatgtatattatgtaac

SEQ ID NO: 82900 - DNA, 476 bp, Glycine max
cttagagtctaactgcacgcgtgcgagtcttaacatagaataaaagggagtgcaattgttacctatctcagtgacaccatctttaagttttgtgaagtgagaaaattggtcattttgttctgaaataatcaattagacaacagttatttatataaataattcacttaggtaacacaatatcaagggatgagatctcatagaaaaatttgtaagacaatgtgacttaattgtaagcactcatttaagaatacgcattggagatactctatggtttttgactaccttgagaaaagcgcaagttagcatccctaccacacaattggaaatacatgatgggagtgaactcatagttgaagaatattagaacgtagaataacgcaattgtagcccttatgttctaagagaagttttgttatgattcccaggatatgcactgaacgttggctcttagattgtacacataacataagttgatc

SEQ ID NO: 82901 - DNA, 477 bp, Glycine max
  unsure (1)..(477): unsure at all n locations
ctgcaagcttgttatgccctctnccctcggcggggatttcttcttcggcaaaggcgagatagttgttggcagtgatattattgaccagccctccgaaaccttctaccgagatgtcttgggccacatgggcctcgttcaaaaccttcactagtagagcccgatgaggctcggagctcatgagtaactccaacagcgagaccctggccggngttttgttgtgctgttcgataaccttgaattcgctctgctgaattatacggaggaactcactggcttcctctagtgacacctcctttttaccatcctttttctccggaagacctttcgcctgaatatctttattcgaagtgaggggtgcttcgtcatcttgttcctccaccacttttgctttccccttgacgtttgcgggttggactggtaggtccgcgggtgcaaacacacgaccgctacgggtcacaccactcagtcccgtgatat

SEQ ID NO: 82902 - DNA, 436 bp, Glycine max
  unsure (1)..(436): unsure at all n locations
agcttctaaggaggtgagcttagttattatagggatgcgtgtagttaagctctagcttctcaaggaagttttctcaaagaagcttctcaaggtagttgtcataccctaattttgtccggngacctttgcttgatgacatgcgacctttctttcgtccttgtgaggtgcttggcatccatcattaggcaatttgtgaaattccaggacatgccgaaaaaaaaaccaaaaaaatattgatgcacaatccgtaagtttccgtcacacaccggaaatcaaatggaagcatcgttgcataattaagtgaggttccgtaacattccgtatgtcaaaaaggggatgattatgtaatccgcaaggctccgtaatattacggaaagaaaacaagtatcgttacgaaattcgtaagtttccgtaactctacaaanaaaagaatcac

SEQ ID NO: 82903 - DNA, 405 bp, Glycine max
  unsure (1)..(405): unsure at all n locations
agcttgaatgaggctgaagaagctgctgctcatgttcatcaagatccggtggagattaatttatctcagcctcatttgtcacaagatagtgacatggagtttatggtaaatatttgtcataacaaagtagttttatctcaacctaatttgttgcagcactccatttttatatattacaattattcatgtttggcatttacatgtaggtccctgcaactattgttccaccaatagcaaggaataagctagccataacaagagccaaaaaaaggaaggttgctgataaagatgatgcagaanactgaagaagcattntttgttggcatttgaaggttgctgaagggtgctgaagacccatnttttgttgcgccatttgaagggtgctgagtttgaaggttgctgatg

SEQ ID NO: 82904 - DNA, 490 bp, Glycine max
  unsure (1)..(490): unsure at all n locations
agcttgatagcacgtagagactaacgtcttcttctgcccccttcgtcaatcgcggccgacaagcccgttgacaagcggtgatttacgtcatcttccgcgctcacaagatctgtcatactgactnttgagtcacgctgacgggcgcaaatacccgagtggttatccttataaactttttgctgtctgtaagacgaaaagcatgatagcacgcagagactaacgtcgtcttctgcgcccttcgtcaatcgcggccgacaagcccgttgacatgctgagatttatgtcatcttccgcgctcacaagatctgtcatactgacttttgagtcacgctgacgggcggaaatacccgagtggttatccgtataaactttttgttgtctgtaagacgaanagcctgatagcacgcagagactaacgtcgtcttctgcgcccttcgtcaatcgcggccgacaagcccgttgacacgtggagaattacgttatcttccgc

SEQ ID NO: 82905 - DNA, 473 bp, Glycine max
  unsure (1)..(473): unsure at all n locations
agccttgattcatgtttatggnggtattataactttgattnttatgacaaaacacaaattttgtcccacactttaaagttctcctaaaatcatgaaattaaaaggcgtagtggtgtattttgtgtcaaaggttattgcataattttttttctatagttaagagggatatcaaaatagcaagataacaattgggataaaggtgaaatagcattaattaaaaaacaaatttttaatcaaacttttattaggggagaaaataaatccaactttaaaatgatgcaataaaaaacatcaacttatcaaactcaacactgacctttggtctagatgataactacaaagcacttcatctcacttgcttctaaggtagcctcatagaaatctttcaatatattccaaanacaaaaggaaaagcatcatacatatatcatagactcaacaacaaaatagtcttttttttttaanaaaaaata

SEQ ID NO: 82906 - DNA, 481 bp, Glycine max
  unsure (1)..(481): unsure at all n locations
agctngctcaaactggatntacacctataattctaccgaatcaaaattagactcttcaacacccaaatttgccctagaaatggctctttgttcactttggtcatttgtttttccctctagcatagcctaacctttctcataagtcctaaatggcatttcaagctaagattaactcacttaaacctctaaataccaccaattccagatttggccttccagccctcataaattcactctttttccactcataacaccacattctcactttccaaccctaggttaactntaccattcatctctaacagttttccataagcaatntcagcatacaaacatcacaaacatcatcacaaaaacccaaaaacagaatgggtatgtctaactcatccaaacatggcaagttcaacaagctttcaacaagagtcttcataaataactatcatgaagcagaaaactaacaaaactacccatcatatctccc

SEQ ID NO: 82907 - DNA, 362 bp, Glycine max
  unsure (1)..(362): unsure at all n locations
acacacaccactattagatctaagcttacctgcttacgaagcttccttaaaatcaaacgcggatacagtaatgctgtgaataaaattaaacgttaatttataattattagtattctagggtgttacagagagggaagagacttgtagaaagagactgtgatatctattatctcgaatatgatgtattacaatgtgatattatgtgcataaaacttaaagcactatgccttatctataccaaagataaacaacactaacccttaacattgatcataattgataatgctatctactcacacatgcctatcactggctgtataaggtcatatatagactatcttacatatntgactgactcatgg

SEQ ID NO: 82908 - DNA, 488 bp, Glycine max
  unsure (1)..(488): unsure at all n locations
agccttattaaaagaaaagattaactaanatcttatataaatcttagagataaaatcctagatactggttactaaaaagataagaggtttcctagaaataagctattaaagatataaatcatatcccttaaatctccacactatcataacaaattcatatcatatgtcaacaacatgaaaggaatgttagtttttatttttaagttgtattgaaatattttttactccactctnttctattttgggttactctttctgataacattatctttctttcacctttcttactacttgatcctttctttgtgcttgtctaattaaattagtaaatattactgtttgatgcatatctttgttgtactttgccattgacattgatacatctntagggcatacccatgtggcagaggcacttanaattccaattcatangtttttcacaatgccatggancgaagnttcatcttgtnttcataactctttcttta

SEQ ID NO: 82909 - DNA, 491 bp, Glycine max
  unsure (1)..(491): unsure at all n locations
agcttctccttatgtttgccaacttcagcttttaggtgtttttgtcctcgaaggctcgcttagtgtcattttcgcgctaagcgaacgcaagttagtgattnttggctgagcgagtcaggcgcgctgggtgccataagagacaaataagtcgttgggcaagctaatggcatgttgagcgcgtgcttgcatggtagattctcttccagattctcctcactcgctaagcgggctgatgtcttgcttagcagatgttgctcgctaagcacatatgcctcgctaagcaaggcaccagccacaacaaccttcttattcttcattntttcacctgagactgaagttgaaaacacattaattcacaatgaagggaatatctactgcataaaaattaaactaaaccttaaaatatatacaaacctagaaaaagaattataattggggaaagacatatattcataatggctttcatacaaaagttagtataaatgatgact

SEQ ID NO: 82910 - DNA, 472 bp, Glycine max
  unsure (1)..(472): unsure at all n locations
agctctaatgctatgaaaggaaagaagccatattatctttttcactattaaagagtaacatctaacctaccatagcttcataacatatttactattaatatcaccatggctcatctgccattgctgtcatcatcaccaccgccatcaccatgatgcctttcacccgacatctcgctaatcatagtcacaatgctaaccttgtggcgatatttctcagtattaaattagcaaagataaattgttaaatcataatcgtcttttcaattcagcatcaacagttgatgattaagaatgcaatatttctttttctgatatagataaataaataaagtgtaacctcanaaaatctccatatccttataatatggatgtcatgcctatattttgttattgtattattaaagaattattgaatataatagctcatatttctgggttataggcttataactcaaatattatttatatacgt

SEQ ID NO: 82911 - DNA, 489 bp, Glycine max
  unsure (1)..(489): unsure at all n locations
agctcgagtcttagcataactgttgcatactcttgcttattgtttattatgaaattgatgtgttattatgtcttgatcggagtgtgtgattcctgtgtattgtgattgatgattgaaaggtgtgattgatggatgaaaagtgtgattgatgaatggcaaagtgatgaaataatgtgagatatgctaagtaaattgtacttggctactatatgttgcgttgtttctctctagtagatagaaatgtgataactcactcccggtttgctatttgtgtttggatcctgtaatgatcttgaactttgtgttcggnggagcagatgaataggtggatgactatgaagaacctcatgctagagaacacgagaacactacgctctgatatgatgtgacattangatataggttctatattaattgtatgacacttagatgatcttccttgtgtcgagatgactttattatntattttgacaagtttgaatatgatgt

SEQ ID NO: 82912 - DNA, 467 bp, Glycine max
gatcttaagcacctgagctgcaacttgccctgaaccctctggtaatatctctgggcctgatttttaccaaattaaggcaccagagaagaagatcctaatctaaaagactgattcccaaaaacacaatcaaaaccaatgtaaaaaccaaaaagcaatgtgatagataccaactggtaagggaataaggactgaattttattcaaaagaaatacaacagaaattacaaattacacaggaaattgagtaaaccagttaattcataggtttcccccaagatgtttgagagcctggtctctcccttcctgaaaacccactaaaaactgcctaacccccctgctgttactccataatttattctgcaataactgcttaaggcagttacatatggtcctaaaaacacacataatttattctgcaataactgcttaaggcagttacgtacacacacacacctaatttcccattcg

SEQ ID NO: 82913 - DNA, 423 bp, Glycine max
agcttaacctaacaacatacaactaagattacattaagtcatctatcctaaggtttgaagaatgaaaaataaaaatggaaatgtattcacttacttaagttgtgattgaaatgaagcaaagaagatgcaaagaaacagtacacgcacgcaacagaaagtacacaattactgaaggttaggaaggtgcatatgtttggttgcaaaggtagcacccaaagtgcctctgcctttgatttttaaaacccaagcgcttagcctagcctcgcgctaagcccaacttgaagttgtaaagtcccgtgagcatctagggcttatcgtagcaggctgtgcttagcgctgtctgcaacacaattttctacaatatgcgcttagcctgagatgtaaggcttatcgtaccatcaagcttcaacttacagagagtag

SEQ ID NO: 82914 - DNA, 469 bp, Glycine max
  unsure (1)..(469): unsure at all n locations
agcttangctattaaatgaagatacatgaatagttttatattattattataaaagcttacatatgaataggaatatattttcttgcattgtcaggtagcttggcaatagtagagtgagttgtttggactatttgtagtgttggatatgtccacctaacttaaaggttattcatttttctcaagctgcatttgaggttttggtggtgagctgaatatgatgtttcagaactgtgttaatttggttgatgtttggttcttttgaatggcgtcaaatgccagatttgctgtggtttattctctcatantttgtaagacaggcttttcttagcttaattatgggcttcagctcatgggttcttttagtgcattcctttgaatattgtgcaaagcaattagttaactctgttgagcttgaattatttccttggcagtttctgtaaagaggatatnttccacttcttgataattc

SEQ ID NO: 82915 - DNA, 456 bp, Glycine max
  unsure (1)..(456): unsure at all n locations
agctnggactcatgagtggtaagttgaggtctaagtggattgggtcctttgttgttactaatgttttttccttatggtacagttgagatcaaaagcgactccacaaacaagagcttcaaggtcaatggacaccgacttaagccattcctcacaaacccttctttagtggacatagtggtggaagagacttccttactccaccctactcttcctccaccatgacttagggagtttttcttttcctatctccttctttacttttattacatttttccgattctatttgatggtttaattgcttttaatcttttacttgtgctacattgaggacaatgtgttgtttaagtatggggggagtgttctttggttttgctagttntgttagctntgntaattntgttagttgtggtaanaatatgtaatttgttagttttggtggtgtcgcaacctaccctt

SEQ ID NO: 82916 - DNA, 490 bp, Glycine max
  unsure (1)..(490): unsure at all n locations
agcttaagcttctttaactacacaaggctcttattatttgaagagtatccatgtggaaccttcacctgatgaagatactgacaaaaacttatcttctcctttttagacaaagtatgacaagttgggggcaagtaaattttcttaccatcagaccttggatgcaactgtgattgtatccccatctcaactagatcttgacgggtattcaagccatcctttgtcttgccttgaatgttaaggagcgtcccaatcacaccgtcacatgcatttttctccacatgcataacattaatacaatgtctaacgtctagatcagaccagtatggaagatcaaagaaaatggacctcttcttccatatgcaagtcttacttttattcttctttngagtctttccaaatacaatattcaggtgttgaacccacttgtataccggctcaccagtcaacggtatcggtgcaatatcgtgctcttgacttctattanaagctt

SEQ ID NO: 82917 - DNA, 464 bp, Glycine max
  unsure (1)..(464): unsure at all n locations
agcttataggttctaatgtggttgtgcaaatgcttcgtacctgatcttgtatcaccaccaagtttcttttcacaatatttacatatagctttccattnttcctctattttctttcttttgaagtgggtccaagcaacggaagttaatcctcttttatttggacttctttcaacatcttcaacttcttctatattgggagaattttttgcttcttccatcagattgtgcatcattagcaacttgttgtgtttctaatggagcaatactattaacggatggatcaataggcatacccattttctgtacaacaaacaagtaacaaaatttacaaatatgagtcatgtaaaagggtaaatgcacaaatctgactattattggctagatacaaatntacaaatatgggggcnaattntaaactcaatgaatcnagcaaaccaaaacatcacaataagctagcagcagaa

SEQ ID NO: 82918 - DNA, 444 bp, Glycine max
  unsure (1)..(444): unsure at all n locations
agcttctccaaggtgctttgtggaattatgtntatgctggagccattatcaatgagcactctggccttaatgtgatccatgcatttgacagatagacgcagagccctattatcttctcgtccctcgatgggaatctcctcctcagcaaaggtaaagcagttattggctgtcatattgctgacaatccccttgaagccttctacggaaatgtcttgggccacatgggcgtcatccaaaactttaactagcaatgttcagtgaggctcagaacttatgagtagttctaacaaagaaaccctagccggagttntgctgagttgctcgattatcttgaactcactctgttagattatatggaggaactcattggcctcctccaaggatacctctnttctgccgagtccgtgccctattttagtgaacctccccactggaacatactca

SEQ ID NO: 82919 - DNA, 477 bp, Glycine max
  unsure (1)..(477): unsure at all n locations
agctgggttcgaaaagaaaggggagcataatgcttatgtatattttgaatcaaatatactgaagttcttcataatacttggtggattgattctggacgtacaaatcatgcttctaatatgatgcagggattccttacaacccgaaccataaacccaaatgagaagtttgtcttcatggggaatagagtgaaagttccagtggaagctgttaggacttagtttttaatccttgacactggatttcatttagacttatttgatactttgtatgtacctagtatttctaggaatttagtttctttgtttgaacttgatgttgctggatactcttttaggttcgggaatggttgtttcattttgtataaacgtactcgtatgattggatctgatacactntatgatcggttatatanactaaatcttgataatntatatgttgaaactcttatgaccttgcatcataatgttggcactaaa

SEQ ID NO: 82920 - DNA, 497 bp, Glycine max
  unsure (1)..(497): unsure at all n locations
agcttctatataagctgaaccattntatcaatattcacttgttgagttttattcagaaaattagagtttatctcttttatcttagtgagagtgattctcctaaattcttgagtgattcaagaacaccttggctgtatcaaaggactttcacaacctttgtgtgttgccctcgctggaaagagtgattctttccttcctttcatcatcacccttgttctttcacaccacaattccagaaaatccacctctgcccagaattatctcgtggccataactcccattttacgcactcaaattaagtgattcttgagcctaaattgaatttcacaacgagacctttcacctctgtttggaatcacctcatttggagccctgtatgctcagttattgccatttctatatttctgtccagccaccacttaacctatcgtttaccatcccattcatccattntatgccacgaaccaccttattaagacccacgatattagccacca

SEQ ID NO: 82921 - DNA, 366 bp, Glycine max
tgagcacttcggccttaacgtgatccatgcatttgacaaatacacgcagatcccctatatcttctcgtccctcgatgggaatctcctcctcatcaaacggaaagtagatattggctgtcatattgtcgacaataccccttgaagctcctctacagaaacgtccttgtgccacaatgggctgtcatccacaaacttcaactagcaactgtcagtgaggctcaaaacttatgagtagttctaacaaagatactctatcccgcagtttgttgagatgcctcactatcttgaactcactctgttcgattatatggaggaacacattggcctcctccaaggatacctcttttctgccgagtcctttcgctt

SEQ ID NO: 82922 - DNA, 483 bp, Glycine max
  unsure (1)..(483): unsure at all n locations
agcttctccccattccacttcaaagttaaaactattgaggtatagtttattacaagggagataatatggggagggaatccaaagtcagtttagagtaagtctcaaaaaattccaatcaactctatcattagctttctcaaaatcaattttgaacatcacctaacccctcttccctttctttntatgtatatgatgaaccatttcttttgaaattaaagcattattagaggtacctttcttaggaatgaattttttttgaaggggatcaatgagcttgcccaaatgagggtggattctattcaccatgaccttggtaatgactntgagaagaacattgcataggatgatagggcataaatccttaaaagacttaggagcatctatcttgggaatgggacaatgagagtctctacaggccaggatcaaaggccctatagaaatgcgtagaaacatggccacacataatagccaccacctccaata

SEQ ID NO: 82923 - DNA, 350 bp, Glycine max
  unsure (1)..(350): unsure at all n locations
agcntttacatgaatgggtggctctctattaatataggttgaacataacttggcttggttntctctcacttggaaggcttcagcataacttcatgatgccccttgatgaactcttaatgctccacaaaagactgttgaagtggagcccactcaagtgacaaacttttggaagaaacaaaaaaaaagtgacaatcgtcaactcatgataggttgtagagtcattctaaggaacctttctgatgagcattatgaaggtacatcagactggtgattctgatgttagctaagaatggatcaatatgaaagctgatccttatgatgaacttcacctaagttcgctcttgcgacta

SEQ ID NO: 82924 - DNA, 483 bp, Glycine max
  unsure (1)..(483): unsure at all n locations
agctgggagaggatgcttcaatggaggataagatagagggagagaaagagagaggggggagcacgaaattgaaggaagaaaaagggagagaagttgaactttgagttgtgtctcacaagactctcattcatcaaagntacaacaagtgttacacatgcttctatttatagactaggtagcttccttgagaagctttcttgagaaaacttccttgagaagcttctttgagaaaacttccttgagaagctagagcttagctacacacacccctctcataactaagctcacctccttgagaagcttccttaagaagattcctaaagaagctagagcttagctacacatacctctctaatagctaagctcacctccttgagatgagaagctagagcttagctacacgccctctataatagcgaagctcacccncatgacaataaacatgaanatacaaaacataatttcttactacaaagactactc

SEQ ID NO: 82925 - DNA, 480 bp, Glycine max
  unsure (1)..(480): unsure at all n locations
cttagcgcatgaatttatggcgcttatcgcaagggttgcgcttagcggatggacaactgataaaaaattctaagtctttattgtccatctcttcacctaggcttaaaaacccccttgttcactactaaacaagctgaaaaattaatcacaatcacaatcaactatcctaactacatgcaagagatacaaaatgaaaaagagaaaaaagaaagaaaagctgggttacctcccagtaagttctcttttaacgtcattagcttgacgcatcatcctgttatcctgngtccaacaaggttcctatttccagaacctttttctcaggtctcctttcaaccatcacatgaaccttcaaacagaaattttggtcaagcaaagctccctcttcatgaaacatatcgaaactgattngctgatcttctatggccatntgtagtttccgcttccctatgtctaccacacagcttgtggtagacataaaag

SEQ ID NO: 82926 - DNA, 496 bp, Glycine max
agcttgaaatgaataacggaagctctcgagatttctttatggtcataacttgtcacacggaagtgcgattcacgcgcatactatatcaagacgctctaatataaacaatgaatgctctcgagaaattcatatggtcataactagtcacatggaagtccgattcatacgcataatatatcgagaagctcgaaactgaacaacgaatgctctcgagaaattcatatggtcataacttatcacacagaagtccgattcatacgcataatatatcgagacactcgaaatctaacaacggatgctctcgagatattcataaggtcataacttgtcacacggaagtccgattcatgcgcataatatatcgagacgctccaaattgatcatcggaagctcttgagatattccaatgcgcatatccattcacacagaagtccgatgcaagcgcatcacatatctagacgcatccaactgaacaacgaatgctatctatgtattc

SEQ ID NO: 82927 - DNA, 474 bp, Glycine max
agcttctatacactgcttctcaaaactggcagattgatgtctctcatcgctcttgatcttttgtgctgaattctcctattacggccgtatatatgtcataagaccaaacagtcatcatcttcttttaaaccaaatatgtatctttgtcctgcgcttcttacctattgacgaaatatatagacaatcattctatcggacatctctgttcaaacgatgagtgattcaacatatgcgctctcacctggtaagacaagtagtgaatctgccgaggcacatgcataggagagacatatttcagcatctaaaggaagggttatgacagcccagattgcgtcaatctacataggcttggtagtgtgacagctgatgctgatttaactggcagaaagttgagaatgttcttcctgtctagcatactcaacgcaattgggaatgatcttatctagaacgacatacatggtacgagactctcac

SEQ ID NO: 82928 - DNA, 493 bp, Glycine max
agcttaataacaaatagccactgacccgtttgttgtctactcaaaaatgcatcaacttcttcatcaacaagtcatccatgacatgtgcgtgtcttccctgcaacgacaattaccaaacatcaccattaaaagaaattacatggaacccgcgacctttcttcaacagtacacgaaccagttaacctaaaacaaggttaaaataagcttaacctagcaaatttagtaattgactaaccaatctctatcttcacgaaacttggagccgagaagttggagcgatgaagtcgaagaggtgaaggagcttcaatggaagaaggggtaggagcttcaatggaagaacaggtgaaggagcttcaatggaagaaggggtagggcttcaatgtcaaagaaagggagggttcacacgaaggagcaagcagaaagggagggttcacacgaaggagtaaggagcaagcaatctagggttcatagcaatctcgaaagctagctagca

SEQ ID NO: 82929 - DNA, 482 bp, Glycine max
  unsure (1)..(482): unsure at all n locations
agcttgccaaaaagtagtgtttcagacagttcattatttatgactctgttccatagtaattgacattaatgttaactaagtatctcatgataagataagattaatgaccgtttctttgtctagtgtagcgttgcccctcttctccaccttaacaatcctttcatttgggtgcagccagtgcaggcatactcctacgttcaacattaattaggcaaacataagttgcgtactgtacttgtttgaaagaggaccaagataagacgattggaaattttaaataaaatcccacttcacgtaaaatgtgagatcaagttgatcacatttgcacaccactctacagattntagccattcaaatatgaaaatagttgaaaaagtgttgtcactttgtgtttgtntatacctaatgacagattnnttttccactttatactaaccctntcaacctccccatacaggcgcacgctataatatntcaaacaa

SEQ ID NO: 82930 - DNA, 472 bp, Glycine max
  unsure (1)..(472): unsure at all n locations
agctntcatcgatgtgacaaaaggggattctttttacttgtagcccttgcggatgagctgagcttctctccctctgttctaaggagattctccttttgtaggcgtgcgtaggcttataacccaacccaaaccttctgtgattctttgtgaactttaccaaacttgctatgccattcttgtttcggcctaaacccattccgggctcatatttgtgccccaacataacccgagccatcatcaaagcggctccagatgagtgcagctgcaccgagggagactccacgtaagcattgctcataacttccaatgcctggaaggatgtntccaatgactcctcttcagcctcaacataaggcgtagaagatggataacttacaagtatgtcttcttctcccgaaactataatcagttgtccctccatcacaatatttaacttctggtgcagtgtcaacgcgaccaacctaaccgaatg

SEQ ID NO: 82931 - DNA, 486 bp, Glycine max
  unsure (1)..(486): unsure at all n locations
agcttcanaatacaagaaagacactatttttggtgaaagataaatggaagacaatgatggagaattacttctctagcctctcaaccctaaatctctctatttttcacgaagccaagctctcttttctactctcaaccaattgtcccttttttcatttccgccaacttcggtgttttaaaggctcttggacttttcagctttcgaaggcttgctcagcgagcatgtctcgctgagcgagagttagtgaaaatccgctaagcgagcatgggcgcgctaagcgcaagaagacacaacgtcctcgctgggcaggctggttgtgcactgggcgtgcagatctctgacttatcctcttctagggtttcccatccactaagcgagttggatgcatctcgcttaaccaatctacctcgctaagcgagtcatcagcagctnttaccttctcttcttnggcctgaaactgagttggatcaacattacgcacaaaat

SEQ ID NO: 82932 - DNA, 474 bp, Glycine max
ctgcagcttaagagacatggctataattgttatattttatcgaacagtctgtgtgcactacaagatgactataatgtactcaggaatagcctaatttcttcactttcttgcacaaaataatcctccaattattaacttgtttctcaacaaatatccttatctttctattctttctatgggtttagccttttcactatcccaacaacatgattgttacaattatcgaactttttgattaattttctttctccaatcgatcgattatgtgttttggcatggaagcgatcaaacattgttgatgcaaacctgaacatcctatgggaaagaattcacatgtgagacacatagagacgctgatcatacactacagtggaattataagcgtagttctgaccgtaggtacaacagagattcagtgatatcacaatcttcaaggttatacgctcgcatgcggtgcaattggcatagcttctc

SEQ ID NO: 82933 - DNA, 467 bp, Glycine max
  unsure (1)..(467): unsure at all n locations
agcttgcctaacaacctcattgactcatatctttatagctgtacccaacacacttgtttgagcaccgtgagaagtaaattctcatgctgagaacagtcaaaacatttaagctggaacatctagaaaattataagcatttaagcatggccaggctatagattcccaatttagggatgtcacctaacatgagtgaactgaaattacagtagtgtgctgcttatagaattttgaagttgttaaagggggaagcatagcttggccaaaatttttcctctaccttaattataggagtgtatttatgtggtttctcatatccccatttcagattcttcttaggttcaaggataacttttattttaaccggtgttatgaatataaagtatctcctaattntaccaatgattaatttctatcacagaattgatccatcacttttaatagaatntcagagacacctttctagaaac

SEQ ID NO: 82934 - DNA, 450 bp, Glycine max
agcttataatatatcgatacgctcgaaattaattatcgaaaactctcggaaaattcaaatagacataactattcacacggatgtccgattcgggcgcataatatgtcgagaggctcgaaattgaacaacggatgctcttgataaattcaactggtataacttttcacacggatatccgattcgggcacataatatgtcgagaagctcaatattgaacaacgaaagctctttagaaattcaaatggtcataacttttcacacggatgttcgattcaggcttataatatatcgatacgctcgaaattaagcatcggaaactctcgcgaaattcaaatggtcataacttttcacacggatatcctattccggcacatagtatgtcgagaagcttgaaattgaacaacggaagctcttgagaaattaactggataacttttccacggatgatct

SEQ ID NO: 82935 - DNA, 488 bp, Glycine max
  unsure (1)..(488): unsure at all n locations
agcnttcctcgggccatttcctgcgaaggcaaaaatttgtaaagttagttntaccagtgggacactactcttaaaacaaaaatggcatacaacctcctcccataaatacaaacatcaatgtaaatttagagcaagcttatgcgcatatttccttacgaacgttcacttgcacaagacatcctatcaactaagaaaaatgcacccatatacaatcaaggtagcttcattacctagattatttacatgtacttccaaggtgtatttattatttacatcacacacgcctccttggctgaatttacatacatgcatactcaaagcattttggggtaccaaaaactgcacatgcgctcatcttggtatttctaatacccatacatatacaaacttcacgatgaatcttgactacctacacaataaggtgctacatttcatgcnnttttttcaagttttgctacctaaagccacatgcanattcaagcatattt

SEQ ID NO: 82936 - DNA, 370 bp, Glycine max
gcgcttcatatgatgaagtgagaaagaaagagatttattttagtgtctttctgacgcgagataatcggattcatacttaattgagaagaaactatcacactaaatttgcattaagatgcgatatttaagttcatagttacacaggctgactgaattaaatacaagaccgtctctgctattgaatctttttacaagatcagatctggttgttgaactatttaaactatactatgatcttacagcgttcactattgtacatgtggacttttcactcacccctacctagaagtgtggacaacgcatagacccaggtttactatgttgcgagattgattattttattcgtgtggattacgttggcacatatcac

SEQ ID NO: 82937 - DNA, 486 bp, Glycine max
  unsure (1)..(486): unsure at all n locations
agcttctatataagctgaaccattttatcaatatacacatgttgagttntattcagaaaattagagtttatctcttttatcttagtgagagtgattctcctaaattcttgagtgattcaagaacaccctggctgtatcaaaggactttcacaacctttgtgtgttgccctcgctggaaagagtgattctttccttcctatcatctccacccttgttctttcaaaccacaattccagaaaatccacctctgcccaaaattatctcgtgaccataactcccatttcacacactcaaattaagtgattcttgagcctaaattgaatttcaaaacgagacctttcacctcgttttggaatcacctcatttggagccctgtagcttccgttattgccatttctatatttctgtccagccaccacttaacctacgttntaccatcccattcatccattttatgccagaaaccaccttattaagacccacgag

SEQ ID NO: 82938 - DNA, 488 bp, Glycine max
  unsure (1)..(488): unsure at all n locations
agctngaaactcgagggagggagganaacaggttactctattaaaagatctcaccttttgtcagttttggaatgcacacacacatacacacaaacaatcagtacagttaatgaaaatcatatgggcatacaatccatttgacatacctaagcaagctatcaaatatctctcanagcagtataatgcaaaagcttcatagcattcccggataatttcgctgttaaatgctgcatcagaattcaatactgacaaaaactgcaccatacaaacatcagaacctacaaatgcattattacattctatttaaaaaaagaaacaaaaaataaaaagactaagaactagattatcaattatgtacagatagctganaatgctagtattaatgcttgttgtaactcactgctgacggtccttgtgtgaaaataagccaatcatttctgaaaattgattacaggtacgagaaannggatttggagtatattatgaat

SEQ ID NO: 82939 - DNA, 492 bp, Glycine max
  unsure (1)..(492): unsure at all n locations
agcttaacagagattatcatgcaaaagtgtcatctttggagactattacgaatgtagtatcatattatccaagcatcttagaagaaacattctcatttgcaatgaattaaccaagaaaaggaaatataatgataattagatgattccatcgaagctctacagcccctggctagtcaagtgatatacctaatgtacttgatggtgttgttctntgtctttgctacaaatgtcttcaaataactgcaataatattaaaaaaaattataggtctggataactaacctgtgcatcacttactttctcaattaattccatatttctctgaatgcaagcagcatcaccacttgaacgattactagcagcattattttctgcagtggcttcaaccttctgttgtgcaacactctcatcttgtggaccattaatgcctgtggttgactgacagagaaaatatattataaattaaaattcaatcagttgtcaataatatat

SEQ ID NO: 82940 - DNA, 482 bp, Glycine max
  unsure (1)..(482): unsure at all n locations
agctngaagacaagactatacgaggtatcttccttgggtatagcaatatctctaagggctaccgtgtctacaacttgcaaactaagaaactcgtcatcagtcgagatgttgaagttgatgaatatgcttcatggaattgggatgaagaaaaagtggagaagaacgttcttatactcgttcaactacctcaagaagaagatgaggaagaaaacccaggtgaaccaccttcacctccatcacaacaacaagaagagatggagtatccatacagaaaaatttgcaccagtagctcgtcttaataagacaaagctcaactctgatggcaccatacagaaacacaaggcgaggctagtagctaacggttacttacagcaacccggaattgactacaatgagacatttgcaccagtagctcgtcttgataccataagagctctaatagctcttgtgcacataaaggatggagtatccatcaactagat

SEQ ID NO: 82941 - DNA, 456 bp, Glycine max
agcttcctagagaagattcctagagaatctagagcttagctatacacacccctctaatagcaaagctcacctccttgagatgagaagctagagcttagctacacacacaccccctataatatgtaagttcaccccatgccaaaatacatgaaaatacaaaaaagtctctactataaagactactcaaaatgtcctgaaatataaggctaaaaccctatactactagaatggccaaaatacaaagcccaaaagatggaaaaacctattctaatatttacaaagaagagtggacctaaccttggcccatgggctcagaaatctaccctgaggttcatgagaaccctagggccttctttaacagctctagctcaatcctcttggaatcttctatccaatacccttaaagggtaggatagcatcacgtggcggtggtggtgacagagataaatgtggtat

SEQ ID NO: 82942 - DNA, 327 bp, Glycine max
actgtactgcacaacatagaatcaaagtgctgactttttgaccaagacacttccaatagccaaatttgaatacttgagacaaacgcttggagttcgcagctccacagataagatgtgactgatgaaactgtctaacaaactatacgcgataagagatttatgctagttcttaggaaaaataaaaattatgttgactgatcagatgaagcagctctgatcttgtttattaggcgtgatctgttagtggagttatctcatggttagcatctactatcctttcatgttcttaatatgttgcttcatatcataatagagcaagcttataca

SEQ ID NO: 82943 - DNA, 479 bp, Glycine max
  unsure (1)..(479): unsure at all n locations
agcttgtagaatggctagacatgatacatgtcatggtttggtttggttcaaggataaaagggatgccccacattatttccatgacacaaatgcaaaaatgatgatttggaaactntatgcaaaactggtcatgcatgcacctatgcggacactcaagtgtcaaatttttatggtcatgtgatgctagggctcaggattcgtttcctctattntaatcaacccaatgtttccaaaatatgttcttttatcaatttgtgcattcatccgagtccatttcgggcgtccggngaaatttcacagcattcacccttcaggtgtagacacattttccaaaaattggttatgatcaatgaactttttcaaagaaaagttggaaatcgtctcttttcaaaagcatggctgtgtttagctagacaacctaatttttccttntttctaaccttttccttacttgcccttcttcccctatatgccctctt

SEQ ID NO: 82944 - DNA, 465 bp, Glycine max
  unsure (1)..(465): unsure at all n locations
agcttggtcctgcaattntccaattaactatgtgtcttgagaaagtgctcgcaagcttctgagagtcacgctctcagacacgacgccagtttttgttgacaaggtgtttgattagatgcttttgaagattctgaagactgtgacttattgctttcagccttttacgcttgatttgatgattataagcatatgttcatagtggctaagtcttcttttagcttctgccatgaatgagtaagctttgatcgttgctgattcacaaattgtttgcgaaacattctcattgaagacaaattttgtaattcttctatctcgttgatgtaaagttatgcacatgatgcgtaagcattgtttaagctnttgccatggatggttaagcattaaattgtttattattttctgtctttaatgattaagcgttgactttagctgcttgctcttgatggtaagccttcgtacttctac

SEQ ID NO: 82945 - DNA, 474 bp, Glycine max
agctcggtggatcacagcagctatgacatcttctatttgttcctcctttcacagtttccaccagtaacttgtagtattatccaactatccaagtatccttaaaggacagcttccacactttagtatcggttacatcatttaaccaaactaatactttgattttgtaattgaaaaacattttatttgtgtcaccaaaatcggggtctattaaccataatggcattgtagttatctgttctcaaactctcatccgtataaagaacgcgtttttatggtccatgatgacgcttggtagagcttatggttattaagtgctcatagcaagtttttcgcttctaaatgccaccttctctgtgctgttgggtagttttccatgtcagtgtctcattataaaagaaggctctcttgcgtgggtgaacttgaatctctggacatatatactcgccagcttaatccccaaggcatatttcacat

SEQ ID NO: 82946 - DNA, 466 bp, Glycine max
  unsure (1)..(466): unsure at all n locations
ctcgtccgtgatccttaagcacctgcggctgcagctggatttctttagtagggaatctatccttcctattatggagccaaacccagtcaccctcattaagaactagctttttccttcctctattgcctgtagttgaatacacctttgtttggttctctatttcattcttacccctctcatgcaacttctttacagactctgacctagattccctctgttnttgtattaaagaactgtccattgagaggggaatgaggtctaatggtgttaggggattaaacccatagacaacttcaaaaggggactgcttggtggatctatgaacccccctgttataggcaaattatacatgaggaagatactcatcccaagacttatggttgcctttcagaagagcctttgatagggtggacaaagacctattcacttcctctattgtcccatcagtttgtcgatgacaagtggt

SEQ ID NO: 82947 - DNA, 464 bp, Glycine max
  unsure (1)..(464): unsure at all n locations
agcttccattgttcaatttcgagtgtctcgatatattatgcgcctgaatcggacctccgaatgaaaagttatgaccatttgaatttctcgagagctacctttgttcaatttcgagcgtctcgatatattatgcgcctgaatcggacctccgagtgaaaagttatgaccanttgaatttctcgagagcttccgatgttcaatttcgagcgtcttgatatactatgcgactgaatctgacctccgagcgaaaagttatgaccattttaatttctcaagagcttccgttgttcaattttgagcgtctctatctgtgatgcgcctgaatcagacatccgagtgaaaagttatgaaccattgaatttctcgagagcttccgttgttcaattttgagcgtctcgatatattatgcgcctgaatctgacctccgagtgatatagtatgaccatttgaattgctcaagaagc

SEQ ID NO: 82948 - DNA, 496 bp, Glycine max
  unsure (1)..(496): unsure at all n locations
agctntntcgaagtccactttanacaccgagctatatttcttttgcctcctagcctcctcaacaacctcactagcaatcaagactccatgtaacagctgtctacccttaacaaatgctgactgtctttcatcaacaagttgatccagaaccttacttagcctattagataggattttagcaataatcttgtatacacttcctatgagggatatgggtctgaagtgactaataatttgaggatccttgatcttaggaataagagcaatgaatgaagaattgaggcccttaggaaaagcagcattcacatgaaattctgctagaaatcttaagaaatcaggtttcagctctttccaaaagtgcttgataaatctaaaattaagcccatcaggccctgtgcttttgtcattgccacatgcccacactgtagaatatatctcctcctctttaaatggctccaccatcaaatccctctgaatgggtgcangacattaaaag

SEQ ID NO: 82949 - DNA, 451 bp, Glycine max
  unsure (1)..(451): unsure at all n locations
tagcttattcttgctaccaataggtgatcttatatatgtgcacggagctgactcactacgtgctgatcacttgttatggccatgcatatgaatatgatagcaggccaggcactcctacccctctagggtgatgcattgaggacttccctacgatgcctgcagagatgcagaataggaccctatcgtgctcatgaccctctaggactattattagctcctgggctgagcctgatctcacttatctttgttcatattanaccaagatctccttaattttggccacctgctttacgagctctatgaagaggtctcgtccatacacactatgatattatacccttgactaactgccatctgctgctctgtaaatggaccgtttgaacatacatgctgtatgacttctgagtggtgcagagagatctgtctctgcagaagactgccattactgtga

SEQ ID NO: 82950 - DNA, 477 bp, Glycine max
  unsure (1)..(477): unsure at all n locations
agctngngatacgcctagactnttatatgaatatttgtttgtggcataacaagttcctacaaaccaagctattatgcacgttaacgttcacgttcaccaatccattgattcactctaatactaggtagttttccgatttcctgcccgacacgttgacgcgcatgctcaaaacccacgaggatccgttacctttntcttccgttgtgataatgtttcggcctctcattggtttttcaggcacgtgggaaggagattattggattgggaaaatgattgaaagatacagacccatgtgctntgaatggaaaattaaatgttcgacagtggtatgcctaaagagactngttttttcttggaataccatcggtcatggctatcaatggcttttataagtgcatgtatgcagccatccatattggattttggttgacatgggatggcaatgcttccaataatcattaatcaaatcattattac

SEQ ID NO: 82951 - DNA, 488 bp, Glycine max
  unsure (1)..(488): unsure at all n locations
agcttagacatggtgcaagaaatattntaagattgcacttcttctttctgaattatatttcaaattgcataggatggctatttgagtctttactgtattatacaacaaagccattaaaattcctcacatagttacactacaaaacttggggcattgctgcatttttcctcaattatagtatctatttctttgtttactgactcaaacatcactatcctgacagagttttatgtagaatttgttcaaacattattgtctggtcattcctcaattgcctcagtgcaattagttntcttacagtgctgtccatctgattttaaactgaatctatttaaattatttaaattgattntgaaatctccatttccttttacagggaatacattaaatgccttcctactgctgatgtattatcaggtgctggcttttcttttctgaatgtatgcttatttcaatcataaatcataatgtgcatgtaaagaatttct

SEQ ID NO: 82952 - DNA, 460 bp, Glycine max
  unsure (1)..(460): unsure at all n locations
agctntccgatatatatattgccccacctagtctagtattgttatnatagnnncgatcatacttttcctcaatgcactgattcttctttgaggttgtagctttttctctcccttcataagccaagaaatatgtaatataagagagttatcggtaaggatatcaacatgccaaagataaccctgcaaagaaaaaatacaaagagcaaatgttaatatgaatgttaatctatacttgcattggttatgaaaggtaatatgaaagcaatatcttacatcgtgaataacgaaaataacattaacttgacttaatctgacctaaaggatcactagacaggtagtctacatatttatgcatcaaatggtggggttgaaagccgagcaagatcaagttttgctagacagcattctctaggttttcagtatcaagaacactctcgcctactaatgattacctgataac

SEQ ID NO: 82953 - DNA, 389 bp, Glycine max
  unsure (1)..(389): unsure at all n locations
gcttcattgcctaataagccttcttcttcagtaagccccaagagactcagcataaggatgcacagaccaaagttacgtatgtgaaaagattgtatgaccaagtgaaggtgcaaatngcaaagaagaatgaaagctatgtctagcaagcccacaagaataggaaggaagtggtacttgaacacggtgatgatcctgaacatttgaggacaaatggtttccaagaaggagggaatgatgagaattatgaaactggccatatacaggctataggcctcagtggagaatgacgaatgcccaagtggagaatgacaaatcccccgagtggagaaagatgaacgcccatattgagatagatgaatgcccataggcatagacactctcaagactat

SEQ ID NO: 82954 - DNA, 485 bp, Glycine max
  unsure (1)..(485): unsure at all n locations
agcttgaacatgacaccnggtgatagtgcattttaatattgaagcactactttgttctaacataacgcatgagaaataaaaataactatacaaactgggagtcttagccaccaaatgtgatattctatgttaccccacactgcttgtttgaaatagaggatagttaaaaatataaaaacaattgcttcttataaaatagcatacctcaagcaaggtgtcaatgtaagaatcaaactaattattatgggccatggtcacctacataacctcggatcatcatgattatttgattgaaaactgaaatatcaagaatagatggatgaactcttttgatttggtttcccttcaagatgctctcaanatttcaatgatcacgatgntttagttggtgttaacactttggaatcatgactacaaanaagtaacatattattatcctaatttagaatacggcctggacttganttatcttcaccaatagataa

SEQ ID NO: 82955 - DNA, 441 bp, Glycine max
  unsure (1)..(441): unsure at all n locations
agcttgtcctngtgttagacatgatttatacattattttctacttgtaggattcaatttgcgcaaaattggacgagggcaagtgtgatttcgaaaatctgcactattatgcaaaattttgctgttgaaatgtgcagcagaattttggctttgtgcagaaaatgatgtgtatttgctggttgtggaaagagtagttcagattgtgttctggacagtttctagcagatcccaacagtcaaaatgtagacttatgtactagggacctccagttaaattttcgagtcgatccaacggtgaacgaattggaacgaagagaatgttactggagtatgtgagtaaggaaagatgcggtattggtttgtggtttgcgcacatatttctgcctccgcccaattttcttgttttgatagcgcatgatgtttggatgactgattgcttgatg

SEQ ID NO: 82956 - DNA, 445 bp, Glycine max
  unsure (1)..(445): unsure at all n locations
agctntactcagcgttgggttgatccagtttcatacacttttaattcccaacttagttgtattttagcgtacaaggatcacctgtgtgttcttttggaatttaacgtttaattattctgtggaagatgatactttgattacaacatcaataacctcatcgcatcccatatccctaagcaataattagttagacaacataattaagaagataaatagataatatgtttgatattacacacacacagttgtttactaacttactactgctaacttaaaaccaataattttttttttctatcaaacttcaatcatatatttgagtgaatcataaggcatggcattnntctaattttttaggggactttcagggtacaatggcttccaacatctcgccttctgcccttgataagaacaggtaggtgttcttttctcttgctcatatttt

SEQ ID NO: 82957 - DNA, 490 bp, Glycine max
  unsure (1)..(490): unsure at all n locations
agcttcctcgtggcttctnnttgaagctntcttttatgcttctttgagaaggtaacactttaactactaacacccttttaataactaaactcacctatttgaaaataattacggataaaataatacaccaaatataatcaaccatcaaacataattactaataatatatagatatatatatatatcagggtgttataactcacacatgcacctgagtcaaatgttatggccgtttgaatttgccgagagcttccgtgaaaatttcgagcgtctcgacatattatgcacctcaatcagacatccgaatgaaatgttatgaccatttcaatttctcgaaagcctatattgctctttttcgagcctctcgatatatcatgggcctcacacatacacccgagtcaaaagttatggccatttgaatttttcgagagcttccgtgttcaagtttgaccgtctcgatatattatgaacctcaatcggacatccaagt

SEQ ID NO: 82958 - DNA, 484 bp, Glycine max
  unsure (1)..(484): unsure at all n locations
agcttttatgaaaggatgtgactattcacaatttaatttgaattccaacgttcagatacactggtaatcgattaccaatatcttgtaattgattacaccattttgaaatcaattggaacgttgcaaattcagttaaaaacttttgaaatcaaactttgccactggtaatcgattacaggaaactggtaatcgattactagagagtaaaaactctggtaacttagaaattttttgagaaaaactcttttgaaaaacaaaactgtgctatgttgtttttggaaaaatcttttcaatacttcccttgtgaagtcttcttgatttcttctcttgaatcttgaattcatcttctcttgaatcttgaaatcaatcttctcttgattcttgaaatcaatcttctcttgattcttgaatcttcttgatttcttctcatgaaactttgaaataaactngatctttgaacttgtgactcattctngaaatcatt

SEQ ID NO: 82959 - DNA, 348 bp, Glycine max
agcttgcattcagtgccataagaatacatatgtttatactgaactgtttgtgtgcccatgtggcaagcataatgatcgagttgtgcttacgtctttgtttccttttaaacttctgggcactatattatcgttgaattacttttatccttaacgctatatatatgtttccagatatagacgtgaagtgatggtcacattataagatgaaagtcctaatttctctgtggatcatgaatgcactaaatgattggcagtcagctatgaagtctaaccctccacgataagttgtgtctatatttcaaatacacattgaatcatgggatatctttaatttattgtgttttcctg

SEQ ID NO: 82960 - DNA, 470 bp, Glycine max
  unsure (1)..(470): unsure at all n locations
agctntcataggtganatcaggtgcagtcattttctttagagtcctctcacgaggtggaggttgtgccatgttctcagaatgtgcaaaatcagaatgctcagaatcagaatgctcaaaattataatgctcaagatcaggatgttcaaaatcaccaataacagaatgcacagattcaccagttatggaatgctcagaatgatcaaaaggtaaaaaatgatgcctaactaatctatgaaatgtcctatctatctcaggatcaaagggttgtaagtcagatggattgcctctagtcatacactacattcagcatgcacacaactagttgccttgtcatgtaaataaaggtgtaggtttgaactacagctaccctcaaatgatatccaaatgactngaaattntgtgagcaaccttataaaatgatgagaagatagcacanaanattntagacaaaaatgcanagtctaactat

SEQ ID NO: 82961 - DNA, 487 bp, Glycine max
  unsure (1)..(487): unsure at all n locations
agcttgtctcagcgtttatgcgagacagagacttacatgttagctatcatcgccaagtaccaagaagagttaggtctagccacggcccacgagcatagaatcgcagatgagtatgcccaagtgtatgcggaaaaagaggctagaggaagggtgatcgactctttacaccaagaggcaaccatgtggatggatcggtttgctcttaccttgaacgggagtcaagaacttccccgattgttatccaaggccaaggcgatggcagacacctactccgcccccgaagagattcatgggcttctcggctattgtcagcatatgatagacttaatggcccacataattagaaatcgttaggaaacttgtatggtctctcagaccttgactagatacgaacttccttttgaaataaaatgagttggtcccatgttttactccaaaaaaaaaaactggtgcagatcanatcactcctacatttcatctctagcat

SEQ ID NO: 82962 - DNA, 405 bp, Glycine max
  unsure (1)..(405): unsure at all n locations
tttattgcgtgaccacagagtggtacctggagatatgtcgcggnggtcaggagaccttggggacgtcaggtggggtgctattgcccaaaaccaagcttgagcaatcccgacccaacccgggcatagtcagtcagagagaacctgtgatgtacctaagcaggcgagctcctggcagtcaacagataaaaggaactaagaccacaaagcaaggaggcttgtgtggtggctggccagctgtgaactgtgaatgatatatgggatatggcctctggtaatcgattaccaagggtgggtaatcgattacaatgcttanaaatgaagacaggaggctaagatggtctctggtaatcgattaccaaggtggtgtaatcaattaccaggcttganaacgaagtcaggaagcta

SEQ ID NO: 82963 - DNA, 422 bp, Glycine max
  unsure (1)..(422): unsure at all n locations
tctagataagataagataagatctagattaaataatatctatatgagatcaaatctaaatgatatctagataagataaagataagataagatctaattntgtagaataaaatagtctgccctcttcaagtccaagcccaattctggattcaagcccaatgcttcattaattcctgaaattagattaacagcatcagattagcttaatgggcccaaataataaaattgcctaattaatttgacaattaagattaatcagtacttaaaatggtgcacaaatgggtaagaaataggagaaaataatggcacattagcgggcaaagcacgcttaacgccatgaagtatgcagaagttcggatcgtgaacgcgcgcttagtgcgagattactgccatactcactaagtgggctatcgtgctagcgcg

SEQ ID NO: 82964 - DNA, 478 bp, Glycine max
  unsure (1)..(478): unsure at all n locations
agcttgtagggntaaagactcacgattgtcatgtgctcatgcaacaattgttagccgtggctatacgagacatcttgccaaacaaagtcaggttaacgataactcgcctgtgctttttcttccatgctatatgtagcaaagtcattgatccagtcatgtttgatgagttggaaaatgaggccacaattatattgtgctagttggagatgtattatccctctgctctctttgacatcatgattcacttgattgtgcatctggtcagagaaatcaaatgttgtggtcctgtttatctacggtggatgtccccggttgagcgatacatgaagatcttaaaagggtatacaaagaatctatatcgtccagaagcatctattgttgagaggtacattgcagaagaagcacattgaatttgttcataatacttagagaaggctaaacctgtngggctttctgagtctcggcatgatgacagagt

SEQ ID NO: 82965 - DNA, 370 bp, Glycine max
  unsure (1)..(370): unsure at all n locations
gctcccaggatactctggagccgacctgcctgcgtgcacgctncaacacatgagcatgtttttgtttttgttagagacgctttggttgaagatactttcttgatgtcagacattcgctctatctaatatcggttgtgactctaacgcatatgaggctatctttgaaaagctacatgctcgtgaacggcatctgattgaaacattacgtgatattcgttacggatgattaatacttctatgacacatgcaccactattattaaccactgtattttgtcacttgaggacatgtgatctgatctttctttgcttgaagacaagtctacactgaacatcagccgggagtgtgatcgtcatcttataccactaac

SEQ ID NO: 82966 - DNA, 485 bp, Glycine max
  unsure (1)..(485): unsure at all n locations
agcttctagccaaatggacttaccttgaattaattcctttgatatcccttntgagccttgtttccctttccttgttttgaagctcactacaagccttaagtgaaaaaccatgatattaccatatccttaaggaattttggagctttggaattgttttgggaataagtgtggggggtttttgtttcattggacaacttgttttgttggctatgcttcatgatgtattttgggccatacttgatgtacattgtatattggttaaatgttggacatgctgaatgaaatgtcgtttctcanaggctaaagagtgaaaaataacaaaaataaaaacaataaaatataaattcgaanaaagaaaaagacaagcaataaagttgagtgaataagatcttatatggcacaagaatcatgaaactcttgattctactcttcatgtntaanntttatctttacttcnttttaatttcttaaattttttttcttaa

SEQ ID NO: 82967 - DNA, 478 bp, Glycine max
  unsure (1)..(478): unsure at all n locations
agctntaacccttcttaccactagctacaaaggatgcttacacacttactctctagatgactccactaatatcacatctcatggttgaaaccaaaatctagtgctagaggttgaggatcaaagtcctacaagtttctaacttggtttggtaaaaaacaaaggcttgacatcatcacacaattgtgggtgttctcgacaagaacatctcatactcccttattaacacaacgttaccctaccagcaaactagcagatggaaacctctaagataaggattggctganaaaaaacaacgaatgatcatggataaaacttcgccaagaagaaaagaagatacaaccaagaaacagaaacatgcatatgttcattgaaacgaaactcatttgagaacaaggatgatgaactttntaatgcaatcatgaaactttatcatacccttaaacatccatgttataatcaaagaaatatggcacaacac

SEQ ID NO: 82968 - DNA, 486 bp, Glycine max
  unsure (1)..(486): unsure at all n locations
agcttgngatacgaaacacatcaagaagatattgttcgccatgggagaaacagtggatgtggacgatgatgtcgaggaaaaacggaggctggataaagcaagggtgctcattaagaccccatggaggcctacaatccagcataccgtcaacgtccacatcgacggcaaaacgttcaaggtgtaagtggtcaaggagtgtggtgacgacagccacgactgccatagaagatgatgcagcttcatgggatcgtcggaggagatcgactcctacgaaagatacctcggcattctctctccaagaccgacaacctcgatggagaacaaaggtgacatgcacgacctggtggcatcggaatcgctaactgcaccatgcaggaccacccncaatcccatcgccgacaacgacgaccacgggataaccttattaaccagtggtcaaagtgagtgtaactacccactgggtaatagcaatagtccgcggacact

SEQ ID NO: 82969 - DNA, 430 bp, Glycine max
  unsure (1)..(430): unsure at all n locations
acgctttgttagtagtcacttagtctgattcatganaaatttagaaattcagcttactaattatactttgagttntgatctaaataaacctatttgggagtcctaagctctctcttagttattggcttttacttgctgtaaagctcatggtctttttgaaggggtttcccttacagagatgtttaggactgggtaacttaattgattcttttttgtcatcttttcttggttgaattttccaatctattgtaatcttctctttttatctcaaccaacttcctctattataaatataatttttggttgggtcttgagttgactaacacatgatcactagctgtgcgtaatccagatagtaaaaatcanatatatatgtgatttctactatctgagaagntgcgtccagatttttttcttcgcaggtcatcta

SEQ ID NO: 82970 - DNA, 484 bp, Glycine max
  unsure (1)..(484): unsure at all n locations
agcttcacanagcaagtagaatactatatttgatggaagaaaaatggaagaaaatggtggagaatgtctcctccagcctctcaaccctaaatctccctacttctcatgaaactaagctccttttgctgctctctatcggttctctcttgaaatttcaccaacttcagtgttttaaaggctcttggactcttcagcttctgaaggctcgctcaacgagccctctgtcgcaacctacccttcggcgggagggcgacgcgaggctcacgggtgcgtcttccgagggaggaaaacacatggagtcgccaccaacatttgtttgaggaaaacgtcgggaaaaccaaaatgtggtctacgaactttaagtgtgaaaggttcaggagttgtttttacgcacggngaagggattagcaccccacgcgtctgcgctgaggaatgacaacctttaattaaatgtgcaacatcatgaattntaactggttttatt

SEQ ID NO: 82971 - DNA, 466 bp, Glycine max
  unsure (1)..(466): unsure at all n locations
agcttctacagtctcattccaaatgtccttaatcatgagaaagacatttctaatgttttgtcttctgccttagatgcttccaaaaaccctntgagttcatgaaagccaaccattttccactttgagcaagtcaacaagaccatcccaataaactttataaatatgcatgttcaagtaaaaccaaaaccaaaacgaaaccagaacatccagctaatgttcaagtttaagcaaaatccaaacacaaaaacaagagacaaggaaactaaaaaaaaaagggtacaaaaacaataagacaacaacgaagtttgaagtatagacaaaagacaaaacaaatcatcctcatccccgaaacacagattcacccgtataacaggcacagtgatctttatcaactacaaacaagtcttcccattcacctccttagatatgcaaatgtcagcatccttctcanaccctactcagatca

SEQ ID NO: 82972 - DNA, 467 bp, Glycine max
  unsure (1)..(467): unsure at all n locations
agcttagctccttatctgacaaggctcttattattgaagagtatccttgtggaaccttcacacccgacgaagacactgagaaaaacttatcttctcctttntggacaaagcatggcaagctgggggcaagtaaattttgttaccatcagaccttggatgcaattgtgatcgtatccccatatcaactagatcttgacgggtattcaagccatccttcgtcttgccttgaatgttaagaagcgtccctatcacactgtcacatacattnttctccacatgcataacatcaatacaatgtctaacatctagatcagaccagtacggaagatcaaagaaaatggacctcttcttccatatgcaactcttactnttatccttctttngggtctttccaaatacagtattcaggtggtgaacccggtggtatacctgctcaccagtcaacggtatgggtgcaatatcatgct

SEQ ID NO: 82973 - DNA, 479 bp, Glycine max
  unsure (1)..(479): unsure at all n locations
agctaggactactatatttatggatggttcttttcttgaatctaatccttacaattgtttataaaaatttctatccaatagttgctatgctaacttggtaataaatttgctcagattcaacaagacgcacattattaggttgggctaagcgattcgaaattattggtggaattgctcgaggacttctatatcttcatcaagactctagactaaaaatcattcatagggatctcaagactggtaatgttcttctcgatagtaatatgaacccaaaaatatcagattttggtatggctaggacatttgggctggatcaagatgaagcaaacacaaatagagtgatgggaacatagtaagcttttctataggtagttatttttttatttccccttttacaatggcttctagcttctcatgtggactcctggtnttctatgcagtgagtatatgcctcctgaatatgctgtccatggatcttt

SEQ ID NO: 82974 - DNA, 473 bp, Glycine max
  unsure (1)..(473): unsure at all n locations
agcttgcaatntagtgataattcctaatgtggttgcatctagctttcaaaggtttctagaggtatcatcccctttgatatcaaacattgtggcggtagggactaccagcaacaatgtatcatcaaagagaaaaactctagataaggtttcactatgatcaagcaagtcggagacttagcatgaccacagattcatctccacttcctatgttcccatggacctgagtatagggccctgaacaactcacggtgtgtgcaaaaagtgtaggtgtcgtgggtgcatcaaatgaataaatatttatcaatgcatatattaaataaacaattactaaaagcatcaaagagttatatgcatacaaaaacataagagaaataaagggaaacaaacaaaagagtgagtcatgataaagaaagcacacggattaaaatggcctaactctcttaanacagtccccaatggagccaccaactatc

SEQ ID NO: 82975 - DNA, 441 bp, Glycine max
  unsure (1)..(441): unsure at all n locations
agcttacccctatggctggccttcggacttcactctccgtgccgccccggaagatttaagccaagcccctaccttcgaggggcaactcccaccttatgacgactatcccgggcaagacgatgaggaaggagatacccatctcggcccnctgctccacctcaaagatccatccccccatgaactaccccaaccaaacatagtccgccatatcccggcttcacccacgcccgtaaaagaatctattcccttcgcggaagataagggaaagatcgaggcgcttgaagagaggttaagagcagtcgagggcctcggcaattacccattctcggatttagcggacttatgtctcgtgcccaacctcgtcatccctcccaagttcaaaataccagaacttgataagtacaaagggacgacatgtccaagagggcatctccggatgta

SEQ ID NO: 82976 - DNA, 480 bp, Glycine max
  unsure (1)..(480): unsure at all n locations
agcttgtctatctaggaattttaacattatatatcatcgaccatatatctgctaagaactaaggttctgtctctatgcctagtttaaggataaagtcttctgcagtaaactacctcgtaatttagagctacatgacataatttatcaaattcgattaacaaataaaatattttgagagtaacactttgccttcattattcattttttttcattctctcctttttttctcttaaaaaaatcaatacaccaatagccgacaataattttagaattgcatttggtttgttaaacatcatgatcaatctttgtgatcattgagcgttggttgaaattcgttaagaatatatatatattttttattctattactcatttatttattaatgcaaaatatttatggatcttggttatcacttttaataaattttttttcaaatcaattttntaatattcgcaaaacttaaactctagaatatttatt

SEQ ID NO: 82977 - DNA, 394 bp, Glycine max
  unsure (1)..(394): unsure at all n locations
agcttctgtntcaatatgaacgtctcgatatatacagaacgtaacttgacatccgtgtataaagttattgtcaatacaattntctcagaacttcggatctaaattttgagcgtctcgatatattacgggactcaatcagacatccgagtgaaaagttattgtcgtttgaatatgatacgagcttcctgtttcaatttggagcatctctcgataaaatacgacactctgtcgggcatccgagtaacaagatatcgtctgttgaattttctaagagtcttcgatttcaatttggagcgtctcgatatattacgggactcaatcggacatacgngtataaagtgattgtcattataatttgtcagagctctattctaattttggcggctcgattata

SEQ ID NO: 82978 - DNA, 356 bp, Glycine max
  unsure (1)..(356): unsure at all n locations
ctcaaacaaacaaatcatacgtaacaagacaattatagttgttgtttgaatacctcacccactcaagtgtatcacacaattatgggctttctctaatgaaacgactcttgcctttaccactctaattccccttgagttcttaggcaattcaagagattatggccacaacaaagaacaattcaccaatatgtgtaaggttaggctagagagacaaggaaaaggttaacctaataaaaggctaacaatgttnttatgcacaaatgaaggaaataatattcagaatctatgaattcaagtaacaattcttcatgccacccatatattaccttttaagagatnnttnttaaagtcttcaa

SEQ ID NO: 82979 - DNA, 340 bp, Glycine max
tatagtagggaaagagcacaaaagatgcaatcgtgaaattagaaaagttatttagacttgacgagaagaaagaaatgagattgtttttgttaaacaactcgtccaatttcaatgtttgaaaacttccttcaacagccctaacaactacttccaagctatttaatgagatcaattttaaagagctttgttgcaaggaaggagtgccacaaagagatggtttggtctaagaggtgagtgctcaaaaagatacctcatatatataaaaaaaaccttcttagtcaaaacactctatgttagagcttaaaccttgtcgatccaaaaacaagtgtaaacacgttca

SEQ ID NO: 82980 - DNA, 414 bp, Glycine max
  unsure (1)..(414): unsure at all n locations
agcttatggcggcgaagggttagctatcaatctctaatcatgttgatgttggtgcttatgaacattgtatccttggaaagcagaaaaaggtcattttctcaagggtagggaagactctgaaagctgaaaagctagaattngtgcacacagatgtttgggggccagccccagtgaaatctgttggaaactcacgctattatgtcacctttatcgacgactctaccagaaaggtatgggtttattttcttaaaaataaatctgatgttgtttctgtgtttaaaaggtggaaaacagaagttgaaaatcagacaggtctaaaggataataatctgatatctgacaatggtggggagtatgatagtcaggagtttaaagacttctgctcataacatgggatcacaatgatcaagacaa

SEQ ID NO: 82981 - DNA, 339 bp, Glycine max
tttatatgatggatagatattaaatattatgaatagcctatcaatcttaattaaggctctatttgccatcataattttttaatcggaaaaatcaaattcaagaacttaccatagaattttgaacctcatttcactcacttagagcactataatggtagtggaactttattactcaagttactaagggggaaaatacaattttgatggaaaaacagtatttaatacacttatgacaatatacctaagctttgcttttacatgattcaaatacctagttttctcatcttttccattttcaatcaatttaaccataaactccagtagccatattaaacactt

SEQ ID NO: 82982 - DNA, 364 bp, Glycine max
  unsure (1)..(364): unsure at all n locations
ctgatcatcatatggattattcaaccaaaacaattcaagttaaagcacactcttagaactactgttaatcatatacattatgtatcattaccgtagaaattttgaaataatccaagagtccaattgttcagaagtttttgatggccatcanaggcctatanatangtgacttgngatacgaaattccttcatagttttctgaacaacattgtcttatcctctcaaaaccaaattgtcttatcactctcaaaatattcattggccaaaatacttgcanattcaataagaaatcttgatcgatcttcaattntaatatccttctcttanagagagaaaatcttcttcttctattcaanagatctgt

SEQ ID NO: 82983 - DNA, 431 bp, Glycine max
tagggggagaggtgaagggaaaaaatgttcagccctcctggtaattcaagatcacttgaaattagtgaaacaaattggttccgtgaagataatccaagccaaggcgcttccgtaacgtttctgcgggtgatttcgcgaagattttcaaccgttcttcgacgttcttcgttcggtcttcggcgtcttcggtcttcacccggtaagttcctgaaatcgaacttttcaattcattatatgcacccttggtggacctcatttgtttcgtgtacttttattctcggttcatttactcttccgacccccttttgacgtgtattagtcatttgcttaagtcattttctcgcctaatcaacaaatagaatacatttccaccgatcatttgaattgtaacatccgttaatttctgttaaaatgagatctgactgttcagt

SEQ ID NO: 82984 - DNA, 327 bp, Glycine max
tttgtgtgattatactctcgtttcaataggtgtttgtttataaatgaggcacggctgcggagtcgcatacaaattttatggcagttctcacacataaataaatatttggcacctgatgtgacccgacagaagagtatttctactataaagttaactaagcactcggtaatgactggcttttattttctattcatatggacctccctattcacacaatcagagttgtcatcatgaccttgaatttgtatatttttttaatcactctcattattgtcattccacccttcttttattgtatagttcggatatcagatctgtgcaataaat

SEQ ID NO: 82985 - DNA, 416 bp, Glycine max
  unsure (1)..(416): unsure at all n locations
cgtnagaagttcanacgataataacttttntctatgatgtccgattaaatcgggtaatatatcgggaccgctcataatgagacttaaacctctaagaaanatgaaacgacaataactttatacacggatttccgacagattgccgtaatatatcgagacgctctaaattgaaaaaagaatctcgtaagaaaattgaacgacaatattgttttactcagatgtccgattgagtcccgtaatataaaaagacgctcgaaattgagagcagaagctctgagaaatttcaaacgacaataactttatactcgaatgtcctcttgagacccgtaatatatcgagatgctccaaattgaaaacggaaactcgtggcgaatttaaacgacaattaatatatacacagatgtccgattgagtcc

SEQ ID NO: 82986 - DNA, 349 bp, Glycine max
  unsure (1)..(349): unsure at all n locations
aataatatatgcagcaaattgaacttggccattatgttataccttggcattgaactttgtatctaaaagaacattagaagatttcagatctctatggatcaccggagggtaacagtgctcatgcagatantttaatcccctgcttgacattaatcaaatagcatgttaacaaagagacaattaaccaaataaaaaatgctaataatacactctctaacacactttattattggctgaaaattattaaatgtcactgagttataagactcgttaaataagtagtacgagatattattttgtgactctcaataagtctcaattaataataaggaatatgttaaaaagagta

SEQ ID NO: 82987 - DNA, 434 bp, Glycine max
gtggggaaaataacatgtagtacttaaccaataatcattttttgtcatttttttttcttgaaaagtggtacttttttattttcttatatctatctttctccatttaaaaatgactttttctttaaactattctattttttctttcttacactaaaaattgatagaaatctttttattgaccttttttttttgcaggcatgaattgattattaatagcatgttatttgagaagaaagaagatcaacatgcatgtgttctctaccaagaggaagttataacttaaaagtatcatagagctataaaaggaagtaaaattttgaacaaaaagcttccagaattatgcaaacatattagatgaaaaatcacaagagttcataattccttcttgtcacaacctaccctttggtgggagggcgacacgaggctcacgggtg

SEQ ID NO: 82988 - DNA, 275 bp, Glycine max
  unsure (1)..(275): unsure at all n locations
caacaagttttccacatccacaatgcgcgcataaacccaccatccnctgttgcccacctncaactgagctcacgtactcncacgtagcccatatcctcgtttctctcaacaccgggtccccatcaatccttccaagctntcacaacatccaagcaaaacaacattcaaacagcacaagctatcacagccaagcaaaacagagcagagggcagaaaactctgcttaacacaccaaccanaatcacagctnttctcacttaaagaccccagtaacaa

SEQ ID NO: 82989 - DNA, 443 bp, Glycine max
taagggaagagaggaatgcacactcgatttatattggtttgtccacttcccgtgcctacgtccagtcctcaagcaacccacttgagattttccactctctttgtgaaaattccttctacaaagtctgaaccacacagggacaaccctttccttgtgtttcatgaatctctcttcaacaagagacccacggtctcttaatcccttttcataaataagaagaagaaaagaagagatctctcttaaaagagatagattgttcaatgaacatcaatcaatattccttattgaatatgcaagtggttgaccaacgaatctttttgagaaaataagaccagtcagttcagatacactcttaatcttttgaaaggataaaaccttttgggcaatgataacacccctttacatatcttgttcctaatcacctttgatgggtcttcataaac

SEQ ID NO: 82990 - DNA, 396 bp, Glycine max
  unsure (1)..(396): unsure at all n locations
agctntgacttgagtcatcaagaaattataaatatgtgaccttggcatgaaaccaattttttttcatctcaatcatctttttcaatcaatctttcaatattttctttcatctcttttaatagattttttttgattcatcttctcttcatctttctaaaattttttgttcaaaactttctctttcaagaaaagttctttgttcanaaacttgtgatattcatctttttcattctcttctccctttgccaaaaagaattagacaaggactaactgcctgaattctttttgtgtctctcttatcccttttccaaaagaacgaaggactaaccgcctgaattcttttgtgtctcccttctcccttgtcaaagaaattaaaatgacacagtctgagaattc

SEQ ID NO: 82991 - DNA, 377 bp, Glycine max
  unsure (1)..(377): unsure at all n locations
ntagatntcaactaacacaatgtataattgcaagcatagaataacatgattctttctatatgatgcttcgtactagcggatataaaattacaatctgaccttttcataatactttttgtggtcattgatacatctaatagcagtgtgcaatgccttctgaaagtcagtggatgcattatccaacaattttctgacccaaataaatatatacacatatcaagtatttatcttttaattttttgatcacacatgaagagaacaatcaagagagtgaacttttttcttgtgtaccttagttatagaagcgccatggtcatctctgtagcgggtgaaagttgccacaaattgggtcttgctccttgtagtaaggatcctga

SEQ ID NO: 82992 - DNA, 448 bp, Glycine max
  unsure (1)..(448): unsure at all n locations
tcttacatagtctgcctttgcttgaccttctttatgcttaataacagaaacattaggcataggcaaaagatcaagaggagttagtgggttaaaaccataaacaacttcaaaaggagaacaattagtggtgctatgaacagctctattgtaagcaaattcaacatggggtaaacaagcttcccaagtttttaagttcttcctcaaaactgtcctaagcaaagttcccaaagtcctattaacaacttccgtttgcccatcggtttgtgggtgacaagtggttgaaaataacaatttagtgcccaacttgctccacanagtcctccaaaaatggcttaagaacttagagtccctatcactaacaatgcttcttggcaaaccatggagtctcacaatctccttgaataacaaatcagccacatgggaagcatcatcaacttttttacatgga

SEQ ID NO: 82993 - DNA, 361 bp, Glycine max
gagtcacctgcggcatgcaagcttctagatgagttatgtctgcgaatcggacatcctgtgataagttatgactcattgagattctcgagtgctgtcgttggttaatttcaagcgtctcgatattatatgttctcacatcagacattggagcgaaatgttatgaccatccgaatatgtcgagagcttcccgttctcaatatcgagcgtctagatgatgtatgtcaccggatcagacatttgagtgagatgttatgaccattcgaatttgtcgagaggcttccgttgttcaatttcgaacggctagatgagttatgtcaccgaatcggacttgctgtgtaaaaggtatgaccattcgactttg

SEQ ID NO: 82994 - DNA, 448 bp, Glycine max
tgtcgattcattctatgtacccgtagtggtccacattgtgtttcgtgcatttttattctcattttgtggactttttataccccctgttgacgtgcttaagccattttacttaagtcatttctcgcttaacttaaaaataaaataaatttccaccgaacgtttgaattgtattatccattaacttcggttaaaataaattccgaccgttcggtcgtgccgtaaccacgttggaagtcaaaaagaggtaaaaaataatataataatcaaaaagacatcttttagtaaaataaagcggaaaatcaatcgaacgttttctctttgggatttctcattcttaatcgaattgattaataactaaagtgaaactaaaggctaaaatcaattcgcctagtcaagctcgtccacaaaaataggcttttgaagtttgtcatttcaatttctcactaag

SEQ ID NO: 82995 - DNA, 299 bp, Glycine max
tcatgacaactagtaaagtcattctgagactgtcattatgaggaacctctttatgaactctctaaaaacatcaaatggtgatctaatgtaactgagaaaagatctatgctgaagcaaatcctcttgatgaagtacaactgatatggctgtctgaaataacatatcttcatcatgcttaacacatctccacacagcattcttaattattttgcatcataaatagaaattgaaggaacagttattattcctgtggtgttctatccaatgttagattgcataatggcttcagtcttccattc

SEQ ID NO: 82996 - DNA, 352 bp, Glycine max
  unsure (1)..(352): unsure at all n locations
cctatcctcttctataaaatttcagatgatccaatattctcatggntcattgtctttccaccacatatttatgatgaaatagaccaattagtcttgcatgaacacctgacacgaaagggttttatgaatgattgatttacaaaagacaagaaagttaaggcagaatcagaacaaccacaaccacaaccttcaagttaacaaaacaaacacacagaactgttagttccagtaagagaagaatatagacaactcttgaaggaccttttgttttgggatatcagccctattttcacgggtgacatggccttggttattgttgtccttggaagaaactgcaccttcagttggcatg

SEQ ID NO: 82997 - DNA, 369 bp, Glycine max
  unsure (1)..(369): unsure at all n locations
agcttataccataaacaaacataatgaagctttatatattgatttctggtggaaggagaggctaataaataagaggcaaaatatcaacatatgattcatttcatttcatttgcagagagcaatgatggaaagaaaaacgggtttgttgaataatggtgttagtcgttgtcttactcatgattcagttacagccaatgatgaaaactaagtcactgttcaaaacttcaatcanggattgatgttaattaaatcacactgaattggagggaaagttagatctccaaacacatatcattcctaattgaaatatttgtntgataaagtttctatataaagcaactgggttttcatggtctttatggatgtaac

SEQ ID NO: 82998 - DNA, 434 bp, Glycine max
  unsure (1)..(434): unsure at all n locations
ctcagcttcatcggtcgtctccacgagcatggtcatcaacgttcttcagacagaataatcataatgaatgggggtggcgggtgttgttttgtaattaaaatcgacaaattgaattaagaaatgcaaattaaacatgtgttccgttgatcacaacagtctttatctatgtacgagaanttatccctaatcagttcaaccacttaatccaaccctaaattaaattactaagcgaaaattaacataaggctatcattatgtgnataagcaacactcacaccaattaatcatgaacgaaacttatccttaagcatgaacgtaaattaagcgtagagacaattaatcaagcactaagcatgcatggattaatagcaacaaatatagagtaattggtgaagaggaanaactaatcagaattcaatagtataacaaaacct

SEQ ID NO: 82999 - DNA, 394 bp, Glycine max
  unsure (1)..(394): unsure at all n locations
agctntctattcaaacctagatatccaagcttgcactttaatttatgaagtntatgggattaagatggtcattgaccaatccctattctatgatttaacccaattgccaagtgaagatgtaccatttgaaggtacattgattgatgattggaagtttgatttttctgtgcatgatgcccgccggtttggttgcaccaaccaagcggatatgaccggaaggcttcttgccggttcattggcttttgaaagctgcatccttcattatctaattgttcgcatcttgcttccaagatcttcaaaccttgcacaggtttctgaagaagatcttattgttatgtgggcttctcataaaggcctacaaattgattgggcacatcttgttagatatcgcatg

SEQ ID NO: 83000 - DNA, 340 bp, Glycine max
  unsure (1)..(340): unsure at all n locations
ngccgccacggagttgtccgactatgctcttatgtggnggaacangctancaaaggagagagcaagaaatgaagagcccatggttgatacattgactgagatgaaaaagatcatgaggaagcggtatgtgccggctagttactccaaggacttgaaattcaagctccaaaactaaccaggcaccaaggggttgaggagtatttcagggaaaggatgtgctcatgattcaagcaaatattgaagaagatgaggaggtaactatggctcgattcttaatggtttgctaatgatatccgcgatattgttgagctgcacgagtttgttgaaatggatgatttgc

SEQ ID NO: 83001 - DNA, 410 bp, Glycine max
  unsure (1)..(410): unsure at all n locations
agcttatcataatcgattacatagttatttttgagacaatgactgatttattcatgagtctctgccttaatcaattaccatgtgatataatcgattacttctctttctataagtggttcagaagtaaacaagaacactttaatcgattactttgagtatctaatcaattatattgttcttgagctgtttctagtttcttggaagaacactntaatcgattaaaaagataatctaatcgattaccttgtagatttaatcgattacaagcggttataaatgttttctctataaataaccacctcgtgttctctctaataacaccacantttgagcttctgaatgagctatgatcacgtgctgttattagtcaagaaagaagagaaaaaagtgcttaaaactgtactcacact

SEQ ID NO: 83002 - DNA, 266 bp, Glycine max
tttacacttggagtgatcacctgcagtccttttgaacccttaacacccactctgtcatcatgccgacacttaagaaggccaaccactttagccctctctaaatattctgaacaaaaatcaatggcctctttctgcaaggacctctcaacaatagatgcttccggacgaaatagaatctttgtatatccctataaaatcttcatgtatcggtcaccgggtatattcaccatagataaacacgaccacaacatttgatttctctgact

SEQ ID NO: 83003 - DNA, 394 bp, Glycine max
  unsure (1)..(394): unsure at all n locations
aaacattgtctatattatactagagtatcanataaacatactagattgcatatgataatacgatannattgacgtttattggctacctntttttttctttgtacaatgggacttacttcactattgagacactaagagaaaatgagaggttcatgctatcaaagtgtgtagagggacccctaccctttcacacttacattntgctgacaacaattttctttttcacaatgctattgaagaagaaacatccactctgatgaaaaatttggatgtgtatggaagggcatccggccaactcattatatttcaaaaaaattaagggatttttcaattccaatatcaagcatgaattacgacataatatcatgttatctcttgggggttctaatcttat

SEQ ID NO: 83004 - DNA, 457 bp, Glycine max
  unsure (1)..(457): unsure at all n locations
tatgggattctctcatctatctgcctacatctagaggaccaaatttgtcatcgcttcttttggtctaagaatggagatagcaagggttggaacattgtacctttgaaagtcctcacaaatccaaaatattataatggattgggcttcagagataccaagacaacanacatatcactcttgggtaagttgatttggaaaattattcatgatgttgaagaaccttgggttcgagttttataacagaaatactcgggtgccaattctatactcaccgtaaattctgcaaggggaccttctcaattttggaacaatattatcaaatatgtgggccaatcttgtgagggatttactatcaatttaggggaaggctcatcctctttcttctactcagaatggatggggtcgggcttgttaaccccttctgggccttacatcccatttggtgataccctattga

SEQ ID NO: 83005 - DNA, 403 bp, Glycine max
  unsure (1)..(403): unsure at all n locations
actatataacaacaccaagggtctagtttatgatctctcttctctttctcctttanttttcgttttggcaattccagttctgactattagttttatcaataaaaattcggtcttcaatctataatttccgtctctattgattaatggagagctaagtccccagcgttgttttctcttgaggatcaagcacagatctctttgagggtctaatattactgttaaattcttgtcagtttttcatcttcactaattactctcgaattgttgctattaattcatgcatgcttagtgcttgattaattgtctctgcgcttaatttaccgtcatgcttaatgatcatttatgagtaatnggngtatgtgtacttaatcacataatgaatgccttantgttaattcactta

SEQ ID NO: 83006 - DNA, 444 bp, Glycine max
  unsure (1)..(444): unsure at all n locations
tctctgtcatagtaagaggaaatgtgcctcttcctaagggcactcttaagatcattcaaatactctactggaggatccccatgaatccttcgttccctaacaagggaagtccaccaatatagggcatacccttgaaagctaagggtagccaatggaaattttctctctttgctaatatgatgacaagcaaagagttgttcaaccttcatttcccaatctaagtagggctcaacattatctttttcatggaaatatgggaggctaatgttaacctcttgaggcccgctatcattttctcttctttgggaatggtgtttagtatgtgaactatggtgtcctctataatagtcgctaagttcttcacttaaactcttgcaagaatcatgattgctatangagacatgattcttccttttcatttctttcattatttttcttcattct

SEQ ID NO: 83007 - DNA, 375 bp, Glycine max
  unsure (1)..(375): unsure at all n locations
tgagtcacctgcggcatgcaagcttgtgcctcaatatcctgatgagagtgttccatatgttctcaagactggactaatacattagctgcccaagtttcatggtcgtgcacgtgaagagtctcataagcatcttaaggagttccatattgttttgtccaccatgaagccctctaatgtccaagaagatcatatctttctaaaggtttntcctcattctctggaaggagtggcaggctgtactatcttgctcccaagtctatttttagctgggatgaccttaagagagtgttgttggagaaattcttccctgcatctaggaccactgccaccagaaaggacattttcggcgttatgaaacttagtggagaaagcttg

SEQ ID NO: 83008 - DNA, 442 bp, Glycine max
  unsure (1)..(442): unsure at all n locations
ngaggaatgcaatggcttgtgttatttgtgttgactgaagaccaagaattgtgtatatatatagtttgtaagattctgtggaaacccaattcccagagaaagtgactgtcaatggatggagggcatacgcatgagatatcacatggtgttgtcttcggtccaactatgaaggataagttgtgaagacttgcgtaaccccaccttatcatacattaattggccagcataaagcctccacatgtaaccaaatgagacgtgcctcagtgaaacgtaacgtctattcaagcattatttggtattccatatttttgtaaacatgctctgggcatgttctggaaggtaatttctggctgatgaattataacgcagcggatagcgagaggtcatatatcattntaattatttctgatgcctgacatctattttatttcacgcgagaaag

SEQ ID NO: 83009 - DNA, 420 bp, Glycine max
  unsure (1)..(420): unsure at all n locations
agcacctgngctgcagctggtacctcttctcactacataataatcgccggttgagctctctgggctgcttactggttaaccccgtcttctanaatacttcgatgcatacatgtggatgggctaatagcaagaatgtccaccagggtccagcctatatccttcttatgcttcttgagaactgataacagctttctccaatgctcatcaacaagggaggcatatataattactggaaaanctttgctatcatccaagtaagcatattttaaatttgatggcagaggcttcaattctggtgtggatggctggatagtggtagaaagaggtggtttctcaacctcgtcctcataaagaaagtcagaagtatgtgtactttcctgaaacatggttagttctatccgaatctattaaagcaatctc

SEQ ID NO: 83010 - DNA, 398 bp, Glycine max
  unsure (1)..(398): unsure at all n locations
tccatcaagaagattcctacagaagctagagagtatctacttatacctctctaatagctaagctcacctccttgaaatgaaaagctagagcttagctacacacccgctataatatcttagttcacccccatgacaaaaaaacatgataatcaaaaaaaaagtcttactacaagactctcaaatgcccgaaaacaaagctaaaaccctatactactagaatggccaaaatacaaggcccaaacgaaggaaaaacctattctaatatttacaaagataagcgggctcatacttagcccatgggctcaaaatataccctaaggctcatgagaaccctaaggtctttccttggatctgttacccaatctactnggaatcttctaacccaatgcccttgcggg

SEQ ID NO: 83011 - DNA, 420 bp, Glycine max
  unsure (1)..(420): unsure at all n locations
ccgcttcttgagaatgccttcggttatctcactagacgctctggttaaatctactatctcattagagacattgaaatagtcgatgaatcttaaggctggcacaacatatggaaacttataatccactaactgatgactcttgaacatgatgtctttaatcaaaagtgtccaattcatttagatatcaaattttagaccatacancaattgtagatcatcgatagntacttgtgcatggttactagaccttggtgtgagaatataggatatcaagtacacgggcattttctcttaacttgtaaaccacctacacctaagtgaatccttatgttccttgctaggtcaaggagcttacctatgtaattttgcatattggtggacgcaaaacaaattcttcanacttgcggactccacccatgt

SEQ ID NO: 83012 - DNA, 384 bp, Glycine max
  unsure (1)..(384): unsure at all n locations
agcttgtgtattcccactgaagaaacatcttatgaagtaaattacatgggaaaccagcctagacaaaattttaatgtaggtggctnttctggatttcaacatggccaaccttaccagcagcagaatcaatggagaactcaccctggtaatcagttcaataaagaccagggtgggccacctaacaggccacaacaacaaaggtctggcttatatgagagaacaacaaagttggaagaaactcttgctcagtttatgcaggtgtcattgactaatcataagagcacagagttagccatcanaaatctagaggtccaggtagggcaactagctaaacagcttgcaaanaatcttctagtacttttggagctaacattgagcataatc

SEQ ID NO: 83013 - DNA, 436 bp, Glycine max
  unsure (1)..(436): unsure at all n locations
gctttacgtgacacttagaaactaagcttgaggcanactggatgcattggttaacttggtaacccatctggccttgaatcaaaaatctgtacctgtcgcaagggtttgtggtttgtgctcctctgctgaccaccatacagacatttgcccttccatgcaacaacctggagcaattgagcagcctgaagcttatgctgcaaatatttacaataaacctcctcaacctcagcagcagaatcaaccacagcagaacaattatgacctctccagcaacagatacaaccctggatggaggaatcaccctaatctcagatggtccagccctcagcaacaacaacagcagcctactccttccttccaaaatgctgctagcccaagcagaccatacatttcttcaccaatccaacaacagcaacaacctcagaagcagtcaaca

SEQ ID NO: 83014 - DNA, 286 bp, Glycine max
actacctagctcttgagtggcactgaaactatcaatggcaaaatcagaccgagagaagtcagcctgattacaaaattccgaaatgcatttttttttactttctcacatactctacaatttataggttaaggttatatacccacattttattttcaaaacttctatccccccccccccttttttttatgagaagtattttatggttcaaatttggaaaaagaacttaattccctttgaggtattttttaccttacgtggagaaagggaaaaattcgtctggttttta

SEQ ID NO: 83015 - DNA, 434 bp, Glycine max
  unsure (1)..(434): unsure at all n locations
ttacaacagaatttagtaatgacccactaacctagaatttatataacttaatgccattaacctanggaattaaanataacttaatggctgagtgtaactgaaattgtggcaaaccacaaagtcaccctccaatagctcaacaaagtcagccaccatttggtctnccaaaatgctgatgcctacgttgccaattgggcccttattacaacttgaactaaacctaacctaaagcccttnttagttgattaacccaaaacatatttttggtcagccaactttacaaggattgggccatttatttagacagactaaacactctaaatttgaaacaaagtggtggcatttagtccctctccatttgggccatgatacaacttacaaccctggacttttctccttgatactgggcttgttttcaaatatatggacagcac

SEQ ID NO: 83016 - DNA, 300 bp, Glycine max
  unsure (1)..(300): unsure at all n locations
cgggctgcagcaaccggctctgctttcctaactgtactggaagcagttgccggtggctntatcctctattggtttctggaggtttaaacatgaccttcgagatggaagccatttgatctcttaaggccgaataatcagccctcattttgtcctgcacgccctcttcttatccatttttcttgatcgagtgtataagggtggcctggtgttttcttattatgatgaaatcctaaaaaaaaaacaacggtgagtattgccaccaaacatgagtttgcataagattatcggagccttggatcc

SEQ ID NO: 83017 - DNA, 429 bp, Glycine max
gcatccctggttctgttgaacaaagtctgtttataattaacctgcttgctagcatgttgtgaaatttacataccattaaagcctttacactttaagtttctattgtttattgtggatctgttttttgaaaaaaaaattacattctaacatcaatctttttttgagatatacctgttttttcttttttatgaaccccaaagagaaggagtttatagagatactagatgtccccaaatacacaaagtcacacttaatataatgaaagggtcagcaagtgggtatgcaacattaatatgcaggtgtgctccttaatgtgaaataattcaatgaacatcctgaaacccttgtataagggagagaaaaacctatttggccccaatcccttcccccaacaagcgttaaataatactatatgtgccccctgtcaaa

SEQ ID NO: 83018 - DNA, 114 bp, Glycine max
accgcgaacatctagaagggagggtgataaatatcgattgagatctagactacatggtgttcagtggggccatcttggtatttcgtttctctatctgcattagtttgcttatgc

SEQ ID NO: 83019 - DNA, 135 bp, Glycine max
  unsure (1)..(135): unsure at all n locations
ctgtcatggatnggtgaaataatangggcgtccccctgatcactatttaaaaaattgatgaaaagtatgaaataaaaaatactttcttctggattttcatgttgattattcctacccaaaagtacaacaaaccta

SEQ ID NO: 83020 - DNA, 424 bp, Glycine max
acttgaagatgccacttctatccaagctcatcttggtggtgtatctccttcttccatggcttactccctagtggatggcgccttctctcacctcttcttctctgtcttctgctgcatcttcatggtggaaaatcaccattaaaggacatcattgaagctcaaagatccagccttcataaaagccccacaagcaagcttccatcatatacatattattttctattacttctttttaatgcaaagctatataaaaaggcatagatattgcattaggtggtacttagtatttatattgttgtctcacttgaccaaattttatatattgttcaccacacaagtaaagtgaaatatatcttcccatgctattgttgggtgtattcaatgtacttttgttccaacatatcacaagtataaagtaaactat

SEQ ID NO: 83021 - DNA, 434 bp, Glycine max
gtccatagaatcttctggtttatccttggaaaaactggaatcagcaatacgctttgcattgttaggctgagttaatccagccactgccttcattcatgtgattatgaatgtttactcatgcttcacttactttctgaccttctggtttgtgattcttgacatcaagaaaaattaaatgctggattgtaatcaacatccctatcttaaaagcttgattttaatcagcatccctatcttaaaaattaaatgcttgatgttaatcagcatccctatccataaattatcaagaaattcatctctctctattcctgttaatacatgttaaaatcaaaagataaagactaaacttgcgcataagatgtaaaagctaaattcactagaaattacccttacctttcgttaagttatcatgtatcagtcatgagagtgaacac

SEQ ID NO: 83022 - DNA, 337 bp, Glycine max
  unsure (1)..(337): unsure at all n locations
actgcggttgatgttcttacttcttagtgacagctctctgttcgtaagcagtaaattataattttataaagcatgattctagttacagcttctgccaaatactcaatttgtagaaaccatccaagttntgtggaactcggaaatattttgttatgtatgtactcttgtttctctttagtataaatttctcttcattttacttctataaaccaaacaacaatttttatcggctctcattctactcacataacctatttctaatctacccaatacaacgtacaagacactttaaaattttagaatgaagaaagacaaattactaataaaaatataccgc

SEQ ID NO: 83023 - DNA, 324 bp, Glycine max
  unsure (1)..(324): unsure at all n locations
gataacttaagtctagnttggtttattctatggtttgacttactctatggatggatttgtgcctatggttttttgttggttgcccttaaccacttnttcttttagacagtntctttggctttttgatgttgtcaaaggcggagagaacaagcggtagaatttatcataaacttangcattatttctaatcttgagggggagtaagggttgtaagcacgcattatacattgtatatcatttatcttggatttagattattgtcatcatacaaaaaacgtgagaatatagaagcaaatatgatattgcagtttatgaaattttgat

SEQ ID NO: 83024 - DNA, 373 bp, Glycine max
cctaaatcatttgcaaatatgcatgtgaattatgaagcatcaacaagaatcaagccaatgctattgtgcaagcaatcaatatggcaaaacacaccaaaagattatgatgatggatggctcgaattctcacaaaggtaaacttatcactttcaaattgagctttcaaaactatcatgacatgtaaaggaaaaacaaggaatttaagtcacaaaatgtcaagagacttttatcttcaaaacaattacccataacttgaacatatcctataattcaaagacgaacatgccaaattaacacaaccaaactcacaaaatttaactataacccaccaaacttacaaaattacactaattaacacgactaaaaaacccaa

SEQ ID NO: 83025 - DNA, 421 bp, Glycine max
  unsure (1)..(421): unsure at all n locations
gcttgatgaccatgccagtgtatgaatcagattttggctgttgaaagcctgtgcattatggtttagcaagtctgtttcaggtaaatagggcaggaattcttccaagcccagatggagatggtgttattggtaacatatntttccaggaagcacttatgcagcttttcaaaaagttgttctacgaggatttgtatgtatcctcattatagcacatatggagctatgaaatattctgttagctactatcatggttttaaactgtggttgcaatcaggatcgtgatgagtcaaaatctttacattatggataattacggaaaaatatgactgatgccatatcaattccggtcataatatgactgtgaagtgtcaaaataccttggcgttacgatcacaatttcagtcgtggatcagaatttaaa

SEQ ID NO: 83026 - DNA, 273 bp, Glycine max
  unsure (1)..(273): unsure at all n locations
cgctcctgcctacaatgttnnttatggtttattacaacatgtgactttttgtttaattgtgttaaattcatcaatttcgatccttaattttgaatatttagctctatcaactgcgtcattttgatattttcgactaatcatcagtcttacatatttccatcaatctatcaattaaattacaatcatttatttttcatcaaacatttcttatcttaatgtaacgttagcatctatggaaacattacatgccaccgtgaagtagagacagctgtt

SEQ ID NO: 83027 - DNA, 439 bp, Glycine max
cactcaccttgactttgtgttgatgaataataggtaacagaccatatgcaagaaattaagtgcatatagggctacagatgtcttggaattaattcattcagacatgtgtgggccatttcatacatcttcatggaatggtcaacaattttttatatcattcatatacgattactctagatatgcatacttgtttcttatacatgaaaattcacaactcgtttgatgtgttcaaaaaatttaaaggtgaagttgaaaatcaactctacaaaagaataaattgtgtcaaatctgaccatggtggtaaatactatcgcagatgttaccgttcaagcgaaaaatgtttggggccttttccaaatgcctataagaaaattatttttagacaaacataactcttaggattagtagaaacatggttgcattcaactaccaattcatt

SEQ ID NO: 83028 - DNA, 414 bp, Glycine max
agctggtctcagcgtttatgctatacggagtctaacatgttagctatcatcgccaagtaccaagaagagttgggtctagccacggcccacgagcatagaatcgcggatgagtatgcccaagtatatgctgaaaaagaggctagaggaagggtgatcgactctttacaccaagaggcaaccatgtggatggatccggttgctcttaccttgaacgggagtcaaaaacttccccgtatgttagccaaggccaaggcgatggcagacacctactccgtccccgaagagattcatgggcttctctgctattgtcagcatatgatatacttaatggcccacataattagatatcgttagatacttgtatggtctctcagaccttgactagatatgattttttttttgaattaaatgaga

SEQ ID NO: 83029 - DNA, 249 bp, Glycine max
  unsure (1)..(249): unsure at all n locations
attgggcctatgcaagatgaaagccttggaggaaagaggtatgcctatgctgttgtggatgatttcctcacaatcacctgggtcaaccttatacgaaaaaaatcagatccctcttgagtattccaagagnngagnnnaagacttcaaagagaaagagactgggcgattcatataatcctgagtgaccatggctgaaagtttagaacagcttagtttctgaatacttgccatctgaaagcgtcactcatg

SEQ ID NO: 83030 - DNA, 354 bp, Glycine max
gctataatatatcgaggcgctcgaaattgtacaacggaagctcttgagaaattcaaatggtcataacttttaactcggatgtccaattcatgcgcatcacatatagagacgctaaaaaatgaacaacggaagctcttcagaagttaaaatgggattaatgtttcacactgaggtccgattcaggcttataatatatcggggcgctcgaaattgaacaacggaagctcttgagaaattcaaatagtcataacgtttaactcggatgtccgattcatgcgcatcacatatagagacgctaaaaaatgaacaactgaagctctctagatattaaaatggtcactaattttgacactg

SEQ ID NO: 83031 - DNA, 443 bp, Glycine max
  unsure (1)..(443): unsure at all n locations
ctctatagctagccatacaagatgacatattnntttattacgtgtnatccacatcacatactacacggtctcaccatgaataaaaagggaaatggttatttcttcttcttccatactcacaaacatacattatttttcaagcatcaaactcaacttttgaaaacatgtgcatcatgcaccacaacagctcatcacaatccacaacaatgccttgaagcattctcacctattccacgaattggattcatgccccaccccatgttttattgcatgttatgttattcttccctttctcaattatatgccgagttgatcatgacttatattctccaatcaaaggtcctaatgtttacttttagtccaatccttactaatgtactccaatgtgcaaaagtacctcatatttacttgttcaacctattaataggttcaactcctttaaa

SEQ ID NO: 83032 - DNA, 376 bp, Glycine max
  unsure (1)..(376): unsure at all n locations
gatctctaagcacctgangctgcagcttaaatttgataaaacgtcattttgcggaatcattaccatttgtgaatcgattaccaggcaaatttgaatcaaatttaatatctgatgcaaatcagtctggcactggtatcaatacatcctctggtatcgataccaaagattaaattttgaaaagacttttacttatattcttgcccaacctttgctacttaattgaattccttctattaataaccctttcaagactctaagactgcttgatcattcatttgaataagctttagagcatgtgacctttgcatctcaaacatcgcttgacctttgctacacatgnatcctttgcatcataaacatcacttgatcttgttac

SEQ ID NO: 83033 - DNA, 427 bp, Glycine max
ccttgtcgcgcctcctccgacgaagctcactcgtctatacctttgtgctccccttctctgtcaccaccaataaggctaatcgactgtgttgctttctcggtgtcgatgacaacggcgagattcgtgctctgaggtgcgactggcttctagaaggacatatactttctctccagcgtcatcgtcggcgttggtctcaatcgcaagctcgattggaccatcaaaacttgaacccaccttgattaattgtgtcttgatctgccaattgaatgttaccgactgagaagtggtctattttccaggttctttttctccgacatccccttcctcctccatttcatgacgccaaacagcctcgtttgtttgcggcggccgaggtggctgaacgtggttgaatgtggccggtgtagattatttggtgacatggtga

SEQ ID NO: 83034 - DNA, 355 bp, Glycine max
  unsure (1)..(355): unsure at all n locations
agaggatgcttcaatggaggatatgaatgagggagaganagagagaggggggagcatgaaattgaaggaagaatacgggaaagacagtgaactttgagttgtgtctcacaagactctcattcatcaaagttacaacaagtgttacacatgcttctatttatagactaggtagcttccttgagaagctagagctttactacacacacccctctaataactaatctcacctccttgagaagattcctaaagaagctagagcttagctacacacacctcctataatagctaagctcacccccatgccaaaatacatgaaaatatataaaaagtccctggctacaagactactcaaaat

SEQ ID NO: 83035 - DNA, 402 bp, Glycine max
  unsure (1)..(402): unsure at all n locations
acttatgtggcanggcgggctttcttcaccttcatgtctacaacgcgaactttgaccatagttcttccttcccgcgatgcttcttttcgtgtccgcctgagtgggcttatagcctaaaccatacttaccacgattttcttgggtatttatcaggctagttatgccgccggtgattttttctaaacccatcccgggttcataaccgttccccaacataactcgggccatcattaccgctgcatcggacagacaaggctgcccaaagagggagtccacggaggaaatgctgaccacctcaaaagactggaaagcagtttctaacgattcttctgcggctttcacataagggcatggaggatgggcagcttaccaagatatctttctcgcctgacacgatgacca

SEQ ID NO: 83036 - DNA, 402 bp, Glycine max
  unsure (1)..(402): unsure at all n locations
agctatcgagaaaatcanatggtcatcaatttttacacggaggtcagattcaggtgcataatatatcgagacgctcgaaatcgaacaacggaagctctcgagaaattcaaatagccatatcttttcactcggatgtgcgattcaagtgcataatatatcgagatgctcgaaattcaacaatggaagctctcgagacattcaaatagccataactgttcacttggaggtccgattcatgcgcacaatatattgagaggctgaaaattgaacaacggaagctctcgagaaattacattggtcaatacctttgacactgaggtcatattcaagggcatactatatcgagatgctcgaaattgacaacagaagctctcgagaaattcaaatcgtcataacttttca

SEQ ID NO: 83037 - DNA, 303 bp, Glycine max
  unsure (1)..(303): unsure at all n locations
atttctaagaatactttccaaggtttcttccgacatgtagctatggacaagcttgcatactcacacattcgttcacacttttacttttccaatcaatcctttacaagcctcgaatctctttgaacttctgcttctactttgtaccaaatgcttatgaaataaaatggctttccaaaccttgataaacttgtgctattcattcttatcattctcttctcccttngccaaaaagaattcgtccaggactaaccgactgaattctttatgtgtttctgttctaccttttccaaaagaacaaaagac

SEQ ID NO: 83038 - DNA, 379 bp, Glycine max
  unsure (1)..(379): unsure at all n locations
tgctggtaatcgattaccatatatgtgtaatcgattacacagtgcaaattgtgaattcaaatattaatagctacttgtaaatcagtttggccactggtaatcgattacatcctctggtaatcgattaccagagagtaaatttgntgaaaaagactttntaacttaaatttcttggccaaaccttttgctacttcaattggaattcccttcctattcaatataccctttctaagactagaggctngtcttgatcatccatcttgaatatctttaatttctttgtcttgaataaagctntgagacgcatgtgaacctttggcatcatcaaaacattcagcttgatcctttgtctacagaaaggaagatgaacgagcaccac

SEQ ID NO: 83039 - DNA, 319 bp, Glycine max
  unsure (1)..(319): unsure at all n locations
tgtttgcaggtacaagctggacactttgtggtggagctcatgggtcagcttgtgtattcccctgacgagacatttcattgaggtaattacatgggaaacccgcctagacaaaattttaatgcaggtggattttctggatttcaacatggccaatcttaccagcaatagaatcaatggagaactcaccctggtaatcaattcaataaagaccagggtgggtacctgacaggccacagcaacaagggcctagcttatctgagagaacaacanagctagaagaaactcttggtcagtttatgcatgtgtcattgaccaatca

SEQ ID NO: 83040 - DNA, 54 bp, Glycine max
agcttagttcaacttatcattctatacagatggtcttactgaacgaaccattca

SEQ ID NO: 83041 - DNA, 307 bp, Glycine max
  unsure (1)..(307): unsure at all n locations
cggccttgatctcactgaatagaatgtgaggtgaactctgctttatgtacccaatgacctggaattgtcgcggggtcagggaccttgggacgtcaggtggggtgctattgcccaaacccagcttgaccaattccgacccaacccgggcatagtcggtcagtgagaacctgtgatgtacctatacaggcgagctcctggcagtcnacagataaaagggaaacaagaccacaaagcaaggaggcttgtggtggctggccagctgtgaattttgtgtaatatgtggatggtggcctctggtaatcgatta

SEQ ID NO: 83042 - DNA, 355 bp, Glycine max
  unsure (1)..(355): unsure at all n locations
gatctagcaagttccattcttcttgtttatgtcggntggcctaaacccctgataagggtgatacaacttcctcttgatataaataatcctctatctgcatcttccaaagctgaaaattctgccgtcgaactctcgatcttcatcttcccctgttctaatgccattgttcccactgcctcctctaaactgagaagactcccactaattcctctaaattaaggaaatcccgtggagtaaacaaaagctcttgataccagttgttagtatagaggaattagaagaaaagaaaggaaataggagaaaagagagaagacacanagttttaatgtgggtcagcatacaatgtatgttccta

SEQ ID NO: 83043 - DNA, 429 bp, Glycine max
  unsure (1)..(429): unsure at all n locations
agacaccgangctgcagctggtactcactggggttgattgcgtcaacanattgtatgtaaccttctgatcatcaactctcatttcaaggttacccttccacataataactacgcatttagccgacaacatgaaaggacgacctacgtataattggaatctcaacatcctcttctatgacatgacccnaaacagctgggaatggaatgacgcattttgaccaaaacatcttttaccacaccatacggccttgtgattgagcgatccgctaactgtagtgtcattctagttggtaggatctacaaatttcctatccttctgcacatggataggggcataaatttatgctatcccttaaatcaataagcgcctttgcaactgacatagcaccaattgagcatgggatagtgacactccattgatacttatat

SEQ ID NO: 83044 - DNA, 455 bp, Glycine max
tcaagaatcaagattcgagaataatcgagatcaagattcatgattcaagagaagaatcaatcaacataagttctaaaatgtttttcgaaacattgagtagcacatgaagttttcacaaaatcttttaccaaagagttttactctcgggtaatcaattaccagaaggtagtaatcgattaccaatagccagcattgtttttcaaattgatttacaaagctgtaatcgattaccataatcatgtaatcgattaccagtgttttaaaacattaagattttcaaaattcaaaaagagtcacatctgttgatgtgtaatcgattacaccttaatggtgatcgattatcagtgactgatttcaaaaaatacatttccaaaagtcacaattcttcaagtgacttgtttctgaagattcttcaaaagtcataactctttaagtgactaggtttaaagaaattg

SEQ ID NO: 83045 - DNA, 360 bp, Glycine max
  unsure (1)..(360): unsure at all n locations
aatggacaagtttgcacactgtcttattatcaaagaatccaaattgtgaaaggattgaagaccaatatgggggctgccaaatggtatttagtttctccatgaagaccatctccatnttcttcaacttaggaaaaacatcaatattctgctacagcagaaagcccgtgtatgtgatcaaataaaagacctcagcacttaatacaatataagacaaatgatagtaagaacaaagttcaattaaatgaatccacacacccttgcatcttttggaagaaatatatcctccatcattctacatgaacttacaataagggctttgtagatcaccatacttctagccatggagagtgacagtaaata

SEQ ID NO: 83046 - DNA, 338 bp, Glycine max
  unsure (1)..(338): unsure at all n locations
tgcatctggaattgcgaaagccccactccatcattaggattagtacctgacatctcaaacaaacaaatcaaacgtaacaagacaattatagttgttgtttgaatacctcacccactcaagtgtatcacacaattatggcttttctctaatgaaacactcttgccttttaccactctaattccccttgagttcttatgcaattcaagagattatggccacaacaaagaacaattcaccaatatgtgtcaggtaaggctagagagacaaggaaaaggttaaccaagaaaaaggctaacaatgtattgaataatatntggatgatgtccattangaaatgt

SEQ ID NO: 83047 - DNA, 305 bp, Glycine max
  unsure (1)..(305): unsure at all n locations
atataaattgtggctactaaagaaaatcaaggaagaaaacntaaatacctgaatatcctcccatatcaaatccttctgagaagcagagacttcctttcaggtctcgtatgtcacatcgatcttatcacgaacgacaattcccaaatatgtgtcttaattcttcttctggggaccagtggccttgctggtcgcaggatcgacgtggaccactggtttctctgccccangtggtctagtggccaaggatcgtagccgtgtcactttgcgtgtctgcttcaaggtggatggacacgttgatgcttctg

SEQ ID NO: 83048 - DNA, 454 bp, Glycine max
  unsure (1)..(454): unsure at all n locations
ntactatgcagagaatatccaaggaanataccttcatctgtcttagcatcaaantttcctaagttatcttttccattattcaatacaaaacatttacaaccaaagatatgaagatgtgagatgtttggttttctgccattgaacaattcatatggagttttctttaaaatgggtcttattaaagccctatttaaaatgtagcatgtagtgttaacggcttcagcccaaaagtattttggaagaggagtatcatttaataaagttctaacaatctcttccaaagatctattnttcctttcaacaacaccattttgttgaggggttcttggtgcagaaaagttgtgctcaatcccatgcttatcacaaaataattcaaattctttattttcaaactcacccncatgatcactcctaatagatataatcttgagatttttctattttgaatgatttt

SEQ ID NO: 83049 - DNA, 317 bp, Glycine max
  unsure (1)..(317): unsure at all n locations
agcttagccctagaggggatggaccttntcatgtttcgaagatgatcaatatcaatgcctgtaggttggacctcccacaagagtatggagttagcaccacttttaacctttctgatttaattccttntgtangtagaagtgatattgaggaggaggaactaacagatttaaggtcaaatactcttcaagggggaagggatgatgcaatccttcctaggaagggaccagtcactagagccactagagccatgagcaaaaggctccaagaggattcaactaaagctgctaaagaaggccttanggttctcatgaacctc

SEQ ID NO: 83050 - DNA, 445 bp, Glycine max
  unsure (1)..(445): unsure at all n locations
taatatatcgagacgatcaaaattgaacaacggatgctctcttgaaattaaaatggtcataangtttaactcggatgtccgattcaggagcttcacatatcgagatgcacgaaattgaacaatggaagctctagagaaattctaatggtcataaattttcacacggaggtcctattcatgcgcttaatatatccagacgctcgaaattgaacattggaagctctcgagatattcaaatggtcataacttttcactcggatgtccgattcacgtgtatcacatatccagacgcttggaattgattagcggaagctctagagaaattcaaatggtcataacttntcacacggaggtcctattcaagcgcttaatatatcgagacgctcgaaattgaacaacggaagctctccggaaattaaaatggtcataacgtttaactccgatg

SEQ ID NO: 83051 - DNA, 322 bp, Glycine max
  unsure (1)..(322): unsure at all n locations
agcttgtacgaatataagaaacatcttcttctaccttggtgattcttgactccatctcattgaagcgcatgtccacttgtaactccaaagtatcaaacctttcaccaacaaaggtttgaagaccatcgaacctatccaaaatcttttgaagaagagaggaatcttctccaccatgtccttcttcatcaacaggtcgagcaccctttttcacccaagagccatcatgctctntttgataaccaaaggatgcaatgacagcagcacctattagaaaggatctcttgattnntatgctttgaacgggccatgttaactgataaaa

SEQ ID NO: 83052 - DNA, 476 bp, Glycine max
  unsure (1)..(476): unsure at all n locations
ctattcgtgaccttagaaactcagcttcattgtgagnttgatttagccttaatttcactttggttattagtcaattcattcaaggaaacttccaaagaaaaatgcccgattgattntttttctttttgattattttattcaaagatattttgattattttattatttttcctttttttggtttaaaacgtggttacaacgtgaatgatcagttggattttattttaacagggattaaacgatattacaactcaaatgatcagtggaaattcattttattatttattaggtgagaaaacggcttaaataaatggttaaagcacgtcaaaagggggtaccgaaaataaacgaaataaaaataaaagcacgcggaataagtggggaccactaaggtgcatagaatgaattgaaagatttgattntgagaacttacctgttgaagaccgaagaacgatgaagaaataatgacaaacgatg

SEQ ID NO: 83053 - DNA, 396 bp, Glycine max
  unsure (1)..(396): unsure at all n locations
agcttaaagtatgcccgagtcattcatccctatgatatgttgttgaagtattggcgaatcagaatgccattccttggattatagggttgaaccaagctcatgcttttacaaaaaggttcatcaagtcaagtngaaatatggaagtaaccgtcttgcaaaattggggcaaaagatgaatcgagtcacatcactgcttcgtctactgccaaagatatttaggatngtttatgtccttgttacttcccagttcaccttgacaaagatgtcatggaccatgttgaaaatctaaattgattcaaccccatatcctgcgtaaaaattcgcaatacttcaactgtacatcattcgcatacatccatgcttttcattggttgcattgctcattgcattctttcc

SEQ ID NO: 83054 - DNA, 456 bp, Glycine max
  unsure (1)..(456): unsure at all n locations
ctaccttctccacatctactttngaaacgcctccttgtcaagaacctgtattntgagacatacatcagcgtgtgatatacatatcagacgtgtaaatatttgcttttgacattgcacaaggacatcctaccacttcaacctcgaagttaagcaaatcaaaaacacttaaatcccaaaaattaaaaagaaccacccccaacctaaatgagcacaactaaacaattcccaagtatcctatagttgctatcaaactaaataaactacaactataatgatcctcaaagtacaggctctttaacaggtcacaagattaacaactttgtggatatgctgtatttaagctgcttgaacatctcacaataacataaaacatatccaagaagtaaagcttattccatgtttgtccatatctaagaagctntatgatatcntaattgatatttaggatatgtaagt

SEQ ID NO: 83055 - DNA, 412 bp, Glycine max
  unsure (1)..(412): unsure at all n locations
gcggatntggtcttcgccagtgaaaggatngatgtgggtccgaaaagaggcaaatttgatcatcctactatgacgactgagaaaactggggcaaatgaagagggtgagaaagagggagaaacccatgctgtgacttgccattcctatacggccaagttcccaccaaacccaacaatgtcattactcagtcaataacaaacctcctccttacccaccacccagttatccacaaaggccatccctaaatcaaccacaaagcctgtctaccgcacttccaatgacgaagaccacctttagcacattccaaaaaaaaaccaaccaaaaggaatttttgcagcaaaagccttgaagggtcaccccnaatatccgtgtcatatgctaaacttgatcccatatcactcaataattcaat

SEQ ID NO: 83056 - DNA, 426 bp, Glycine max
  unsure (1)..(426): unsure at all n locations
aaggatgatatcatttgtgctccacattcattcatgaaaagttttgcatttctcctctgcaaaagaatgtctagcataagcttaaactntagagggcaacacaaaggaaaatgatcattccctctaaggttgaccatcaaccattccataatactacctacaaaaaacaaactactagtatagaaatggatcacattcntccatgtaaaaattcccaaaaatagtgaataagatcctcttcaaaaccatcacacatggggcctcatgggatctgtaaaacctctctcgttgcatctcattcatggccaaggctccacgaccattcttccaaagatggcttctacctctctcgagaccttnccaaagtctaaatagttttaaatagcaaaatattagccaaaggcttcaccttatctatagtttcat

SEQ ID NO: 83057 - DNA, 431 bp, Glycine max
  unsure (1)..(431): unsure at all n locations
atccttagagtcacctgcngctgcaagctatgctgcaacatctctacagaccttctaacctcagagcaaaatagccacaacagaacaattatgacctttccagcaacaggtacaatctccggtggaggaatcatcccaaccttagatggtcgaattcttcacagcagcagcaacaacaaccttatttataaaatgctgctggcccaagcagaccatacgttcctcctccaatccaacagcaacaacagcaacagccccataaacaacaaatagttgaggctcctccgcaaccttcccttgaagaacttgtgagacaaatgactatgcaaaacatgtagtttcaacaagagaccagatcttccctgtagagcttgactaatcaaatgggacaattggctacacaattaaatcaacaacagtcccagaattct

SEQ ID NO: 83058 - DNA, 382 bp, Glycine max
  unsure (1)..(382): unsure at all n locations
aagttctacactgcctttcttattcatgggatccatcagtccaagcatgactactccttatccaccattgcttcacggaattccttcatctcctactagggtatgtagatgacatcatcctgtcaggaccatattctgcctctgtgcaagctattcacacccacatgttatctatgtgtcaatcgaccattcttggcacttagaaatatattcttggcttataaatagctaaatccaatagaggtatctcactcttccagagaatatactctctatctctnttggaagacacaggtttcttgtgaagcataccttccaatcttctaatggatcccaacttgaagcaccatcttgatgatggagacttactctctgatccctc

SEQ ID NO: 83059 - DNA, 410 bp, Glycine max
  unsure (1)..(410): unsure at all n locations
tccttttanagctngccatgtaagcaactgaagagtatcattctcattcaattccttcacctcatatgttgtattaacttcatgagatgctagcaactgtttgttcccagttgtgatgatgattttgctgtccggaccaaaccaatcaggtcttccagcaattgcttgtaattgcttgtgtatgtcaacatcatctagaatcaagagaaccttctttcccatgagcctagactgtatgattgaaattccttgttgcttacttgttaagttgatgttcatctctcctagtatttctgaaagaaggattgtttggaggtgttctaacccgcgtttgtttgacttttccctcacatttgcaagaaaacacacaccatcaaacttctcagcaattatcaactatgaagcacgga

SEQ ID NO: 83060 - DNA, 398 bp, Glycine max
  unsure (1)..(398): unsure at all n locations
tccttgagaagctagagcttagctactcacacncctctcataactaagctcacctccttgagaagcttccttaagaagattcctaaagaacctagagcttagctacacatacatctctaatagctaagctcacctccttgagatgagaagctagagcttagctacacatacatctctaatagctaagctcacctccttgagatgagaagctagaacttagctacacaccccctataatagcaaagctcacccccatgacaaaatacatgaaaatacaaaaaaaaagtccctactacaaagactactcanaatacttcgaaatacaaggctaatatcctatactactagaatgatcaaaatacaaggcctaaatgaagggagaaaaacctattctaata

SEQ ID NO: 83061 - DNA, 395 bp, Glycine max
gcttctacatgtctagaggcttctagagagagaaaggtcccagttccatagagttttgagattttgctgtgcaaagacccgcatataaccgagcttgaagaggaagtcattctgagagcatgagatgagtctgtgagcgactgtgaagtttttgatgtggaggagacatcctcaccacttgtatttcttcaatccttcatttatctcttctctttggtgaaaggaagctaaattctatggtgtgtcttccttgtacgtacttgatgtaaatactcgtatatctatctcaagatgttctgtgtgttcattgagctatccaaacttcattctagcatgcctttctctttgatgcgtaaatcatgggttggtaagaacattcacaattgaaactggtc

SEQ ID NO: 83062 - DNA, 420 bp, Glycine max
aacaagcaagccttgttgacttgctttatcttatacctctttggccattgagatattaaaaactttctcaagaggaatgttctcctacatagcacgaattccaagttaacaaatgtctaatactgatagtgtttttcatctcctatgtcctaataaatatcatagaagtaaattaaaaaaaaaatcgtcctacttttccatttcttcatattttggatttgaacttgaaaaatacataaaaatgacacataatacaaccacaaaagtcttatctcatctagtgaggttggatacatgagatatacatggacttggataaagaccataatcttaaaaatattattcatcatgagattccttttaatatcgttctctaaaggtcttctcggtcttccttctccttttaacataacaaaaaac

SEQ ID NO: 83063 - DNA, 232 bp, Glycine max
tagccatagaagttgtattgcctttacctgcgcacatttgatgtctttccaccttaattgtaagcttgttcgctttccttcgttcatttgattcatttgataatccttcattaaattcttctcttgcaggaagtattgattttttttctcacctcattttatgaatagaatctcgttgttgataatttactagtagtgaatatcatgcacctttttgctatacgtctgttca

SEQ ID NO: 83064 - DNA, 445 bp, Glycine max
  unsure (1)..(445): unsure at all n locations
gtacctgtntgaccaanaagagctaaacatgagacttatgatatggatggagtttctaaaggattatgactttgagttgtcataccatcccagcaaggctaacattgtggcgaatgctttgagcaagaagtccttgcatatgttcgttatgatggtgaaagaattgcaattgatcgaggattttaaagacttgaacttatcaatggaagtacgacccaaaagcttgtctttggggactttgaagatcactaatgagtttttagtgcaagattaagaagcccagcaaggagatcagttctggcaagacatgacgaggttgaatgaggaagacatggagttgaaatttcgacatgatgctaataaactcatcatgtttatggagagagtatgtgtacctcaagtaaaggagataaagcatgtgattctagaacaagcacataagagt

SEQ ID NO: 83065 - DNA, 310 bp, Glycine max
  unsure (1)..(310): unsure at all n locations
ccttaaacaacaataactntntactcggatgtctgattgacacctgtaatatatccagacgcctcgaaatgaataccgatgctctgagcaaattcaaacgacaataagtttctactcgtatgggtcgatgactcccgtaatatatcgaaacgctcgaaattgaagaccgaagctctgagcaaattcaaacgacaataactntttactctggtgtttgattgagtcccgtagtatatcgagacgctcggacttgaatgccgaagctctgtgcaaattcaaacgacaantaactttttcctcgaatgtctga

SEQ ID NO: 83066 - DNA, 367 bp, Glycine max
  unsure (1)..(367): unsure at all n locations
aatgatcgaaaccggtctaaanaaggggaagatctgatcatcatgctttgataaatgcaaaaataactatggcaactgaagaggatgaaaatgagggagaaacccatgctgtgactggcattcctatatggctcaagtttcccacccacccaacaatgttattactcagccaataacaacccatcttcttacccaccacccatttattcacataggccatccctaaatcaaaccacaaaacccacctaccacacaaccaatgctaaacaccacctttagcacgaaccaaaacacccaccaaaaaggaattttgcagcaaatagcctgtatgattcaccccacattccggtgtcatatgctatacttg

SEQ ID NO: 83067 - DNA, 396 bp, Glycine max
  unsure (1)..(396): unsure at all n locations
tcttaaggaagctacctagtatataaatagaagcatgtgtaacacttgttgtaactntgatgaatgagagtcttatgagacacaactcatagttcaacttctctccctttttcttccttcaatttcatgctcccccctctctctttctctccccctttcttttcctccattgaagcatcctctccatgcttcttatccaaggctcatcttggtggtgaaattctttcttccatggcttattccctagtggatggcgcctcctctcacctcttctcctttgtcttctgctgcatttccatattggaaaatcaccattaaaggacctcattgaagctcaaagatccagcctccataaaagctccccaagcaagctttcatcaagtggtaatcagagca

SEQ ID NO: 83068 - DNA, 380 bp, Glycine max
agcaagcttatgaccattgaatttctcgagagctttcgttgttcaattttgagcgtcttgatatattatgcgcctgaatcgggcctccgagtgaaaagttaacccatattgtatttcacgagagctttcgtttttcaatttcaagtgtctcgatatattatgcgcctgaatccgaccttcaagtgacaaagttatgaccatttgaattgctcgagagctttccgtgttcaattgcaagcgtctcgatatattatgtgcctgaatcggacatccgagtgacaaagtattaccatttgaattgctcaagagcttccattgttcaatttcgagcgtctcgatatattatgcgacttgaatcggaccttccagtgaaaagttat

SEQ ID NO: 83069 - DNA, 440 bp, Glycine max
  unsure (1)..(440): unsure at all n locations
tctctntntactngaggtatgtaagagaaacatangcatccaaatgtcttcagatttgttagcttcggttggtagtcatgccatgcttcaaatggagtctttntctgcaaagctntttgtggtaacctattcagcaaaaaaactgttgtgtgtgcagcctctgcccaaaattcctttggtagccctttgtcatgaagtaagcaccttgtcatctccataattgttcggtttttcctctcgacaacaccattctgttgcggagtgtatggtgctgtcaattgatgttcaatgcctgcatctacacaaaacttgttaaatttttcagaggtatattcagttccattatcggacctgatcacctgcatcttgcatccactttgagtttcaacccaagctttaaacttcacaaagatgtcagcaacatcagatttaaacttcat

SEQ ID NO: 83070 - DNA, 455 bp, Glycine max
  unsure (1)..(455): unsure at all n locations
cctgctttacggacctatgaaactccgcttaacattcagtaccgagcgtctcgatatactacgggactcaatcagacatccgagtaaaaagttattggtcgttgaatttgctcagagcttatgcattcaagtccgagcgtctcgatatattacggcactcaatcagacaaccgagtaaaaaagttattgtcgtttgaatttgctcanggcttcggtaatcaatttcgagcgtctcaatatattacggtactcagtcagacatccgagtaaaaagttattgtcgtttgaatttgctcagagcttcggtatttaatttcgagcgtctcgatatatacaggactccatcagacacccgagtaaaaacgttattgtctgttgaatntgctcagagcttcaacattcaatttcgagcgttccgatattttacgggactcaatcggattccgagcaaaaag

SEQ ID NO: 83071 - DNA, 462 bp, Glycine max
  unsure (1)..(462): unsure at all n locations
tctagaggaagcctcttaatgaagcttctagagaaagctacatgaagctgtctcggtnaaaacgctgcccagccttcatcaattgttggatcttctcgaaattcggccttaaacttcacaagacacttgtcaatcatctgatcattgggatctttgagaagatgtctggagtgtgctacaagcctcttaatgaagcttctagagaaaactacatgaagctgcctcggtagaaacgctgcccagccttcgttaaccgttggatcttctcgaaanttggtttgcaacttcacaagacactttaccatgatttaaccgttggtatctttgagaaaatatctggagtgtgctagaagcttccgttcccgagagcatctcttatttaagcatttcagcctttgctttcttgtagcttaggaaaaatgtcatttcttcttctttctttcttacatatccatttctaaa

SEQ ID NO: 83072 - DNA, 175 bp, Glycine max
ctcaattttctaccatcccattgacttatcgccctgcttctactgttgtctaagtgaaatattttaattccccaaaaatgtaaaactaattatttttgtcaattttgtctgtctaaacagaatggaggttagccttgaatagctgtattttgggcgaacaacctaattttcaaaa

SEQ ID NO: 83073 - DNA, 444 bp, Glycine max
  unsure (1)..(444): unsure at all n locations
taatagcagcaatgatcatcacatcaagctctatactttggtcnactctctagacaccagcatcacccaccttctgtacaaaaggaaggccttcaaagggatttagcaaatagagaagttggcattgctgccgatagaagagattgggatgaattgaggaaattgtttgaacaagcctagaaagatctatttggacttgcctcagctacttcggctaaaccatccaatgttgttgctcctgccaaggtcattgttgagtagaagctaaacttgcttaaactactagcgaaacatatgattaactntacatttttacgtgataacaaatacttttttattgttatgaaatgattaagtgatgcttcttattttaacaacatatcttatataagtaatgtcacttaatatgctccaactaattctgctagcgctctttgaaatgta

SEQ ID NO: 83074 - DNA, 411 bp, Glycine max
gcttagaacaataaacttggtcttctcttatttgtcttagggcgtggcgaccactatcaataaagtacttttggcacctacaatatgttgacttcaccaacgctgttattggaatgctgcgacaatctttcaacaccttattcacacattctgataagtaggttgtcatgtgaccatatcgccgttcatatgtatcgtcagccatgctccatttttcctttgagaatcgatcaatccatcttgctatagctggactcaattgacgaaatttttctaagtcttgatcaaacacatgcttgcaaggagtgtacgctgcatcaaattagttatcatcaacagttgtacgtatacatgacactccaatttattaatgtttaaataaaccttacacactttcttgaacatctcttt

SEQ ID NO: 83075 - DNA, 395 bp, Glycine max
  unsure (1)..(395): unsure at all n locations
agcttgtcaaggggaagctgttaaagctttttcaagcaaaatgttgatttacttcataaccctttgaactacttcacattgatttatttggtccctctagaactatgagcttgggtggaaattactatggcttactaatagtggatgattactcaaggttcacatggactttgtttttgaaaacaaaaaatgaatgctttgatgcttttcgcagacttgccaatgtgattcaaaatgaaaaaggtctcaacattgtttcacttataagtgatcaaggaggtgaatttcaaaatgagtcttttgaaaacttntgtgaagaatatggaattcaccacaatttatctatcccaagaacaccacaacataatggtagtgtggaaaggaaataatctatt

SEQ ID NO: 83076 - DNA, 341 bp, Glycine max
gagtatgtgaaaatattgtatgaccaagtgaaaatgcaaattgcaaagaaaaatgaaagctatgccaagcaagccaacaagaaaaggaaggaagtggtacttgaacccggtgatgatcctggacatttgaggacaaatgttttccaagaaggagggaatgatgaaaatcctaaaactgtccaaatacagggacctatgactaggagtaggaccaaacagtcagtggatacccttcaacgaatggtagtaggcatacttagcaaggcccaagtggagaaggacaaaagcccatatggagaaggacgaatgccaaagtggaaaaggatgaagccctatgtgga

SEQ ID NO: 83077 - DNA, 362 bp, Glycine max
gcctaataactacatgcgtttgcctctcgtgtcgtgggtgacacgtggttgaaaactacaattatgtgcccaacttgctgccaaaatcctctcaaaatgccaatcatcatacctaagtataggatgcctatatctaatggtgatgttaataaaggctcttcaatcgaacacatgcgccatgtcccattctttctgggtgaccaaattactgggacagcacaaagactcatactatcttttactcaacccttgctcatgagttcatgcactcgtctttaatctctttggttcttgtgaatacttccatacgctggcctattgtgcaagaatctcctcggatgagatcaatttgatgctctatt

SEQ ID NO: 83078 - DNA, 159 bp, Glycine max
tttcttttcacttatactttggaaccacttttccttctctcgttttatttgctatgggggtaactatatttattttattattattggcatttaccccctctttggtttttatttcacttgagagatgtaattatgattctttcgtcgacacaacccgta

SEQ ID NO: 83079 - DNA, 399 bp, Glycine max
  unsure (1)..(399): unsure at all n locations
ggctgcaagcttataataccttggttaattatgcatgataaganaaagatgggaaataatatttacttactatttgcatgtataataaatgaagatcattgaagaagatagaatgagagcagtctttatcatttcccaagtcatactttcaagatcgagaatatggacatcattgaatagcttcctgctcatatcttctccaccaaacaatataactcttgaaccaaccactggggcacactgtcccataaattgaaacatatacaaatatttacaaagaaaattctctagtttcatttcttagtttcacaatctaaatggcatataaaaacatactctntacaacagcttgaagctgcttgaaggccttcaacaggttttaattcttcttgctagatg

SEQ ID NO: 83080 - DNA, 425 bp, Glycine max
  unsure (1)..(425): unsure at all n locations
gcaggacttacgcctaggaatctaagttttggttntgaatgtaaaaaggcatgaatattatgacatgtttgagaggtttatattataatttaaatttggctgccccatgaggaataccttgcacctaggtagcatggaaaatacctttcaacggtatgtgtatatgtgaatatatatagcatggaaatgccttgcanagtgtgtgaatatatggcataaaaataccttgcgaagtgtgaatgtataacaaataatgcatttcaaaaatctgtatatgtaggatagggtagcgtaaaatgccattcataatatgtatatctgtggataggtagcataaagagcctttcaaaaaatgtacccctgtcaaaaatggcacgagaatgcttcccaaatgaatatatgatgtggaattgtctttcaagtgt

SEQ ID NO: 83081 - DNA, 277 bp, Glycine max
caacatgtcaccctctgtatctggatactcaatagtggaaattgttcggagaaattaaccgagccttcgtacgctctgaacgttctgtgggtgattccgaagatattccgccgtcttcggtcttcaaccggttagatcccgaaatcgaactttataattcattctatgtatccttagtggtccccactcagttcgcgtgctcttattattagttcatatacgttacgtacccccttgtgcgtgcttagtcattatataagcagtttttccctaatca

SEQ ID NO: 83082 - DNA, 450 bp, Glycine max
  unsure (1)..(450): unsure at all n locations
ctgatgatatggtcttcaccgacgaaaggatcattgtgggtctaaaaagaggcaaatctgatcatcatgattngataaatgccaaaaaaaaatagggcaaatgaagagggtgagaatgagggagaagcccatgctgtgactgccattcctatacagccaagtttcccaccaacccaacaatgtcattactcagccaataacaaaccttctccttacccaccgcccagttgtccccaaaggccatccctaaatcaaccacaaagtttgtctaccgcacttccaatgacgaacaccacctttagcacaaaccgaaaacaccaaccaagaaatgaattctgcagcgagaaagcctgtagaattcaccccaattctagtgtcctatgctaacttgctcccatatctacttgataattcaatggtagccataaccccagccaaggttcatcaacc

SEQ ID NO: 83083 - DNA, 365 bp, Glycine max
gtcgacctgctgcatgcaagcttgttgcaatctgtaatcaatctctaatttggttcatggatctatgcgacgtgtgtctgttaaaaacatttctccagaattcattggcatgttgattatatgattttaggaggcaattggaccagcttttggaacaattatattggaggcttgctacttatcattggtttgggatgacacaagataatgaaggaggatgaatgagaatcgataagaaataaataaccttcctatgttgtgacaacttttagtccctaatatccttatcttattaatagcgttaagctacactctacaaaatgatcatggtggaccttcgtttaaattaataaggaactaaatat

SEQ ID NO: 83084 - DNA, 482 bp, Glycine max
  unsure (1)..(482): unsure at all n locations
cctgcattacggacctatgatactcagcttcaaactntgtacaagaatgaagctctgataccacttgttagacaagtggcctcagatatcttaagaagggggggttgaattaagatattccaaacttttctcctaattaaaaatctatcttattttttacttaagttatgaattcccttaatgacaatcttcttaaatattaattcaaatgaagcaacttgaataatgaatataaagcaatagtaaataaaggagattaagggaagagaaaatgcaaactcagttttatactggttcggccacacccttgtgcctacgtccagtcctcaagcaacccgcttgagagttccactaacttgtaaattccttttacaagttctaaacacacaaggacaacccttcctttgtgtttagagattctntacaacaagagactcacagtctcttaatcccttagagaatgagaagaagaagaggaacaa

SEQ ID NO: 83085 - DNA, 385 bp, Glycine max
  unsure (1)..(385): unsure at all n locations
agctattcctttggttgctctactagagttttcaagtgttagagagaacgagaagagattgaaactctcaatttactgtctccgtgcaaggggcaatttctacagacattatttcacanatcccaacggtgtgaatgcgcaaaattgagttcttgaagtggcatccaatattcaagatgatccaatggtaaacactttctggattatagttttactgacataagtgtgggtgtatgcgggaaaaagagatggttctggaagagatataaagaaaaacaaatctatgatgaagagagagcgtacaaacatatcgtaaatgtataaattgacctaacatgtntctatttacagttatggtactctcggcttaatatttacttttttt

SEQ ID NO: 83086 - DNA, 367 bp, Glycine max
  unsure (1)..(367): unsure at all n locations
tgngctgttgcctcactcaccgnctttatggattcatttctagctatcttatacttatcccaagattcagaatttctacacctagaccactccttgaaacactccttttttactctaactttgctctgaacattttcattccaccaccacgattctttacccctaagtccaaaacctctagattcacccaacgtntntttagncactttaataatctcttgggacatcttgttccacatatcattttcacttccttgtgattgtccacaccaaccctcccatatcttttgttggaagattccttgaaatctaccctcaaaaatctagtgaagaaatctaccctcaagaagaaggacaacctttaatg

SEQ ID NO: 83087 - DNA, 352 bp, Glycine max
  unsure (1)..(352): unsure at all n locations
agcttctagctcactccanacatcttctcaaagatcacaatggtcagatgatggaaaattgtcttgtgaagttgtaaaccaaatttagagaagatccaacggttaatgaaggctgggcagtgtttttaccgaggcagctgcatgtagttttctctagaagcttcattaagaggcttcctccagaagcttcattaagaggcttcgagcacactccagataacttctaaaagatcccaacggtgagatcatgaaaacgtgtcttgtgaagtggtagaccaaatttcgagaagatccagcggttaacgaaggctgggcatcgtttttaccgaggtagcttcatgtagctttctct

SEQ ID NO: 83088 - DNA, 349 bp, Glycine max
  unsure (1)..(349): unsure at all n locations
ntgagctaattgaaacgaacaataatttttgctcgaatgtctgattgagtcccgtaatctattgagacgctcgaaattgaattctgaagctttgagctaattcaaacgacaataactttttgctcggatgtctgattgagtcccgtaatctattcagatgctcgaaattgaattgtgaacctcagagctaattcaaacgagcaataacttttactctgatgtctgattgagacccgtgatatatccagacgatcgaaattgaattctgaagctctgagctaattcaaacgacaataacgatttgctcagatggctgattgagtcccctaatacatcgagacgctcgaaa

SEQ ID NO: 83089 - DNA, 456 bp, Glycine max
  unsure (1)..(456): unsure at all n locations
gaccttagatactcacgcttaacttgaatttacttaataaaatatatctaatataacctctctaacctgaaactaataaagactaaggcattaattctggtggagcaaaaactttcacctttntgttctgttgattatataaaaaagaaataatggtcatgacaataaaattgatgagaaactctaaaccctaaaccttgacaatcagtgagatataaaacacaatggaagatgtttgattgaaataaaaaatacgtaatatatgaggagagagataaagatgagttgatttaagttagaaatgatttactgatctatctcacaaattctaaaattattctaaggctaaatcttgtctatcatataaataaatactcactgtggtttttttattagaaaaaaaattctatctcatacttattagagaggtagttcctctcttaattgcatattctc

SEQ ID NO: 83090 - DNA, 222 bp, Glycine max
atcaaccacagcagaacaattatgacctctctagttacagatacaatctccgatggaggaatcaccctaatcttagatggtctaaccctcaacaacaacaacaacaacaacctgctccttccttccaaaatgctgctgggtccaacatgtcatacgttcctcctccaatgcaacaacatcaacaacaatagctacaatagccacagagacaacaatcaactg

SEQ ID NO: 83091 - DNA, 360 bp, Glycine max
  unsure (1)..(360): unsure at all n locations
tcgttgcanaccagtggttggaggagaaagctggatggtgaagttgatttgtggagtgcataatccatgaatggccaagtcattagttggacatccatatgtggagcgattgactaaagctgaaaaaacacttattgctgatatgacgaagtccatggtgaagccaagaaacattatgctaactcttaaagaacacaatgtcaataagtggtggaccattaaacagatatacaattccaacctctcagcaatcccatagcaaacttcctatttaatacaaaacaaacagattacacaaattattatgaaaatattgacgtaaatgacgtaaattattattattacttaccactgcatgtc

SEQ ID NO: 83092 - DNA, 318 bp, Glycine max
ctgttgaaaaaattgagaggggagtcatactgaagaattcttacacaagagtattgtacattaacgaaaacaaaatattagtttatagaacggaggtggcgaatatataacaaatgatgtagcctctcaacaagaaaagaaaagggtgccttatcctagtggaatataaaaacatcttggatgaaacacatcaaagacgggttgttggtgtgacatgacattcatagtgaatttataaaacaaagaatggcttgataagtgcttgtgggacgtttgaaagatatttcattgttttatataaatacctgattgaccttt

SEQ ID NO: 83093 - DNA, 451 bp, Glycine max
  unsure (1)..(451): unsure at all n locations
tctattcataatttcgagtgtctcgatatacttcaggacacaatcggtcatccgagtaaaangttattgtcgtttgaatttgcacagagcttctgttntcaatttcgagcgtcacgatatactacgggacacaatcggaagtcctgagtaaaaagttatagtcggttgaatttgataagaaggatctgtttgttaatttcggagcgtcttcgatatattacaggactcaatcagacatccgacttaaaagttattatcgcttgaatttgtaacgagttttcattttcaattgcgagcgtctcgatatattacgggacacaatcgtacatccgagttaaaagctaatgtcgtttgaatttgctcagagcttctgttttaattttcatcgctcgatatactacgggacacattcgaacatccgagtaaatagttattgtcgtgtgaatttgct

SEQ ID NO: 83094 - DNA, 119 bp, Glycine max
  unsure (1)..(119): unsure at all n locations
attcaccatgtacatatatatatatgataggtagctagagataagaccctctagactaaacgtgtatatgtagaataggtgntcaagcgctttatatatgtacacaccgtttgaatgtg

SEQ ID NO: 83095 - DNA, 345 bp, Glycine max
aatttaatcatcctgcctggatgaatgagaaaactgttgcatatgaagacggtgagaatgaatgtaaaacacatgctgcgactggcgttcctacatggaaaataccccaacaactgaacagcatcattactcaaccaatactggcccttctcattacccaccacccagtcgttcacgaaggccatccctaaatcaaccacaaagcttgtctgccacactttcaatgatgaacaccacctttagcacaaaccaaaacaccaaccaagaaatgaatgttgcagcgaaaaaacctgtagaattcaccctaaattccggggtcatatgctaacttgctcccttatatac

SEQ ID NO: 83096 - DNA, 204 bp, Glycine max
  unsure (1)..(204): unsure at all n locations
actgacatacgtttgggtgtatgccggaaaaagagagggttttggaagagaaagaacgaaaaacaatattatgaggaagagagagcgtagaaacatatcgtanatgtaaanatngacctaacatgttactatntacagttatggtactctgggcttattatttactttttttattctaatattatattaacaacgaactttatt

SEQ ID NO: 83097 - DNA, 391 bp, Glycine max
aaattacaccctctaaaccaacttaactgagtagagactagtttctctcttcttccataccaatatgtcctcctcactcagaatcaaattaatacttctaaagtcatgaccttttatctaagtaaattattatatttatttctcctaatgatatagagatttctccatttccatctccacaatcaatttccctccctccagtcacctaatcctgacaccctggctgttatggctactacaagggtgtataatctactatacttcctaaatgtgaaaataaagcacttccacccaaaggtcttgagaaaataaaagtatcccctaaccccccaacccccacccaccttctaactaactcaaatgccagattctctcttccctcatagatact

SEQ ID NO: 83098 - DNA, 396 bp, Glycine max
gcttgtactcggatgtccgattgagtcccgtatatatttttatgctccaaattgaaaatagtagctcctatgcaattcataccataataactctttactcggatgtccgattgagtcccgtaatatattgcgacgctcgaaattgaaaacataatgtctgatctaattcagacgtctataactatttactcggatgtccaattgagtcccgtattatttcgagatgctccaaattgaaaatagtaggtccttccaaattcaaaccataataacgttttactcggatgtctgattgagtcccgcaccttatcgttacgctctaaattgaaaaagatgctctgagcagattcaaacgacattaacttttacttcaatgttccatacttgctgtaatta

SEQ ID NO: 83099 - DNA, 371 bp, Glycine max
  unsure (1)..(371): unsure at all n locations
ttgtgtaatcgattacaatgattnggtaatcgattaccagttataattnttgaacacaaatcagaagatgtaactcttcctatggttttcaagttttctgaaagttgtaacttttcaaatggctttcacagttttcttacaggtataactcttctaatggttctcttgaccagacatgaaaagtctataaaagcaaaactttgatttgcatttcaataatcttgaacattctttagaacaatcaatacattcctttacaacctttgaatctctgtgaacttcttcttctttcttttgccaaaaagctttccaaagtattctggtttttcaaaccttgaaaactgtgctattcatctttttcattcccttct

SEQ ID NO: 83100 - DNA, 437 bp, Glycine max
  unsure (1)..(437): unsure at all n locations
tgatgtcgtacaaaagagactatgttgacttaaatgatgattgaacatgtacctntgtttatttgttatgttaacataaaanattgttgcttattcgaaaaaaaaatcattgctccaactaaaataaagtatgtaatgtgccattattttctcctatttcttaaacctttttgcaccattntaattattgattagtcttaattgtcaaattaattagacagttttattatttgggctcattcaactaatttgatgtttttaatctaatttcaggaattaaggaaacattgggcatgaatccaaaattgggcatggacttgaagaggacagactattntattctaccaaattntatcttatctagatattatttagatttgatctcatctagatattatctcatctagattttatttatttatgggcttggatttaaa

SEQ ID NO: 83101 - DNA, 290 bp, Glycine max
  unsure (1)..(290): unsure at all n locations
ccctctcatactaagctcacctccttgagaagcttccttaagaagattcctaaagaacctagagcttagctacacatacatctctaatagctaagctcacctccttgagatgagaagctagagcttagctacacatacatctctaatagctaagctcacctccttgagatgagaagctagaacttagctacacaccctctataatagcanagctcacccncatgacanaatacatganaatacaaaaaaaaagtccctacttacaagactactcanaatacttcgaaata

SEQ ID NO: 83102 - DNA, 414 bp, Glycine max
tctatccaaatggacttaccttgaattaattcctttgatatctcctttgagccttgtttccctttccttgttttgaagctcactacaagccttatatgaaaaaccatgatatcaccatatcctttaaggaatttggagctttggaattgttttaagaataagtgtgggggggttttgtttcattggaaaacttgtttgttggctatgcttcatgatgtattttgggccatacttgatgtacattgtatattggttaaatgttggacatgctgaatgaaatgttgtctctcaaaggctatagagtaaaaaaaaatcgaaaaaagaaaaagaaagcaataaagttgagtgaataagatcttaatggcacaagaatgatgaaactcttgggtctactctttatggttaaaacttatc

SEQ ID NO: 83103 - DNA, 403 bp, Glycine max
acctctcgacccggatcttaagtcaccgagctgcagcttgacatctcaccaccatgctttttgtcgtgagacctgtgagtactaaacatgtaactcctgcacttaacatataaaagagcaaagactacaagccaggaggcttgtgtggtggctggccaactatgaactttgattgatatatgggatattggccttggtaattgattacccacggtgggtaattgattaccacgccttaaaatgaagacaggagactataatagtctctggtaatcgactaccaaagggtgtaatctattactatgcttgaaaacgaagtcaggaagctaagggagcttcttgtcattgattaaccagggatgttatcaattacctgcttcaaaacggaactggaagactgtgg

SEQ ID NO: 83104 - DNA, 428 bp, Glycine max
aaagaacagtgacaactgtagagtctatacatgtttcccttgatgagtctaatctcattcttccaaggaaggattttttagatgatatttcaaattccttagaagatacacatattcatggaaatgactctaaagaaaaagatgaaggaagcaatgaggattctcaagataatggagttagaggagataatgaacttccaagagaatggaaagcctcaagagatcatcccctcgacaacattattggtgatatatcaaaaggggtaacaactagacattctcttaaagaattatgcaataatatggcttttgtatctatgattgaacctaaaaatataaaagacgcgatagtagatgataactggataatttccatgcaagaagaactgggtcaacttgatagaaacatgtgggaaactattcaaaaa

SEQ ID NO: 83105 - DNA, 363 bp, Glycine max
gcttgtagagaagtgtctcatatcgttttaagcgattacacatttgtttttgagacaatgattgatttattcaagagtctctgctttaatcgattaccatgtgatataatcaattacttctctcttaaaaaagtgttttggaagtgatcaagaacacttttatcgattacattattcttgaaaggtgtctagtttctgggaagaacactttaatcaattgatatgagaatataatcaattacattgtatatttaatatattacacgcaattaatattggtttctctataaatagacaccttatgttctcacttctatatacaagttcattcagtgggaaattgtatgagctgaataagtgaaa

SEQ ID NO: 83106 - DNA, 415 bp, Glycine max
tgtccttgtcgacacaaacgccgacaagttctgcgacgagatgctcgacctccaacacgtcgccgccttcctcccccgcactaagatcaacgcctctgctgattcctttgtcactgttggcacccgccagatcgctggagagtcacgcctcaacctcctccaaaggaacctctcgctcttcggcgccatcattccgcctctcatccgttactcccccaacaccattctcctcatcatttccaaccccattgacattctcacctacgcgcatgcaagaaatggaggaaaaagaactcaagtatgcaaatttggagaaaaggtcgatgaatgagagggcttgtgaggagtggccatgggaggcgaggcggcgcttgatggagtcgaccatggcggtggtggtggcgttaggggtgac

SEQ ID NO: 83107 - DNA, 416 bp, Glycine max
  unsure (1)..(416): unsure at all n locations
aacttanataatgtaaacctatactagacccgctctaattgagagaatagaaaaatgaaaactaatctaaaagtatttagctcgttattgatatatacgttaatgatgccatcgtaaccagtactagtaatggtagacatatcgatcaaaagagcagagaattaataataacttgaaataaataacccaaattgtaatggaagacaaaccataacaaaaaatagcatgtgtgaaataaataacaaagatattgcaaaaaaaaaccaacagtggcataaaaaatgaaaaagacatttcgagcacatgctaagtataagcatacattacatgtgcatgtgtgcatgtgcttgaggccctttccactgggaggctgaatgcaaacaatgcaagagcagccaggtctgtgacgtggatgc

SEQ ID NO: 83108 - DNA, 243 bp, Glycine max
tgagcatgcaactctactatgtgcaaggcggctttctcaatttttgcctcaaccgcaagcttgaacactgctgtttcttttcacgatgcttctctttatattcgccagagatgggttatagcctataccatactttgcccgaatttcctttggatataataaagcttattatgccgccggtgacttttgctaaacccattccggggtcgtacccgtttccaacataactcgggccattcttta

SEQ ID NO: 83109 - DNA, 446 bp, Glycine max
  unsure (1)..(446): unsure at all n locations
tagactcagttcagcctaccatcctcagactgatggccaaactgaacggaccattcagtcgttggaggacattttaagagcatgtgtcttagagcagaagggaagctgggagggttttcttccattgaaagagttcacttataacaacagttttcattctaccattggcatggctccctatgaagctttgtatggtagaaggtgtagaacacccctatgttggtagagcccggagaaggcctcaccttatgaccagaagtggtacaacaaaccactgagaaagttaagttaattcaggaaaggatgagaactgctcagagtangcagaaaagttatcatgaatagaggaggaaagatctggaattcgaggttggtgatcatgtattcttgagagtcactccatggaatggggttggtcgagcattgaaatcccgaanactcacacc

SEQ ID NO: 83110 - DNA, 341 bp, Glycine max
acagtgagtgatatatagaggttttaatctactaaccttttttccccaccacactacaaattggattattcttttcttttcattcttttatattccattctttacttatttgggaatgattcaataagcccacaacccattttcagggattcattcaaaagagcaacaatatcttggggagtttctttatgcctttacacccttggtttcctataaagtgtaattttgatacacttttaatgtgtaaagattaccgcgacaaccatttcagaaaatactcaagacatgattcttaaagtaattatttcaagatcaacaattatatcattcattaattgggg

SEQ ID NO: 83111 - DNA, 412 bp, Glycine max
  unsure (1)..(412): unsure at all n locations
agctntngatattactcattgagaccctcattgtctttttaaaggttctcaatctcttgggtggtgttttgctttaagaagttcatctctctgtaaggtgatgatcaataagtgatcatcaagctcctgattagaggtgctcatggttggttatttaaataaccctaaccataactaataaataactatagccataactagttataataactatagccataactagttatgatttggtataactggttattgttttaaaatatggtatataactatttatgaatataactagttatatacaagttatatgtaaaactagttatataaccagttatatcacanattatacgtaaaactatgtatataaccagttatgggtgaataaaaaataagtatttgaaataagtgttct

SEQ ID NO: 83112 - DNA, 359 bp, Glycine max
gttgtgattccaaaccacgattatctatccccttgcttttggattatccttttctttgctatatattatggttatattacttgaccttctcctagcttcctgtatcttttcagggttttgcatctctccctgccagaataagtgtatctagtatgaatcggccattgtcctatgaacacgttgttgcctggaaagcctcaatgatgaggattctaattactgcctagccttcatgttcatcacatgggctcttgtctgatagatgaaccatatctatagactactacatcatgtatctactaatcagatgatactttcacatacagatgtactgatgtcacatttctttatgccctatg

SEQ ID NO: 83113 - DNA, 348 bp, Glycine max
tacacacggatctgaccctctattctggaagtatatgaattattatctggcataaaaacatatactttatttaactcatgctacttaactctcgaaagaaaacaatgattaaatgcttatcaatctaaataattggtaccgaattggagtcgtcctattcaatctttaaaaacaaattcaatgctatgtaattacttgatccacaacatggcgagaatgccaatatgcctttgtgcgacacatcaacttgcaaagcgatttgctacagaaaacgatgccaaagcagattaaaatgctgttggtcatgctcaatctaaaatgcgacgaatccgagactgagattcatgt

SEQ ID NO: 83114 - DNA, 314 bp, Glycine max
  unsure (1)..(314): unsure at all n locations
gaatgagcatgtgatnggaagtatgactaattatgttagttagtctgtcagatcgattgtgaaggaatgtgttaatcagtgaaaatgactaacttttgtgtataaaaattgtataaattgtatcaaagactcccaatctatggttattttgtagtgttataaatattttatgttaagtataggtaataaatacttaacattttcattttgggtgtttaataatcattttctctcaatttcgcgttaattaggcaatctttggaaagtgttgttattcaccttctcgctaaaccaatctgttggcttagcgagca

SEQ ID NO: 83115 - DNA, 402 bp, Glycine max
tgcaagcttgatagacctgtaactcttacacttgtcgaggttaccgctctcaacatcacacaacatttgtccatacttgggggcttcacaaaatagtcacccttctacttatcaaggctattacccaggacattagacaaactccctcgatgtgggataacctccttcaaccctggacaacctcttttgcccacaagccgactcaaagctcggagggcttatgtgttgtccaaggtccacaaaatacatgtggcatcttatgtgacacttcaagacacatgtcaactctccatgtcaaccctagcacaggtgcacgaatgcccaacccttagcagctagtctccctaaccaatagggtatctctaaaccttctattattgaatatatggggcatctttatct

SEQ ID NO: 83116 - DNA, 421 bp, Glycine max
ttaatctcagctttatccaaggaatcataatagctcctattttaatggagaggggttaccactactggaaaacacaaatgcaaatcgtcattgaggcaattgacttaaacatttgggaagccatagaaataagaccttatgtacccactgtggtggctggaaatacaacaatagaaaagcctatggaaaattggagtgaggaagaaagaagacgagtacaatataactttcaagcccaaaacataattacttcttggataaatactctaactcatgagtatgaattgtttaggatgaagacaaatgaaagtctattagatatgcagaaaagattcacacatatagttaatcatcttgcatcattaggaagaatattccccaacgaagatctcataaataaagtgttaagatgtctaagtag

SEQ ID NO: 83117 - DNA, 431 bp, Glycine max
atcctctgagtcacctgcggcttgcaagctttacaatatattctgtgttatgatatatatattaaaatacttaagtgtctacaaatttaaaaatatatactgagtcaaactaatagtaaattattctttgctttatttattacaatatcttgagacaaaacctatctcttatgggacaaaaataataatttctttataatattcaagtataaaatttacctaggggggcatttgtccccatgattggacatgcattcgtcacatgctctatcttgaatgtgatcttgccttattggtgacaactcttgaacttgaccttatcataccatgacatatctattatcaacagaaaaaatgtcgagctactagaaatatgagttctttcgtagccatattaataaaaacgtaatatgtgtgagataagcatgtct

SEQ ID NO: 83118 - DNA, 435 bp, Glycine max
  unsure (1)..(435): unsure at all n locations
tagcaatcataggatcatagngcatgctaactgtgtctccttctttaactccaggctgcacccgaactgccaaaatagcaaatnttcagtataaaaagaaagatccacacatctatattgaagtttcatagttattccaaccaaaggggggaaaattcagattcatcattaataaattagtaggctaattntgcatatctgacctgcagatgagactggaacatgataatggtgtagaactccagttgctggaagaaaccctttttgaacattatcagcatagattcgagcttcaaaagcatgacctgccatcacacaaagagttataatatactgaatctttaaggcctctacataatagatggatggaactttacacatgatagtaaaattttctatgtgctctttattttcagaaataacacgtcagtttgc

SEQ ID NO: 83119 - DNA, 394 bp, Glycine max
  unsure (1)..(394): unsure at all n locations
nntacattanacacaagcacacaaatgacatgctcctgagtattactatttgatctcgcaagcaattaacttagactagcggttgtttaccaaattccaatgtaaacacactgantaatttatttttcttaaattaaacaaaaaacacattattattaatagttttgaccttctttttgtaacatccaatacttgcagatttttaaacatgaaaaaagatggatgagaatagacatttaccacgggtcaagatgtaaacaaaaacacattaaataattattgcaaaattatttatttaaaagactaagaatactaattgtttctaattttaaaagtatacatgaaggaaaatattaaaataagtgatatatgcactacatattttttattttat

SEQ ID NO: 83120 - DNA, 390 bp, Glycine max
  unsure (1)..(390): unsure at all n locations
ctcgacccggatccttaagtcacctgcggcatgcaagcttgctaagtgtctttctgtcgattanacataatatgatgtgtctgcatcaacaagtagatattatatggtgaagctcctggagagcttgccttgattgaaggtggtcattaagtccacgtagcctctggtctctactttctcgcttgcaaatccactagtcccttgaagtccctatccgtagaggtgatggaagggagacttcattctgatggtgcatggacaaaattgatgttaatgtcccgaatgtcgtggatattggcattttaagactagctgaactgttcttcatangaaaatccgcccgcaatggtgttcattacacctctgatctgttgggtgtggtcctgttct

SEQ ID NO: 83121 - DNA, 415 bp, Glycine max
  unsure (1)..(415): unsure at all n locations
ngaaggtaaactagatgcctnggttaacctggtaacctaactgactatgaatcanaaatctgcacctgttgttagactctgtggtttatgctcctttgctgaccactacacagacctttgcccttctgtgcagcaatctgaagcaattgaacaacctgaagcttatgctgcaaacatctataatagacctcctcaacctcagcagcaaaatcagccacaacaaaacaattatgacctctccagcaacaggtacaagcccaggtggaggaatcatcccaaccttaatggtcgaatccttcacaacagcagcaacaacaacaacaaccttattttcaaaatgctgctggcccaagcagaccttacgttcctccaccaatccagcgacaacaactacaacaacaacaaccctagaaac

SEQ ID NO: 83122 - DNA, 371 bp, Glycine max
tgatcctgggtatgacgtgatgaatactctgcatacattattgcttagagctgattgcgctaagtctctttgctacacaattgatgggctcatggccccttgataggaggggctttcttagtgatgctcttaagaataattcttgaccagtacctggcacacgatatgtactagtgggcactaccaaattggtcctttgatatgatccttgccttctttagagaatgttatccccttattaatctttgacaatttccatcagatattactgtgtgctcgagcatcacagttaacgagaaaagcttaatagagcagtcgattatgtacccactatactgtactacctggaacggaagtcttcgcttgataat

SEQ ID NO: 83123 - DNA, 424 bp, Glycine max
tcacacttattatatgtggctgagcctctaactatgcgtggtgtatattgttctacctatttatgaacggggacttcaacaaaaaaataatgtcccggtccacttataaatttggattccgatcaagtggcatgattaaaatactatgtactaattatatacagatcatcgaaaggttactatagagaattgcaagatttcttctctcacctaaatagttcacatgctaaagtcaaaccatatatatctgtattaataatacttcttgagctcttggtatatatgctctttatttcaactcgatcccgttcaagtggaattgaaaaatatcacaataatagagttatatgaatctggaggctacttatgagttcacaagataagaaataattctaaaagtgactcattgctcactcttttctat

SEQ ID NO: 83124 - DNA, 320 bp, Glycine max
  unsure (1)..(320): unsure at all n locations
tttatattatttctttatgaatcttgttacacacttgtaatggcattntaactgccaaagtttgtgcactgatatttatctggaatactaatatttatgcagctcttatgtgtcaaaatatgcaacacttattggatttgtattatgtttaatagcaattctcaaatcagtattgctatgtggaataagaatattgaatcgaacacttacatgggatgttttaattaatattgttgtggtgatgtctgtatgtagaatatgactattggattgaatgctaacacangatgcatgccttcttgtttagcgattatgtgaac

SEQ ID NO: 83125 - DNA, 450 bp, Glycine max
  unsure (1)..(450): unsure at all n locations
nttctggcatgcctatcgtcgctcgtgataatgtcaagtgtcctattcacggcagttaaagagaacttgttaaagaaaaaaatagaaagtatttaataagataataatttttaaggaaagacttgactttctacttccttttgttttttttttcattttaatatatttttttaaaattgatcctatttgtcaaatgtgacaataaaaaatgctataattgaaacaaaagagataaaattaaaaacaaacaaaagttaaaccaccaaactcaaataaaatgaaattaaaggacaacgtagattacaaaagttttcaacttttagtctattaaaaactttaaaaaaatatttcattttggatgttttcaaatgcttaacaaattattactactacaaaatagggttttaacatcagttattaaagactttcaacatcggttattaaccgatg

SEQ ID NO: 83126 - DNA, 270 bp, Glycine max
  unsure (1)..(270): unsure at all n locations
aacattgnntgatactatngtgtttcaatggtgccaacattgccaatccccaaatacatgcgtgagaatgagggaatgtgatacaatataatcgtgaaccgcgtgtgaggaatggttatctgaaattaaaagagactatatataaaatgttatattaaataagcggtttaaagaatattcaatggcaactgtcaatcttttcagtgtgcatgatgataacgtangaggacaangcttgcccatcatcccttactcacagctaccacactt

SEQ ID NO: 83127 - DNA, 443 bp, Glycine max
  unsure (1)..(443): unsure at all n locations
tgccacctatngtaatttgaatcaacagggacccataacccaagtggacagaggaatcacccaagtgctagaggttctcaaccaattaaatgtcaacaagacaatgagcacatagcaatagaacagaatcacaatatctggcctcgaatggaagacaacctttttttcttcccacttttctcatctagtttgctatgtaaattcatccttgaaatgaaattcagaactacatcctcaacaagaacatattatttaattacattgtgaaccaaaagttacattgcaaagtaaaaaaaaaaaactggcaagaaaccaccatntgggaacaaacccgtagagtgccattttttctttggcttagtattattattcactcacccatgtacacatgatctcaactcaagtctaaacagtagaacctgagagtagaaggtagagacata

SEQ ID NO: 83128 - DNA, 297 bp, Glycine max
cagctactcttggtgttttttattcagccaaaccttaaaatctctcaatcagctggaaacgcaaggatatcatcctttctgcaatctaggtgacaaactgtctgacccttgacaccccttgacgaacatatagaccctgagttgtacatcacaacctgacttgatacccgcactggtgtgcatttcctccccctggcttattggggctcaaaagacttaacctaaaggctcatgttatgtctacctctgctgcccccatgccctctcaaatatcttcttatgataatggccctgatt

SEQ ID NO: 83129 - DNA, 433 bp, Glycine max
ctcagcttgtttgttgcatatttatgttgtgtttggattgatttctataaagaataaagtttggaccaattggaaataggcatgactgagatcatattgcatgtaattttcatgttgcttattcatattgacctatgtcattgagtgtagtgatgtggtcgtcattagggtctagttacatttgttgtagtgacaaagacacaatgatttcattattgatgcatgagatgaatcaagttgttaaggtggaagtctaaaggtaaataacatacagatgcatgcatgcacgcttaaggatttttgataaaattgttacaatatgtagtccaagtgcgagattattggaattttctattctaataattaatgtgcgctaatattataagacaattatattagctatttatcaataatgagttttattctatgtgat

SEQ ID NO: 83130 - DNA, 349 bp, Glycine max
  unsure (1)..(349): unsure at all n locations
gttctgaataatcaaaaatggtacttcttcaatgggttttgattttttcaaattggttttaagtttttctaaaaatcataactcttctaaatggttctcatgaccaaacatgaagagtctatttgggctttgttttgaatctttctatcaatcccattaatcttatacaatcctttacaagccttgaatctctttgaactnnttcttctttctttgtgccaaaagatttcccaaattttctggttttctaaaccttgaaaactngtgttattcattcttttcatctcttctccctttccaaaagaattcgccaggactaccccctgaatctttttggtctctttctccc

SEQ ID NO: 83131 - DNA, 426 bp, Glycine max
  unsure (1)..(426): unsure at all n locations
tctgattcttccaccccgactcggctaggattctcatatatgaacctccacctcaaataggagcacaacctctatcctgtacaccaaagagaaaggggtttccccagcagatgtgcgcaccgaagttcgataaccatgcaatgcanatgggagcatcttgtgccaacctttgatgacatggtcatcttctaaactatcttcttgatatttttattggcagcctcaactgccccattcatcttangcttgtaaggcgtggaatttatggtgtggattntgaaatcctcacacatttncttcatcattnntgttgtcagatnggtggcattatcggtgataattntcttgggcaacctgtatcggcaaaatattttctttttgatgaatctaatcaccacactcctagtcacactagcatatgatgct

SEQ ID NO: 83132 - DNA, 380 bp, Glycine max
  unsure (1)..(380): unsure at all n locations
atatagtcatatatatatatatagatatgtatatatatatatatctgcgtggttacgttgcaagataccttgggtgtgcatgtatatagcaaaaatacctcacaaaatatatatatgtatgtttaggtagcaaaattcctcatgaaaagaacacgtgtttcttacggtaagagaacaaaaaatatatctttcggctgataagccaacatgctctagaagagaaataacttctatctcttctttganaaatgattcactgatcataaccagtttttttgagaaaaaaatgtgtatacacccgaagggagaatgctgtggacatcttcccgaacacccaaaatggacttggatgaatgcatgaattgataaaagacatattt

SEQ ID NO: 83133 - DNA, 310 bp, Glycine max
  unsure (1)..(310): unsure at all n locations
gcttctcaataagcttctaaaggaangtttatcaagaaagcttctcagtttntctacatagtctatnaatagaagcatatgtaacactcgttgaactttgatgaatgaaagtcttatgagatacacttcgaagttccacttctctccgtcttttattccttcaatttcgtgctccccctttctctctttctttttctccattaaagcatcatcttcaagcttcttatncaaggcaattcttggtggtgaagctccttctttcttggcttattccctagcggatggtgcctcccctctcattttcaccttt

SEQ ID NO: 83134 - DNA, 432 bp, Glycine max
  unsure (1)..(432): unsure at all n locations
acagacacctggaggcatgcccgctnngatttaccaatcagggctatccttctagtacataatttttttatcaaatctcacagactcaatatgacagagacagttaattttcacacaccggctaaagaaaaatgatataaaatgatttattgttcttttaaattaacaaaaaaattgttgttctgcctgtttcagattatctcacaatcaccttcttctctaagaanaatgtttgataaaacagtactatcattaactatagttatacagagagagagaagatttgtacacgaaagatgatatcatctgcaaaggctaagtgggttttgcatgacttgcaactgtaagacctaccctctagctccaccgagaagaatcttcccattttcttcgtttatgaaagacaccctttgattttgatgccccactcac

SEQ ID NO: 83135 - DNA, 349 bp, Glycine max
  unsure (1)..(349): unsure at all n locations
ctaaaatatctaaatatctcgccatatgacgaatcttttccttcttggaggtaccacaggatatggtacttccacaccttcatccacaactttttcacttctactcttctttgcaattttatttttttttctttttcattttttatttccttttctacttctatttcatttntttgggccttcaattctttattctggaccattatttgtttccctttttccctattgccttcacctctcacatcattattcttaacttcagtacctttcttttaaccgctntctccttgtgcactacactttcttcgtcctcagctttccaaaacctcttactccttgtcatcacaac

SEQ ID NO: 83136 - DNA, 463 bp, Glycine max
gtcacctgcggcatgcaagcttctccaaagggcatagttatttccagttttctatttatgtctaggaatctcgccagatggtggtccttatctttcttggaaggtaccatgggatatggcacttccatacccttatctgaagctttctctttcctcttttctctttctttttcactcctactctgttcttcatctttatttttttcaactttttctttttcttagatttcttattctttacctacctctatttctttatcttggacttttatttctctctcttcgacctttatttgtttttccctcctctgactcattgcatctgttacctcattcttcttttaacaatagtgtccttcacaacaacttgctccttcaaagcaacaacatcctcatcctcaaccgccacaagcttgctgcttattgatacaatagctttacactcttctttgggattcttctc

SEQ ID NO: 83137 - DNA, 476 bp, Glycine max
gacctatgatactaagccttgggctggaaaaacagcaccaaggttctagtttaagctctctcttctctttctctcttaattttggtattggcaattccagttctgacttttcgttttagcaataaaattttgttattcaatctataatttcattctctatttggttaatggaaggctaagtccccagcgttgttttctcttgaggatcaagcacagttctctttgaggttctattattactattaaattctgttcaatttttttcctcttcactaattactcttgaattgttgctattaattcatgcatgcttagtgctcgattaattgtctctgcgcttaatttacgttcatgctctaatgatcgttatgagtaattgtgtatgtgttgctaatcacataatgaatgcctttatgtgaattcgcttagtatcttaattagggttggataagtggtcaactgaatatgataactct

SEQ ID NO: 83138 - DNA, 457 bp, Glycine max
  unsure (1)..(457): unsure at all n locations
agcttcagcctaatcgctaagcgcaacttagccgtggctaatctgtacctgnngacgccaagcgtaattccttacggtcttaatagaagaccatgacgctaagcgccagtcatggctactaagtgagatgtattacgacaatgtgagtgctaatcgcatgctcatctgtacttaaaatgcatcattntagctaatctggccagggccatgcttagcgagagttgcagcttgtctaatctgcagacctcgctaagcggacgtacccgtctgctaaaccgaaattctgttcaaaaaaacaatctgattttgaatatgatacgtcggctaagttcacgtgttcactaagcgagccctgttgagaaaccaatttgttgttcttgctcacttaacgcaacggttcgctgagcgaaagtattgaaaaactgcataagtgagtgtaatncatgtacactcacat

SEQ ID NO: 83139 - DNA, 373 bp, Glycine max
actcaagcttaagctccttcaactgcacaaggctcttaatatttgaagagtattcttgtggttttctttcccgacgaagacactgacaaaaacttatattcttcttcttggacaaagtatggcaagctggtggcaagtaaattttctttccatcaaaccttggatgcaactgtgatcatatacccatatcagctagatcttgacagatattcaagccatccttcgtcttgccttgaatgtgaaggagcgttccaatcacactggcacaaacatttttctccacatgcataacatcaatacgatgtctaacctcaagatcacaccagtggcgaagatcatagaatatgaacctgttcttccatatgcaactatg

SEQ ID NO: 83140 - DNA, 311 bp, Glycine max
acttgccatgaaattttcttaggctgatgggaaatctacatctctggcaatgttacctttttagcaatattgcgtgactccaccaagatccctaagttgtcttcataatattgttcgaagctttcaaatgttgggtttaaaaaagacggaacttgctattcctaagctgatggatattccattacaagccctggaagttttggaacattttctcacatccctgagttagatatatcactattgtctcgtttactggaactcaaaaaatgtttttgtcgagaataatatttcttgcaacaagctatagctta

SEQ ID NO: 83141 - DNA, 342 bp, Glycine max
tctccttaattctgccagtctgctccataagcaagagaatcatgcctctattgtaattaaactttccaacactctaagttaattgaagtcttattaacaggtttttagattgatcttaactcccataccctcaagaattcatcatagctgatatatcggggactttaaaatgtcatattgggagtgagggtttgatgcaaatcctaattaataactagataatttagatggtgtagaatccaacagttcacagttctaagtatagacaacacgtttaattagattagttctaaataacagaagggtaccatctattgtagaaatatatcatactctattatg

SEQ ID NO: 83142 - DNA, 277 bp, Glycine max
  unsure (1)..(277): unsure at all n locations
agctntcttgagaaaactnccntgatatttctttttatttatcttcctcgcagaagcgagaggctacatacacacacccctctaatagcttgtctcaggtgcatgagaacctggcttggcacgattctagagaagctagcactaactacacacacctctctaatagcgaacctcacctccttcgaaagacaagcttaaagctagctacacgccccctataatatcgtatctcgccgccatttccacatgcttgagaagacacaaaaacgctcctact

SEQ ID NO: 83143 - DNA, 308 bp, Glycine max
caccttctcgctaagccaatctgctgtcttatcgagcatccgctaagcgcgacattcctgtgctaagcacaaggaagaatccagaagaagatgagctgtacaggttcgctaagcgcaccacttcatctctctaagcgcaccgcttcagttcatctgctaagcgagaaaggtgcgctaagccaaaaatcactaacgtgcgctaagcggacgagcatgaacaaggccgacctattaagcctgatatcagaatttgagaggggattttggactaggattcagaagcttgcatgtctagggtttctagagag

SEQ ID NO: 83144 - DNA, 444 bp, Glycine max
  unsure (1)..(444): unsure at all n locations
agcttgganaatgatttatatacaaaagttagtcatataaagtgactaacaagcatgtgctaagccgaaatccactaatgcatgttgagcggtccatagtcgcgctaagcacgctagcacaaacaaagccacctatttaagcctaaaatcaaattttggagaggattttggccattttctcaaggagcttctgcatgtgagagattctagagagagaagggtttgaatccagagaatttgagaggttttgttgtgcgaagacctgcagagaactgaacttgaagagaaagtcgtcctgagagcttgagatgagtttgtgagtgattgtgaggttagaggtggaggagacatcttcaccacttatatttcttcaatctttcaattttctcttctctttgttgaaaagaagctcccagttatggaaggctaaatctctggtgttct

SEQ ID NO: 83145 - DNA, 314 bp, Glycine max
  unsure (1)..(314): unsure at all n locations
agtatgacagtcaccgctttatgagcgttgtacaccagcagcgcttcgaagccatcaagggatggtcgtttctccgggagcgacgcgtccagctcanggacgacgagtatactgattttcatgaggaaatatggcgccggcggtgggcaccactggttactcctatggccaagtttgatccagaaatagtcctttgaatttatgccaatgcttggccaatagaggagggcgtgcgtgacatgagatcctgngttaggggtcagtggatcccgttcgatgccgacgctatcagccagcttctgtgatatccgatg

SEQ ID NO: 83146 - DNA, 445 bp, Glycine max
  unsure (1)..(445): unsure at all n locations
agcttangttatggatcattatatggttttcttgtttctcttagtgtatacacaacacanaggacagacgtcaaaaatgtcaacattgcattcaaacatggggcaaggaatcacaacgacaagtgtacttatgaggttacttgaatcagtaagtgaaattcatgttgtacagtttggatattatgtgcattataattggttaagtaatgtttttcgtcttcagggcacataggcaacttgttgttctatgtccacgggacaatattgttgtttggttttgttctttgcgtaagaagcctgatgataacatcaaggctacagttaacaagttattttttacatcataagtaatgtctaccaattatagagtacaaacacaatggttatttgattgtatacgttaatgttattttgtactagtgcaatgaagacaacaccactactt

SEQ ID NO: 83147 - DNA, 390 bp, Glycine max
  unsure (1)..(390): unsure at all n locations
tactaagcttctaagataaggaccatgtaaaactcgtccagnttcctgttctacttttccaatgaatcagccacaagaaactttctcagctcttccacggcagcccgagccttacccacatgagcaatcatgtcatggctggtttgcttgagggctgtaaccttcatggttgcatcaaataagctttggacatcatcggcaaaaatttcttgagccttcttccaaaaagaacgacacgttntaaatgatctaaggatatccaaaatatccggctccacttgatgccatagcacagcacacagttgatagtcaagcttctcccattcggctcttttgtcacttgaaacagaatcagaagctntcttcaagtggtcatggtgtccttgaccg

SEQ ID NO: 83148 - DNA, 436 bp, Glycine max
  unsure (1)..(436): unsure at all n locations
agctgactantatcgatgtttaagttctttctattaaaacagccaggtggctacgagttattaaagctgttaaagacgtctataatcaattaattggtttaaaacctagtgaaatactaattaaaaaagagaaacttataaaatttcgtataagtaatgtacaaattcaaaaataaatggtaagcaaatcatattaaatttaagttattaaaacacatagtatatcacaagaaaatgacaaaagagagcataatattaaaaaaaatatatgaattagagattacttatactaatatagtcaaataaaaatatttaaattgtctgaaaatgtctttacaaaatattattttctttggaagtattaatctgggtgcattatccttgtaacattnttttttctttttgaaaatgttacatacagttaactctctaacac

SEQ ID NO: 83149 - DNA, 388 bp, Glycine max
  unsure (1)..(388): unsure at all n locations
tactcagcttgtagggtaaagtctcacgaatgtcacgtgttgatgcaacatttgttatccgtggttatacgagacatctttccaaacaaagccaggttagccataactcgcctgtgctttttcttccatgccatatgtagcaaattcgttgatcctgtcaagtttgatgagctggaaaatgaggctgcaattatactatgccagttggagatgtattttccccctgctttctttgacatcatgattcacttgattgtgcatctggtcagagaaatcaaatgttgtggtcttgtttattcgcggtggatgtatctagttgagcgatacatgaagatcttanagggtatacaaagaatctatatcatccagaagcatctattgttgagag

SEQ ID NO: 83150 - DNA, 382 bp, Glycine max
  unsure (1)..(382): unsure at all n locations
agctngtaatggtaagaaaagagcatcacacactttcatctaataaacaacaagtatttaaaaaaattgtgagcctagaataaaagtgtgtatgctgctattcaagaaatagaaaagctacgtgcggaacggcaagtaatacagctggaataaaaagaaaaaaaaggtttatctatggatgaatgctctcttagaacctaagcttttgcatcctagaaaaaccatgattgattgtatcccagactcgctacaagcctagtagagtccttcggattcaagatgtgtgttcttaactgtatggcatgagatgaatcgcaaagattgagacttgtgttaagtgttgattgctgaataagtctaaacacttgtgtttgagtgaaac

SEQ ID NO: 83151 - DNA, 410 bp, Glycine max
  unsure (1)..(410): unsure at all n locations
gtgcggatctggtctnttccagtgaaaggatcgatgtgggtctgtaaaaaggcaaatttagtcatcctgcttggacgaatgagaaaactgacgcaaatgaagagggtgaggatgaagtanaagcccatgctgtgactgccattccaatacagccaagtttcccaccaacccaacaatgtcattactcagccaataacaaaccttctccttacccaccgcccagttatccacaaaggccatccctaatatcaaccacaaagcctacctaccgcacttncaatgacaaacaccacccttagcgtanaccaaaacaccaaccaagaaaatgaatttgcagcgagaaagccttataattcaccccaattccagtgtcttatgctgactttgctccatgtctacttgataattca

SEQ ID NO: 83152 - DNA, 408 bp, Glycine max
  unsure (1)..(408): unsure at all n locations
cagcttctcagggaggtgagcctagntatgagaggggtgtgtgtagctaagctctagcttctcaaggaagttttctaaagaagcttctcaagaagttttctcaaaaaagcttctgaagggagctacctagtctataaataaaaacattgggaacacttggttgaactttgatgaatgagagtcttgtgagacatacttcaaagttccacttctcttcctctnttattccttcaatntcgggctcccccattctctctttcttttcctccattaaagcatcctcttcaagcttcttatccaaggcaattcttggtggtgaagctccttcttccttggcttattccctagtggatggtgcctccccctccctcttctcctttgccttccgctgcatctctatggtgaaaa

SEQ ID NO: 83153 - DNA, 354 bp, Glycine max
  unsure (1)..(354): unsure at all n locations
gtccggatcgcacaagtagtataaaacagtaagaaccgagtatcgaactctcggggaacttgtgttatctggcaagctattttggtaaataggtgtatggtatgaaaatatgattatggttatgaacagttatgtaaactatctatgcaaaaagaatgaanatcacgcaagagaaatgttgtgtaaaaacaagtagagaatgcgttggtcttcctaataggttcctaatgctaaaatggatgttctctatctaacaatgcccatgtattcctatngtgtctnctgaactgctagaccccgattcctcatgatagactagcctaatcctgatcaagcatcgtccgtagattccac

SEQ ID NO: 83154 - DNA, 425 bp, Glycine max
tgcgagctagcttctacatgagctcatggttagttgtctgttttgtgactcttgcagcaaggatgggcacgactatatgtctagtaatctgaatatgggaaccatccttagatgatgcagagagagggttatctcttaaatctggcgcagctagaacaacttaagagtgggtctatttcttgatcatggttaggagcaggagcttctgtgtttctgaaaagaagaaacgttaaggcgcacagagggttctgagagagagagagagaatgtgaagagttcgcatatcggcttgataatgacaagatgtaatgacgagtgatggcgatagctaatgcgttatgctgaacagagagaaactacttattgaaggaacgtgacaagatattggcattttcgaacaagatcttacccgattcaggtgactc

SEQ ID NO: 83155 - DNA, 350 bp, Glycine max
  unsure (1)..(350): unsure at all n locations
taacacaatataaatgattactaaatgtggtaatcaattatctggaaccacaacgacttccttcttgtggaactagcttatgtaatcggntactaaaaatggtaatcaaattaatttgatgattcttatcaaatttcaagagaagtgagtttttgtgcttggtctaacactttgtaattaattaccaaacttggtaatcaattacactatgttgaattcattgcttctaaagaaacttgaaataatacatttatcttatncatgtggattcctactaaacctatatgataaaactaagtctaaaacacttgacatgcctagtctaaaaacatttgatagaaatgcacatc

SEQ ID NO: 83156 - DNA, 299 bp, Glycine max
caagcacctgagctgcgcttattctacacctaaaagagatgagattgcgttctttatatattgcttcctaacaaaaattttcatgcgtgcggaccttattctaataattctgacttgccgcagactcatatcacttttccattgccacctagagcgatttctaactgagataaagaaaatgcaaaggagggagatttggagaccttctcggaagcaaaggtgaaaatacctttgttagatgccatcaaacagtattcaagatattccaagtttctaaggagttgtgcccccacaaaaag

SEQ ID NO: 83157 - DNA, 359 bp, Glycine max
tgtcgccagactctgtggtttatgctcctctggcgaccaccacataaagctgttgcctgttgtgcaacaactctgaagcaattgaccagcctgaagcttatggtgctaacaactacaatagaccttctcacctcagatcaaaatagtcacaacacacaattatgacctttccagcataggtacaacccgggtggaggaatcatccaccttaatggcaaatcttccacagcgacacaacacacaacctattttatattgtgtggccaacagaaatacgtcctccaccatcagagtacataacacacatacccataacacaaaggggagtctcgaacttcttgagacttggagaaagatat

SEQ ID NO: 83158 - DNA, 430 bp, Glycine max
  unsure (1)..(430): unsure at all n locations
gagctttgtgtganaagatgtgactcttcacattttgaattttatntcaacattcaaaggcactggtaattgattaccaaatcattgtaatcgattacagctttttgaaaataattggaacgttgtaaattcaatttgaaaactttttcanaacaattttgctactggtaatcgattacaacaatctggtaatcgattaccagagagcaaaaactctttggtaaaacgctttgtcgaacactcatgtgctattcaaagatttgaaaaactatctaatacttatcttgattgatgcttttcttcattcttgaatcttgagacatgaatcctgatcttgattcttgagatcttgaaccttgaatcttgattcttggctctagactttcttcttgagtcttgaattcttcttgaatcttatcttgaactcttg

SEQ ID NO: 83159 - DNA, 338 bp, Glycine max
tcttctcgccacgtgccacgttggctcgtctcataacctctttcaccttcgcagaatgccccaccggtttctcaaactcctccatcgttaactgcttccccgtctgcaaatcactcagcctgttccacgtgccgtcttctccgtattcgtttactataaactcttttcccgtgtccaggttctttattaaaaaaaacgcgctaacgccggccactcccatgaccggcgtgattacctggcgattcacccgtgcatccacgtgcacaagggaatcgccagcagccgcatctttcaccaccactcggttgttctcaacgcgggcatgccggcgttgagcg

SEQ ID NO: 83160 - DNA, 410 bp, Glycine max
gtaaactagatgcgctggttaacctgttattccatctggccatgaataaaatatctgcacttgtcagcagactctgtggtttatgctcctctgacgactaccacacagaccttttgccttctgtgcaacaatctgtaaacattgaataggctgagcttatgctgggacatctacattaaacctccttaacctcaacagcaaaatcagccacaacataacaattatgacctctccagcaacaagtacaatcccgagtggaggaattatcccaaccttagatggtcgaatcctttccaacagcagcaacaacaacaacaacaaccttagtgtcagaatgttggtggccaagcagaacatacctcctccccaattagcagcacaatagcgcgacaaccccagaaacacaaaca

SEQ ID NO: 83161 - DNA, 376 bp, Glycine max
  unsure (1)..(376): unsure at all n locations
cagaaacagattgcttctttacttcggcagctntagttttcttagttaaccttgcatggagatctcgcacagaagtacccctggctacttcctccaatagttcattccgagctgcttcatattcctcctaacataattaataggagtaaaatatatcacgctaatgtcgaattccggcttaataggagtgggaaggatcctagaatcaacttagatgcggattaggagtgggaatatcaataaacctagagaatacatacacatagcattaataggagattggcgagactaaactgtttcagaggtagttatggcaagcataatcaagaacatctacccttgatacattcagaanaatagaattgatatattcttc

SEQ ID NO: 83162 - DNA, 458 bp, Glycine max
  unsure (1)..(458): unsure at all n locations
ctgaggcatgcaagcttgggaggcttaaatttgggattgttcttatgctgaagntgaccgcgggcgggtggcgttaatcctgaaagatactaaccacttacttaatcctcatatgctatactttaacgtctctttctttccatttcaatcatcaattccagtttttacaatgtagtattaacataaagaaagtagtgatgacaaacctattattttttttaaaacaaattatttatctatttgtataatttttaaatgaattaattatttttttatatcttaattattttctctccccgatcatttatgaaaatcaattaatatctttgccattaaatttgtttgatgcgagttntattaatttattcgaataaacattcatttattaagatttgggaatatttattaataaaaaagtgattaaaaattaacgccctttcccacaataaaacatacta

SEQ ID NO: 83163 - DNA, 397 bp, Glycine max
  unsure (1)..(397): unsure at all n locations
tgaatgataagagaaagctaattatctttcatactatagntaaccttctatcaactatcttaatcttaataatatataatattattaagattaagaaaaagaaatggtgtgcttccgaaatggtgtccttccgaaatattataaattaattatatgcaacaagcaggataaaaaaaagtgtacattatgaatgttccaactatatatggaaatggtacacttacaaggacgctaggaatgagacataaataactatatatgcctccctcctaatgttattatttcagaaagcaacttcttttataacaaagtaaaaaagctagcatccacatattttgagatagaaaggcatgcaatggatcttctagcctatatagcanggaaaagctcagtcaaa

SEQ ID NO: 83164 - DNA, 456 bp, Glycine max
  unsure (1)..(456): unsure at all n locations
atccttaagcacctgagctgcagctttcgctatctggacgccttagttaatcaccggcacctaagcacccaccagaggaagctcccaagtcaactcgaacccactcaccggccgaattcaacacgacaggaacttccttcgaggcattggcggaattcaccccgctcccaatgacgtacgaagatcttctaccattcctcatcgccaatcatttggccgtggtaactcccggaagggtcctcgaaccccctttcccgaagtggtatgaccctaacgcaacttgcaagtaccatggnggtgtcccggggcattccgtcgaanaatgcttggcccttaaatacaaggtccaacatttaatggatgccggatggctgactttncaagaggatcggcccaatgtgagaaccaacccgctcgccaatcatggannggggagcggtaatgcagttgagtccg

SEQ ID NO: 83165 - DNA, 412 bp, Glycine max
  unsure (1)..(412): unsure at all n locations
agcttgttcaactgccagaatctggccttgccattgntgccttcttcactctctccagnttcttcaaaaggtgccaaatgaaacaaaaaattattacactgctcatgatcccaactaattttcatggaatacataattaaaattctcaacttactagaaagaattgtgttacatggaaattaactggcatagttgtccccaactatgtaatataatttctccaaaataaaaacacctcatcgtgtgtgtatgtgtgttgtgttgtgatatttctgcatatataaatagcgtttacacatatgaaaaccgttgtatgaaaattgtgttacatttgccaatgcagatctagaactcaattttaggatcaaattgccttcanggcgtgtgttaataaatagtttatatattttta

SEQ ID NO: 83166 - DNA, 389 bp, Glycine max
  unsure (1)..(389): unsure at all n locations
tgccgcccagctcgcccaggcgagctcagttcgcccaggcgattttggtgcttcctccagaagcaacagccttctggaggaatcttttggagggcccaggtgggcctggttggctattgcacccccctttntactaaatgcacccccttctatttttttggtaattctttttccgtaacgttacgaaactntacgaatttcgcaacgatccttattttccttccgcaaggttacgaatccttacggattatgtatttactttttttagttttttgaaggagttacggaaacttacggattgcgcanaaacacctcttttcgacttccaccacattacggaatttcacggatcgcgcaagcctgcttccttttgatttccgagacgtctc

SEQ ID NO: 83167 - DNA, 391 bp, Glycine max
  unsure (1)..(391): unsure at all n locations
agcttncttaagaanattcctaaagaagcttgagtttatctacacacacatctctaatagcgaagctcacctncttgagatgagaagctagagcttagctacacaccccctataatagctaagctcacccccatgacaaaaaagagatgaaggtactttaaaaaaagtgcttactacaaagactactcaaaatgccccgaaatacaaggctaaaaccctatactactataatggcccaaatacaaggcccaaacgaaggaaaaacctattctaatatttacaaagataagcgggctcatacttagcccatgggctcaaaatataccctaaagctcatgagaaccctagggccttcccttggatctctagcccaatctacttggagtctttt

SEQ ID NO: 83168 - DNA, 472 bp, Glycine max
  unsure (1)..(472): unsure at all n locations
tccgttactcaattacaagcgtctcgatatattatgcacctgtatcggacctncgagtgacaagttatgaacgattgaatttctcgagagcttccgttgttcaatttcgagcgtctctatatgtgatgcgcctgaatcggactttcgagtgaaaagtgatgaccatttgaatttctcgagagcttccggtgctcaattacaagcgtctcgatatattatgcacctgaatcggacctccgagtgacaagttatgaccatttgaatatctcgagagcttccgttgttcaatttcaagcgtctctatatgtgatgcgcctgaatcggacttccgagtgaaaagtgatgaccatttgaatntctcgagagcttccgtgctcaattacagcgttttgtatatatgcgcctaaatcgacctcgatgacagtatgacatttgaatttcgaagcttcgtgtcaattcagcgttcattata

SEQ ID NO: 83169 - DNA, 430 bp, Glycine max
  unsure (1)..(430): unsure at all n locations
agctngaaggaagaaggagatgaatgaatggattgggagagaagagcacgaaatnttgtgctctaaaagagctctgaaatctgaagttaatattcaaatgatcaaagtttaaaaaaaaaaatgcacacacatgacctctatttatagcctgagtgtcacacaaaattggagggaaatttgaatttcaattcaaatttcacttgaatttgaaattgaatttgtggagtcaagctttggagccaaaatttcactaattatgattagtgaattttagttatggttcagcccactaatccaagatcaattccaagattctccactaagtgtgcttaggtgtcatgagacatgtaaagcatgaaggacatgcacaaagtgtgactatatgatgtggcaatgaggtgtagtaagcaaatgctcaccttcccctcta

SEQ ID NO: 83170 - DNA, 460 bp, Glycine max
  unsure (1)..(460): unsure at all n locations
cctccgctatcattgattgactgatataggtgtgtatctcgatttctcattgagccagttatatatgcaccataacaccaaatgtgcaccaccggatctctgattttttaagcacacccgtgaccaccctaagtgcagtattggccaatttcaaaagagaagaacagagcacatgcgcatgccttgatagggatttagaaaagttcatgcccgtgaacaatatgcaacattaaccttggtaacagaatgaagganaagagaagtatatattatgatgtaatagaaaaaaataaaaggaaatgataaatgttaaccgagtgtgtaaaactgattggtgcaagcaattaataaatgtaacaattatcatgaagtacatanaagaattgcaccagtatgatggaatggttatctcatggtatctatggtaatggcgaaacaatccataagatgggtcgaatcg

SEQ ID NO: 83171 - DNA, 380 bp, Glycine max
  unsure (1)..(380): unsure at all n locations
gcgactgagctgcaactggctaagactccattgttttttttattctcaaccttnttcggagccccatgaatggagttttcgttcatgcgtcctccaacttcaagtgtggagccatgcgttgctattgcttacggcaattctccattctcaaccctttgtggataccccatgatatgtgtttacggacatgggtcctcctacttcgtgattggaactatacggacagagtgccttgcgcaaaggtccattctccaccttttgcggagccacatgaatcgccaatgcgttcatggggcctacaccttctagattggagctatgcgtaaagaatgttgagcgcaaatactcattctcaacctgataaggagcccgatgaattg

SEQ ID NO: 83172 - DNA, 414 bp, Glycine max
  unsure (1)..(414): unsure at all n locations
gacctataaaactcagcttctcgggccattcctgcgaaggcaacatttggtttgtttgtttaccagagggatactattcttaatacaaaaatgacatacaacctcctcccataaatacaaacatcaatgtaaatttagaggaagcttatgcgcatatttccttacaaacgttctcttgcacaagacattctattaaccaaaaaaaatgcacccatatacaatcaaggcagcttcgttacctagattatttacacgtacttccaaggtgtatntgttacttacatcacacacctncttggctaaattcacatacatgcatactcaaagcattttggggaccaaaaattgacatgtgcacactctggatttctatacctatcatacacaacttcatgatgaatctgctattacaca

SEQ ID NO: 83173 - DNA, 346 bp, Glycine max
  unsure (1)..(346): unsure at all n locations
agctntgagccaaaatcttgactctccatataccttaccctcggaagcaaaaaaggaaggaaggaaaggaaattcccaatcaaagagaaagaaaaaaaggaaggaaaggaaattcccaatctaagagaaagcaaaaaaggaaggaaaggaaattcccaatcaaagagtgggagaaagagaaaaaaaagaaacgaaaggaaattcccaatcaaagaagtgggagaaagataaaagataagaaagaaaattcccaaccaaagaatgggagaaagtaaaaaagaaggaaaccatgacctaaaagtggtcttctccctttgattaccaaccaaaatcctgtgcactagcg

SEQ ID NO: 83174 - DNA, 435 bp, Glycine max
  unsure (1)..(435): unsure at all n locations
tgtagaatggctagacataatacatggaggggtttggtttggttcatggataaaagggatgccccacattatttccatgacacanatgcaaagatgatgatttggaaattttatgcaaaactggtcatgcatgcacctatgcggacactcaagtgtcaaatttttatggtcatgtgatgctagggctcangattcatttcctctattntaaatcaacccaatgtttccaaaatatgttcttttatcaatttgtgcattcatcctagtccattttgggtactcgggaaaatttcacagcattcacccttcaggtgtacacacattntttcaaaaactagctatgaatcagcgaattttctttcatctcttttcgaaagcatgctggttttttcagctagacaactttattnttcttttttctctctnttntttctt

SEQ ID NO: 83175 - DNA, 476 bp, Glycine max
  unsure (1)..(476): unsure at all n locations
cggatccttaagcacctgagctgcagctgagttttgngtttaaactaactcctctagtcctttttataagaaacaagttttagagtagtttacattgaaacttgtttcttataaaaaggattggaggtagtacttgaatagttgaatttaaaaacgcagtgataatagcacttttatattggttttggagggagtatagtcctaggaaccttttaaatcctagttggggagtaaaagcatactgtaataataccctcgattgaataatatttgccaatgattgatgatctatttggttctgtaatgtttttggtgtgctgataatacttanaatggatgtttgtttgataaatataattgggatatcatttctttnttcaggagaagcangttgatcttcttccgaagttgaanaagaatgtaagcactccagagggggttccacgcttttttgatttagtgaaagtcaagatgaa

SEQ ID NO: 83176 - DNA, 158 bp, Glycine max
  unsure (1)..(158): unsure at all n locations
agagagagatgggtattgtgtattgacgagaatacggagagaagttgaactntgaagtgtgtctcacaagtttctcattcatcaaagttatgacaagtgttacacatgtttctatctataatctagcacatgggaagcttccttgagaagcaaggtga

SEQ ID NO: 83177 - DNA, 404 bp, Glycine max
agcttcctcggggccattcctgcgaaggcaaacatttgttatagtagttttaccaagaaacgctaccctgaagacaaaaatggcatacaaacctcctccaataaatagcaacatcaatggtaatttagagcaagcttatgcgcatacttcgttacgaacgatcacttgctcaagacattctattaactaagaataatgcacccgtatacaataaaagcaccttctgtacctagagtatttacatgcactctcaaggtgtatttgtacctacatcacacgcattgtctttgctaattacatacatgctactcaaagcacttggatatataaatagatacgccacatactggtattccaaacctagcatacacaaacatatgatgaatctggctatctcacaagta

SEQ ID NO: 83178 - DNA, 349 bp, Glycine max
  unsure (1)..(349): unsure at all n locations
agtgccactacttgctctaatctcacttncaatgatttcaaaatagaacgatgttggcgcttatcacatnctttcccgctaagcccggctcgaaagctcaacttacaaaatgaatctatggcttagcacagaatggcgcgcttagcacagctattaaaaaatttcatagagaggaagtggcgcttagcgcatcattcacactaagcncactgcttaatgtgcaacttacagtgaagatgctgggcttagcgtaccgatgtgcgcttagctgaaccattcagccaatcaatcaggggtctttgcacttagcgcgagcaagctcggcttagctcgtgaagagatggcacat

SEQ ID NO: 83179 - DNA, 448 bp, Glycine max
  unsure (1)..(448): unsure at all n locations
agcttgttattaacaataatcattaatgtttatcatgttgtatcatgtgacatctatgaatgtttttaatgtttaccatcacatgtaatattaatgttggaattgtgctatataatatatagaacaaattatatgtaccttggattacaacatatgcatacacattggaatgcccaatgtgactgcatgcataaaggcggataactaattagtgccctaaccttatcattcatatggctattggacatgtgtnttgtcttacctaaggaggaaaccatatattggaattaatacaaaatacaacacaattgttgattnttttgaacaatgacaaattttgtgacagaattaaattatataacgataaataaaattacaaccgaatactatttttggaatagactaaagaaaagtgagattggtctaaacaaattaattttcattttta

SEQ ID NO: 83180 - DNA, 303 bp, Glycine max
  unsure (1)..(303): unsure at all n locations
ttgtgagcctacatcaaacatttggattattgatgtttctgtcacaatcaagtgatagttgatgtctccatatgtgcgtacactgtgaataatgtttcnnttatagaaatcatttggagtatctactgttgattatggatgagtgatcgctcttgatttaaaatattgnctcctaatcaatcgagtgttcatcttgttattagntgttcatcttccaatcatgtcttgtttaactgctcgatatgttgtcatgtgttacttctgttacgaatagagagagacttcgcccttgataatcacatt

SEQ ID NO: 83181 - DNA, 404 bp, Glycine max
  unsure (1)..(404): unsure at all n locations
agcttggagttggagcattgattatgctngtgtgatgttattggagcatttgcttgacagatcaaagtgtctttagttatgatcttcttctgggtatctgttaagagtctatgaagctgtaccaaatatcctaatagcttttagtttggttaattcagctgaatggttgtttattgttgtactggtgcttcttggtacgccttgtaccttgatacttttcttattaatgaaaagtattttgctttgttaacaaaattacaatgtttaaacgagcttttataattaaaataatgttatttattctcaatatgtttgattgatttcttaattatatttaaataagatttgcacttttattaataattaattcttgatgatttaatcaattttttttaactatcaac

SEQ ID NO: 83182 - DNA, 465 bp, Glycine max
  unsure (1)..(465): unsure at all n locations
tcctgtntcatatgtatcttagtgttgtttgaaacgatgtgattatttatcagctggggtttttttagcattcagttttgggttaaggctagatgcttgcaaatattagatatttagaattatctaatattagtagcatgagttttcttttttagcattcagttttggtttttctnttagcattcatctttgggttaagcctcagttttgccaagaaaaggtacataatttgcatttgacttatgtattaattagctacttagaattttaagtatactttggtatcatcactatcatgttaataattagtaccaaaatatactgaaaggaatgtctgcctatcacacattaaactttaaacaatacaaagattaatatgggaagaaaataatgatcctatcatcttctttttgtattatggatattccgacctctctatatagaagctcgagttaggttaattta

SEQ ID NO: 83183 - DNA, 456 bp, Glycine max
  unsure (1)..(456): unsure at all n locations
tgaggcatgcaagcttggaaccatgttcctatgactaactaacacttatgcatattgtcaaaaactttcttagctataactacttgtctagacccaacactaatgctactggaaagatagtatggtgaaactaaaatactatgacataaaaacggtggaatgatcttaagattatgaaagattatgctcattttattgatattttgacgcctaaacctcaaataattgcgatcactcgctttatatatcgagttataatatctttaatgttaatttaatttttattaaacagataattatttttatctcttacgtaaaatgaacattagcatgccaataaaattaacaaaaccttaagcagctgcattttcaggaaaatatgataagttntaaagatgttattcttgagacaaaatcacttggaaattttacaagaatttatttccactaaactat

SEQ ID NO: 83184 - DNA, 57 bp, Glycine max
actgattactgagtctgatcttagtacttgctggctatgagggattattatcatagt

SEQ ID NO: 83185 - DNA, 432 bp, Glycine max
  unsure (1)..(432): unsure at all n locations
agcttcttatctaaagctcatcttggtggtgaattcttcttcttccatggcttattccctagtggatggcgcctcctctcgcctcttctcctttgtcttccgctgcatctccatggtggaaaatcactattgaaggacctcattgaagctcaaagatccagcctccatagaagccccacaagcaagcttccatcaagtggtaatcagagcacaagagcttcaagtaggtgctccttaaacctccattaattttatttctttaccttctcttccattggtgtttcttcattnttctccatgtatctcctcacatgtcttgttctaaatgttgttaacatgattctttagagtttccaccgattaaacttgctatagaagttagaaattgatttctatggtttaaatttcttggtcttgttctcgaaccatgaa

SEQ ID NO: 83186 - DNA, 452 bp, Glycine max
  unsure (1)..(452): unsure at all n locations
tntgagtgaaaggatgtgactcttcacatataaatntgtatttcatcgttcaagggcactggtaatcgattaccaaaacattgtaatcaattacagccttttgaaaatatatggaacgttgtaaattcagtttgaaaacattttcaaactcattttgctactggtaatcgattacaacaatatggtaatcgattaccagagagtaaaaactctttggtcaaggttatgtcaaaaactcatgtgctattcaaatgtttgaaaaactatttaatacttatcttgattgagtcttttcttcattcatgaatcttgagtcttgaatcttgatcttgattcttgagatcttgaatcttgaatcttgantcttggttgagggcttcttcttgatcttgaattcttttgattctgaactctaactngttctgttctttgagcttttagtcacatctttg

SEQ ID NO: 83187 - DNA, 136 bp, Glycine max
  unsure (1)..(136): unsure at all n locations
agctngtcatgaggagagatacaatctttgatgttcttttttttctcaccactagctcttcatggaagatgtctcacatatacctattctttgtagacatttgatcacagcatgaccatgaagggttctactacct

SEQ ID NO: 83188 - DNA, 410 bp, Glycine max
  unsure (1)..(410): unsure at all n locations
ttagagtcgacccgccgcatgcaagcnttggaggattgtatatcttctagatgaattcgactangagttatgctttctacttacatatttgtattgtgcattgagaggctcctccttcttatgtctatagctatggaccaaagagtgtagcgtcatattcatcttagtagacatggccctcctataacatatttagcctttgcatatgatgttattctatttgtgaaggctatcctagagcatgtccatgtgatgaaaaatattctaaatctattttgcagagctccaggtcgaaatttagcttagagaaatctcgcatgttatctttaaatattgtgggaagaaatctcaagcaacatttgagtgatgctatatggatgtagtggacagaggacctatgcaattacctt

SEQ ID NO: 83189 - DNA, 445 bp, Glycine max
  unsure (1)..(445): unsure at all n locations
agcttgtctttaagaaaattatgcattgtctttatatactcaatggagattgctagaaataactctgtatatttgattcaaaaatgttactgaaccatggtggagattgttggaagaaagaggtgactgaacaacatcgtctatatcngccagtctagtcttctatgttggaatttgtctcctgtctagtggagcgtccaacatgtctaacagtgtatcattcagtctatttagttagttgttagataagatatgtttgtaaccattttctgttatttttgtttcagtttgttatactcctatataagagagttagttacaatagttaagtgcgatgagagtgctaaacccacacattgtaatttcattggtgtgatctttaataataggtatactcctttttcgcccatattacacaatacctggtttcttcttcccttatctg

SEQ ID NO: 83190 - DNA, 366 bp, Glycine max
  unsure (1)..(366): unsure at all n locations
tttttgtgagtaagagcatttcacatcttacatgatacaaacttaggagagagagacagagaanaccaacgaacccaagtaagactactaanatgtgtggtcattcctggttatgagaaagagagcttggtgagaagagtagcttggttnttcgctctttctttcacaacacggtacctattaattttttttggcctattatgtcatcttctgctttgtcttgaatctcctctctcaattgtcccgtgttcattggtgattatgtgaaacctttccttatattgtctcttcttcaaaataattaagccaacttatgttgttttgtgttgtctgagaaatgatggaaatattggagtgtagtaatag

SEQ ID NO: 83191 - DNA, 354 bp, Glycine max
atataagtctattcatcaaatcttatcttatccagattttattctatgtagatcttatcttatccagagtttattccatctaaaatatatttcgaccaaagtttatgtcatccaatcttattttatcttgttcagatttattttattttcgacttggacttaaatagattggcgagctctgaggctgaggacctatatatagcaccaatatttttgtatacggatatttgtttcggtgaggagaataattctaggattttagagattcaggtctaattattgttcatgcacacgtttcacgtataataaatataatttctgcaatttggttcggcttcatctacagtctcgttc

SEQ ID NO: 83192 - DNA, 272 bp, Glycine max
gaggcgagcgcggcgtgcagctagaagcgaaccgaattcttttatttttgcggaaaccctccacgttatcatataatagcaaaagagcagtctatgaaccggtgcaactgggaggcaacaacagatagccgaataacttgcatacgtaaaaaaacctgccgcgcccgccgaacgtttaagagtaatcttcgagattccgccggtctctaagcaacgtcaactagccctactccatacgggaagacccccccgacttcacttatcttgaccgg

SEQ ID NO: 83193 - DNA, 416 bp, Glycine max
  unsure (1)..(416): unsure at all n locations
agcttgtatatactgggtttaagggtatgatatatcatatatcattaatacttatttaattntttttctttctatgttgcttttcctatcaaatcatatttaattatctattatatctataattttctcttctttctttaatttctttctatctatgtgtcaaataacatatataggtgctgatgcatgattattcttgtntaaattaagatttgaggtaatgcacgagctgtgtggtttttctctgcatttttaatggaaaatatgtgatcgacactcatatatttttcacaccttagaagagagaaatttttcgtgagagaaacaatataagtttatagaattttgtgttataaaaaatataagtgtgatagatgtgacatacaaggtattggggtatatttttcaatgctgat

SEQ ID NO: 83194 - DNA, 288 bp, Glycine max
agaatctaagctatgaaggctcactattctctaatgcttcttattatgttcgttggaattgaagtatcgacaagcacatatctgattcgtctggttagaagctaagacaatacacaacctactccatcatatatataaatcttattggcctgacagaaaaacaacacactccatcatatactatacaattctgtttcattaaaaaagtgagagcctcaagcatataactcctgaccggtagatcgaagtctgatatgggctctaatgccatattgacaaccaacaatc

SEQ ID NO: 83195 - DNA, 438 bp, Glycine max
  unsure (1)..(438): unsure at all n locations
agcttggttgcttctagaggaagcaacccagctctcctgtgctagctgggcggcaatctcctccccgtttttcctataaataggctgaagggggctgttctaaggatcccggatgcccctggtgaggtatttcagttgttttgggtgaaaaaaaattgtttccgtgaagaaaatccaagccgaggcgcttccgtaacgtttccgtgagtaattacgcgaagattctcgaccgttcttcaacattcatcgttcgttcttcgttttcttcagtcttcaacgggtaagtacctcaaaccgagcttttcaattcattctatgtacccgtggtggtccccatttgntttgtgtatatttattctcgttttcattcgctatctatacccnctnttgacgtgcttcagtcattttattaagtcgtttctcgcctaatctaaaaat

SEQ ID NO: 83196 - DNA, 287 bp, Glycine max
  unsure (1)..(287): unsure at all n locations
gcacanaagccttcatcaagaacttagaaatgcaggtgggacaattggccaaacagatggctgaaagaccctctagtagctttggagcccacacggaaaagaaccccaaggaagagtgcaaggccatactgaccagaagccaaaagagagcacaaggagaggcagaagcagaataagaccagtctgatgaaggaaggacagacagagatgaagaaagagaagaaggaagaggaggaggaagagaagacggtcttactccctaagaacaaaagccagttagcccgaga

SEQ ID NO: 83197 - DNA, 369 bp, Glycine max
  unsure (1)..(369): unsure at all n locations
gtcacctgaggcatgcaagcttagcgtanaacgactcaacgttgtgctctctcatatttcaacaattnaagcagcgttgctgaatggtttctgtgaagaagggattcttcgacgggtcatctcactcagagtatacaagtgctttgaaatttctgagggtcatgtatagaaagaaagagtttgaattcacgtttctcaaaactgaacacgcggatcaatatttgatattttcggatcacgccgccanaactctgcggcttgctgatgattgaacttcctgtgatgtgagagaaatcataaactgtgcgggagtgttggtccggaatagatctgctgagctacattggatttcatggcacgatattactc

SEQ ID NO: 83198 - DNA, 299 bp, Glycine max
  unsure (1)..(299): unsure at all n locations
gagcgatgatcatcggnntagttacgaatctggtccaaccgacgcttgagaggatctggtttcagagctaggacggatcttctaatcgactcaaatccatgtgcaacaccaccgtcagaaccctagttcaccaccacaaccaccgattagtaacctaacatcatcaaatctttttttcttctcagaaaatgaaaacagtttgaagaaaataacaaactttttcactttctagcagtaacatttcctttgaaaaatttccacaccacaagcacaaatcaaattaatacaaaacaaaccct

SEQ ID NO: 83199 - DNA, 420 bp, Glycine max
  unsure (1)..(420): unsure at all n locations
agcttctntgagaaaacttccttgagaagctagagcttatctacacacacccctctaataactaagttcacctccttgagaagcttccttgagaagattcctaaagaagctagagcttagctacacacacaccctataatagctaagctcacccccatgccaaaatacatgataatataaaaaaaagtccctattacaaagactactcaaaatgccctgaaatacaaggctaaaaccctatactactagaatggccaaaatacaaggcccaaaagaaggaaaaaccaactctaacatttacaaagaagaatggatccaaccttgacccatgggctaaaaaatctaccctaaggttcatgagaaccctagggccttctttagtagctctagtcgaagcctcttggagtcttctatccaata

SEQ ID NO: 83200 - DNA, 361 bp, Glycine max
  unsure (1)..(361): unsure at all n locations
ggaagccacattatcccttgcgttctagacttcaaccacttgtgaatgccgncgatgacaccattgctacttcctctaagctccttatcttttctttccactctattccatgctntacgaattttctgaagtatcttcgcattagcttcattgaagcctcatgcgatgaaaggcgtgatgacttcctccgacggcatacctctcatagggtagcctaactatcttattgccaacacgggattataattaatacaaaccctcatccctatcaaggggacatttangaatacttcgcatgagtataacactcctgcccctctttctttctaccgtgggaaccaactaacgggactctccatca

SEQ ID NO: 83201 - DNA, 433 bp, Glycine max
  unsure (1)..(433): unsure at all n locations
agcttagcgcgaataacgcccacgaagaagctcatatgttttcttatcgtgaatccttgcgtaagcgcatgatcactgncatacttgcctaacccaaaaggcctgcttatcatgaggtcgcgtgaattttaagctaccttaggcctatataaggaatatgaagctaaggagaaatatacactgagactcacagctttctaatgaatacatcctanatttgaatatctctaataagagaaaatatctttctatgttcattatcctcttctctttttttatccatcccttccctttttctatccacatcaaccctaatgtgaaagcctctcatgacaatgagaggctcaaccccagtgttaggaagtgtggatgtcaacttttgtaatggagctcattcttattatctattaaagaaatcttgtttctattattc

SEQ ID NO: 83202 - DNA, 319 bp, Glycine max
tataagcttaaactacctaaaggtacccgcatacatctagtgttccactgctctatgcttaaaccctttcatcaaccaaccctgcccgataataatccacccctctcattgccaccagttgtaatcgataatcaaccatgggtgtcaccattagccattgtgggcactatgcataactcagacttcgacaagctcagactgcaagtccttgcgcaatgggatggtttactttccgaagataccacatgggaagattgggagcaactaccagctgagtaccaccttgatgacaaggatgattttgaacgcatatgggatg

SEQ ID NO: 83203 - DNA, 453 bp, Glycine max
  unsure (1)..(453): unsure at all n locations
agcttggaactccttgaaagagcttcacaataagctaatgcacatgtccatgcatgtaggatctttaggtatgcataacccttcttgtatttattattacactattataaaactaaacatttgaggttttttttatctgatcaactgatattttcggctctacaacatttgccattgaggggcaagtcaaggacaaaagtaagtggttttcatcattgagagacttcaagatgaaattgaaggtactgatatgttaacaaagttgagtgagaaacaaattaagaagggtaaagatatatttataacatgttaatcaatttcattgcacagattatgaaaatggaacacattaagctattagaggaagcacaggcaaccaataaatatcaagcagatatgagagaaatggngcttattattaagtccaaaagtaagtagatttttgcgcaacat

SEQ ID NO: 83204 - DNA, 377 bp, Glycine max
  unsure (1)..(377): unsure at all n locations
taattatatcgcgcataactaaataggatattgagtnttttttacatgcatttacttaacaagaaacttaaacattagtaagttttaaactatatggttggcaaaagaacaagttgaagagtgaaggtttccaaacaacaatccctgacaaaaaataaaaaaaagttggctctagccaataaatcatatcaacactaagaatgagaaataataccagcatccctatccaaaaaatattcaaggatgagacgtggaacacggaaggattttcatgctgctaatgatatatctaacataataatactggttcttttataactcttaagggtattatggagatggacgagagtggtgtccatggcgcctcacatattggg

SEQ ID NO: 83205 - DNA, 449 bp, Glycine max
  unsure (1)..(449): unsure at all n locations
tagcttctggagggacatcttgactagcttttctatctgacattcatcacaaattctgccttcttctattttcagattgagaatgcctctaacagcacctttgtcaatgattttcttcatgcctcgtaagtgcagatgtccaaatctttgatgccatattttgacttcatcttctttggagaatagacatgtggaggagtgactggtttcttgaggtgtccatagagaacagntgtcctttgatctgctgcccttcattagaacttcactcttctcatttgtcaccaggcattctgactntgtgaagttacattgaatccttcatcacacaactgactgatgctgatcaagttcgcagtcagtcccttcaccagcagtactttggtcagactangaagtccttcatggactagctctctcattccagtgatctctactttagagccatc

SEQ ID NO: 83206 - DNA, 368 bp, Glycine max
acaattaacaacttgtgagaggtaaaatcacagtgaatacttcacagatatcagtacaatgaaagaaaggtcatgtatagaggcatagcataagttacaaatataccagtaatgcatacaacaacagattgaaatcagttttcaaatcaaagatagaaatacctgagttcgaggcttcaacacaattgactttccaccaatgaccgcaggacgcacttgaatttagaaacaacaatgtgtagatgcaattggcattgatgtcttgatgatgatcatgatgatgtgttgcaattgatgcacatgggctcttaagagtaaaattcaagacaatacttcaagactacaagtcacagcatcaagatgatcac

SEQ ID NO: 83207 - DNA, 453 bp, Glycine max
  unsure (1)..(453): unsure at all n locations
agctntngtcttaaatatgctngtgncttaaatgctatgaaatcatgctccctnctctattatatttcacgataataaaaaataataatacttctcccaattgggcttcctgtttgatggtaaatatagaaaagccatatcaactctacaattttgtaatcctaagggatggaaagataaaaacaaatcccgttgagcattaagctaaggaatttgagctatttccaccanatatttgtgaagagattgtggcttaaaaaagaatggacagtggtcactgcctttgatcttgaaaactccttcaggtggattntccctcacaagcttctcttggacatctggtgaaagcgcacgatcatccaatgttngaatgtaaaaccggcgaccagtactcatattgtcagcagatagagacagtttctccattattggaccaagagggctatgtctcat

SEQ ID NO: 83208 - DNA, 476 bp, Glycine max
  unsure (1)..(476): unsure at all n locations
actaattacacgtgttataccattgatctgtgcttttaattatattaaacccattctgtttaactctacgtatntatctcccatcagaagttaaggactaatattttcaagtattaagatctattaaaggtatagtctctcctaatagatatttttttatacacatgaacttgagaatcaaatctcacatatttaagggataagattatttattaattatgtcatattatgttgatagtcttttgtttctatatataactaatattttagcatgtacattgcatagaatatatatatgttttttatatagataacaaaagataaattataagggataatatgtaagaccatatagacagtgttaaataaagatgataaagaatggttgttgaggtggtgagagaaatttacttatcggagaccatagtgaatgtcatatatgatacagactgagatataatttagtctctacataa

SEQ ID NO: 83209 - DNA, 435 bp, Glycine max
  unsure (1)..(435): unsure at all n locations
agctttcgtacagttagaatttagatttatttttgcattcttaggcattataggctataaactaaacaaaaactcatcattntgatcaaacattgaaaaagagacaattttaaaaattacaaaaattgttttgtttagttctcctctctctcttaagtacatattacccattttcataaccacattttacattaagaatttgggtattgtttaaagccttataggtttgggataattntcaaaatagggttctaatagaaatggtaattaaatgtgtgccaatcactggatgtccaattntgaatggagtagtttcccctatttgttttgtcttagtcttaaagtaatttgattatatgtcttanatngatgatgactttggcatgattaagtttggaaaatgggttntatataaaaattaacacgaaatatttc

SEQ ID NO: 83210 - DNA, 397 bp, Glycine max
  unsure (1)..(397): unsure at all n locations
aatgcactatgataggtgnatttgtattatgacttcaaaaataccaaaataagtcatggtggtatttatttcatgaagttttgctgaagtaaattccagggtacaagtgttaactgttaactagagatacctgaaggctgatgctcaaaaaggcaaatatattcattnttttaattntttcataaaattatattttacagctcaacaaaattaaatatcattgtgtccttntagactttgttagaagtagagaagtagcctgcatgagtaaatagctacctttgatggaagtcttgctatacanctgtgacttttatagaatttttttataaagacattggtgaatgataatgacacatctcattttcctctaattgaggtgccaattaataactga

SEQ ID NO: 83211 - DNA, 306 bp, Glycine max
aatccttaccctcggaaacaaaaaaaaaggggagagggaaaatttccattcaagaaggaaccaaaaaaggagagaaggaaaatttccaatcaaaggaaaaaaaaagaggaaagggaattcccaatccaagaatgggagatagcagaaagaaaagaaagaaaattcccattcacagaatgggagaacgaaaaatgagaagaaagatggggaagaatgttcccgatcaaaaaaaaaaataatattcagaaaggtctttggaccggacaatatctgaccaatacagaaattgtcaccaaatgaataaaa

SEQ ID NO: 83212 - DNA, 494 bp, Glycine max
  unsure (1)..(494): unsure at all n locations
atagaaactcagcttgtggatatggngtacccgtcatatgtggtactatgttgttatctggtgatggcgcanatcaactcttccacttccacaaatcaaacatgaacccaccatccccagttgcccaccttcaactgagctcatgtactactacgtagcccttatcctcgttcctctcagcaccgggtccccatcaacccctccaagcttccacaatatccaagcaattcaattccaaatatcatgaaactaccctaaaccaagaaaacagggtagaggtagaaaactcttgccaaaacacagtcaaataccacaactttccttactcaattaccccagtaacattctctttgttccgattcgttaaccatggatcgacttgaacttttactganggtcctagacataatctacatttgaccgtggattngtagaaatgtcagacccaaatgtgctacttccataacaacatgatagcattttgacagacaaaa

SEQ ID NO: 83213 - DNA, 455 bp, Glycine max
agcttcctcgggatgaggatacagggcttgtctttcatattataaaaaaataagataaatagttattttccattgttaaatatatagaacgtttgtaaattcatcctaaaaaattaaaaatttaaattttagtgcttaaaatatagaaaaacaaatattaattaaaaaaatataataataaatataatattgattaataaatacttataattttagtctaacttataaaaaataaaaattaaattaatccttataaaaatgagacccaacataatatttattataatatttggtctaatttataattaattttttattttttaaatcttgattataacgttatatttataactataaaaaaagacaagataaaaattaaattatattttttcttaaataaaatattgcgacatgataaattaattcaatagacatcgtggcctaatttatttgta

SEQ ID NO: 83214 - DNA, 435 bp, Glycine max
  unsure (1)..(435): unsure at all n locations
agcttnttggagtagaaacatgggaccatctcattttatttcaaaaaggaagtcgtatctagtcaaagtctgagagaccatacaagtttcctaacgatttctaattatgtgggccattaagtctatcatatgctgacaatagccgagaagcccatgaatctcttcgggggcggagtaggtgtctgccatcgccttggccttggctaacaatcggggaagttcttgactcccgttcaaggtaagagcaaaccgatccatccacatggttgcctcttggtgtaaagagacgatcacccttcctctagcctctttctccgcatatacttgggcatactcatccgcgattctatgctcgagggccgcggatagacctaactcttcttggacttggcgatgatagcaacatgttggtctccgctcgcataacactgagac

SEQ ID NO: 83215 - DNA, 412 bp, Glycine max
  unsure (1)..(412): unsure at all n locations
agctntcccactcatgggtctttcctggcttcactctcggagtctccatacaatgtcgctgggttgaaaggtttatggttgaacctttttattgtatcttctggccgctcaaagtttggcagcttcctccttaatcctctcatttttgtgaactttttcggtgggttcaagttctattctcatattcccttcatgttgttggtgctgaaacaataatcttcttgtcgacggctccccaacttctatggagatcatagcgtctgtgccatatgtgagtcannaagaaagttcactatgtgttgtctgggtgcgccatggtaaacccacagtatgtcgcacagatcttctttccataagcccttacactttgcgagtctagttccaacggcctagatgataactctgttaactg

SEQ ID NO: 83216 - DNA, 210 bp, Glycine max
gctattacagcccactactacctcagttttgttctgatcctttcagttgccagatttcagccatgatagatagcaacaggcacactatcatagttatgatttatcctgagagatcaaacaatatcgtccccttgatgaagaaatatcacccttctgatttaacaaaccaaattaattatgacagatcaatcaatctcatccttctgaatg

SEQ ID NO: 83217 - DNA, 430 bp, Glycine max
  unsure (1)..(430): unsure at all n locations
agcttctttgggaccttgaacaagcaactaacttctctttcagaaccatgctatgtgctcgcgactggtccctctcttcccttcgcagcttgagttcactattgctaccccatagagctccgcgaaatttattccggtcatactcttccttgcgagccctcttggtctcttgttcaagggctcttgcggtaattgcattctcttcccgtaacccggcacactctttccgaatgtgtgttgcggccaacttgaacttctccttggcaagtttcgcctttcctaactcgctttagagagcttggacttcttcgtcctcttccggtgcttcaaaactctcttcgctgacgactnttaacttggcgagccaatctaaacctcgtatatgaactttcatccattcatgggagccaccaatgatgccattacgaat

SEQ ID NO: 83218 - DNA, 293 bp, Glycine max
  unsure (1)..(293): unsure at all n locations
aaatggtcataacttctcacacggtagtcatattcatgcgcataatatatcgagacgcttgatcttgaacaaccgaagctctctagaaattcaaatggtcctaacttctatctcggagggtccgattcangcgcacaatatatcgagacgctctgaattgaacaatggaagctcttgatcaatataattggtcataacttttcactcggaggtaagattcatgcgctaatttatcgcatccccgaatttaacaactatgctctctagacattcttatggcataacttttactc

SEQ ID NO: 83219 - DNA, 396 bp, Glycine max
  unsure (1)..(396): unsure at all n locations
agctntgccgatttagttgtcaccgtcaaaaggttcgtatcgtttctgggaagaggcaaatttgatcatcctgctatgatgaacaacaattcacccctcttacggtgtcatatgctaacgtgctcccataactactcgatcatttgatgctagccataacccaagccgtggttgctcaacctacatttttcctaggatacaactcgcacgcggcatgtgcttatcagggaggagttccggggcattgcattgagcatcgtatgaccctgaagcatcaggtgcgaggtctaattgacgcaggtgggatgaatattcaagagaatcactgatgaattctgaagtttgcgatcacttctacgtatgatcatgggngcatagtgatagtcgatgacagat

SEQ ID NO: 83220 - DNA, 465 bp, Glycine max
ccaccaatatgagccttggataagaatcttatagaggtattttttatggttgctatgacagagggagagaatgacagagggtggagcacgatattgtacgaagatgaacggagaaaagttgaacttctgagtgtgtcctacaaaaactctcattcatcatagatacaacagagtgttacacatgcttctatgtatagactaaggagcttcctctggaaactttcttgaaaaaacctccttgagaagctctatgagaaggcttcttgagaactagagcttatctaccaaacccttctataactaactcacctcctgaaagcctctgagaaacttcttggaagctcttgagaaactccttggaaacagaactactacacataccgctaatactaactcactcctgaataaaacgtaactacctcccccctttaaagtaaccacccctgacaaacatagatcaaaaag

SEQ ID NO: 83221 - DNA, 366 bp, Glycine max
  unsure (1)..(366): unsure at all n locations
agctggccacccagctcgcccaggcgagctcatctcgcccagtctagcagggntgcttcctccagaagcatcagtcttctggaggaatcttctggacggcccacgtgggcctggctgctatatgcacccccatttttactaaatacaccccctaccttttaggtgattcttgtttcggaagttaccgaaacttacaaatttcggacgagactagattactttccatagtggtacggaaccctgccgattacataaacatcccctttttgacttactgaatgtcatggaaccttcctaattgtgcatcgatgcttccattggattttctgggttgtacaaaacctctcagattgtgcatcaatattt

SEQ ID NO: 83222 - DNA, 302 bp, Glycine max
ctttgcattcctagctatataatacttgtgacaatccagcctgtttctatctactgtattgagagaaagaaagggatgtagtccctgtcgccattagaatgtgaacaacattactctttattggtgtgctgggccatttattttaacaatgagggttgcaagtaagtacctcttcttaggtctgacaaggtgatccacgccgcacccgatctaataaacatgataatgcagtaactaagatgtgatcctaggtcgtttcccaacgagcagtgactagccaaacgtttataatatacttgcag

SEQ ID NO: 83223 - DNA, 461 bp, Glycine max
  unsure (1)..(461): unsure at all n locations
agcttataagaacanaatngcctcaatcatttctttatttcatgtgaattangaagcatcaacaagaatcaagccaaggctattgtgcaagcaatcaatggggcaaaacacaccaattgattatgatgatggatggctcaaattctcacaaaggtaaactcatcactttcaaattgagctntcaaaactatcatgacatgtagaggagaatcaaggatttcaagtcacaaaatgtcaagaacttttattttcaaaacaattacccatttcttgaacatatcctataattcaaagaanaacatgcaaagtcgtacatgcacacaaaattgacccaaaatattaaactaaaaatccgacaaaactaacaacattaacaaattaacacaactaacaaattaacaaaaccaacanaactagcagaaccaaagaacactcctccccatacttaaacaacacattgg

SEQ ID NO: 83224 - DNA, 414 bp, Glycine max
tggacatggcatatgacgcggcatttcaatgagcacagttaggcctcctagtataccttggtataagagcacagacactctgctcctatcaaccaggctactgggccgaattggaatctctgatacccgaatatttggatattaatgataatgtgagaactcccttatcacgcgacagggacctcattatctattagccacaccctatcttactagcgtattaactatgagccatcaatatcttccagctagaattatctacagggttgttcaccatcgaaaatgccctacaaataagacctgagctctatctcatctatagaccaagtctatctgatctttcatattcatctcactaaccacgtcctattgaggcaagcattattttgagactcctctggttctacaaaatcc

SEQ ID NO: 83225 - DNA, 397 bp, Glycine max
agcttgagatgaggaagtgttgaagggtgaaacttcttgtttttattgttgaccacagagtggtacctggagatatgttcgcggggtctggagaccttggggacgtcaagtggggtgctattgcccaaaaccaagcttgaccaatcccgacccaacccggcatagtcggtcagtgagaacctgtgatgtacctaaacaggcgagctccttgcagtcaacagataaaaggaacaaagaccacaaagcaaggaggcttgtggtggctggccagctatgaactttgaatgatatgtgggttatggcctctggtaatcgattaccaagggtgggtaatcgattacaaggcttataaatgaagacaggaggctaagatggtctctggtaatcgaataccacg

SEQ ID NO: 83226 - DNA, 336 bp, Glycine max
gagcttctatggagggctggatcgtttgagccttcaatggatgtctctttttatgtgtgaggtttcaccatggagatgcagcggaagacaaaggagacgaagcgagacgaggcgccatctcttatggaataagccatggaataaaagagcctgcccaccaagatgagccttggataagaagctctgaataacgactccatggaggaaaagatagacggagagaaagatagaggggggagcaccacattgatggacgaatatggggagaagttgactttgagttgtgctcacaagactctattcatcaaagttacacaagtgtacacatgcttctat

SEQ ID NO: 83227 - DNA, 441 bp, Glycine max
  unsure (1)..(441): unsure at all n locations
agctnttaaccttgacttggaaaacctcttccgggtttgattgttcccatgcttactaaggtgagacaaaaagctggtgcaaatcaaaactccgatatctcatgaatggaatggatgaatgcatgaaggaatgcatatgacacagatgtaatctaggaatgcgggggcccgaggaattgtctccttcttagatacaatgtctaggggtagcaaagtgccccaacgtacgtttttaagaaggcgacacggaccctccgttggtttgtttacagaggggatcaagacagaacccatatgtgatgcatatgcaaaagacgcaatgcgggaatgtacatagtatgacaatattcacataagcaaaagggtatatgatatttatgcatggcagtgtgaanaatggcacgcagcgtgtttgctccgtgcccctatttaagggaccta

SEQ ID NO: 83228 - DNA, 453 bp, Glycine max
  unsure (1)..(453): unsure at all n locations
agcttaaacaaaatatagcaccaacaaatgtctttatgttgttaagaacaatttcactaccaacatacaagcaaaacaaacattaattttatggagaaacaattattagagaagacacttgacacttaggaatttaattaaacaagtggtgtgcaatgaatttaatgaacatagctaatgtaatttttttttaaaacttctttttttgcagattttttttttgaaatgtttctaataatgaagtacataattttgcaatgaaactttgaagttgcagcgactcagaatgaaactggattaaaattcccaacaaaaacaagcacatatttgacactcaacaacaacttatcccanatcacatggattgaaaggattaaactctataaacaatgatgaacataggatgaactctaggaacacaaatacataactgtattgactgaacaagaactg

SEQ ID NO: 83229 - DNA, 425 bp, Glycine max
  unsure (1)..(425): unsure at all n locations
agcttctagccaaatggacttaccttgatttaatttcttngatagccctttggagccttgtgtccctttccttgttttgaagctcactacaagccttatgtgaaaaaccatgatattaccatatccttaaggaattttggagctctggaattgttttgggaataagtgtggggggttcttgtttcattggacaacttgttttgatggctatgcttcatgatgtattttgggccatacttgatgtacattgatattggtaaatggtaacatgctgaatgaaatgttgtatctataggctaaagagttaaaaaaaaaaattgcaaaaaagaaaagaaagcactaagttgagtgatatgacttatatggacaagaatgataaactcttggtctactcttcatgagaatttatatcttacttcttctat

SEQ ID NO: 83230 - DNA, 286 bp, Glycine max
gagctcggaaatgaatggtgaagctcagtgttatttcattttatcaataacgtttactcagatggccgattgactcctgaaatatatctgaaagctcgaaattgagtgtaggagctctgagcccatctaaccactatggctgagaactcggatgtctgatggagagccataatgtatcgaaatgctctaaatgtgatacacaaaccctgagcacactcaaacgaccatgactttgtgctcagatgactgattgagttccgtgctatattgagatgctcgacatgga

SEQ ID NO: 83231 - DNA, 207 bp, Glycine max
  unsure (1)..(207): unsure at all n locations
agcatctcgatatattacgggactctatcttacattcgagtcaaaagttattgtcgtttgaattcgctcagagcttctgtattccatttccagcgtttcgatatattacgggactcaatcgctcatacgaataataacttgctcgcctttgaatgtgctcagagctccgacactcaatgtcgagcgtntcgatatgctacgggactc

SEQ ID NO: 83232 - DNA, 434 bp, Glycine max
  unsure (1)..(434): unsure at all n locations
agcttatggtgaaatctgcgacttatccatggtataagtctctacagaggccattgcctccctcgcccagtattatgatcatctgttgaggtgcttcacctttggggactgccagctatcacccatggtggtagaattttaagagatcctatgatgccctctagtggggaggaaaccataccttttcacagggttctatccctcattagctagaatttccaagatagtccaaatctcggcgcaggaattagaccacaggaagcaagtcgaaaatggggtggtcggaataccgagaatatatttggaggtaaaagcaagaatcttggcagataaaggcgagtgggtctcgttcatagatattctcacactgttgattgttgggagagtcgtctntccgaacgtggatgggtaggtggacctggcaacgatcgaca

SEQ ID NO: 83233 - DNA, 353 bp, Glycine max
  unsure (1)..(353): unsure at all n locations
atcctgactcaccatanaccttgatcccaggtgtgaatgtcaatccttaccctcggaagcaaaanaagaagagaaagaaaatttccaatcaaaggaaaaaagagaaggataatttccaatctaagagaaagcataataaagagagaaggaaaatttccaatcaaaggaacaaagagaggaaaggaaattcccaatcaaagagtgggagaaagaataaagattagaaagaacaaaaaaaggaacaagaagaatgaaagaaagctcctgatcaaggatcgaaacataacagaagaaatgtgcagaaaggtcttttgaccggacaatatctgacnacacagaattgtcccaaatga

SEQ ID NO: 83234 - DNA, 321 bp, Glycine max
gagcttggatgttatgaatgatgatgctttcttgaccgaccacgagcctactattgtgacagactgaggtaagatgcaacacgaccacccattaattcatttgctcatccgaagacctacctttgatgcactatatgatcacatgatggatgctatgttttggctagctaagactgcacttaggctgaaattggattagtatctagacagttggctatgttagtggaccacccttcttgtcagttgagcctgtcgctcctctttcttctccgtgggggtgaaacaaaatagtggttctccgtctatccctggaggtgaacc

SEQ ID NO: 83235 - DNA, 389 bp, Glycine max
  unsure (1)..(389): unsure at all n locations
ntggacataatcatatgaacgcaacacaagtttgtcgtttaaatacttcactccagtctactctattatctctcctattgtagagagacaaattgtaacctccaacactttccagcaatatgacatcttcattctcagacatccacaaaggcacatgggaataactttgaagatgcatcataactgaccttcaccaactgagtccaagaattttcaactccaaacttcttcattatccatacagcgaaataagaaagacacaggcaacctttcaaggctcatattcgggaatttctagaagaccatcgtgcatcaacaaatatctgtatgtctcgctccgcatatcatattgaaaacatactaactgatcgatacaacagtttcaagga

SEQ ID NO: 83236 - DNA, 455 bp, Glycine max
  unsure (1)..(455): unsure at all n locations
agcttcatatttgagaaaggaagataactcatcttttcttataagcacaaactcattatagcaatcaaacaagacaaacaaataaaattttgttagtcatcatataaacaagttaaatgaaagaaaaatttcaaccaacttaatttaaaagataatgttttgatgttacctttttcatgattgaagtgcttagatctttaaagatggaagtcagacttttgtttttcttacttgaacttcttgagagatgttctcatcactttcatagtccttggatagaaggttgatctccttctccgaaccatcaaatgagtcattgtcatcccaagcaataaatgccttcttggatcttttttctttatagcttttcttctcattcttctcgggccatgactcattnganggacattttgcctttatgtgatcaggttgattacacttatagcatttaagtg

SEQ ID NO: 83237 - DNA, 283 bp, Glycine max
  unsure (1)..(283): unsure at all n locations
ggagaatgtgaatggatgtatacctgattntgatgatgtcaaaagaagaatcaaacaaggctcattttgcttcaagattaataccagattgtttcaacaaacaaagcctagattcaagatttcttcaagatcaagccttgccttacaatgaaagggttcaagtcattcaaggcacatgtaattgattaccaatacatgtaatcgattaccaatgggttgaaagtgtgaatcgattgcacatcacatgtaatcgattaccagagactctgaacgttgggaattc

SEQ ID NO: 83238 - DNA, 441 bp, Glycine max
  unsure (1)..(441): unsure at all n locations
agctngcacaagaaagtaactaaattgttttttacttattataagtaactaactaactaactaatttccactaatatatagagtgaatacttagaaggaagggatgggccttgattaggcccatctaatctacctaattaaactaattacacaaaacaaagcccaaaatcatagccaaattattcaagtacaaaggttctaatttccaagaccaatttgaccctcaaaatggtagaactgccccaagcttatttataaaaaaattggatacctttttcttagattttcagggactactcacaccatttggagttctgtactattctactggccctgcaaaaggtagatagatcaagtaagcacaaaaatccgaagataagccataattattaattaactcaatcatttgcctaagaccaaaactaagttaaagtgagaaaa

SEQ ID NO: 83239 - DNA, 297 bp, Glycine max
  unsure (1)..(297): unsure at all n locations
ttttcaaaagaaaaaaaaatttctaaggtatttttcagtcctttntcccagaaattgaaacccttatggttaaccattcaagataggctgatatacctctatgtacagatcagacagcaagttccaaatgattaaatgcatgaaaaacagaaattaaaactgggttaccttccaggaagcgcttctttaacgtcattagcttaacgcatagcttactatcttcnaggtggcatgaaagtcacaaagaacacatctttcttgaaagttcgcttttagctagaaatttcatgaacttca

SEQ ID NO: 83240 - DNA, 446 bp, Glycine max
  unsure (1)..(446): unsure at all n locations
agcttganatgatggttgtcgatcatgaatggattatggttagagagcctacagctggaaacattgatcagatggaagaagatgcagaagttgaagctccacaagagcctgcatatcaatgaagtccttttgagtcacttatgattcaaaagatggatgctatgtttcacctccatcaacaacactcagttgaagttcatagttcgttagagaatataactaccttactggaaaacgttgagacaaggctgaccctgagcaacctccttaaccttgatgaggatgaaacttagttatgttttagtgcttagttcagttggttaattggcctttntgattatgtttaaatatctttctatgtctctgataactnggtatgtgatgcttgattaagtagntatggtttatgataatggctgtactgactaaagtgaatgggtttatat

SEQ ID NO: 83241 - DNA, 290 bp, Glycine max
gatctacagaagaacatagaccacagactcttgcaacaggtgtagaattttgattcatggcaagctgagttactaggttgaccaacgcatcaagttttccttcaagctttttattttcagtagatggagatgaatctgtggccacctcatggactcctctaaggaaaataacattatttcttgcactgaattgttgggagttggaagccatattctcaatcaaattcctagcttcaacaggggtcataccaccaagagctccaccactggcaacatcaatcatacttctc

SEQ ID NO: 83242 - DNA, 445 bp, Glycine max
  unsure (1)..(445): unsure at all n locations
agctttagttcctcccaataggttcctgaaatatgggcacggagcaaacacactacgtgctgtttccttgatattgccatgcatatctttatgatatcatgtgatgcaatcctaccccccaagggtattggatagaagactccaagaagtttgggccagagatgcaagagaagaccctaaggttctcatgagccttaaggtagattttgagcccatgggcaaagtatgagcccacttatctttgtacatattagattaagatttcattatttttgggccttgtatttagggctctataatgtaggtaaggtaccctagaaatgtaggattnttcagcccttgtattttagggcacctaaactagtttttgtattaggggtacttttgtaatttcacatgcatntaagtgaatattgatgtgtgtgttgagaaataaatntaattc

SEQ ID NO: 83243 - DNA, 174 bp, Glycine max
  unsure (1)..(174): unsure at all n locations
actatataatagcaccaaggttctagancaagccctttcttcttactctctctctctatatctgtgatcatgtagaaacacccacactacctgtggctttatgccttgaaacaagagagtgccactcttgctttagatataaacactactctgtggagcaaccaaattatggtc

SEQ ID NO: 83244 - DNA, 463 bp, Glycine max
  unsure (1)..(463): unsure at all n locations
gtcacctgaggcatgcaagctnganacgcaagtcaaccgcanaatggaatcttctatcttataagatgcaagtatctataattaaggggaatgacgattcacctgaaaatgcggagagatgacgaggagaagggagaatatagcgcaagtttgcattctgattgagattgaaaaaaggggctgaagaggaagaagcaaaggcaagtaccctccttacagttacagccatagtcatagtcatcggcacttggttctagttgtacacaagaccaaaagtagtcactgcctatatcggngctccgaccaactttggtctatatatacagcagatctaatgggccactgccattgtcttgtcttggcccatacatttttggtgttcgcccacttttttcaagacccctctccacattcactcaagatactataaaaacaacatccctctctcatttagaatactata

SEQ ID NO: 83245 - DNA, 238 bp, Glycine max
  unsure (1)..(238): unsure at all n locations
catataaatcctaagtttgactcatctatttagttgttttcacagtccaagcatgaatttattttgtaaagcaaacaaagttgattctgcatggaaaaagccgagtttgaacagttcatgaatagttttctttctagaaaaaatgactaggcgggatacatatggttcagatatctcggcgctccattgatgtctaaaatgtaacactagggtatgcangcagtattttgcaaaatgt

SEQ ID NO: 83246 - DNA, 450 bp, Glycine max
  unsure (1)..(450): unsure at all n locations
cgctgcagctatgctganacatttatatggcttcatttatcaaaagcaacaatagcagaataattatgatctttcaagcaacagatacaatccagggtggagaaatcatccaaatcttagatgggcaagtcctccacaacaacaacagcctgtccctcctttccagaatgttgttggtccaagcaagccatatgttcctcctccaatacaacagcagcaacaacaacagtcacaacaaagacaacaagcaactgaggctcctcctcaaccttccttagaagagttagtgaggcaaatgaccatccaaaatatgcaatttcagcgagacaagagcctccattcagagtctgacaaatcagatggngcagatggctactcagttgaaccaagctcagtctcaaaattctgacaaatctccttcacanactgtgcagaatccgaaaaatgtga

SEQ ID NO: 83247 - DNA, 439 bp, Glycine max
  unsure (1)..(439): unsure at all n locations
agcttgcgggagtgataactttcttnttttgatgtgggcgtcgggcaatccgcctttctttntttatgtaccgatgtctatttgaggtcttgggtctcatcttccccttgaccgccttctagtatgctcttcttgagcacttgaacgtggccacttcccaactccacccaaacagttgtgctatggtgacgacctttaagattttgtgccctttcttcaacatttgacctagtgtgcttgttttcttgaaaaacaaatgttaacgaaactttgttaacatcggtttttatggaaaccgatgttaacaaaacatgttaacatcatttaaagcttactctcactctttctatccgngacgcttcagtctcgctttcactcttactctctctatttttgacctcgctgtcgttcctcactcacttttgctttcactctaacc

SEQ ID NO: 83248 - DNA, 429 bp, Glycine max
  unsure (1)..(429): unsure at all n locations
ctccttaaaagagaacattcacggtaaatgacccggtgaaacttatctttttgatgattaaccgaggttatagcacaaacgatcgtttgaattttattntaacggctgataaatgagattacaacacaaacgatctggtgaaattcattttaacattgattaagtgagattacgacacacacgatagattaaaattcattttaacattgattaagtgagatgacgacttatacgatcagtcgaaactcgcttatacanagaanaagatcaccgatggtagaagaatgaagatgaagacatgcncagcaaggatggacccctcatggtgcatagaatgaattcanagcttcaatatacgaaactaacccgtcaaagattgaagacaatgaagaacgatgatgacggtcatgggatgatcacggaacatta

SEQ ID NO: 83249 - DNA, 434 bp, Glycine max
agcttaatagggaaaataaacttccttatgtgattcatagaaaactcggctggaaagttgaaagctttttcaccattactatagctaaagaagcaagaagatttcgtctatgaaaggaacaacaagaagtttttgacaagattaaacaagtcttggtgtcgcaacgtgcccttctgcgggcgagcgaaggcgatgctcacgggtgcgctttccaaaggaggaaagatgcacggagtcgccaccaacgtttatttgtggaaaacgtcgagaaaaccgaaggaaaccggtcaaaatgaatattctaagttcgggagttgtatttacgcttgatgaaggtattagcacctctcacgtttgtctcagaggacaacagcctattctttatgaatgtggaaagtggattaccttaacttttatgtctgttttatttttga

SEQ ID NO: 83250 - DNA, 374 bp, Glycine max
  unsure (1)..(374): unsure at all n locations
tactaagctagttgcacttatatttcttatagagaacctttaattttttaaactcatcttgcaaagaattgtaatcatgtagaagcacaaacacaactagtggctttatgccttgaaacaagtttttcattttcatgcttcaatttatcaatctcactntgtgttgaagccaatttattgacatgccattntagatcacttctaagcttattattcaaaacaaaaagcttttgtgcttcctcatgcatttccttaaaggcttccaaaacttccttagattcataatttacctaagtttcatcaatggttgaggagtcatctgttgaatcagccattaagcgcacattntcaatttcttcttcactagaggagtc

SEQ ID NO: 83251 - DNA, 426 bp, Glycine max
  unsure (1)..(426): unsure at all n locations
agcttcttatccaaggctcatcttggaggtgaagctccttcttccttggcttattccctagtggatggcgccgcctcttacctattctcctttgtcttccgctgcatctccatggtggaaaatcaccattaaaggacctcattaaatctcaaagatccagcctccataaaagctccacaagcaagcttccatcacttttgctcctacgtatcctcaatttgtgatgaggaactcaaacctacgtagttcttgataactgtgagactaaaaatagtctcggtgttttcttcaccaaaatgtgaacatgctttagtaaagagacaaaacttccaactgatcagagcaacatatgctntttggatgaaaaacaatgtgtctatttgggaaggagagtatgctaatgaaattttctcataaccgtaaatg

SEQ ID NO: 83252 - DNA, 295 bp, Glycine max
gtctgacacacatcaaccatgagtgactcttctgccttgcactataaccggtgccaaactccataattcgattagcaatgatcaaaacattatatccgaatgagtagaatattatactcggatgaaattaaggtctgacagttgcccttctttaatgacactaatgtcattcgagcgatgtagctattcaaaaccggatgccagataaattagataatgaaaccgaaaaacatatgacttgaaggctgtacaccaacagaggactgaagtctacacacacatatagagacatgga

SEQ ID NO: 83253 - DNA, 370 bp, Glycine max
  unsure (1)..(370): unsure at all n locations
agctnttaacgtgagaatattcattntctgtttgtatcgatcatagaagagtttgaagagatcttgggatgtccgctatgaggaagaaatccatatcttgtttctgggttctatccctccatggtgagaatatncaaggagtcaaaatctcactgcttgaattggaccgagtaaaacaaaataaaaatggggtggtcggtataccgctgaagcacatgctttggcatatcaaggggcatgggcttcattcattgatgttgtaacactattggtgttcggagtcatcctctttccaaatgtggatgggctagtggacctaacaacaatcgacgccttcctttgaattctgaaatgaatgggtaagccacgt

SEQ ID NO: 83254 - DNA, 449 bp, Glycine max
  unsure (1)..(449): unsure at all n locations
cgagcgacatgaagtttgcctcgaattgggttatactatgtcaagagatcttcttctttcttgaccaattctgctttagatcgctctgcttttttttttattggcccttgtattatcataagtttttccttatccttctgaaaacctttttgagctcgaattaacttatttcaatcctgctctatagaagactctatttcacacaatataaatgtatgttgactatgtaattgatgagctntaaaggcattattgaagatattacgaaagattccattttctttcgaatctcatcaccaccaagtttgaaattgaaacctattgatgattgtgaagtgagctgtattggatggaagaagcttgaagatgatcaagcagcctccaacttgctcacttataaggtgaatggcatatgctaatcaaacttgatgatgatcaaaataatgcat

SEQ ID NO: 83255 - DNA, 386 bp, Glycine max
  unsure (1)..(386): unsure at all n locations
cagcttgngacatcatacaaatcatattattacttaatggcgcaagtgagtgtgtagtgctatagcttgatcattagctagtgggtgagcttgaccattatctgttgacgcatgagaactaaggggggctgaagtcaacaaccactctacgaggattctgcacaccatagaattggttcgagagaccgcggagtagatatgtggagaataaatagaactaactcacttgctattacgaatgaacgaaacaagaatgagtcaagtctatatatggagataatatggtgaaaaggcgatatcagaccttgaaccacagattactttatactctgtcgctaattcactatgttcttgggcacaaacaacatgggcaatgaacatgacat

SEQ ID NO: 83256 - DNA, 271 bp, Glycine max
agaatgagaatgcatgtatacatgactgtgatgatgtcaaaagaagaatcatacaacgctcatttgcttcaagattaatacaagattgttttaacacacagagccttgaatcaagatttcttcaaaatcaagccttgcctcaaaatgaaaggtttcaagtcattcaaggcacatgtaatcgattaccaatacgtgtaatcgattaccaatggtttgaaagtgtgtaatcgattacacatcatatattatcgattaccacagactctgaaca

SEQ ID NO: 83257 - DNA, 444 bp, Glycine max
  unsure (1)..(444): unsure at all n locations
agcttatttccgttcagatcattccgactcatttttntaagtgtgaactaaagttaacccgaatacaaatgctaattaagataaatgcataaactgtcttcaagagatcttgggttccatattagaggcttcagtctatatatgtctggctcatacaaataacatcaacgacagtgtattagatatatataagtatttaacatatatcgtcattacgggagaatttctactaatttgtgtgttaaaatgtcttttataagtacacgcttgtttttttatggttaagactgatttaaatataaaatgactaanattcaagtgttaagtccactaataaaaagaatttatttntataaaataaaaatattacatttattatgaaaaaatgttttatattgtgacaaaaaagcttaaatatataatttttatatttaaaataaaata

SEQ ID NO: 83258 - DNA, 415 bp, Glycine max
  unsure (1)..(415): unsure at all n locations
tgataaatctattaacaatggtgcagggccactgttcgntctctgatatacttaaacttggttcactggtcaacgaggctaatcgacaagtgtaccgagtcgcagaagtaatataacatggtaagaatcgagtatccaatcatagggaacttggttcattcaaagagcattcattcagtaggtaaacatttgtatacaggtcagacatataagaagaaactgagtttatagttctaatttaactactacactaactatctaaatgtgagagataaacagatgattaaaacgttgggcttcctactgaacctacttggtgtactacgcatttttctctatttaaaactggtttagtgttgtattacgaanacaactcttctaaaccacgattcctcgagtgaatggcctaactcta

SEQ ID NO: 83259 - DNA, 455 bp, Glycine max
  unsure (1)..(455): unsure at all n locations
agctntaacctcatcgtctctcacagtctttagtattggtagccaatccagtccttgtgttcggactctcagccacttatgatagccgccgatgatcccattactgcttcccctaagctctctgtcctttcttcacgccgcatcccatgccttgcgaactccttggagtaccctagcggtgcggtcactgaaacctcgtgcgatgaaaggcgtgatgctttcgtctgatggcactcctctcatgggacatccttcgcatgaagatagaatcctgattcttgcttccttctagcgagggaaccatttaacagacgcccctccatgctagccaagagttggtcccaattcgtctttctttttcgacgcacgagcggtgaccttgtagcagatagacggtcctaccttcttagagaaataggtgtgaaaccagccacacatagagagctggagtacag

SEQ ID NO: 83260 - DNA, 401 bp, Glycine max
cacatcgagacgctcgaaattgaatggtgaagctctcagcaaaattaaaagtcaataacattttactcggatgtctgattgaagtccggaatacatcgagacgctcgaaattgaattcagaattcttgagctaattcgaacgacaattacttgttactccgatgtctgagtgagtcccgtcatacatcgagacgctcgaaatgaatgttgagctcttagcaattcaacgacaattactttttactcagatgctgattgagcccgttttatatgagatgatcaaattgattctgaacttgagctattcaacgacataactttgctcgatgttgattgagcccgaattattgagaccttaaattgattctgactcttagttattaaacacaaaacttttctcg

SEQ ID NO: 83261 - DNA, 439 bp, Glycine max
  unsure (1)..(439): unsure at all n locations
agctngccgctagtaggaatggcggattgcacgttaataacagacccccattagaatttgttttgaaacagaccctgcttcgtaaattgtttttaaaagaaaccccatacagtaaatttgtccccaatcacttgcaaacacgcgtctaaactactagggaattaacttacctctaccacacttcgctgccaatcccaactaacccatatgcaccaacactggaccaccgtacatcaccatcatttagcagcagccattgcgaagagaaaatagaaaataaataagaaatatagtaacaaccagcattggccattgctttcatttcccttttcttttcgtaaactatccctctcccttctttccttttctctctttcccccttctcgtcggcaacttgctccatcactgcccctgagggctgtgtcacggcggcctccct

SEQ ID NO: 83262 - DNA, 313 bp, Glycine max
  unsure (1)..(313): unsure at all n locations
gtacttggataaaataatgatatgatgaaacatctcaaagttaaaacattaaatattgcttcaagagctattcttaaaaatcacatgttttctttttcacaaattatggttctatctttctgatgtagaggagatgattgttgaacctatttagaaaaacctttgaataaaatataaagttagtaatttctaaacaagggtttcccaaacatataagagatagcaaccactatatgtaaatgagaaatagtaaggaagggatcaacacactaaatattttaaacatatgcatactccactangtattctttac

SEQ ID NO: 83263 - DNA, 377 bp, Glycine max
  unsure (1)..(377): unsure at all n locations
agcttatcctnttcttttacagattgcaaccaatattctctttctatcttcattaactagcccatcagatttcctcccttgaatattggcatttcaagagttctccgccaatttcttctttgtgaagcattccccttattctctcctattgaattgtctcgcaacctgccctttggcgggggtgtgaaaaggcctatctaatgggccaagggtgcatcttccgctgaaggaaaatgtgtggagtcgccatcaacgtttatttgatgaaaacgtcataaaaaccaaaatggaaaaggccgatggtttgcgtgttttgaaaatgaggattccaaagttgtttacgcaagaggaatgtatttacacccccacacacccgt

SEQ ID NO: 83264 - DNA, 319 bp, Glycine max
caggaaaaaaaggagagaagggaactttgaagtatgtctcacaagactttcattcatcaaaggtaccaccagtggtacacatgcttctatttatagactaggtagcttcctttgagaagtttcttgagaaaaattccttgagaagcttctttgagaaaacttccttgagaagctagagcttagctgcacacaacactctcataactaagctcacctccttgagaagcttccttaagaagattcctaaagaagctagagcttagctacacatacctctctaatagctaagctcacctccttgagatgagaagctagaact

SEQ ID NO: 83265 - DNA, 420 bp, Glycine max
  unsure (1)..(420): unsure at all n locations
agctntnggtacanagaagaagaagaagtcaaatagattcaggcttgtaaaggattgtataagattaattggattgatttaaaatgcaaaacaaagccttgcttttatagactcttcatgtctggtcaaaaggaccatttagaagagttatgacttttagaaaaacttaaaaccaatttgaaaaagtcaaaaaccatttgaagagttacatcttttgatttattcagaaacaatcactagtaatcgattaccaaatcagtgtaatcgattacacaaagcttttatgtgaaagcatgtgactcttcacatttgaatttaaatttcaacattcaaaggcactggtaatcgattaccaaaacattgtaatcgattacaactttttnttaaatcaattggaacgttgtaaattcatttgaaaac

SEQ ID NO: 83266 - DNA, 381 bp, Glycine max
  unsure (1)..(381): unsure at all n locations
gtctgacgantgtcacatgttcatgcaacaattgttttctgtggctatacgagacatcttgccaaacaaattcaggttagccataactcgcttgtgctgtttcttccatgccatatgtagcaaagtcgttgatcctgtgaagtttgatgagctggaaaatgaggccgcaattatactgtgctagttggagatgtattttcccctcgctttctttgacatcatgattcacttgattgtgcatctgtgtagagaaatcaaatgttgtggtcctgtttatttgcggtggatgtacctggttgagcgatacatgaagatcttagaagggtatacagagaatctatatcgtccagaagcatctattgttgagaggtacattacaga

SEQ ID NO: 83267 - DNA, 243 bp, Glycine max
  unsure (1)..(243): unsure at all n locations
agctntggcanatcaaggggagtagacctcgttctttttatattagcactgatagngtttaggactatactattcctgaatgtagatgggctagtggacctatcagcgatcgacacctatcttgcttatcactatagcaaggaaagcccaatcatctccattttggcagatacatatgagacgctcgacctggcgagaatcatctgttgtacgcctgctctttatgtgtggatggacgcccac

SEQ ID NO: 83268 - DNA, 391 bp, Glycine max
  unsure (1)..(391): unsure at all n locations
atatgtcactctattacaggttatctaagatggtgcgaaactattttcattgaagttgaatattatatagccgccgtgtattttaaggaatatgcttgcaaaatatatgtagcgttggatctacgagcatnttccgtacgttggttatgccgttcctgccgaggattatgatgagaggagaccgcgtgcatgtcgatggacctctggcaaggcactacttgtttccatgtatcgcaggtgtctatatagactgacccctgacgaggtgtgctggattacgcactgtgaccaccgatcatttaaagaacttgaggtcgtctcattattttctagtcatctgatatggggactcttgacgatcattcaccgtctggagaggggtgttgacaga

SEQ ID NO: 83269 - DNA, 468 bp, Glycine max
  unsure (1)..(468): unsure at all n locations
atccttaagtcgacgcggctgcagctgcttctacagttttatcttttttcgatgattgtnntaaccaaatagaagtcgtttaaggtgttggacctttaaacgatcttttgattcttgaaaggagagaatcgttaaggcgcttgaccctttgaaaaatctcttgattttttttaacagagagaatcactaaggcgctggacccttttcgacgatctcttgatttttgaaaagggagaaagctaagctggtgtgttctacttatttatgttattggattttgagagtttaaatatgtgatagaagaattcagcaatgcaacaaaggaagggtccaattttttatgcaattatttgaatatttacttctaatacataaacaattaaaactaataaaatattaaaaaaaagtatgtatcattaatattatggatagttgtagagaaaaaaacatataaagttagctaatagt

SEQ ID NO: 83270 - DNA, 254 bp, Glycine max
  unsure (1)..(254): unsure at all n locations
gtttgatttttactgcttttagcacaagaataataaaatcattcaaaaatattattttctgagttctgtgttggtcatttgaaagaatgccataatcggtcattctatgcccttattgagaatntgagaaaatggatggagaaagggtcaaggctcaaaatatggaagcagtctgatataactcgaaacattcattaacttagctctctgttggttttccagttttcatcatgtcatcatttatgtgtgatctg

SEQ ID NO: 83271 - DNA, 386 bp, Glycine max
  unsure (1)..(386): unsure at all n locations
agcttgcccatagcaagagnccattgacctatgttatcatcaacatttccactaccattgggtcctacggaagttgaggaaagtatttctacaagagattgttgcaatgcttccatgccttgatttaaagcatcctcagcctgctgggaagactgttgtagattacaaatacccatcaactgctgatctgttaatggctcaatgtggttcttgatgatctgaaacccaaaatacaagatacgagtcaaaaactaacaaattatgtacacaagtgaagttaattactatcattctagaatgtggatctgagctaactctacccctaaaattatattataatgtgagagtcacacctcacttatatgctctgtcttgatcttatctct

SEQ ID NO: 83272 - DNA, 214 bp, Glycine max
agaagaagcagaaaagatagatgcaagggatcttcttgcttctattatcagtggacctaacaaccgcatttatgttttgggtatatgatatgaagactgacaccgaccgacagactgtacacggacacggataatggaatatcctgtgaacatatgtaacggtcaaaatatataacgtcgccttaatgtcatactaatggtaaacatggatatg

SEQ ID NO: 83273 - DNA, 375 bp, Glycine max
tcgactatgccactgtaatctcgccctcgtggcttatgtcccttaaaaaatatttcccctattgttcttgcgcctccatatgagcttcaaatctgatgtagtttgtattgttacaacaagtcaccctatggtgactcgtgctaaagctggtatctacaaacctcgtcactttgcagatataactacttatcggccatcttctcttttacatgcattactcaccacttctgagccaaaagggtttaaatctgctaccaagcatcctggctggcttgcttgcatgaatgaagaactcacgttcttacacttcaacaagacttgggaactttgtcttcgaccacctaacactcaacattgtggcttcaaatgggtatt

SEQ ID NO: 83274 - DNA, 363 bp, Glycine max
  unsure (1)..(363): unsure at all n locations
actaagctacacattctgttctaaaggtttacgatgatattntgttatgttttgtgtgctgaaactnttgatagaaaactgatagagatgaagggtagagttaacctatggttaaaaggtgagaatgtagtgatatgagtggaaaagtgtgatgctttgagggtttgaaaagctaaatctggatttagtggtaattggaggttaaagtgagttaatcctagtttaaaatgtcatttangacttatggaaagcttgggctgagcaaatgaggaaaatgagtgaccaaagtgaaaacaagagccatttctagggtaaatcgagtgttgaggggtcaaaatttgattcggtggaagtttagtcgta

SEQ ID NO: 83275 - DNA, 423 bp, Glycine max
  unsure (1)..(423): unsure at all n locations
agcttggtgtaggagttgtagagctagaattggttatgtcatgatacttgtagctctggaaagttagtggaacttggaggtttaccaagaggtagtcttggttgttgagataaccactataaactcggtgngcctgtttattttgttactctttttacatataaactaacctagggtttgaatttgattntgtctgaaaactcttgttttgccaaatttgtattcatcgtctaaacatgtttttgtgaaaatttgttttgttttacaaagttatattttagatgatacttttttagtcgtgaaaaaggctttaaagtttttaaaatcgcaatttaacccatattattgtgatatttgcctttacagttaggtattggagctcaacctctaaagggtgagcacctgatgatgtctagaggacta

SEQ ID NO: 83276 - DNA, 307 bp, Glycine max
  unsure (1)..(307): unsure at all n locations
ctcctcagtttttagtcaagctcgccaattatntcgcccactcaatcccagctctctatatgcatacatcacaattctctaagcttctgtggtcaatccatctgccatgccagcaataagctgaaagaatgcatttatgcataataatccagaatgtgcaccagatattttgcaaacccaagttccaaagtcaacaacttaagggtgaatatacagtaaacataaaaaatatggacaatatagacaaataaccaacacagaatttatatggtgtctgattgtgggaagagcttttccaacatgttat

SEQ ID NO: 83277 - DNA, 436 bp, Glycine max
  unsure (1)..(436): unsure at all n locations
agcnttgatgatgtggtcttcaccgatgtaatgttcaaagtaggtctaaaaagaggcaaatctgatcatcatgccttgatacatgccaaaaaaaactagggcaaatgaagagggtgagaatgagggagaagcccatgctgtggctgccattcctatacagccatgtttcccaccaacccaacaatgtcattactcagccaataacaaaccttctccttacccaccgcctagttatccacaaaggtcatccctaaatcaaccacaaagtctgtctaccgcacttccaatgacgaacaccacctttagcacaaacctaaaacaccaaccaagaaatgaattttgcagcaagaaagccttagaattcaccccaattccagtgtcccatgcttacttgctcccatatctacttgataattcaatggtagccataacccta

SEQ ID NO: 83278 - DNA, 289 bp, Glycine max
tataagtgcgggttcgggagacaaaggtcaatcgttcgctttatgctaagatgatattccgagtacttaggatatggtacgaccatgctctcctgattttcagctgggaaattggcgagtggaggaacgccccggcatttacgcaacatgcataatgtaaacctttacggatttaaagctctatagttgggcctaagctttagagttttcattatgttaaagcattgtgtctctcgttattgaattataatacaggatctttcttatctgtcctggctttaccaatcta

SEQ ID NO: 83279 - DNA, 442 bp, Glycine max
  unsure (1)..(442): unsure at all n locations
caagcttgatgcaccttcataaaatattgtttcactgcatntttgaccacatctttactatcaaattccatgccaacatataattcttggccaacattaaaggtcgatggcatctccaaaccgcaaatgtcctcctcatcaggataactccagttgatattgttataatgtgaggcatcattccaaaatgaattttcaattagttgtgcacctaacagttcaaaataaaataaaaaatcaaataatacttatttagcattaaatacaattgtcatcaaataataaatgtattgtctaattttttcatacaacaaattataccttctgctgggtgaacaattcttactggttgaggaatgtttgtgactccatcgtctgtatcagatataccgtcaacactgtcatcttcgtctaaagactcttcaacgtatgagttagacac

SEQ ID NO: 83280 - DNA, 298 bp, Glycine max
  unsure (1)..(298): unsure at all n locations
ttatatggatgttagttcaaggtggcgaattgttgggctgtgaccaaaatccatatggaaagttattctgttatttttgttttgtcctctgcctatataaggcaaggatgccctgtataagaaaaaggggctttcacttgtgtattgcatcagtaataaaaaactttatgttttctctcccctggatgtagccttaaagaaaggtgaaccacataaatctgtgtggtctttctcatctatctctcactttcattttgctgcaacatctgtggacatgacacttcagntctggtgcatc

SEQ ID NO: 83281 - DNA, 189 bp, Glycine max
ttgccccagaggatgccactccttcgacgccagctccaggaacagaacatcctatctgttaagaaacaccaactgctcaagaggtggacctgtctcatcatgcactggagcttccacaggaggagcatggcgcttatataactgcatgcggaacactcgcatggatcggccgtattaatgacatatgca

SEQ ID NO: 83282 - DNA, 355 bp, Glycine max
agtactttcactctctttatttatagtgagagacacagagagagaggaggtatgatgatcaacgggaatgaacagagaagttgatcgacaaggagagtgtatggatattatttatcctctaccgatttagtgttggcaagtattatatatttgaagagattcttctgtggacacgatggtctcaatgattctcaaagcttgcttggcccatttgccacttctttctctgaaacgcacatatgtttccccaactctccttccattgaatatgtggagaaagtgcactcagacatggtggaaagaaattcccttccatctgcgatgaaatttttatgatgatttccacaatgatact

SEQ ID NO: 83283 - DNA, 447 bp, Glycine max
  unsure (1)..(447): unsure at all n locations
agctggatgaacaatgaagaacgaacaaagaactgtgattaacgtccacgaaatagatcacagaaacgtctcataagcgttacggaagcgtcacggaagcatctcggcttggattttttccttctttctttntctcctcactaattttaagtgattcctaagctcccaggatgctggggaccttccctcagcctcccacgccccttttatagccaaaatagggaggaacttgccgcctagctcacccagacgagctcagctcgtccagacgagcatgttgcttcctgacaaagtttcctgagtgcaccccccaaatcgattagttcacccccattttcgtatccctcgaattgatcatgcaaacgttacggaagcgttacaggagcacctcgtccttaattttcttcttctttcttcctcttttcgctaaatttaagtgaaatatgc

SEQ ID NO: 83284 - DNA, 341 bp, Glycine max
  unsure (1)..(341): unsure at all n locations
ttgctgcatggaagggcagatgtctttatagtggtcaacagaggagcatanaccacagactcttgcgacaggtaccaatttctgattcaaggccagctgggttaccaagttaaccaatgcatctagtttgccttcaagcttcttaacttcagatgagtttacagctacctcatgcactcctttaatgactatggcatcatttctggcgctaaactgctgggaagtggaagccatcttctcaatcaagtttcttgcttcagcangagtcatgtctncaagggcttcaccacttgcagcatctatgatacttctcttcatattactgagtccttcataaaaat

SEQ ID NO: 83285 - DNA, 483 bp, Glycine max
  unsure (1)..(483): unsure at all n locations
gacctctaagtcacctgaggcatgcaagcttaatgcaaggaaacatgcttatggctagttatcttaatattggttttaggattagaanagcatgataataaggactttttgtaaggatttgagctgccccatgattggcactttgcacctaagtaacgtgggagatgcttttcaatggtgtgtagatatacgtgaatatatggcataaagatatgttgcaaagtgtgtgaatatatggcatagaaataccttgcaaagtgaatgaatggtgaataatgcatttcaagatatgtatatttgtggataggtagcataagaagcttttcaaaaaatgtacccatgccagaatggcgcaagaatgcttcccacatgaatgtatgatgtggaattgcccctcaagagtatgtagatgacatgaacagttcttttcaaatgcaagtgtgtgcgtgatgtgagattggctctncaacgtgcatatatgta

SEQ ID NO: 83286 - DNA, 498 bp, Glycine max
  unsure (1)..(498): unsure at all n locations
cctatcatactaagcttatatanactntagagcttcaattcattgagagatcctagctagtctttgtctaacaacttgagtgctntacacgtggcatgttatagtgcatagagagagtgtgaggaccataaacatcttttgcaatgtatcttcagagaagtacatcttgctagtttcgctctgtgcgtagagccaacttttagtgtatagttcanatacaacgtttataacatacgacaaaaggaataaagaatgtctagacaagacaattcaaaactttcttcttgtgcgctaagacaagtattgcttactgaaccatgggcattactnttttatgataattcttagttcttgaggatggagtaacaatntcattgcctttggactatgagccaatagttataacacttatcttcttggacaggacactgatgcagtattgtccaatgattgatacttcagctatcgttcaaagctttctcctcatcttctgatttc

SEQ ID NO: 83287 - DNA, 461 bp, Glycine max
  unsure (1)..(461): unsure at all n locations
agctngatcaaccaatgaaagtggttgagaccttatctttttctagatcttggttgcctgatcttgaattaatattcaagcaatgcttaacctttcatcaaaacctgaaacttgcatgattcacattctccctttttttaatgatgacaatcattatcaagcaaattctttntgacatcatcaaaacctgcatgattcacattctcccttttttttatgatgacaactatctataggttaggagtaaaaacaaaagaatatctatctgtaacatttacccccccttgaccttgcaatgattgcataaatttcatatataaaaagttgtctcataaacccttactatcttatcttttatctatctctacccctttttcaacatcaaactgaaatcatgagcagagaggagaanagcattcaaccaattataatggattanaagagtagagaatgtcatacta

SEQ ID NO: 83288 - DNA, 402 bp, Glycine max
  unsure (1)..(402): unsure at all n locations
tctntgagaagctagatccttatctatccacacccctctattatctaaattaactctccttaaaataattacggatgaaaataacgcaacaaataatcaaacatcaaacataattactaataatatatagatatatatatatcagggtgttacactcccaaccttctgcagatggagagtggcattaagtcaatactggctcctagatcaataagaacttttcccacagtgacttctncaattgaacaaaggatggttacactccccgggtctttatgcttgggtggaaggatcttttgaatcacaacactacaatttccttccacaacgatgntttcctggtgaatgtacttatgctttcttgntaacatatnctttaaaatatggagtagagtacatcta

SEQ ID NO: 83289 - DNA, 446 bp, Glycine max
  unsure (1)..(446): unsure at all n locations
gatcttaagtcaccgcggctgcaagcttaagtatgcccgagtcattcatccttattatatngtgntgaagtattggtgatcaganatgccattccttggattatagggttgaaccaagctcatgcttttacaaaaaggttcatcaagtcaagttgaaatatggtagtaaccgtcttgcaaaattggggcaaaagatgaatcgagtcacatcactgcttcgtctactgccaaacatatttaggattgttgatgtccttgttacttccagtttcaccttgacaaagatgtcatggaccatgttgaaaatctaaatagattcaaccccatatcctgcgtaaaaatttgcaatacttcaactgtacatcattcgcatacatgcatgcttttcattggntgcatngctcattgcattctttcctttgaaaataaaataaaatgaacttaaa

SEQ ID NO: 83290 - DNA, 455 bp, Glycine max
  unsure (1)..(455): unsure at all n locations
tgaaggcatgtaacccaccattctctccttttggtatttttctcattcttgatcaaaatattgaacgatctttcgtcttgtgtggtaactggcgtttaacaccgtaagtcgactagcaaggatcataagatcaatgaatgatagtccccggacgaaattatggtatgacacaaaatatcaagtgaagactgaaatatagagttaaaagcatattggaataactagtagtattagggtattttgtttagcatttatcgtacattagtgtttagagaattaaaacagccagttaactcttgaggttttggagttggactaattaanataattgcctacttatatttagttcttccattggttattgtcaggtgtagattataatttgaaaactttcatgtcatcttctttactatcccttgacttaaatattntaatgagctaatttatgttattga

SEQ ID NO: 83291 - DNA, 431 bp, Glycine max
  unsure (1)..(431): unsure at all n locations
agcttccatcagaggaggagctcacccctcttgttccttcttattatgatgcacgcacgcacatggctaaggaggaggatacctccacaaaccagattcatgagccatcttctacacttgtacctgatgatgccacaccatctgcaccagcacctgagtcagagcatgctatctcttaagattcaccaactgctcaggtgttggaccttaataagcatgcacaggagcagccacaggaggagcatggcgtttaaatttttgcattctgaacacttgagtttattttcagttattttatgatttatgtcatttcaatttcagctcttatgtttcagttctttaaatntcagcatttaaatttcagtagtgtagttggttgtttgcttggacaanaagcttgattgaacaatgaatggtgaactttgatgagt

SEQ ID NO: 83292 - DNA, 429 bp, Glycine max
  unsure (1)..(429): unsure at all n locations
cctataaaactcagccttgatgtaatttaatcttgattggttggtaatttggtttttcttattgcaatttgcactatctatgaatgtttggaaggttcaagtttgtagttnttgctggtagtcttgaatgtgtttgntaagctatcatgttatttcatatccagtgtttggagtgaaaaggttcaaattttgtcaggtgttgtctttggctaccaaggtgatttggagtgaaaagggtcaaataaagcaatccaaggtgatttagtcctaccttagaaaaatattntatatttacagttaagtgttattggtactgatttagtcccactatccagtccaggtactactgaacacataaacaggcaaaatgaatttcagacagcanntttaaaagttaaaatcttctgattaataataataataataaaa

SEQ ID NO: 83293 - DNA, 438 bp, Glycine max
  unsure (1)..(438): unsure at all n locations
agcttgtagagttgagtcttgtatcagtttaatttattacaatagactcataatcgattacactgttgtttgagacaatgactaatttattcaggagtttctgctttaatcgattaccaagtggattaatcaattacttctctcttgcttagttgttctgaagtaaacaagaacattttaatcgattacttatagcatgtaatcgattacattgttcttgagttgtttccagatgttgggaagaacactntaattgaatacttagataatctaatcgattacttcattgaattaatcaattaccttgtagttntaattgattataagtggttgtaattgttttctatataaataatcagcttgtgttcacatctatacatcaagagatcaatagaggatactcaacacatctcgaaaataacatcttagcctctgaat

SEQ ID NO: 83294 - DNA, 171 bp, Glycine max
  unsure (1)..(171): unsure at all n locations
gttctcagaatggtccaaattataatgctcaaaatcaccaataacagaatgctcangatgctcaaaaggtactaaatgatgtctaattaatctatgaaatgtcctatctatctcaagatcaaagggtttgtagtcagatggatagcctctagtcatacactatattcatca

SEQ ID NO: 83295 - DNA, 439 bp, Glycine max
  unsure (1)..(439): unsure at all n locations
atccttaagtcaccgcggctgcagctgttcctgtgttctgagcctaatctatctgcttaggtaaataagtttcattcttcatcccagacttgatttctcttcattttcttggtctatcttctctagtaacttaaaagtttcatgttttctcatgaagggaaacattgaaaactgaacattcttcattcttccttcaaaatttcgtgagtttcatcaagaggtaaggggggtctctccaactcttgaaccctatgcttgttgtcaaactttcttgaacatgttgttttgaaattctcgtacttgctagcatgttcaggatttgtgtgctgagctgttttccttgagtttttgatgccaaaaatgagttctttgcatgttaaaacatagagttaaccttaaatttcacatanataagagtttctcggtaaaagttacaaat

SEQ ID NO: 83296 - DNA, 433 bp, Glycine max
  unsure (1)..(433): unsure at all n locations
ntacaacagattttagtaatgacccactaacctagaattaatatatgttaatgccattaacctagggaattaaaaaaaacttaatggctgagtgtaactgaaattgtggcaaccaaaagtcaccctcaacagccaacaagtcagccaccatttggtctcccaaaaggatgatgcctaggttgccaattgggcccttattataacttgaactaaacctaactaaagcccttttagttgattaacccaaaacatatttttggtcagccaactttaccaggattgggccattatttagacaaactaaacactctaaaattgagacaaagtggtgccatttagtcctcctccatttgggccatgatacaactcacaaccttggactnttctccttgaaacttgngcttgtattacatagtatggacaacactttgtg

SEQ ID NO: 83297 - DNA, 456 bp, Glycine max
  unsure (1)..(456): unsure at all n locations
agcttatctggcctcctatcagtagggccttcatatattataattgcattcctagggaggcacaacaacagggtgaagcacagcaacagcagtaggagggccagcagcagccaaccgtagatgcacttccaccacctctacaggagccaccatctctggattctatctttgcccacttgcagaggatagagctccagatgcacacatacatgcagcatgtgactagccagcaggcgactaatcacaggagtcaggtgcagctgaataagagcttctatcggtacacccagcactagcagagccaggacctcagtcctttcccatggcctacccctgagcagtccggggccacggttgcatggccgggagatgagcccgactttcagataggggcaggacccgcacggcccnccggagatgaggatggagctcatgagtatgacgatatgggtgatg

SEQ ID NO: 83298 - DNA, 411 bp, Glycine max
  unsure (1)..(411): unsure at all n locations
agccttaagtggagtggtgaatttgtaattgcattataaaaaagatgactntgaatttcacttattactatgaaaaaaaaatttaatgtantgaatttataatggttctttaaaaatcgatttaatacataaggaagagatatttttgtaatattgtgatgaatattctgcatcaattgccttaacattgatttagaaaatatgatctacacttattgttctaagaattggtgtagaaataactttctatattagttctaattataattaaggtaactagtatagaatgtggattttcttgtacgaagagccgatctagaaacatgagtaaaatgttgattccttttcaagttgtgaaatttccatattaaactttttggattannatgtataataactgatgtaataagt

SEQ ID NO: 83299 - DNA, 401 bp, Glycine max
  unsure (1)..(401): unsure at all n locations
gggatttccgacgcttatcactgccctatgcatcgcccaaggtgttgttccagatttgctgacattcgagtcccttagccctgccatgaatttggcatatattaagaagaattgctagaacctggatgatccttcgatcacatttccagggacccgcaagtctaaggccaggggacatgattcagctgctccttcctcttctactccagctgaccctacctttacttttgtagctccctctacttcagttcttcctttaccatctactccagcacctaccagcacctccacttaaagctcagacttggtagtgccgatgctgcanagcctccaccatggtttatacctagtgatgcagagtattcagaacttgactcagcatcagcccatcatcagtattg

SEQ ID NO: 83300 - DNA, 416 bp, Glycine max
  unsure (1)..(416): unsure at all n locations
agctttccatatgaatttaatgtaaatttcacttcttattccaggaaaaaggagaaaaattggaaggtgcacaagctgctatctcactaagcctggaccatgcgcttagtgagactcaaccgttaagcgagacatcagccgcttagcgagtgagatgaatattgaagagnaatttccatgtaatcacgcactcagcgcgtcatcagctcgttaagcaagaagattgtctcttttgcgcttagcgcgagaatggcgctaagccaaatttcacttacttgcgctaagcgcgaagatggcgctaatcgcgcctctcatggagaaaacagcctctttaagcctgaattgcaaagaatgaagagagaaggtctgaatagactacccgagccgagtgctgacaaagaacagaggaaaagatg

SEQ ID NO: 83301 - DNA, 382 bp, Glycine max
  unsure (1)..(382): unsure at all n locations
tggatgattcttatgaagaatcgcttatgaaatatagnacagggtcttacgagtggcaacggcttggaattctgttctactaaattcaatgaattctatgaagataaagacataacaagacaacatattgtacgttatactccaaagcaaaatggagtagttgaaagaatgaacaagaccttgttggaaatggtcaaatgaatattattcattcaagcatgaataggagttnttgggctgagacagtcagtacaacatgctatcttgtgaattgctcattatccactaccatagactntaagaccactattaaggtatggtctaacaaactatttgaatacgcaatgntgagagtgttcggatgtccaacaactatcacata

SEQ ID NO: 83302 - DNA, 441 bp, Glycine max
  unsure (1)..(441): unsure at all n locations
agctngatttcgaaaatctgcaaattatgcaattatctgtcaaattgtgcagcaaatctgccaattatgcagaaaaaaaaatggttgtgtagtgttggtttctgctatcacgggaaaggtagtgtatctcgcgttatagacattatttagcagatcccaacggtcaaaacttagatttacgtattagaaaccctcaattaaaatttcaaggcgatccaatggttaacgaatcggaacaaagaggattttactgaggtatgtgggtaggaaaaactctgtggaatttgaatgaatcttgtgtaaagatttctgcctccactttgtttttaaggtagtttcatgacaaatggaattgtattggttggatatcgtgaaatcttggagagggtgatggggacccggtgatgagaggaacaaggagaangctacgtacatgtacgt

SEQ ID NO: 83303 - DNA, 386 bp, Glycine max
  unsure (1)..(386): unsure at all n locations
tccactccagttctcattcgagtacctaatggatgtgatttttatacgttaaaaaccagaatacacaatacccttaagctaaccgacaaacaatttttggatgaaatttactaccggctttcacgtatgtaggtaatcaatttcggtttcaatgtatgcaactaaaagatgatgttgatgttaacacaatgttaatgtgtaatcatgaattttcgtttgttggtccgattgagttattatgtagcattgctagaaccccagatggcattntaaacttacttgaagctactatgacacctactcatgatgccttgctatattacaatgggaggtggaacatgtcacgccaaaataagtttgtgtgtacttcgtcacaggaaaaaatc

SEQ ID NO: 83304 - DNA, 375 bp, Glycine max
  unsure (1)..(375): unsure at all n locations
agagtagacccgtatgcttatttatgctcggaaacgactgttagtaatgctatcaacatacttatgatagacatgcatgtgagatatatgatgaccctgataataatactattaacgcgtgagaacgancttcatgttctattcgcaatgtgacacaggggttgaacggcataaccacaatcaaaaaagtacctaaagaattggtccactcagaatactctatatttcagataatgcagtttaaaagttctgtcaaagcctaaattgatactttgaacaaatcattacagtactgataaatttatcatctaaggttgtaagctgtaacaactatagcaggcataagcactttgaaaacaagcatagactcttcaa

SEQ ID NO: 83305 - DNA, 443 bp, Glycine max
agcttcaagaattatggcctcatcaaactacttgtttcccgagggaaattctataaatagagactcccatctttaatggagtgggttaccactactcgaaaactcgcatgcaaatctttatagaggcaatagatttaaatatttgggaagccatagaacaaggaccttatgttccctctataatagccggaagtgctacgatagagaaacctagagcatatgggactgaggaagacagaagattactacaatataatttaaaggccaaaaatattattacatctgccttaggaatagatgaatactttagggtttcaaattgcaaaagtgctaacgatatgtgggatacactacaagtaacacatgaaggcacaacagatgttaaaagatctatgataaacaccttaactcgcgaatatgaactgtataggatgaatgttaat

SEQ ID NO: 83306 - DNA, 453 bp, Glycine max
  unsure (1)..(453): unsure at all n locations
agcttgacagagtttggtgcatcggngaacattttctctttaaaagtgggtcccaattggattcctaatcttcaacttacctatttggaagtgacatcatggcatgtatgtcccagctttccattgtggattcagtcacagaaccaacttcattatgttggactatctaacacggggattatcgattctattcccacacacatgtgggaagcactttctcaagtgttgtatttaaacctctctcgtaatcatatccatggtgagattgggactacattaaagaatccaatatctatcccaactattgatctaagctcaaatcacttgtgtggtaaattaccctatctttcaagtggtgtgtttcggttagatctttcaagcaattcattctttgaatccatgaatgaattattatgtaacgatcacgaacagcccacgcatgtagaaattctg

SEQ ID NO: 83307 - DNA, 390 bp, Glycine max
  unsure (1)..(390): unsure at all n locations
tataaagatatgacaatgtagagagtgatccaagaatttcaatggatttccactgaatttatttaaagagagagagagagaatntaatctatcttccttatggttgcgggagaataacccaaaaaaagtcggaaattgttcccttcaagttgattacgtgataaaacaaggtcaacaagagaagtcaaattttcccgaagaagttggaatggttccttcaagttgattatatgacanatcaagttcaacaagagaaagtcaaatttccggggcatcagaaatagtcccatgcaagttgctggaacttaggtccaaagacttgagacgatgaagaccgcataaaccatcacgtatagaagatgagaatgaatttccagaccagtcaagaat

SEQ ID NO: 83308 - DNA, 464 bp, Glycine max
  unsure (1)..(464): unsure at all n locations
agctntgagccaaaatcttgactcaccataatctcttgacccagggtgagaatgtcaatccttaccctcagaagcaaaaaaagaagagaaggaaaatttccaatcaaaggaaaaaggagaaggaaaatttccaatcaaagaggaagcaaaaaaaggaaagaaggaaaatttccaatcaaaggaaaaagagaggaaaggaaattcccaatcaaagagtgggagaaagcaaaaagaaaagaaagaaaattcccaatcaaagaatgggagaaagaaaaaaagagaaggagaagaaggaaagaaagctcatgatcaaggatcgaaagaaaacaaaagaaatgtgcagagaggtctttggaccagacaatatctgaacaatacggaattgtcaccaaatgaacaaaagaaagaaaaggaaaccataacctanaagtggtcttctcccttngattaccaaccaaaatcct

SEQ ID NO: 83309 - DNA, 337 bp, Glycine max
  unsure (1)..(337): unsure at all n locations
tgagatgaggaagtgtngaagggtgaaacttcctgcttttattgttgaccacagagtggtacctggagatatgtcgtgggggtcaagagaccttggggacgtcaggtggggtgctattgcccaaaaccaagcttgaccaatcccgacccaacccgggcatagtctgtcagtgagaacctgtgatgtacctaaacaggcgagctcctggcagtcaacagataaaaggaacaaagaccacaaagcnaggaggcttgtggtggctggccagctgtgaattttgtgtaatatgtggattatggcctctggtaatcgattaccaagggtgggtaatcgatta

SEQ ID NO: 83310 - DNA, 457 bp, Glycine max
agcttctacgagatatagaatctacattcgattatgaggattgattatcttcctctgtttgtaccttaagcgtagtttatcacttttagtcgcgaagtgatctgctatgatcctagaccctttttgatattttgatgtaatttgaggggcaagatctgtactgaaaatgttttttgatgtaacaaatgtgtattgatcatttcactattgttacactttgggttgtatacaaattcttctatcgcgatactatatatttgttttatttacgtaaaaaggcttcgtattgtaaatctgcgttcatttgtttatagattgaattaccacatgaaaacttaatgcttttcaagcaacatgcttaatttacctaattgtattgtatcttaattataaaaaaacgatgagatattttgtcaacgctcaaatagaaaataatagttaataacaagtattctgc

SEQ ID NO: 83311 - DNA, 467 bp, Glycine max
  unsure (1)..(467): unsure at all n locations
tactaagcctgccaggtagtcgtggacctgaaggcccgactgaaggagtcttattccactatggacgattccgagttatgggcatccaacgagagggaggctaactaagaagttgaatatgagttgctagtatacaagaaggaggtggtctagtatcatgaaaaagggttgcacaacgctgttngcacgcccggttcttcctcaagaccttgtcttggctcttttaaccctttctagcacgtgaatgatggtgttctacttatcaaggaagatataactgctgaggaggagacgaacaangagtatgatgttggggccaatgtttatgcccgatgttactttcttctttgttggattttggccacaacggctatgtaattatgaaaattcttctgttgataatgagattcctcttctctgttgatgaattatgcactgtctatatgttttgatgttgtatatgtcta

SEQ ID NO: 83312 - DNA, 464 bp, Glycine max
  unsure (1)..(464): unsure at all n locations
cttaaacacccccgctgcagcttcctacctttaaatttgggattttttcttcacactgangntnatcngataaagagacttcccactgcttctcttcaatttcaagttccttatactgttttgttcaacaagtcacctaattacaattttttgaggagctttggatgttcttgctatccttttcatagaccctataataaacacaaacttgatttcacgtcacatgagtgtttgttccttggttattccacctctcacaaaggctacaagtgtctttctcctaatggcaaattatatgtttctaaagatgttatcttcaatgagcttaaatatccttacaatgatctttttctacctttatccaattctgtcccttcttctaagagtgattttttacctactgctcatattcctcttgtttcaccttcacctaatgaactcactcattcttctcaacatgctga

SEQ ID NO: 83313 - DNA, 397 bp, Glycine max
tatagatgaacatgatgatcttagtctgtgtgtaaaaagttcaacaaatttttatgagtcactagaaatcacagaagatcacatcttatattcaaaagaaggactgaagatccgtcctctactccaaaatgttatgaatgcaatcaacctggacatctgagggttgattgccccatcttccacaaaagaatagagaagtctgaccagaaaggatttaattgaaagaacgcctacattacatgggatgacaatgatatggactcatctgaagaattggaaaatgaggctgtaaatctaagtctaatggccaacagttatgaaagcgatgaagaggtaacatcctcttgatacaacttatccatttcatttgatgaatacacgacgcattgctgattgc

SEQ ID NO: 83314 - DNA, 455 bp, Glycine max
  unsure (1)..(455): unsure at all n locations
agcttctatgttcttcttttctattctagatatgtatatcatattttaacactcatccttgatacaaatttcggtaactccaaacatagcttgaacttgattcttggtagtgccttcataaaagtgtttgcatcttgggcttctctcttgtagtactcgagtttgattttcttagttgcctttgcttctttgaggattcttcatagcatttaggatcaatcatagttgtgttgcaagattcataaatatccagcaaagatcttactcgacttggagtagactctgatgaagaatcttgttgttgtagaggtgacaaaagcatacttgcttcttttgctacttcttgaacctcttcttgatattgttgcactaaaacatgaatattgctttttgcaacattntttgcttcccaattctaagaataattttcatcaacttcaacatcttgactaatg

SEQ ID NO: 83315 - DNA, 351 bp, Glycine max
  unsure (1)..(351): unsure at all n locations
aagctctanggtggttccaatgatgggaatcttgaaacccacaccattcttgggaagggttcaagattgcaatctcccaaaggtttcaagtgtctaacctacggaatccttttcaggcattgcagccgctgaaacacgaagaaacaatgcacgaattcacacgccaattctagaagtacgtctgaaaggtgaaggggtaggaggaatcgtttctggtggaggtgtttctcaaggcgctaatagaagaaatcggcactgaggtaaggcttcatgaaccannaaatatgatggaatctatggtcaacgctcgtatggtggaaaatataatctagtcttatggaagtacccatg

SEQ ID NO: 83316 - DNA, 432 bp, Glycine max
  unsure (1)..(432): unsure at all n locations
agcttatcatgaaaagcagatgcatattgaatctttccttacatatganagaggcttgcatngccctaatttcttctttatattggtttaggcaaagaagtagttgtctacaacaatcaaagaactcccattctgagaaggttaggttttctttatgatattcaaggtagatgtcctctacatggaaggattccctacaccgagcacaattctagggaagaaccacaatgaaggtgaccatcacaccaagaagttgttgaaggtctataggagtagagaaaggcatttcatcaacgacagcctctctacttctctagactgtagctcctagagaataactcctaatgaacctttactaattaaaaatctatccttcctaatgttactatattcaattaggcttttactataacgttcagaaagtaaagaaca

SEQ ID NO: 83317 - DNA, 445 bp, Glycine max
  unsure (1)..(445): unsure at all n locations
gcttgcttgtggcgctcctatggaggctggttctttgtgctccaatgaggtcctttgatggtgagttttcaccatggagatgcaccggaggacaaacgactataggtaagaagcggcgcctttcactacggaattaaccatggtaaaatgagcttaatcaccaagatgatctttggactagaagcttggagaggatgctcccacggacgaaaacaaagagtgagataaatagagatgggggagcacgaaattgaacgaagaaaaacggagacaagttgaactttgagttgtgtctcacacgactctcattcatcaaagttacagcangtgttacacatgcttgtatttatagactacgtagcttccttgagaaccagcgtgacaaacttcttgaaagcttgttgagaaaacttcttgagagctatagcttactacacactccctc

SEQ ID NO: 83318 - DNA, 387 bp, Glycine max
cttggcttgattataaaaagatagatgcttgtccaaaacactgtatgttgtatttgggagatgatgaaaaaagtttggatgcttgtaaacatttgggtacatctatatggtaaccctacaagaagtggaaaatatcttgccaggttttacgttactttccattgaaaccaatattgcaaagattgttcacatgtcttaagactgctaaagatattatatgacatcgtttggaagacaataaaatgggttgttaacgcatccatgagatggagaggcatggaagacatttgaattaatccatcctgagttttcttcatatcctcgacatgatcgcttacgccttgctactgatgggtttaatcctgctaggaccttgagttctaccta

SEQ ID NO: 83319 - DNA, 378 bp, Glycine max
gtaacccagctggccttgtatcagaaatatgtatctgtcgcaagggtttgtggtttgtgctcctctgctgaccaccatacagacctttgcccttccatgcagcaacctggagcaattgagcagcctgaagcttatgctgcacattattacaatagacctccctcaacttagcagcaaaatcaacctcagcagaacaattatgatcctctcagcaacacatacaaccctggatggaggaatcaccctaacctcagatggtccagccctcatcaacaacaacagcaacctgctccttcctttcaaaatgctgctggcccaagcagaacatacattccttcaccaatccaacaacagcaaacaacccagaacatccaacag

SEQ ID NO: 83320 - DNA, 454 bp, Glycine max
  unsure (1)..(454): unsure at all n locations
agcttcttatccaaggctcatcttggtggcgattctccttcttccatggcttattccctagtggatggcgcctcctctcacctcttctcctttgtcttccgctgcatctccatggtggaaaatcaccattaaaggacctcattgaagctcaaagatctagcctccatagaagccccacaagcaagcttccatcacaaagtccatactaatgtctactcaaggtgcagatgggatgggtaagggtgtgtatagcccatgaggcatcacccctagacttggcttgtaaacaagcgacacacctagtgcaatgcttatggacatctttcttcatatgcggccaataaaacttttctttgagtaagacaagggtcttgtctatcccaaagtggcccatgagcccaccctcatggctctctttcacaagtaatttcctaatggatccttngggtatgca

SEQ ID NO: 83321 - DNA, 375 bp, Glycine max
  unsure (1)..(375): unsure at all n locations
tagcccacactccagacatcttcttgaagatcccaacggtcagatcatggacaagtgtcttgtgaagttgtaaccaaatttcgagaagatccaacggttaatgaaggctgggaagcgtttttaccgaggcaacttcatgtagcttcctcaagaagcttcattaaaaggcttcctcaagaagcttccccgtggcttctttgagaagctntctcaagaaactagattcttatctatccacaaccttctattaactaaattaacctccttgaaaataattacggataaaaaataacataacaaataatcaaacatcaaacataattactaataatatatatatatatatatatatatatcagggtgttacaaatgcta

SEQ ID NO: 83322 - DNA, 351 bp, Glycine max
tataaatagggggagaagtgaagtgaatgaaggttcatccacttatgcgcacttgtatctctttcaaatatgcatggaacaatagtttccgtgaagaaaatgtaagccgacacgcttccgagacgggtccgtaatgtttacgtaaggaatttctggaaggtttctaccgctcttcaacgttgttcgttcggacttcatcgttcttcgatcttcaacgggtgagtacctcgaaccaagcttttagattcattctatgtacccgtggtgggccacattgtgattcgtgtgtgtttattctcgttttatctactgtttataccctcttgtgacgtgcttaagccattctattta

SEQ ID NO: 83323 - DNA, 456 bp, Glycine max
  unsure (1)..(456): unsure at all n locations
agcttcatctgcanatccctcatgtaagactattcctaaactaaacaacattattgtaacaacataattaaaaccaaaacttaactcgcagatccctcatgtaaggctaagtgatgcaatcctccctaggaagggaccagtcactagagccatgagcaagaggctcaaagaggattgggctagagctgctgaagaaggctctagggttctcatgagtctcagggtagatttctaagtccatgggccaaggttgggtccaattatctttgtacatattagactaggatgtcattatatttggtccttgtatttagggctccataatgtaggtagggtaccctagaaatataggaattttcagcccttgtattttagggcacctagaactagttttttgtattaggcgtacttttgtaatttcacgtgcactaagtgaatatttgatgtgtgtgttgg

SEQ ID NO: 83324 - DNA, 295 bp, Glycine max
ttgatctagcttgaagttgttaccttactagcattgtgttatacgttctacgtacctctaactagccgagaaacttgaaaatgaatctgtccgggacgattgtccgatgacgactcccttaaacagcaatattgtgtcttgacgataacagtataccagaattgttaccgttcggcacctactacttggggttcagccggagaatccttcatgtgtgtcagttacgcctgttcaccttactacatccggcacttactaagcattaattaaacttgtattcttctaccccggttca

SEQ ID NO: 83325 - DNA, 442 bp, Glycine max
  unsure (1)..(442): unsure at all n locations
agctntgagccataatcctgactcaccatatatcttgacctcaggtgagaatgccaatccttaccctctgaagcaaaataaaagaagagaaggaaaatttccaatcaaaggaaaaaggagaaggaaaatctccaatcaaaggaaaggaaattcccaatcaaagagtgggagaaagcaaaaagaaaagaaagaaaattcccaatcaaagaatgggagaaagaaaaaaagagaagttaaaaagaagaaagctcctggtcaaagaaaccacaagaaatgtgccgagaggtccttggactagacgatatctgaacaatacagaattgtcaccaaatgaacaaaagaaagataaggaaaccatgacctaaaagtggtcttctccctttgattaccaaccaaaatcctgtgcgctagcgactntttcgccccgcactanacaaaaaca

SEQ ID NO: 83326 - DNA, 416 bp, Glycine max
  unsure (1)..(416): unsure at all n locations
tctggatatattacgggactctatcttacatacgaganaaatgttattgtcggttgaatttgctctcaacatcaacaatcaatttcgagcgtcccgatatattacgagactcaatcagacatccgagtaaaaagttattgtcatttgatttggcacagagcttcaacattcaagttcgagcgtctcgatatatgacggaactcaatcatacattcnactaaaagttattgtcgtctgaatttgctcagacgtcaacattcaatttcgagcgtctcgatatattatcggactcaatcagacatccgagtaaaacggtattgtcgtctgacatgcctcatatgctcaacattcaattacgagcgtttcgatatattacgggactcaatcacacatcccagtgaaaaagtattggcctt

SEQ ID NO: 83327 - DNA, 437 bp, Glycine max
  unsure (1)..(437): unsure at all n locations
agcttacacagcatctaagtaaaacgacatttttatcttcaaactatcacagccactacaacagagcacaggcagaataatctgccaaaacaccaaccgaaatcacagcttttctcacttaaagaccccagtcacaataccttcgctccaattcgttaaccgttggatcgactcgaaaatnttactggaagtctctagtacataagcctacattttgaccgtggggatctactaccaaacattcagaactcactctgcgctgctctttccacaaccattaaggcataacattattctgcacttgtgcaaaattctgctgcacagtttcacaacaaaaatctggacaaagagcagattttgaaaaccacacttcccttatacaatcttgtccaaatcaaatcctacaagttccaaatcatgaatgaaatatgtctaaa

SEQ ID NO: 83328 - DNA, 449 bp, Glycine max
  unsure (1)..(449): unsure at all n locations
agcttctctcanaaacccttaatctctctatgtatacattgataggtttttgtctgttaatcctatgagcaaatcgaggcttcaattgcttgatgtttcttccatgctcattgcttcgtaagcttttgcttttaacttttacaatggtttcctctccttaatctattgaagcatcacagattcacagctgcgttcttttctaatatgtaggaagtatgaggaagttaatccacccggtgttgacaaattctatagcatcactaataacacttatgaaaaggcagaggtaagtaaatatgttgttcgtttattcttccttttttgctttgntattntccacttacttgggtttccgtggttattggtgataacattggttgtagagatggaagctaaaatacttgcgtcccttaaatttgaaattggaaatcctactgcaatcacttttc

SEQ ID NO: 83329 - DNA, 413 bp, Glycine max
  unsure (1)..(413): unsure at all n locations
ctcagcttacatggagctacgtcaacaacaaagagggaaaaggttagcctggttgatagaaatcatggtactgtaagccaacaaatttatcttgtcccagtgagttgtgtgaacttatttgtgagagaacatctatttttaatttcttaattttgcatcattctcagactgttagattaattacatgaggtggaaatgatcaacgccatgtttctttttatttttagccacatagccaaaaagccaacctttgatgataaattatctctcgcaccttaattgatccaaaattgataattatttttctaaaaagacactaagcctattttttttcttcagatatctatgaccttcgtttanggttctaagaaagcataggggttttagtcatgatatacccctaatttggggga

SEQ ID NO: 83330 - DNA, 384 bp, Glycine max
  unsure (1)..(384): unsure at all n locations
agcttagcgctatctcaagaatgtattgtgtgttggatcaaactcaagatctcctccacacacttagttacacctatttcatatctatgatgcccattctatatatttaatttcacactggcaacagaataataggccacttgcattatttgatgaacgaggttgcttgcaccatttgtgcaaataaatagttgctcatagcactgctttacgaatataaccagtgctgaacatattttccgtttactctattgctgactcatgtgagaacgtgtgagtttgcattcattcaggcatccataaaagaactatcaattccnccaaattagtatgctcaagcctacactacaaacttgatatcaagggattcttgtttcttaccat

SEQ ID NO: 83331 - DNA, 264 bp, Glycine max
agggagagacttccactactcgtatatctgcaatatcgcatgtatctttatactgtgttgtgaaggaagcttctccatttttggaaagcctacttctctattggatctaacttgttagttcttgacggaaatatcttttttctttctgatgacgctttgtgtgttatctgggctatccgtattccatattatggtgctcacaccttgatcacatggaagcatgtttatttatggtcattcaacattggaaactggtttggtttt

SEQ ID NO: 83332 - DNA, 450 bp, Glycine max
  unsure (1)..(450): unsure at all n locations
agcttcaatactttaatctgcaactccataatttgttcttcatcgttacactgtctntccgctacagactgtggggcaaattactacaattaaccaagaaactaaactactgaaataaaacttagacttaattgcaaaaagagcccccctatttnttccatttcactaaattcgtccccctatattataattcacctattacagtcctcctatttttccaaattcactatttgagtcctagaggaaaatttgaacattgcctgccatatgtccgcatataattggttgttcaagaggtatttccaattcaccctcatcagtaattaggtaattaacaattatcttaaaaacaacaacaactccttgtcgccgnntagaccacgcatagaggtggtggtgcgcactcttgacaaccagaatcatccttacattgctctcttcattacatca

SEQ ID NO: 83333 - DNA, 171 bp, Glycine max
cagagtgtcgaatagagcaagacccttttttttttcaaagaacacacggcgaagagtggctaacaatccccgtgtcgcccgacagactttccatgcgaatattatgcacctaaaaaaagaatggcacctaggtagaactggaatacccactatacactacccgcctacaaa

SEQ ID NO: 83334 - DNA, 452 bp, Glycine max
  unsure (1)..(452): unsure at all n locations
agcttagagttctaattnttcgatatctgcattatgtaaacatccccatgacacttttgtttctctttattcatatcttccttttatcatatcatatcacttatggtaacaaaaaaaatcgtattacttatcatctcgcatctacatttttctatcttttatctttttctctatccaggtatttaattactaccatggggtatctatatggagaaactttattttttaaaggagaagctcataacaagctaattaatccaatgctaaagtctgccaaatgttcattatatttttctttattattacactttagcgttagcctttatatattttntggtgtctgcatgcctgtctggtgacagttgcactcagttttttcaatggttacaaaatttggaataaatttgcttaattgttggtttcttcctttcttatatccccaactcagtgcc

SEQ ID NO: 83335 - DNA, 420 bp, Glycine max
  unsure (1)..(420): unsure at all n locations
ctgatagcctcacctagtgggataataaagctttgttgttgttgtataagcttgacatgcaggttacatggtgttagttagcttaacctacgcaatgcagataacagccaaagacaacccacttaatactcttagatgtttgtcccaagatcaccaccaagatgttttccattgcagctcaatggaggacgtaggtattccataaaagtaacagatatataatatttttcattatcacttttagacttgttggggaaaaaaaagaacaattatagcacaagaagaaagatctagtaaggactgacagagtaggagacttacaccaacaaaagctgaaaatagaagttatagattacatgaaagtcaattttattaccctaacacttgatgatngagcaattgcgaacaaatgaacaaaac

SEQ ID NO: 83336 - DNA, 445 bp, Glycine max
  unsure (1)..(445): unsure at all n locations
agcttgccacccagctcgcctaggcgaggctcttctatgcgagccaggttgcctcctccagaagcaaccgccttctggaggaagaatctggaagtcccaagtgggcatggttgctatttgcaccccttnttttttactaaatacaccccctttgctttttttggtgattgttttttcgtaacgttacgaaactntatgaatttcgtaacgatacttgttttctttccgtaaggttacggaaccttacgcatcatgtaattactctttttttggtttacggaaagttacggaacctcacggattgcgtaacaatgcttcttttttatttccggcatgttacggaatctcacaaattgtgtaacaatgctcccttttgatctccggcatgtcacggaacttcacgtattgtgaaacaaaggatgccaagtacctcatagtggtcaaa

SEQ ID NO: 83337 - DNA, 457 bp, Glycine max
  unsure (1)..(457): unsure at all n locations
tcggaagaaagtgatgaggtgcaagccctaaaggcagagcttgtatgagcccgagtagtctaagagaagttcaagtccatatccatcaaagtctgaaaagagtatgatgaactaagggacgtcaatatggccaccgctgatgccttggaacgagaaaccaagaatgcccaaaaggaagaacacgtgccaccaaagttntgaggggctttatatggcagcaatagtaagctcaaactccgaagaggtgaaaggaatcatcacgggtcaaaggcatgatcttgaaggacgagctaaaggcttaccttatgtcgaaaagaaatttgtcccaacagttaagcgagactgaacggaatatgtgggccatcatctatgagtgcaaagagaagctaaatctatctgcgactcaccagcaaaggctagaggaagttgtccgttatcatattggacatatcctgca

SEQ ID NO: 83338 - DNA, 454 bp, Glycine max
agcttatgatgatgaataagttgatcattttttttgatgatgacaaaaaagcccaagagaatgatttcaagattgagtcaacaagttcaagatcaagattaaatcaagattaatttcaagattcaagtaatgacatcaagaagaatcaagattcaagagaagatgatttcacaagggaagtattgaaaataattttttaaaaatcaaacatagcacagttttgttttacaagagaagtttttctcacaattttctaagttaccagagtttttactctctggtaatcgattaccagtttcctgtaatcgattaacagtgacaaagtttgatttcaaaagcttttaactgaatttgcaacgttccaattgatttttaaatggtgtaatcgattataatatattggtaatcgattaccagtgtatctgaacgtcgaaattcaaaatcaattgtgaag

SEQ ID NO: 83339 - DNA, 404 bp, Glycine max
  unsure (1)..(404): unsure at all n locations
acctatanatactcaagcttgaacaaccgtacaaaaagagaggagatgaagaatattattatagagaganaacaacaccaagagttctgaagagcgatgacacgctacgcattcaacgattatcgaaactatagaataaaattacgaagatggaagagttaagataaagtggtcctttcctaaaatataaattactggtcccactacacatcacaacttaaaatgtgctgtaaggtccttagatctgaatcacaaaaaaaaaataattcacatttgattggttgatataacaatgtaatctttatgatgcccatgaatggagtatacataaaatatatcggtgtgacttatcttgaaatcacaccgaaatagctaccgtatccataccatttatacattaaact

SEQ ID NO: 83340 - DNA, 451 bp, Glycine max
  unsure (1)..(451): unsure at all n locations
agctngtacctcccataggatttctggactcttgccgaagatgaagcagcttaacaagactgaaggggaaaggccagtgataccagttgctagtctctcgaattcggtgaggtactctattactaatctctgttggactagcttgcatagtgttcctcgttgatcatcgtagaaggaaggagtgaaacgggcttcgattgcctgaagcagcgccggccacgacgtaatgaatccgtttctgaacatccattgaaaccagctgagtactgggccatcgaggtagaaggaagccaccgtaatgcgctcttcctncggaattccttgatattcgaagaactgtgagattttgaatatccaacctagtggatcatggccatcanatcaaggaacgtctagcttgaccggcggtctggagggataggaaggctgagctgacngcggagtatgagtg

SEQ ID NO: 83341 - DNA, 345 bp, Glycine max
  unsure (1)..(345): unsure at all n locations
cgtttgcatgtcattcatgaggattttctgtatcactaaccctcgagcacatgctcattatgagtgatagggactcatctgatacttgcagttgaaatagagtatgtttgatcgtctctatggagatcaaaaatgaaggatgggttacacttcacaatttaatgttacctaattaatgtaacagaaacttgggcttttactaataattttcttattggacatcgatattttaaatagaattgatacttggacaaanctactccttgaattacaatatgctttttcagttcaacattacctggtttataaaagtcagaatgatctttcttttttgctagcttacaa

SEQ ID NO: 83342 - DNA, 444 bp, Glycine max
  unsure (1)..(444): unsure at all n locations
agcttttggagtagaaacatgggaccaacttattntatttcaaaaaggaagtcgtatccagtcaaggtctgagagaccatacaagtttcctaacgatttctaattatgtgggccattaagtctatcatatgctgacaatagccgagaagcccatgaatctcttcgggggtggagtaggtgtctgccatcgccttggccttggctaataagcggggaagttcttgactctcgttcaaggtaagagcaaaccggtccatccacatggttgcctcttggtgtaaagagtcgatcacccttcctctagcctctttttccgcatatacttgagcatactcatccgcgattctatgctcgtgggccgtggctagacctaactcttcttggtacctggcgatgatagctagcatgttggtctccgtctcgcataaacgctgagacaagctt

SEQ ID NO: 83343 - DNA, 327 bp, Glycine max
  unsure (1)..(327): unsure at all n locations
cgaggagaagctccgactccatcttaccttataaataaaaacgtaagggtgagtctttccactttatcagccaaaacatagaaagacctaaatcaagttaaaacacacaagactagcaatcactgtgatgtggctatctatcgaatctcacatgcattttaaggcattaccttntgattaactcaacatatatgtttatatatcccactggccaaatgccaaaggaacttccaaaactaagtggtcttacgatactttaatctggatgactgtcaggaaggcaccctatggtataatggcaaggctctcactaactggttatgtctc

SEQ ID NO: 83344 - DNA, 428 bp, Glycine max
  unsure (1)..(428): unsure at all n locations
agcttgccatgtttacgggtaanaaacaaaagtgtgaggatctgaaataccttgtgatntgtgattggaggacccaaatgttattgaaccactggcggngaggcctgatgagtttctttggaaacaccatcttcttcttggagtccctcaaacgcacattgaacattctatttcctaaatctttgatgacgtggccttcgcatcagccgccgttgaagaacagcaccaccttctcgccggactcaaatttccgatggcgggtctcgggtggcagcagtggtcggagctggtgaagacttacgaattctcttacattgtgatgattatggtactcgacctgcaagaatctgtcagaggcatcgcggctgatgattgtgccggaaaaccatgagccgcggaataagccgccgtgggttcttacttctact

SEQ ID NO: 83345 - DNA, 447 bp, Glycine max
  unsure (1)..(447): unsure at all n locations
taagctccttcaactgcacaaggcgtttaatatttgaagagtatccttgtggaaccttcacccgatgaagacactgacaaanacttatcttcttctttttggacaaagtatggcaagctggaggcaagtaaattttcttcccatcagaccttggatgcaactgtgatcgtatccccatatcagctaaatcttgatgggtattcaagtcatacttcgtctttccttgaatgttaaggagcatcccaatcatactgtcaaaacatttttctccacatgcataacatcaatacaatgtctaacgtctaaattagaccagtactgaagatcacagaaaatggacctcttctttcatatgcaactcttacttttatccttctttgggtctttcaaaacaatattctgtgttgaacacctgattacctgctacaatcaaggtataatgctttg

SEQ ID NO: 83346 - DNA, 454 bp, Glycine max
  unsure (1)..(454): unsure at all n locations
agcttgaagaagtnnttgtttttacatgcccttatctctntagtggaacttgtattgagtgttatattgtgtattgctcatattaacatggatcatctaaataggttaatttcaaaagatctagttattggattgcctagattaaatctaaaaatattgtttccaccactaaaccattgcaattattacacatggatttgtttggaccatctagggtcatgagctttggtggaagttactatgcattagtaattgttgatgattattctagatatacttggactttatttcttactcataagaatgatgcatttcatgcatttagaagacttgccaaagtcattcaaaacaaaaagaatctcaaaattatctccatcataagtgatcatggaggtgaatttgaaaacattgattntgaaatgttttgtgatgagtatggcatagaacacaactt

SEQ ID NO: 83347 - DNA, 453 bp, Glycine max
  unsure (1)..(453): unsure at all n locations
agcttgacaatcaagcttacatcataattctttgatatatagattctaagctatatcttgagattgagacaaatgctagagaaaaagctactcttctcaagaactctcaggagtttgaaaaaaaactaaaagatcttcaaaataattngaaggagctgaatgaacgtcatgattatcaaaaggaaaaaagatatgatctatggagagaatgtgcacaataacacaaagattataaagatctcaaaatgtgtaaacataatctttgggtggaatgggaagaacacaaaagatctgtgaaattcttgaatgataagcttttgaagaatcaagaagttatgggtcaacctcaagatgttgtcaaacttcatgaagaaattaagaccttgacaactaaattagccaaaattatcaatggaatggataatcttaacacattctatgatattgtggaag

SEQ ID NO: 83348 - DNA, 287 bp, Glycine max
  unsure (1)..(287): unsure at all n locations
ctcttgtggtgaagctctccctccatggcttattctctaatggatggcgcctcctctcacctattctccattatcttccgctgcaactccatggctaanaaatcaccattgaaggaccttatagaagctcanagatccagcctccatagaaacttctcaagcangcttccatcataagggcttcttcttaaacgaaaggagttacatgaagagtgaagacaaatctggagtaaggaaaatgcaccataaaagagaagttacaatcatactcaacatataactccctt

SEQ ID NO: 83349 - DNA, 438 bp, Glycine max
  unsure (1)..(438): unsure at all n locations
agctngctctanatatacattgatgtttgtatttatgggaggaggttatatgcccattttgctttaagagtaatgtcccactaaaactaactntccaaatgtttgccttcgcaggaatggccccgaggaagcttgcctcaaagaggtccaggaaggacaaggcggccgaaggaactagttccgccccggagtacgacagtcaccgctttaggagcgttgtacaccagcagcgcttcgaagccatcaagggatggtcgtttctccgggagcgacgcgtccagctcanggacgacgagtatactgatttccatgaggaaatatggcgccggcggtgggcaccactggttactcccatggccaagtttgatccagaaatagtccttgagttttacgccaatgcttggccaacagaagaaagcgtgcgtgacatgagatcct

SEQ ID NO: 83350 - DNA, 408 bp, Glycine max
tcgatagctccaatcacgtctattccccacatagagaacgaccaagacattcaaaggtatgggtggagcattgacattattggcaaatgcctgacacttgtggcactttctcacatggatacaacaattggtttccatagtgagctagtaataccctgccctcacaatcttccgggtcatggcatgtccattggcatgtgttccaaaggacccctcatgcacttgcactagcatctgctcagcctccctggaatccatacatcggagcaaaaccatatcatggttcctcttgataggatatttccactcaggaaaaagtcggctggcaaccttctcaacattctcttgtcattgtgagaggcctaccatacgtattccttgtctttgatatatcgattgatatcgaag

SEQ ID NO: 83351 - DNA, 418 bp, Glycine max
  unsure (1)..(418): unsure at all n locations
agctntcataagtgtgacgttgcgctgcccattccctatgagtgctctcgcgaggtggaggctgagccatgttctcagtatgacaattatgagttgaatgctcacaatcagaatattcccaatcaccagcaacagaatgctcgcaatgctcaaaatgtacagaatgatcaggatgcacattatgcctaactaatctatgaaaggttctatctatttcaggatcaaagggttgtaaatcacctggattgcccctagtcatgcactatatgcagcagataatgtgctctcaaacacgcaccaggggagggttaaaactacaactatagtcaaatgatatccaattgagctgatattttgtgagcaataccctacaatcatgataagatagcacataaatttcagactacaattcaaactc

SEQ ID NO: 83352 - DNA, 350 bp, Glycine max
ctttcccatttttaatggggagaggagataaaggttacccttagcctttctttttcaaatactgagaaatttttctggagaaatcatccgagacttcgtacgtttcgtgatattcccaagatctcaccgttctaagataattgtcgtctcatttttcgtctaacgggtatacctcaaccaactttaactattttgtcccgggggccaccttggtcatgtttttatctcgtttattactttataccctttgactgctaccattattagtattctcgttattaaataaataattccccgacgttgattgatattcctatttggtaaagattcaccgttgtctgcctaccatg

SEQ ID NO: 83353 - DNA, 428 bp, Glycine max
agcttctcaaggaagctacctagtctataaattgttattactctgatgaaggaaagtcttatgagatacacttcaaagttccacttctctccctcttttattcctacaatttcgtgctccccctttctctctttcttttcctccattaaagcatcatcttcaagcttcttatccaaggtaattcttggtggtgaggctccttcttccttggcttattccctagtggatggtgcctcccctctcctcttctcctttgccttccactgcatctccatggtgtaaaatcaccattgaaggacttcattgaagctcaaagatccagcctccatagaagctccacaagcaagcttccattagcatattcttttatgaaggccatggcaatttgataggaagatcatttacaatggcctaactaatgagattac

SEQ ID NO: 83354 - DNA, 428 bp, Glycine max
tactaaccttcccaatatggaagctaatactctgctggatctttcttttatgtacttgacgtaaatatgcgtatatctgtttaatgatgtatttgtgtgttcactatgctattagaacttcattctaccatgctttcgccttgatcacatagaggcatgtgtttttacgaacattcaacaggggaaactcggtttgattcttaaaacttgataggacagggcaatatcgtagtattttacgacgaatcggcgtacagaaatacaatcgtcgaatgtcgtcttaatgtactatggctgagtctatccaaaatatgaatttggggacatgcttgaaggattcgcttactatatgagaatcgggttagcttatatggactcctagaaccatagcatggtaataaagatatctttgccttatccctatagaa

SEQ ID NO: 83355 - DNA, 422 bp, Glycine max
  unsure (1)..(422): unsure at all n locations
agctngagatgaggaagtgtagaagggtgattctttctgcttttattcgttgaccacagagtggtacctggagatatgtcgcgggggtcaagagaccttggggacgtcaggtggggtgctattgcccaaaaccaagcttgaccaatcccgacccaacccgggcatagtcaatcagtgagaacctgtgatgtacctaaacaggcgagctcctggaagtcaacagataaaaggaacaaagaccacaaagcaaggaggcttgtgtggtggttggccagctgtgaactttgattgatatatgggatatgggctctggtaatcgattaccaagggtgggtaatcgattaaaaggcttaaaaatgaagacaggaggctaagatagtctctggtaatcgattaccaaggtgtgtaatcgattaccaggc

SEQ ID NO: 83356 - DNA, 451 bp, Glycine max
  unsure (1)..(451): unsure at all n locations
ccacagcatcacaaaatctaggtatccaanacccctcattttaatgggatttcaaggtttgagaagtgaaattgagaatgaggtaaatttgaagcaaactctcacctcacacaagtccataacatcaatttaaacttgttcaaactggatttacacctaaaatctcatcgaatcaaaatttgactcctcaacccccaaatttaccctagaaatggctctttgttcactttggtcatttgtatctctctctagcacagcccaaactttctcataagtcctaaatggcatttcaagctatgattaactcactataacctccaaataccactaaatccagaattgtgccttccaactctcaaatctcactctattttcactcacaacaccatactcacacttctaacctaggttgattctcccttcatctttaatagtttcataagaaattcac

SEQ ID NO: 83357 - DNA, 449 bp, Glycine max
  unsure (1)..(449): unsure at all n locations
agcttgtacccaatacagggcagtagattatgtttgcttcacttgatttgtaatgctgttgtacggccagtttatgttttaactattaacagcattaacagcttcacttgatatttaacagcttcacttgataaaatttaaatatttaatttttaactaatgttttgctactcgtgtaaaccttgcagtgatcctaacttgcactntgtggagtctcctgcatcggctccaccagaagtttaaattgattttgctgcacaacaacagtaagctatcttccttgacctaaattaattctttctatagtaggataaaaacatagattgtagaattcatagttgcattttgaagagaaaaagtaaacataaatccttcttcacaaacataaacccttctttagtatattcataaatcatatantaacaaatttgatttctcattttgtaaaa

SEQ ID NO: 83358 - DNA, 295 bp, Glycine max
  unsure (1)..(295): unsure at all n locations
catactanatntntaataatgttgctttgcgtatataataactaatactctatagatatttcggctttcatcttatgaagcgtaatatttactactacaacattaacatatcatacttgagaattcctttcttttgtgtggcgttaatatctctcaaacctcgtcttttgccaacgtatgacccccccaccgctaatattgtgagtttcaaaacttgaacattacatcaacctctaatcactctataaaccacttgtcatctgagatctacaacacaccaatctctttgattgta

SEQ ID NO: 83359 - DNA, 294 bp, Glycine max
actcatgatgtctagctgtgcgtaatccttggctcattcaatgttgatcaatttgaagcataataaacacaactacagctgatattttactttgtaattatttatactagactttcaagacattcaggctttcatgctgccatatcctctgcacctagtcctagggtttcacaacagtgtcagcagaaatgatgctaaacccggctcgaatttccttctcgtatgattctttgccctgacaatccattctcgtactgagactcacacctctcttctgtgcattatatcgatcat

SEQ ID NO: 83360 - DNA, 355 bp, Glycine max
ctacttgtatgtcgaccagcccctgatgtcacacattttatttataattattggacccaggttaaggaggagcgccacattctctttatatgatcacttcataatatgggatatgagatgcttaaatatacaatgaatggtatatacagtttcctgccactgatcaagcacaactgttaatacaaatactctgtcatggaccatggactgaactctgagcgtaaaatgtacataagacattgtctgatgcatatgcttggaattggccgagtcatgataagtgtaacttgcagattcattaacatcaaagtcttatcccactgggcagataactaaattaccatgagataattgt

SEQ ID NO: 83361 - DNA, 459 bp, Glycine max
  unsure (1)..(459): unsure at all n locations
agcttcacacaatntatctttctcanacttgtttttctaaaggccaagtatgaagtctttcctaactagatgattgagatgatgcatgtgtatgtgtgtagtcctatgatgtcacaaccaagaatcatctatcttaattatcagacaactcatctcatgagatgatgaatgctcaatgtttaacatattgatattacctattctcttgccaatatggacaacctcaccggacatagcttcactaataagacaacgattcttactgaattcaattttgaagccttagtcacatagttgactaatgctcaggaagttatgctttagtccatccacatagaacattctttatctgcgttttgtactaatttccaatatttccttctcccattatctttactttattggtgtctcctgtcacaacctacccttcggcgggagggcgacgcgagactcacgtgt

SEQ ID NO: 83362 - DNA, 410 bp, Glycine max
cataacggaactattaaactaagcttgccgcccagctcgcccaggcgagcaagggtgctttctccataagcaacaaccttctggaggaatcttatggagggccccagtgggcctgcgtgctatttacacccccctttttactaaatgcaccccccttttctatttttttgtaattctttttccgtaacgctacgtaactttacgaaattcgaaatgatacttatttttcttccgcagggtacgaatccttactgattatgtatttactcttttttggctgtcacagacgttacggatactcacggattgcttacaaacacgtcattttgatattcgccacattacggaagttcacggattacgcaagcctgcttccttttggatttctgaaacgactcgggaactcattt

SEQ ID NO: 83363 - DNA, 447 bp, Glycine max
  unsure (1)..(447): unsure at all n locations
agcttcagaccaaagcaactcanaatctaggtatctaaaacccctcaatttagtggattttcaaggtttgagaagtgaaaatgagaatggggtaaatttggagcaaactctcacctcacacaagtctataacattaatctaaacttgctcaaactggttttacgcctaaaattccactgaatcaaaatttgactcatcaacacccaattttaccctagaaatggctcttgttttcactttggtcactcatattcctcatttgcacagtctaagctttctcttaagtcctaaaagacatttcaaactaggattaactcactttaacccccaattaccactgaatccagatttagccttccaactctcaaagccttactcttttttccactcataacaccacattctcactttctaaccctaggttaactctacccttcatctctagca

SEQ ID NO: 83364 - DNA, 431 bp, Glycine max
ttttggagtagaaacatgggaccaactcattttatttcataaaggaattcatatctagtcaaggtctaagagaccatacaagtttcctaacgatttctaattatgtgggccattaagtctatcatatgctgacaatagctgagaagcccatgaatctcttcgggggcggagtaagtgtctgccatcgccttggccttggctaacaatcggggaagttcttgactcccgttcaaggtaagagcaaaccgatccatccacatggttgcctcttggtgtaaagagtcgatcacccttcctctagcctctttttccgcatatacttgagcatactcatccgcgattctatgctcgtgggccgtggctagacctaactcttcttcgtacttggcgatgatagctaacatgtttgtctctgtctcgcctaaacgctg

SEQ ID NO: 83365 - DNA, 456 bp, Glycine max
  unsure (1)..(456): unsure at all n locations
agctngtgcgaatcanatcactcctgtattttatctctagcatgcattctttctttctttacccactcctcacgtttggttttttagggaaaaacaccataactaaacgcgccacaaggcatccctatagcaccagatccaaatctagaacgatgggtgatcaagaggagacacaggaacagatgaaagccgacatgtcggctctgaaagaacagatggcttccatgatggaggccatgttaggaatgaggcagctcatggagaaaaatgtggccaccgctgccgctgtcagttcggctgccaaagcagacccaagtctcttggctaccgcgcgccatcctccctcaaacatagtaggacggngaaggaacacgctggggcatgacggcaaccctcatctgggatacaaccgagcggcttacccttatggattgccgcccaactactcgccacccg

SEQ ID NO: 83366 - DNA, 440 bp, Glycine max
  unsure (1)..(440): unsure at all n locations
cctgtccataaaatagggttttgaagttcatcatttcaatttctcattaagtaaaatggatcattttcaaggtccaacgccttaaaatgatcacctcttaagtaaaaaaaagagtcgcttgataagcaagaactacgtaggtctgatttcctcatcgcaattgaggatacgtaggagcaaaagccccgcttttgtcgaccaccccaagagatcgttaatggtccaatgccttaacgtttctctcctttcaaaaacaagagatcgttaatggcccaacgccttaacgtttctcccctttcaaaatcaaaagaccgtttaatggttcaacaccttaaatgaccttttgttcaataaaaacatattttgcaaaaaaagataataacaacttaaaccaaacactttgttccgaaagaactacgtangtctgatttcctcaccgc

SEQ ID NO: 83367 - DNA, 456 bp, Glycine max
  unsure (1)..(456): unsure at all n locations
agcttacttttccctttttctcatcacgttattatttctttatanttttttcttaaatatatacacttcaaaaaatatgaaaaaaagttgtatattaattntttttataaaatattaaaatttatttaagatttcattttatacaaacatttaatcattgataaaattattcattcataaatttgtatacattaatgaatgcatatttaaatggttaaaaatacaatttaaaaaacttttaatatgaaaaataagataaggttagacgtcaaaatagagcttaatcaagtctatttctagtttaagtccaatatttcaattgggttaaatttaaaatgacccatgtaaaattgaaagcattaaagattcaattatatttgtttttttaatttgaaataataaaactcaagtaatacaccaattaacttaggcttaaacatggttntgtctcgttgg

SEQ ID NO: 83368 - DNA, 269 bp, Glycine max
gtctaatatgaaagatatttgcggtgcaaaatactgtataagttggttcacttttgcaatgaacctatcttgttgcttttccaggtggctttgttgctttcagaatggtaggggagctatccctcctgacattgtaccacatattctggcgagtcgagatcgcaaagagctttgcaaatactccttgcctgccccatcacatggtctttgtcttgtttctatcaactataatgaaagtcacctattggcttccgcggaagtccccctgc

SEQ ID NO: 83369 - DNA, 304 bp, Glycine max
gttaaaaatttaatttttgtttctctgacgacgaatatttctctatattcattatttcctttgaacggtaacacagtgaaccttgtcttatatttgaagttctagttcacgagatctacattgaactctcttacatgaagaaatatttatgaaaggcaattatatcctagcaaaatatattttacttttaaaaaaaatattatcttcctatggatcttccagttttatatgccttattatcaggcggaagatttctaatatgatttagacacattggatacttgctattgagatccattaaacg

SEQ ID NO: 83370 - DNA, 254 bp, Glycine max
acttggttagcgcgtatatctatattttgaaagtatttatctaatattgaaatatgactgtaaataattaaattcaataagtacattaaataaactccagcttaattttttaataagttaagtcattttataaatgagttaaatcaacgtatctgttttttcaaaataaattaaattttatattacgatatctcgacaaataaatattagtcgcttaataatgattaattaatttttttaaaagtaaactaatt

SEQ ID NO: 83371 - DNA, 441 bp, Glycine max
  unsure (1)..(441): unsure at all n locations
ttaagtcacctgccgcatcaagcttgtagggtttagtcccacatagctttgtctatgcaacaattgttagcctgggctatatgagacattttgccaaacaaagtcaggttagccataactcgcctgtgctttntcttccatgccatatgtagcaaagtcgttgatcctgtcaagtttgatgagctggaaagtgaggccacaattatactgtgccagttggagatgtattctcccnctgttttctttgacatcatgattcacttgattgtgcatctggtcagagaaatcaaatgttgtgatcctgtctatttgcggtagatgtacccggctgagtgatacatgaacatcttaaaacggtttacaaagaatatatatcatccaaaagcatctattattgagaggcacattgcagaagaagcattgaattttgttcgaacacat

SEQ ID NO: 83372 - DNA, 418 bp, Glycine max
  unsure (1)..(418): unsure at all n locations
tcacacataggaactcatcactacagtgtaacaccctatggatcataacttacaattttggatttagatgcatgttcaatgacttgatatggtcacaaaataactgccattcttaaagtaaccttccccttttatcaaaattggtactgtgtataaacaaaaaaggtgcttntctttaaattaatttgaaataactaaatttacagcagattgaaggacaaaaaattattccaaaatgcagcactcctatgaaagtatgaatagatttggctcanatcaaaccaaaatcaacaatcaaacatcatgatcaacatcaaccagcanagcaatactagaatatgcaattcagagatgaaacaacagcttacatttgttcagcttctcttgcgtttgtcatctgcaaaagtaaacagcaatc

SEQ ID NO: 83373 - DNA, 381 bp, Glycine max
  unsure (1)..(381): unsure at all n locations
agcttccctcanagagatccaggaaggacacttttttcgcanggactagtgtcgttcccgagttcgatagccatcgtttcaggagcgctgagcaccagtagcgtttcgaagccatcaagggatggtccttccaccaagagagacgcgtccagctcatggacgacgagtacacagatttccaagaggagatagctcgccgacgttggacgacgctggtcactcccatggccaagtttgatccagatatagttctcgagttttacgccaatgcttggcctacagaggagggcgtacgggaccttctgtcatgggtaaggggccagtggattcatttcgatgcagacaccctcgatcagttcctgggatacccgctagtattgg

SEQ ID NO: 83374 - DNA, 466 bp, Glycine max
ttctgtggatgatgctctcctacaacctaagacaaggtagtctgatataaaactgtataggctcaaggttcaatcaatcaatcaatcattcaactcaaaactgggtgcaagggataaatcattcaagcacgtggtcagctttttggctaagtggctatcacaatcaaacatggccttcatcatcctcaatttcatgcattcagtccatacttcagagattcatgcaaaaatcagtactaaatgatagtcatttctctcaaaatttaaggatcacactctcaccgggttacggttaatgcattccttaacaatcaatctgacaaactgactaatattttcagtcatactactaatcacatgttctttctcttctaatggctgcaagcttgatcaaaacagaatctatacattccagtccactcaattcatacaatttctcatttcaatcaatcacaacacttcattt

SEQ ID NO: 83375 - DNA, 414 bp, Glycine max
  unsure (1)..(414): unsure at all n locations
agcttgagatgaggaagtgttgaagggtgaatctttctgctnttattgttgaccacagagtggtacctggagatatgtcgcgggggtcaggagaccttggggacgtcacgtggggtgctattgcccaaaaccaagcttgaccaatcccgacccaacccgggcatagtcggtcagtgagaacctgtgatgtacctaaacaggcgagctcctgacagtcaacagataaaaggaaaacaagaccacaaagcaaggaggcttgtggtggctggccagctgtgaattttgtgtaatatgtggattgtggcctctggtaatcgattaccaacggtgggtaatcgattacaacgcttaaaattgatgacaggaggctaaaatggtctctggtaatcgattaccaatgggtgtaatcgatta

SEQ ID NO: 83376 - DNA, 293 bp, Glycine max
catttatgcattcctaactgtattccacgatattatttgacaaggatggaccgcatgttccttgtataatattgattaacctacacacttgagctcgagtgaaacagtgacattgcactgggtatgcatccttccttgaaatcaggctgctgattagtttacatcaaatgtgttgcttaataagaatgctcttgtctctataaagcttgatgtcttatgtaaaaccaatgattgagtctttgcatagatgtctcatcatatggataatgtttggaagcaaaaccctttgaaat

SEQ ID NO: 83377 - DNA, 430 bp, Glycine max
  unsure (1)..(430): unsure at all n locations
ctgacggatgaagagacatcttcttctctttggtgattcttgactccatttcattgaatcgcatgtccacttgtaactccaaagtatcaaacctttcaccaacaaaggtttgaagaccatcgaacctatccaaaatcttttgaagaagagaggaatcttctccaccatgtaaatgtccttcttcatcaacgggtcgagcaccctttntcacccaagagccatcatgctctttttgataaccaaaggatgcaaccacaacagcgcctattagaaaggatctcttgatcggaacataatgttcagaatcaacaaggatgttgaagtgttgaatgaagatggtgattatgtgtggatatggcaatgaaccatctaatcgaaaagccttatgcatgcgatatcgaactaagtgtgcctaatcaattagtacgcc

SEQ ID NO: 83378 - DNA, 426 bp, Glycine max
gcaagcttcctctccatcatcgtcattatcttctttttctctacctttcgatcctttcactttggcgtgaccgaaccattccactccctcgcaaaacggtgtcgtgccgatcgcgttcgttcggttaaactcgcgcgttcagaatcctccggaacaacgctcttcgcccaattccctataattcactcctctctctctctcgctttctctggtaacctcctcgcgacggtggctcttccgcattccgccgccgccactgccatcgccgttgccgccgccggaaaacactaatcaatagatggatgattctgcgttcaaacgaggcggtcactttaatcgaacttactcgtgctcttctcagagagatgtctgttacaggttcgctttctctctcatcatcgcgctctcgttaaattcgtagattct

SEQ ID NO: 83379 - DNA, 369 bp, Glycine max
catgaagatactcttcttttggcatcagcgttgctatatctcgacctgccgatcaaattcttaggagaactcatagcatatcaatcattatttaatacgatgaatatcataacgtatgtatcttagctggacaaatcttaattgaaattcagattcaccgaaagatatcaaccgacataaattcttaatttaattaccttgctctctaatgaactgtgtagtgggtttaaaacgttggaattgcgagtactgaactccaagggagaaaggactggatctaaaactatgttggggtatgaatgtggatcctgctgttgcaaagcttgcgccacgggagaagttggtccccatcgaatcaagatatggact

SEQ ID NO: 83380 - DNA, 475 bp, Glycine max
atcctttgagtcacctgcggcatgcaagcttaacattcaatttcgagcgtctagatatattcatgactcaatcaaacatccgagtaaaatgttactgtcgtttaaatttgcttggctctccagcattaaatttcgagcgtctcgatatattacgggactatatcagacatccgagtaaaaagttgttgtcgtttgaatttgcttaaagattcaacattcatcttcgagtgtctcgttatattacggggctcaattagacatccgagtaaaaagttattgtcgttggaattggctttgagcttcaatattcaattacgagggtctcgatatattacgggactcaatcagacatccgagtaaaaagttattgtcggttgaattttctcatagcttcatcattcaattatgagcgtctctatatattacaggactcaataagatatccgactagaaagttattgtcgttaaatttgct

SEQ ID NO: 83381 - DNA, 427 bp, Glycine max
  unsure (1)..(427): unsure at all n locations
tgtaggattatggggtacccatcacatgtggtactatgtgtcggtcgggcgatggtgcacaacaaagtttccacatccacagtgcgcgcataaacccaccatcccctgttgcccaactccaactgagctcacgtactcccacgtagccgatatcctcgtttctctcaacaccgggtccccatcaatccttccaagcttccacaacatccaagcaaaacaacattcaaacagcacaagctatcacagccaagcaaaacagagcaaaggcagaaaactctgccaaaacaccaaccaatatcacagcttttctcacttaaagacccncagtaacaattccttcgttccaattcgttaaccggtggatcgactcgaaaatattactgaagtctctagtcataagcctacattgtgaccgttgggatctact

SEQ ID NO: 83382 - DNA, 454 bp, Glycine max
  unsure (1)..(454): unsure at all n locations
agcttcatatatcatcaaataaattattctctttnattgtttggcatcaatccacatcgacaaaaagaaaaaaaaaatgattttgaaaaggagccgtataaaacaagactaggtgtatggcatcatgttggcagtcatgtcatttgaatcataagcaggggcattttagtattttaaaaagagaacatggataaggagaggtactaacctggagtgctgcaaattggagataagactagaaaagcagccacaagaggaggagccaagctcttgaaaaacttcacttcattcttccttgtaggaattgtcttctcttccctcatcacattgtccttttaatcaacaattcaatacccagaattctacttgtcagtctctctctctctttttctttttctggcttaacacataacacaaatatcaaaatcacacacgaaaagtgagatagagagag

SEQ ID NO: 83383 - DNA, 433 bp, Glycine max
  unsure (1)..(433): unsure at all n locations
accgagtatttatcatgttggttttttttattgtttataatggncaaaagggataacttattggtttgtgaacaaataaaaagaaacgtaatgtatgtgatccttctcatacaaggataggccaaattgcagtttttaaagtcttaattgaattgcaaccgcaattatattcatataaaaaatataaaatttggtnttggtctctacgttttggtactcatttacttttaaaaaggtggttcttattaatatatagtgataatataatatatatctaaacatattacatcaactagcgacattttgaagattttctaaaaagaagtcacgtagtatttgaagattttataaaagtttaataagatatactatagttagaagttttatactgtcaataataaaaatatattaattaacttctatatattgtaac

SEQ ID NO: 83384 - DNA, 461 bp, Glycine max
  unsure (1)..(461): unsure at all n locations
agctnggaaggatgcttcaatggagganaagttgagggagagaaaaagagaggggggagaacgaaattgaaggaataaaagagggagagaagtggaactttgaagtatgtctcacaagactctcattcatcaaagttacaactagtgttacagatgcttctatttatagactaggtagcttccttgagaagctctcttgagaaaacttccttgagaagcttctttaagaaaacttccttgagaagctagagcatagctacacacacccctctcctaactaagctcacctccttgagaaacttccttaagaagattcctaaagaagctagagattagctacacatacctctctaatagctaagctcacctccttgagatgaanagctagagcttatctacacaccccctataatagctaagctcacccccatgacaaanaaacatganaatacaaaanaaag

SEQ ID NO: 83385 - DNA, 336 bp, Glycine max
tgctggaactacttcacatggacttgatggggcctatgcaagatgaaagccttggacgaaagaggtatgcctatgctgttgtggatgatttatccaaatttacctgggtcaactttatcacataaaaatcagacacctctgaagtattcaaggagttgagtctaagacttctaagagaaaaagactgtgtcatcaatagaatcacgagtgaccatggccgagagtttgaaaacagcaggtttactgaattgtgcacatctgaaggcatcactcatgagttctctgcaggcattacaccacaacagaatggcatatttgataggaaaaacaagactt

SEQ ID NO: 83386 - DNA, 417 bp, Glycine max
agcttgtgaaatcttctgatccaccaatgatgtttatatgattattaccatcataactgagatcactctaatcaattatgggaattgagtccagagaagtaacctctgaaagttgtggtctttcatcttctgggaggataaatttatgagataaggaaagtcgagaacaagactcatttgctaactgagaggttttcatcttgccagagaaacttgacattgataacgtcaactaccatttaccaaacagaggagatcttatttccaaaaaacgtgtctttttctttccaaacaacacttgctatttctttaatattcttcctatcatacaaaaagtagaacgtcgcatcatgtgtgcctttcgtgtgcaagagtgaaactgctatttccactacatagcgcctctattaattaaca

SEQ ID NO: 83387 - DNA, 390 bp, Glycine max
tagattactcgctactaatgttataatttttcttctacaaatcaaaagcacacctcctcttgatggataaatctattccttactgaatggaccaacattcgttggtttgtccggcttatatctaacaattatctctcttcatcttgctgtattaccttatatgttcgatttgatatactattgtgttctctcacattatcaatatcgagaacaatacaatctaaaatattatgtaacctttcaaatcatcctcgacttatataatcaccaattttctttaatttacctaatagagaaaacctccatctatattgcgcttgcacgttttacaagaatatcttatcacatatcgcttcgacgcatctaacaagatcaaagtcattccactta

SEQ ID NO: 83388 - DNA, 445 bp, Glycine max
  unsure (1)..(445): unsure at all n locations
agctntataagcgcgggtctgggaaacgaatgtcagtggtcgcgatatacgaagatgatgtcccgagtacattagatttcgtacgaccatgccctcctgatttccagctaggaaattggcgagtggaggaacaccccggcatttacgcaacgagcataatgtaaacctttacggttttaaaagctctatagttgggcctaggctntagagtttttccttttgttaaggctttgtgtcttttgtttttgaatttataatacaaggatctttcttcatctgttcctacgtctctacccattctcattcgtttgcatgtttacttctttttctgaaacggcagatccgatgacgagtcccccgaaggtactaatacctgtgacccgcctatcgacttcgagcaacaaatgagtcanacggaagatgaaggaaatgaggatgtgggact

SEQ ID NO: 83389 - DNA, 428 bp, Glycine max
agcttgagatgaggaagtgttgaagggtgaatcttcctgcttttattgttgaccacagagtggtacctggagatatgtcgcgggggtcaggagaccttggggacgtcaggtggggtgctattgcccaaaaccaagcttgaccaatcccgacccaacccgggcatagtcggtcagtgagaacctgtgatgtacctaagcaggcgagctcctggcagtcaacagataaaaggaaaacaagaccacaaagcaaggaggcttgtggtggctggccagctgtgaattatgtgtaatatgtggatggtggcctctggtaatcgattactaagggtgggtaatcgattacaaggcttaaaaatgaagacaggaggctaagatggtctctggtaatcgattaccacggggtgtaatcgattaccaggcttgaaaac

SEQ ID NO: 83390 - DNA, 271 bp, Glycine max
actcggagatctgattcacgcgcataatatatcgagatgcttgtcaatgaacaacggaagctctcgagaacatccaatgcacagtaccatgaactacgaggtctgatttatgcgcctaatatatcaagactctcgtaattgaacaacggaagctctcctgaaatccaaatggtcctgactattcaatctgcggttcgattcgagcgcatgaaatatccatacgctcgaaattgaacaatataagctctcgtgaaatacatatggtcataac

SEQ ID NO: 83391 - DNA, 455 bp, Glycine max
  unsure (1)..(455): unsure at all n locations
agctntacaacaaatgccactctactccaaatttttaaaggatatgttaacaaggaaacacaagtatattcaccaggaaaacattgttgtggaaggaaattgtagtgctgtgattcaaaagatccttccacccaagcataaagaccctgngagtgtaaccattccttgttcaattggagaagtcactgtgggaaaggcacttattgatttgggagccagtattaatttaatgccactctccatgtgcagaaggttgtgagagttggagatcatgcccactaagatgactttacaactttgttaccgctcaattaccagaccatatggagaaattgaagatgtgctggttaaagtaaaacattttatcttcccgatagaccttgtggtaatggatatttgtgaagataatgacattcctataatattgggaaggccattcatgttaactgtgagct

SEQ ID NO: 83392 - DNA, 467 bp, Glycine max
  unsure (1)..(467): unsure at all n locations
ctagagaagaagaatatacctggaatatatcattagtgaatcactaatagtgatatctggtggtttaaaatgaaatggagaagtggttccccatttgtgaagcgtgccttttgcgtcactcaaagggaatgattattgaaagtaagtttaccattatgtcaaataatttataagctacgaaagtggcttaccaaacttaataatttctctttaataatttataatcttaaaacttaagaaaataattattaaaacattatatttatttttgctgcaaaaaatttattaagtttttatcttataaagaaataatcaaaatttgatgatnttacattataaagggcagtcatggctattttgtatttctgtgatatgtnttcttctttatcaccaaaaattataatttaatanataaaattatattctttaaaataaaaattttaatatttcgaattaattttaataat

SEQ ID NO: 83393 - DNA, 405 bp, Glycine max
  unsure (1)..(405): unsure at all n locations
agcttcttatccaatgctcatcttggtggtgtatcttcttcttcaatggcttattccctagtggatgacgcctcctctcacctcttctcctttgtcttccgctgcatctccatggtggaaaatcaccattaaaggacctcattgaagctcaaagatccaacctncatagaagccccacaagcaagcttccatcattttccctttgatttatcgaagtccaataccttgaacttcggaggaatgaccatgtcgagtactatgcacaaatcttccatgtcagctaaaggcataatctctgcctccttcaacagcccttagcctttcctctatctgatccaactttccctttttttcgccatagtagaaaggactctccccgccgcaaaatgcaaaggttgtgattgt

SEQ ID NO: 83394 - DNA, 354 bp, Glycine max
  unsure (1)..(354): unsure at all n locations
ctgtgtaccggtcatctaaattctattctattngcaccttntaatctcattaggcttcaccttacaaatcaacgggctatgtacctttcaattgtctaaataccaagtcatttacactgtaatctcttcaaacatccccttcaagactgatgggctgtgtacctcccacttgtcttaataccaattctttacactttaatctcttcacactttgccttcatgactgaggggctatataccctccggttgtctaaataccaagtcattngcaccgtttcgtctctatatgctttgcctttgacactgacggaatgtgtattcttctattatataaatactgagtcatatacacct

SEQ ID NO: 83395 - DNA, 329 bp, Glycine max
catgtctgcagagggcgggcgacccttttcatcgtatttgcgtctgagagaagcggcactttgatgaacgaaacaacagatccatatatttctttgctacacacaatgatcaatatgcataagttagtttcagaacgtcgtttcatcaaaatataccctagtcgtagaatacactttacggaacaacatatatcaatcctagaaagtcatgtttggatctatactttaacaaaatagacttggaagctaccttctaaaaactgatctatattgaattcaaaaataagggtgacattgccaccactcactcctaaatagctcatcacttg

SEQ ID NO: 83396 - DNA, 125 bp, Glycine max
gtagaatagtggggaataatatacgatgatgtgagccctaatgaatatgaataaggtaacgattaacgaaataatcctatacaatgtcaacacccactggcacgacatttgatagtttgtatatg

SEQ ID NO: 83397 - DNA, 453 bp, Glycine max
  unsure (1)..(453): unsure at all n locations
cacgcatgcaagcttatccttatggcctgcctccggacttattccttgtgctcctccggaagatttaagccaagcccctacttttgaggggcaactcccaccttatgaagactatcccggacaagactatggggaaggagatacccatcttggcttcctgctccacctcacagatcaatccccgcatgaactaccccagccgaacatagttcgccatattccggcctcacccacacccgtaaaagaatttgttctctttgcggaatataacggaaagattgaggcgcttgaagagaggttaagagcaatcgacggcctccgtaattacccattctcggatatggcagattctatgtcttgtgcccaacatcatcatccctcccaagttcaaagtaccatactntggttagtacaaagggacgacatgtccaaaggggcatctccggatgtatt

SEQ ID NO: 83398 - DNA, 352 bp, Glycine max
tccatggagtacattaatatatgtggagctacatttaattttataaatcgtgttatctatacatctaaaaaagtaatgatgtagtgctcaactaataaaaaacaccaatatatttctttttatatcgtattttttgtaaaaaaacattacaactaaatcatgatgttgatgttatttttttcttacttgaatgaaatcatgagttcattgtgttgtgaaataaaaaaaaatattattctatcgttatgtttttctcccatccaatgagatcaagatttccttatgttaatggagctgaaataaaaaaaactattaaattatggttccattataacttcaagaaaattgtgat

SEQ ID NO: 83399 - DNA, 455 bp, Glycine max
  unsure (1)..(455): unsure at all n locations
agcttcatggtaaatcaaaggtgattcanatgtgtttggatgatatcaatgatgataacaaaagatgatgacaaaggtgatgacaaaaagctcaaagatcaatcaaagaacaactcaagtgaatcaaagatcaatcaaagaacaactcaagtgattcaagaacaattcaagagttcaagataagaatcaagaagaattcaagactcaagaagaaagtttagagtcaagaatcaagattcaagattcaagatctcaagaatcaagatcaagattcaaggctcaagattcaagaatcaagagaaggcttaatcaagataagtatgaaaaggttttctcaaaaattgaatagcacatggtttttctcacaacatgtttaccaaagagttcttactctctggtaatcgattaccagattgttgtaatcgattaccagtagcanaatggatttgaaaaag

SEQ ID NO: 83400 - DNA, 300 bp, Glycine max
ttgaaaagacacatctcttccaaccatctggaagaggcacaatgggcctatatatatgtgtgtgtctgactttgaaaagcaggagagacatttttctaagagaacttaatagtcgaatgctctctaaacaactattggtcaaaaacttgtacatctattgagaattcttcaaggaacttcaatttgtatcatctactctaaaggagagaaatctgtctattcatctcataaactcaattgtgatcaacagactgtatgtctcttggattgtgacaatcttgaacacacgggtgagggatc

SEQ ID NO: 83401 - DNA, 457 bp, Glycine max
  unsure (1)..(457): unsure at all n locations
agcttaagctccttcaactgcacaaggcttttgttagcttcgtatgtcacggttagcattattttgaaaattctgactaaatttcgacagcatttcgcattggtctccaagtacacaacatgacatcggtgaaattaatttctcgataatcaagtatgcactcaaagaacaacttgaaatgcattgcaccgaaatttcatcaaattaatcaaaataataataaccttaacgaatgaatctaacataaaaataccagtctccccaaactgtccaaacggacaattaaagactaaatacaatgactaatgcaaattgtccgctagaattattgcattcagtctcaaacgggaatctaaggtgcactcatcatgaagacaattngtatagcatatattagtctgcattaatggaagcgaacaagttaaaattataattgggagcacacattngtatatgt

SEQ ID NO: 83402 - DNA, 457 bp, Glycine max
  unsure (1)..(457): unsure at all n locations
ttgtagacttcgcttattttcttcttcaatctcttttatgacttgttccctaatggttactactatntcagccaactgttctttggtgaatgctatggatgaagtacttgaggcacgtgatgtcctcccatagtattgactaattgtgaccccagacccagctgcacgaacacaacctccatgatctggtcttcctatggccatgttaagtatatcttgacgacacctggggacaaactcaccctgtgtcacttgttcttccaacgagtcctacatgaagaacaaatttcacatcgttagatttcactgtcattgtaaacaacataacaagtagtaattatatgtgaaacaacatgtcacatttaatccanaatngaaattgttgtaatccaaattgaagttggaattgacaattttatcaagcaattgtcttgggcctcagatgtcatcttcccat

SEQ ID NO: 83403 - DNA, 442 bp, Glycine max
  unsure (1)..(442): unsure at all n locations
agcttcttgaaaacttgctgagaaaatttttgtnaaacttccttgggaagctagaacttatctagacacacccctctcataactaagctcacctccttgagaagcttccttgagaagatttctaaagaagctagagcttagctacacacacctttctaatagctaagctcacctccttgagatgagaagctagagcttagctacacaccccctataatagctaagctcacccccatgacaaaatacattaaaaaacaaaaaagtccctactacaaagactactcaaaatgcctcgaaatacaaggctaaaaccctatactactagaatggccaaaatacaaggcctaaacgaaggaaaaacctattctaatatttacaaagatgaatgggctcatacttagcccatgggctcgaaatctaccctaaggctcatgagaaccct

SEQ ID NO: 83404 - DNA, 445 bp, Glycine max
atgcttcacggatagagctaacattttatatgttgatatattaatgctttctatctgcaagtgttcaagaattaactcgatccattaacagacttacaaaaagtgatagatgatgtcataactattcaagtcacccatgggtggacaagatttcatgattcattagcaatgaatatgattgctattaccaacttagaagaaagttttcttaggcaattttttttatgtaatttgttattgaagagagactctatacttggttttattacatattttaatttgctacttaaagaaaaactttgatttaaatattgactcttggtggatgtcaagtgtttttttcttaaacgatatatttatttatacacattataattaggcattggactaatcaacgtaattaatagtgtgggttataagtgaccatttgtatgtacaagctaat

SEQ ID NO: 83405 - DNA, 461 bp, Glycine max
agctttagaaatcaagtgattaagtggtgattaattaatcatcaattccaaaacataaggggagtatgaaatgagtgaacgcaatatatcttgcatatacattgcttgtatcttgatttatggaattaaattgtcatcataaaaaagggggagattgtagaagcaaagactttgcctttgatattttgatgatgccatatgatcgtgatgttttaatgccttatgaaaatgtgcttctcaagtttaattcaagacaaaaattcaagaatacaagatacaacatcaagaagatctctagtgtttttaggaagggaattccaaattgaaactgcaaaaggtttggtcaagaaatttaagcaaaaatgtatttttcaagagatttactctctggtaatcgattaccagtggccaaaattatttataacaactattagaaatttgaattcaaacattacactgtg

SEQ ID NO: 83406 - DNA, 442 bp, Glycine max
  unsure (1)..(442): unsure at all n locations
aacaacattccaacagcacatgctattatagtcaagcaaaacagagcaaaggcagaaaactctgctcaaacaccaaccaaaatcacagcttttcttacttaaagaccccagcaacaattccttcgattcaattcgttaaccggtggatcgactctaaaaatttactggaagtctaaagtacataagcctacattgtgaccgttgggatctactatcaaaagtccagaactcattctgtactaacttttcccacagcctaccacacacaagcatttttctgcataagccaaaattctgctgcacctattttgacagcaaaantctgcattagtgcagaatttcaaaatcacactttcgctcatccaatcttgcccaaatcaattcctacaagcccaaatcatgtatcatcattttaaaccaagtcagctttaagcacagcaca

SEQ ID NO: 83407 - DNA, 434 bp, Glycine max
  unsure (1)..(434): unsure at all n locations
agcttgtaggattatggggtacccatcacatgtggtactaggtggcggtcgggcgatggtgcacaacaagtttttccacatccacaatgcgcgcataaacccaccatcccctgttgcccacctccaactgagctcgcgtactcccacgtagcccatatcctcgtttctctcaacaccgggtccccatcaatcctctcaagcttccacaacatccaagcaaaacaacattcaaacagcacaagctatcacagccaagcaaaacagagcaaaggcagaaaactctgctcaacacatcaaccaaaatcacagtttttctcacgtaaagaccacagtaacaattctttcgatccaatttgttaaccgttggatcgactccaaaattttactggaagtctatagtgtataagcctgcattntgaccgttgggatatact

SEQ ID NO: 83408 - DNA, 440 bp, Glycine max
  unsure (1)..(440): unsure at all n locations
tgcatttactacatttcaagataaaggttgcatgcatttgcatcccanaaatcatgttcatgttaagtgcatagacttctcttgaggatgagaggccctctcaaagagtcaatctcttgctttctcataaggttgagccacttggtactagtacctatcggcttgcttcataagactcaaagtcctcccctttgtctttcataggactcaaagtcctccatcacttgtgctntctagacaacaaagtcttcatccttttcaaagactgttacagtcttcttttccttcgagagacaatcaagttcgttggcctgcagagacaattatggtcatttgctacttttcgaagacttcaatgtctttcgatcaagactattaaagtcttctttgtcttgtagagacaatcaagtctattggcaagccagacaatcattgcatct

SEQ ID NO: 83409 - DNA, 452 bp, Glycine max
  unsure (1)..(452): unsure at all n locations
agccttgtttcctcttgatgcggctntatntttctctcttcttgctccaccatccttaacagatcaggagacaatccccaatccttctcttcatcttccttagtttggttgattgacatctcaaaattgacattagggatctctgtggcgtccctaaattaatgactggtttaatagtaataatttaaataacaaaaatcatggtaaattttttttttctttttctttttcatttctttctcttttcaccataactaggtttagaaggaaaatcctcactatagagtcctgaatggccagttcacaactctattcggagtcatttctttcttaccactcataatctctaaactattttgctgtttcaaaaggaagaatgtaccagccattactttaggtcgtcacgtgaaaataaaagaataaaatacggtcgataaactcttttacaaata

SEQ ID NO: 83410 - DNA, 453 bp, Glycine max
  unsure (1)..(453): unsure at all n locations
ntttggagtagaaacatgggaccaactcattttatttcataaaggaagtcgtatccagtcaaggtctgagagaccatacaagtttcctaacgatttctaattatgtgggccattaagtctatcatatgctgacaatagccgagaagcccatgaatctcttcgggggcggagtaggtgtctgccatcgctttggccttggctaacaatcggggaagttcttgactcccgttcaaggtaagagcaaaccgatccatccacatggttgcctcttggtgtaaagagtcgatcacccttcctctagcctctttttccgcgtatacttgggcatattcgtccgcaatcctatgctcgtgggccgcggctagacctaactcttcttggtacttggcgatgatagctagcatgttggtctccgtttcgcataaacgctgagacaagcttcttttggacctt

SEQ ID NO: 83411 - DNA, 442 bp, Glycine max
  unsure (1)..(442): unsure at all n locations
agcntttgaggttctggaataattgattatcatatgaggtaattgattgtttcgtcacacaaaaagcttataaagtttccagacacaatctaatcgattactaaatgtggtaattgattatctcgagccacaaagtcttccttcttctaaaactggctttataatcaattactaaattgataattgattaattcgatgactttagccaaatttgaaatagaagtgactttagccaaattaagcaacacatacaccaattaaccccttgttcattaagcacaaacataatttaagcacataggcaattaattgaacacgaagtgtgcacagattaacagaatgcatgtgggttaattggtgaagggaaaaccgataggagagcaacattaaaaatagaacctcanagagagttacgcttcttcctcagagggaaacaacacta

SEQ ID NO: 83412 - DNA, 436 bp, Glycine max
tcagcttcatgatgatgaatcaagtagtttgatgatgacaaaaatcccataagaatgatttcaagattaagtcaactagttcaagatcaagattaatttcaagattcattagaagaaatcaagaagaatcaagattcaagagaagaaatcaagaagcaacaagtcaagacttcacaagggaagtattgaaaagaatttttcaaaaatcaaacatagcacagttttgttttacaaaagagttttctcaaatttttctaagttgccagagtatttactctctggtaattgattaccagtttcctgtaatcgattaccagtgataaaatttgatttcaaaaagtttttaactaaatatgcaacgttccaaatgaattttaaatggtgtaatcgattacaatatatgggtaatccgataccagtgtatctgaacgttgaa

SEQ ID NO: 83413 - DNA, 133 bp, Glycine max
  unsure (1)..(133): unsure at all n locations
agccttttcggagccatttcttgttagagtgttattattataaaaaatgacagcaacatgcaagacaatgtggcttggaggcgcanaaatggcaagtccgtacctttggtatttttgaaactggcgggggggg

SEQ ID NO: 83414 - DNA, 425 bp, Glycine max
tggtccagatccatatgtcctgtctggatctttatagtgatgatcgcaaagcttcacaaagcaacacatgttgtcttggctgaaagtccttcttgagcagctcttcatcatgatactttttgaccttttctgtatacaactttgaagattcataagttgttaatctcatctctttcaaatccaaaagctggagccttctttgttctctaaatacgacttcatcaaagttcaaaaacttcaaggcctaatatactttatattccatctcaactggtaagtgacaagacttgccatacaccatctgatatggagataagcctatcggagtcttgaatgttgttctgtatgcccataaagcatcatctaatttgatagaccagtctttctagtagaagctacagtcttctccaaaatcttttcaattc

SEQ ID NO: 83415 - DNA, 408 bp, Glycine max
  unsure (1)..(408): unsure at all n locations
agcttgaatgaattctgaagagggcgcgttncttattgttatactctactctgtatcctcttgttgattacatggatcaagtgccatcttcagcgctgatcattatggtgactcaagagacaacaacattcatcttactgctggtgaccctatcaatcgattatccttacaggtattccataccttttactggatcttggaattgcattattcatgtaaattgtcatctgaacaacacaatgataatcgaattagtgacacttaaattctgtattcatgttggatgggttgctgtactcctctctcccctctgtgttgctggcacaacaagatccttcttcccttaaaacattgctggagagactggaaagaatcttatctcagtggcctcacattgatgaccgatct

SEQ ID NO: 83416 - DNA, 449 bp, Glycine max
  unsure (1)..(449): unsure at all n locations
agcttgtagtatttgttggtataatntgcctgttccattangctcttaatgtctntagaggttatttnctcgttgacatcttttgttttgaatggtattgccatgacaggtttattgttactgtctttgatgtttggtagttgatattgtgttgcgggaggtaattccgattggattaactcaccatccttcacttgccaatttgttatgacatttgttgttggatcacctatgatgtcttgtttccaagggtaatctatatcctttctgatggcataagcatgaaaccaatcaaagaaaaggacattgattttgactctttcgacaaattcgtagaacttgtcttggatttgttttctgtttgcacccttgtaatgttggaaaaaccatctcctttgaggttcattctccggagaatagaaatctttcctaaggggttccttatcaat

SEQ ID NO: 83417 - DNA, 367 bp, Glycine max
  unsure (1)..(367): unsure at all n locations
ctatttaccagttgtatctntcatgatgcttacattcgattatatatgatagaaaaggcagcactaacactcataacttcggccaaacgtctcataccgtacttccaaagtcaccaagtggtagtctagatgaactatcccatcatacaagtgttgtgaaagcctaaactggacggaagaatggtggtatggtccgtataattgtcagagttcaatctccagtacaaatctcgtggccccatgaagaccgaattcatgacaaactttctggcagagtttgctggcaatgactaaaccaccctagactggtggaacctctacatggacggagcgtccaacatggagggaagcggcgtatgcatcatca

SEQ ID NO: 83418 - DNA, 312 bp, Glycine max
  unsure (1)..(312): unsure at all n locations
ggctgcagctgagaactaggtcagacgcttttttttgaaacncaaccacccgtacttggaggctgaccctacacattacaccatcattctataccactaccaccttatctaatatggaataatccttgggtgcaccataaaagttatattttatttccaagctgtactaccctatactattcatgattaaaagaatactataacacacaatgctggaataatacataaacaacagtgttctctgtgcctaactatactgggatcctagaaataggataatctaatttttttctatataaacaattattctgc

SEQ ID NO: 83419 - DNA, 449 bp, Glycine max
  unsure (1)..(449): unsure at all n locations
agcttggacattggaggtgtgctcatctactatatatatattgaactctttcgacacgggagagaggaggaaagaaaaatggtatgctctacatatatactacttagtatcatgttgaacatgttattcctaaattatttatttcaactttattagctgtaacacgttttctctatatatcggcatattttatcattctatagtctattagttaatagtatttaataagcatgcttttacccgttttaacatagacaatgaaatagtaccgtgatgaatatctttttggtatactggcagttntttgacggatacgggtatcaagggacatcatcatttgagcagacatttcgatgttactctgcttcatttattgaaaaggtcaacatatgcttattacgtgaatgatgacttctattgatgatgcattactattcatactaattacc

SEQ ID NO: 83420 - DNA, 445 bp, Glycine max
ctaagctgtactctaactattatgctattgctctatttaatgatgagaagattgacagaaggtctatataatataaagacaatacctagttagcaaaataagattgaagataacgattattcgggtcaagtatatttgtatcacaatcatattatatcaaataaatatcccaatattcacggccttgattctctctttttcttctttcctacctaaaccctataattttaaaaccagctaatgaagatcaaatttgaattctctatgacgaagaaaagtattaatagctgcacaataaggttaccttgaggcgaacaaccaagggctcttctttgggcatatactaatctggtatctgtgcatcacaaagatgctcctcgtgaacaatattaccttcaacgacattagttattggaccatttatgtgttctgcgccatctttttt

SEQ ID NO: 83421 - DNA, 432 bp, Glycine max
  unsure (1)..(432): unsure at all n locations
agcttctggtgggacatcttgacttgctttcttatctgacattcaccacagattctgccttcttctattttcagattgggaatgcctctaacagcacctttgtcaatgattntcttcatgcctcttaagtgcagatgtccaaatctttgatgccatatattgacttcatcttctttggagaatatacatgtggaggagtgactggtttcttgaggtgtgcatatgtaacacgtgtgctttgatctgctgccctttattaagacatcacactcttcttatttgtcaccacgcattctgactgtgagaagtttacattgaatccttcatcacacaactgagtgatgctgatcaagttcgcagtcacccccttcaccagcagttctgtgttcatactaagaagtctcatgtggactatctctcccataccagtga

SEQ ID NO: 83422 - DNA, 457 bp, Glycine max
  unsure (1)..(457): unsure at all n locations
actaagcttaagccaggccagactctcgtgcatgtagaggcttcttctttaaatatgccaaactccctcaaaaaatataatttcaagcttaaataggtgggttggtctgtgcaaatatggatcgcttagcacgcataagtggattgtggcttagcgcgcttctctcacttagcaaatgagctgaagtggtgcgcttgatgacctatagcggtgcgctcagttaacttgacaactcatcttcttctggattcttcctcgcgcttagccactgagtgtcgcacttaatgaatgctcgctaagctagcagattggcttagcgagaaggtgaaaactgcactttttgccaatnttctaattaacctganattgaaagaaattgattattaaacacatacaaaagtataattatctattacctatattttaacataagtacttataatattataaacaacta

SEQ ID NO: 83423 - DNA, 441 bp, Glycine max
agcttcagaccaaagcaactcagaatctatgtatctaaaacccctcaatttagtggattttcaaggtttgagaagtgaaaatgagaatggggtaaatttggagcaaactctcacctcacacaagtctataaacttaatctaaacttgctcaaactggtttttcacctaaaattccaccgaatcaaaatttgactcctcaacacccaatttaccctagaaatggctcttgccttcactttggtcattcatttttctcctttgcacagccccaagctttcccacagtcctaaatgacatttcaaactaggattaactccctttaacctccaattaccaccaaatccagatttaacctttcaaactctcaaagcatcactcttttccactcatagcactacattctcacattctaaccctaggttagctctacccttcatctct

SEQ ID NO: 83424 - DNA, 409 bp, Glycine max
  unsure (1)..(409): unsure at all n locations
cgcttacaatgtcggcttcttatttaggagctttcattctctatttattaaaggcccgagatggttctccctttgctggtgtaagatctttgactcttcgatctatagtggtcaatattcttgccttttgctgaaattaaacattgcaattttcagtttatagaattaagctttttgtaattgttgtcaagtcaactcaattgagaaaattataaccacaaatcttttggtgtgttcataaatttctaagagcaagatccattgaaatgatntttatggttgaagagatattgttatatttggcatgatgtggattatttgttttaactatgcagcttattgatttacaacgtactattgataaagaggtgtctgggtctaataactcttaatcaaagaagaaaatgct

SEQ ID NO: 83425 - DNA, 337 bp, Glycine max
gagaggggcttttttgtttctcgcacaacacacactggcgtgtgatcactattgaaacgcgctcacgcatcgtaatggtgaatgaacgagggagttagtgccacacctcccactgctttctccagaacaaaccttcttgaccagggcgcaccccattggtgggtcctactaatattctttcttgtgaaggtcaaagctcaaattgtgagtatcatggtgcaaaatgtgttgcttagggaatgtcacatcttaaatattgttaacaattgtaacttaatattgacggaatgaccattttggataatttaaatagatatatgataacatacttttttta

SEQ ID NO: 83426 - DNA, 438 bp, Glycine max
  unsure (1)..(438): unsure at all n locations
agctntataagcgcgggtctgggagacaaatgtcaagcgttcgcgatatgcgacgatgatattccgagtactatggatttggtacgaccatgccctcctgatttccagttgggaaattggcaagtggaggaatgccccggcatttacgcaacgagcataatgtaaacctttacggttttaaaagctctatagttgggcctaggctttagagtttttccttttgttaaagctttgtgtcttttgtttttgaatttataatacaaggatctttcttgatctgttcctagtctctacccattctcattcatttgcatgtttacttctttttctgaaacggcagatccgatgacgagtcccccgaaggtactaatacctgtgacccgcctatcgacttcgagcaagaaatgaatcaaacgaaagatgaaggaaatgaggatg

SEQ ID NO: 83427 - DNA, 444 bp, Glycine max
  unsure (1)..(444): unsure at all n locations
agcttctgctctggccgctcctcacggacgcttacatgaccaacattgtggtccttgtaatattgaataagggaaaaaaacaatgaaatcttgtactatgttgaatgattgaaagtaaaacatcaaatgtgtatgaaatgtgtttagatttctcttaaatataattgtcaattgttgcttccaagtataagaggcgacagaggtgggcatatgcattcaacgttgatgttaggatntgcatcaggatgctcactatcaaacatggagcatacttcgataagaaaggtaagctcaattgtcactaatagtatgcctaaaaatggtacattaaggaggataagatctccatgatagtgaactctgtcatcgcctctatggaaaaaccattgccttgtcagatagagcattacttcttgtttccacaacatgggatccatctatatc

SEQ ID NO: 83428 - DNA, 352 bp, Glycine max
tgttacgctaagcctcgcatctcaggctaagcacatatttgtttaaagattttaggggatgcagaaagcgctaagcgctgcctgtcgcgctaatccccaaatgcttactggaatttacaacttcaagttgggcttatcgcgaggctatgcttagcgttagtgttttaaactcaaacgtcacgtttgcacgctaagcacagctgtacgctaagcgcgccaaacaaaattcagttattaaaaatcacatgcagaggcacttgggttgctacctttgcacccaaagctctgcaccttctcatctttgagcattctgttgcattctgctgcgtgcgtactgcttctttgcatcatt

SEQ ID NO: 83429 - DNA, 443 bp, Glycine max
agctggccacccagctcgcccaggcgagcatgtgttgctttctccagaagcaacaaccttttggaggaatcttctggagggcccaagtgggcctggttgctatttgcacccccacctttactaaatacacccccttgcccttttttggagattctttttttgtaaagttacgaaaacttacggatttcgcaatgatacttgttttctttccgtaatgttacggaaccttgcgaattacataatcatccccttttttgacttatggaatgttacggaaccttactaattgtgcaacgatgcttcattttgatttctggtgtttcacggaaccttacggattgtgcatcaataccttcttttgatttccggcatgtcctggaacttcacaaattgcctaatgatgggtgccaagcacctcacaaggatcaaacaaaagttgcatg

SEQ ID NO: 83430 - DNA, 347 bp, Glycine max
atggtgaggaagaataatctgaacgcgggaggaagatacagagacgagaatgaatcatttttttaaaataattaagtcagggatacaaatgtattttccccttaagtgctgggtggaccaccaaaaaatgctcaatgcaccatcaaaaatactcagtgcacctaacaacactcttataattatgctcttaatgagagagaatagtttgttgttttctttttttttgacaaggattaattttacaatgactccaattcacgccgtggtatcttatgtagtgagaaaaagacagcaatgaaagaatccctgatctccttccatcttgacagttgacactaacagcacac

SEQ ID NO: 83431 - DNA, 459 bp, Glycine max
  unsure (1)..(459): unsure at all n locations
gcatgcaagctntagactcttttatctagctagggtgtattatatgtttcacacgctatagcgccgcgcgtgacttatcaaatgtgtactctggccactccatgatttggtcagacccaacctcataaggatgatgctaggtgcaccagcattattatttttgcacccaacaacttttttatttccctaaatgctcttggtgtcttcttccttttgaagtcgattgcagtgttattttttctcttacgcctccattgggtttttcttctctttctccctatgttattggtttgtgttggtttttcattgttgagagagttgccgcttgggtcaaggtgaaagtgttaggggtcggtggtgattggtgcggtggttgcttcgtcgtcgtcggcatttaaggtatgccattctgctgggtgtgcgtgaattgatccgtatgtgtaagttataaataccgat

SEQ ID NO: 83432 - DNA, 362 bp, Glycine max
  unsure (1)..(362): unsure at all n locations
ccctattttttatttaaaattcttttgtcccttatctgataaagaatatttaatcattaatctctcaaatttgaatcattgttgctatttcaaacaatgattttttaaatcttgcgagacattaaatgcatgaaaagagaagaatatattgtctaaccatatcgtgataattatttctcaacacaatttcaattgaaaagtcatccgaataaaggaggattagagacaatgatagaacttaatttatcattccatacattactcaaaacaaatgagatattttatttatagacataaatctacaactcanaanaatcgcccaatgtattggccaataaagtctttttgtatggggtttttct

SEQ ID NO: 83433 - DNA, 428 bp, Glycine max
cgcttggcaatgaaaaggagaacaaaatcacttcgttgttttgtgcgcaaacgccacttgagactgtctatttccaaaagctccatcctctgaactgaattgggcataaacaataaccttgactcgatcacttgtcggtccaaaagaagcggcactcttctttcttccatttttgctgctatagcaagacaagccactgataacatctgcagaggccatgctttatctggctgcacaagcaatccactttgtaaaaaaacaaaaattgcatgttatattttcccaaataaaccacctttgaattcaagtaataccgtcaaggtgtgtgacaagagaaaacgattgacgtaatctacagaaagatatgctgtctttgttgtgaaactggataatgcatgcacctgcagaatcatgatagaactgtctct

SEQ ID NO: 83434 - DNA, 220 bp, Glycine max
cgtctgagaaacatgctcattgaatccctttatttttgttctgacattccaagaagtagcgcttggctaccttacgacacctggcatacaatggcgccattttggaagcctttgatggaaactacaaatgcattttcttgacttaacaacacttattgacccagtggcaaagcttatatagcattggccctctggcagagaacatccacctatcttaaca

SEQ ID NO: 83435 - DNA, 436 bp, Glycine max
  unsure (1)..(436): unsure at all n locations
tccctaccacnctatntttctacccctttggaacatcaaatagtcaaagttcgtgggaatcaatacggataaaataatgaaggggacaaagatcaataattagtcataacaaaccaaaatcataaattaggcataacccgaatataatccaatcagttcaaaattcaaaaccacatagaatcaaaaacataaaagtctaaagtccatatactaaaagataaataaagtaatgaaaacaataatctaaatatcatagccaaaatacatggcttataataaacatagaattataaactaaattctaagaacgtggaggtggtggtggaagatcgaaactctgacgaatataacccacatcttctttaagttgagtgagacggatatccattccggcatagcgagtatccaacatgtcgaaatgttcaccaacataaga

SEQ ID NO: 83436 - DNA, 424 bp, Glycine max
  unsure (1)..(424): unsure at all n locations
agctttaatttctattttagaccaaatctctttttaacatctaagccattaatgagttgaccattatttgactagagaattntctctaaattatccttattctgtctagactttaccttaaaaatttatgagcttaaccattcatagatattctattgtaacatctcattttctagtttaaaaacactatccaatcacacaacaaacaaaaatattgtctaccacatagacatgaaaaattgggatgttacagagtttctctcttttttttttcctttaaccaccaagttaatcctataatcccccatttctctctttaaccaccaagcaaaccttataactcctaatgtgagggatcaatctttctttttatttattttaaggattaatattctatctattacaatttgagagactaaattga

SEQ ID NO: 83437 - DNA, 457 bp, Glycine max
  unsure (1)..(457): unsure at all n locations
tgtgtagagttgtcaattagtaattttagctcagatgagaaaaagaatcaaaaaacgaaggatangccacttaagttagaagctaaatgtaagaacaataccaaaaccattgaaatttaaggtgtgtgagagaaatgaaccgaaggaattgtaacttttgaaaaacaaaccaaagtgaaattatacagaagagggtgattattntgaattacgaaatatatacttcatgcacgcatgatttttgcacaaccatatcataattgtcctcccacaccattgagaaatagagatccatttgcaattttgtaagatcaaagctaatattcttgtgaaaccacatattgtggaatctgaatgcctcaacgcaacttcgttctttcgatacacgtgcaataacaaacattaagatgattcttcgttcaagaccaattctgaatacatttttaatgtagaagat

SEQ ID NO: 83438 - DNA, 446 bp, Glycine max
  unsure (1)..(446): unsure at all n locations
gcatgcaagcnttgcttctacacttattagtatgtgactttctattttagtcgcttttaattcggttatcttggatgactctctaaattatctgacattntattatagcttatgaataaattatgcttagtttatgtatgtgttattgtcttccttgtttggatgattatgagtgaatgtatgattttatgtctctatatgcactctggttttctgttgatgccaaagggggagagaaagttgggattaaatcaagaactcatataattaaataacttaatttcaagtgaagcttaaactcataaacaaagggggagaattacgtgagtgattgattagaagatagagcttgtatgcgtatcttgatttcaaatttgtcatcatcaaaaagggggagattgtagaagcaagcttcatgatgatgaaacaagcaattttgatgatgc

SEQ ID NO: 83439 - DNA, 371 bp, Glycine max
  unsure (1)..(371): unsure at all n locations
gggcacctattttgattttcccatgctgtctctacatacataaaacagccgcaccatcccaattttgcaaaatcatattcatataacattggggcatttcatcgagcacttggtgggcgcacgtttatacatatattgcaagagaatgggagcaatgtggcatgccccattgcttcagaatacaacctaggcctaagggcctttcattcaaatccttaattcaagaaaacaagcaccaaagcataccataactgccttacaaatataagcatgttctcacaattcaaggcaccaaaagatgaagaangcacatcaatggaaagcataaacatccacgatggaatacatacttgctggagtgaatgataaca

SEQ ID NO: 83440 - DNA, 453 bp, Glycine max
  unsure (1)..(453): unsure at all n locations
agcttctagccaaatggacttaccttgacttattttctttgatnagccctttgagccttgtttccctttccttggtttgaagctcactacaagccttaagtgaaaaaccatgatatcactatatccttaaggaattttggagctttggaattgttttgggaataagtgtgggggattttgtttcattggataacatgttttgttggccatgcttcattatatattttgagccatacttgatacacattgcatattggttaaatgttggacatgctgaatatgatgttgtttctcaaaaggctacagaaaaaaaaatattataaaaaaaatcgaaaaagaaaaacagtaaagttgagtgaataagaaaagaatgatgagactcttggntctactctcctatgttaaactttatctttacttcgttctattttcctatggtgtcttaatatgcac

SEQ ID NO: 83441 - DNA, 388 bp, Glycine max
  unsure (1)..(388): unsure at all n locations
tctacgatatgggtctctcttggagaagagaaagaaagctacttgtctatgcanatctaaattgtaagggttatggaagggtttatgacccttacaagcccatctccttaagccgaaactcactaagcccacacaaacataagcatgcatcaccatgtaaataattaatttactttaagcattaaatttaaatgtaactacacttgctaattaattaaaaccacttaatcatacattatgaaaattaggttttacaatactccataacaagaaaaattntgtcctcaaaatttgcttgtgaagaagantcataagcaccaatcaagcacgaaactacttcattntctagaggtcttgatctttccttcacaatctcttgtatagtcaa

SEQ ID NO: 83442 - DNA, 402 bp, Glycine max
  unsure (1)..(402): unsure at all n locations
agctngcataaatagtggacagtctggttctcttcctcagntttgctattatcatctccttacttcttcataaacatgtaaaatgatactattgccctcccctgttttcctacggcccttccccttcctcgcacaccacttttccttctcttgatatatatatttttatttaacttaattatgatatagcttatcattttaactataactgaattaactatgacacacattatcatatgatgacacaagctatcctttcttaataataatcaaagtaattattatacaaattagcatcataataaagcaaatctgcatagtaattaatttgattattcttataaatgataactcctatcataattaaattcaattggtagtccttactaataaaaaaattga

SEQ ID NO: 83443 - DNA, 460 bp, Glycine max
aaactcagcttcatcataatcacaaactgctttaaggacatggaattttatgcttctgttgtggtatgtgacgtactgttatatgcgatctatcattttactctttatgtaacaatttctgttgtaacaagaagctcataatagtttgaacgaaaaactggctgagccacctcctttaattgatagaggagaagccaataaagagctattatcaatgagtttgtgatttataaatacaacaataactgtgatgtcatcgtggaagtgtctcctcactccttgttcaatcttttgaacgtctgagacatttattaatctcttgctatccgctactcgaagcgcaattataacaaaccgcctatcaataccctgtttcatgaatcacaaaacattaatattcataaaggactcttgcatgcatgataagaaacatactgcatggaggtaatgaacttacttc

SEQ ID NO: 83444 - DNA, 458 bp, Glycine max
  unsure (1)..(458): unsure at all n locations
ggatccttaagtcacctgcagctgcagcttagcttcttaggaatcttcttaaggtttcttctcaaggaggtgagcttacttatgagaggggtgtgtgtagctaagctctatcttctcaaggaagttctctcaaagaagcttctcaaggaagttttctcaagaaagcttctcaaggaagctacctagtctataaatagaagcatgtgtaacacttgttgtaactttgatgaatgagagtcttgtgagacacaactcaaagttcaacttctctccctttttcttccttcaatttcgtgctccccccctccctctttctctccctctntcttttcctccattgaagcatcctctccaagcttcttatccaaggctcatcttggtggtgaagctccttcttccatggcttattccttaatggatggcgcctcctctcacctcctttcctttgtcttccgctg

SEQ ID NO: 83445 - DNA, 480 bp, Glycine max
cattacggacacatgaaactcagcttagaccaagtactcaaatcaggcatctaaaccccttaattactggattcttcaagggttgagaagtgaacatgagaatggggtaaatttggagcaaactctcacctcaaacaagtctatatcatcaatctaaacttgctcaaactgggtttacgcctaaaattccaccgaatcaaaattagactcctcaacacctaatttttaccctagaaatggttcttgccttcactttggtcatttgttttcctctcttgcacagcccaagctttatcataagtcctaaatgacatttcaaactatgattaaccctctaagcatcacacttttccactcagaggactacattctcactttctaaccctaggttaactcttacccttatccctagcagtgttccattatcaatttcagcacataaacatcacaagcatcgccataaaaaccctataacagaat

SEQ ID NO: 83446 - DNA, 459 bp, Glycine max
  unsure (1)..(459): unsure at all n locations
agctngcagcaaacacaatgtctggtcttgtttctgacagataaaacaaactaccaattatacttctataaacagaatcatctgctttatcaacaccatcattcattgataacttttcattcacaacatttagagtggcaacaggcttatcgggtaaaggagctggattgcttccattctccactggttcccacagactttgagctctcaaataagttctcatcttggcagcccacatatcataatgctctcttgcaagcactggaggtggaggtaaggattcactattggaagccattggttgaaggtcttttgagtgaggttttcttgctggtgttctcttacacactcaaactggctttcagattatctttctctctctcacacaaacacttaaagatcattgaagctcttgataccgcgttaaagtaagaaactaaaaactgaacatgagtgaag

SEQ ID NO: 83447 - DNA, 404 bp, Glycine max
  unsure (1)..(404): unsure at all n locations
ctgaatgcttgtttaattacaacgcgttggatgttgaacgattcttttattggaagttccatatccttggacgcctacaaagacatatacatatgaagtttaaaatagggttttgtaatcaattttttatttgatgacgtgtttcctacaaaattcaataaaatccattagttcatacaaaatttaatataattattatcattaaaatcatagattttgaaggggttagagaccatccaataatgtgtagttttaacaaaattatctaatgagataaaagatataaaaatatttataaatttttatatttttttgtggtatattaaagtacaattgtaattaaagtacatctgtgggatatnttatttataaatatttataactattcttggtgcatgatatac

SEQ ID NO: 83448 - DNA, 405 bp, Glycine max
  unsure (1)..(405): unsure at all n locations
gcatgcaagcttgtatagataagtactgcacccggagacttgttcatggtggcgaccctcatgctcgtgatgcacagactttacctgatcaggctcacctatctgggtcatttgacaccgagcggcctttactacctttggcttgtcagtaggcgggcgaccacagggcgcacgtgcacacccatgactatatatatcagggtaccctcaccctgcatagctaaggctcagcttcttttccatgccccactccggagaacttcatgcaataggtcgcatggcccggatatatggctgaggctcatactgctnaggcatccacagaggctcccggcgagcctaatgatgcccgctaggatgacgagacgttacatccgctcggatgcctgggatggagaggagcca

SEQ ID NO: 83449 - DNA, 453 bp, Glycine max
agcttcaacattcaatttcgagcgtctccatatattacgggactcaatcagacatccgagtaaaaagttattgtcgtttgaatttgctcaaagcttcaacattcaaattcgagcgtctcgttatattataggactcactcagacatccgagtaaaaagttattgacgtttgaatttgctcagagcttcaacattcaatttcgagcgtgtcgctatattacgggactatatcacacatccgagtaaaaagttattgtcgttcgaatttgctcagagcttcaacattcaatttcgagcgtctccatatattacgggactcaatcagacatccgagtaaaaagttattgtcgtttgaatttgctcaaagcttcaacattcaaattcgagcgtctcgttatattataggactcagtcagacattcgagagaaaaggtattgacggttgaatttgctc

SEQ ID NO: 83450 - DNA, 427 bp, Glycine max
  unsure (1)..(427): unsure at all n locations
ctgagccaattcagacgacagttactttttactctgatgtctgattgagtcccgcgatatattgagacacctcgaatattatgttgaagctcttagccaattcaaacgacaataactttttactcggatgtccgattcagtgacgtaatatattgggacactcgaaattgaatgttgatactctgagccaattcaaacgatgtctgattgagatccgaaatatataaagacgctcgacatcgaatgttgaagctttgagcaaattcataagacanaagtctnttactacgatggttgagtgagtcacgtaatatattcagccgctacaaattgaatgttgagctttgagcactatcaaacgacaatattcttttactccgatgtctgattgagtccggtaatacatcgagacgctcgtattgaatgt

SEQ ID NO: 83451 - DNA, 318 bp, Glycine max
  unsure (1)..(318): unsure at all n locations
tactttcttgtctcaacgcgagctctgaccactggtcttgcttactgcggtgcttcttttcatgtccgcttgagtgggcttatatcctaaaccatatttaccacgattttcttgggtttatatcaagctagttatgccgccattgtctttgcctaaacccataccgggttcataaccgttccccaacataactcgggccatcattaccgccgcatcggacagacaaggttgcccaaagagggagtccacggaggaaatgctgaccacctcataagactggnaagcggtttcttacgattcttctgcggcttacacata

SEQ ID NO: 83452 - DNA, 450 bp, Glycine max
  unsure (1)..(450): unsure at all n locations
gcatgcaagcttcaggatgtggactacccttggtctgttgtttatcaaagtgtaaggccatggaacaactactacaaggtatgaaattccatgagagaaaaaggttcttccaagaagccactangtatgtttgggatgaccctattcttttttgtatttgttttgacagtttgttaacgcgatgtgtaacaaaggaagaacaagctagcatactttggcattgccataactcaccatgaggaggccactttaactgagaaagaacaactgctaagatccttcaagaaagattatattggcctacattcttcaaagatgcttataaccatgcacgatcatgcggcagctgtcaacgaaccagaacatatttagatgacatgaaatgccattacagaacatgcaaaaggtagaagtctttgattgttggggaatttattttgttggtccctt

SEQ ID NO: 83453 - DNA, 446 bp, Glycine max
taagtatggattgtatggtaccatgtatctaatgtctagtgctataccatttctgtcaatatatttaccattattacgctctctataaacatgataaccctcttggtaacaacaggttcagctcgccatttttttgggaaatatctagaacactttccatctttcatgcatggtgaacttttgtttgcatgaccacatggaccatgtttcttgacacactcatagagttatggttattcaatagacattgttcaatatagttatggttgttcaataaaatctggtatctcaactgatatgatgccatcaatatttgtaggagatggatacttgctggcagcatccaatattggatcaagtggcctcagaataattaagaagaggggggcgtgaaataattattaatgtgtcttgactaaataaaaattatcccttctaatattact

SEQ ID NO: 83454 - DNA, 455 bp, Glycine max
  unsure (1)..(455): unsure at all n locations
agcttagtgagagcaaatgagannaattagtttcttatgtgaaaagagagtcatttatagtgtaaattgagtgttgagaggtccaattttgaataggtggagattttagtctaaaatcagtttgagcaagtctaattcaatgttatagacttgatgaagatgagagtttaccccaaaatcacccaattctaattttcacctttcaaaccttgaaaactcactaaattttgttggttttggatacctatattttgatttacctttgtttgaggtttgtaattagtttgaacatgatttatacatggtttangacttgtaggatcaaatttgagtggaattggatgtatataagttagattctaaaaatctgcaaaattatgcagaaaattcgattgtgaagtaccagttttcactgtcgcggtaaaaaatttatatctcgcgttcaagacattctt

SEQ ID NO: 83455 - DNA, 415 bp, Glycine max
aatcacacttgagaagcgcattttcataaggtatcaaaacatcatgatcatatggaatcatcaaaacatcaaagtcaaagtctttgcttctacacttttcacttggatctccgattcaggtgcataatatatcgagactctcgaaattgtacacagaagctctcggaacatttaaatagccataacttttgactcgagtgtatgcgtaaggcctatgatatttcgagatgctaaaaaatgaaccatggaagctcacgagaaaatcaaatggtcatcacatttaactcggatctccgattccagcacataatacatcgagacgctcgaaatagaacatgtttgctctcggcatattcaaacgaggataactattgactatggtgtatgtgtgaaacccatgatatatcgagacgct

SEQ ID NO: 83456 - DNA, 455 bp, Glycine max
agcttcctatgtgcactagcaaattaaaaatgttatgtgggttagttgactgattaattataagcagcgacttgtattctgaacttaatgatatatatgttttggtaacatactgtcttgtttcatacaagtaagtttttttcttaatttgtcgcatttgaaacataaatactttgatgataagagaataaaagttcactgcttaattgacctcatgtaaatttgatttaacaaatccatatgattagtccctccaactcatttgtccattagtactcattcgatcatttgagactaaatatgttgattgctgaagagtgaatgtactacttacttctgaataaatgatttttcaaacttcctttctgcataactcacaaagtagaagcttgtttttacaatcggtgcagtaaccaataagtttgaccatactttcgtggtgaagctaaccaatc

SEQ ID NO: 83457 - DNA, 452 bp, Glycine max
  unsure (1)..(452): unsure at all n locations
tgtgtaggctccatctatccatgttgtctctccctaatcttatgcatttgtattcaagtggctgtagaatgtagagagattgaaatccttaatgttcattcaaaatgtttgtgacccaaaccatagtagaattctgagtctacactggaagagagggtctgggcacttcatgtttcttcttcatctggtgctcctctataacaatattttcctcctccttttgttgatgggcacgctttatggtttggacctttcccttctgctccctaaggatccttttaacctttatagcaaggccaaaagtttccaaagccttgtctttattatcaatagccttggccagtttcttctgcctcttttactgaatgtcatcctagttcactagaggaataagtatgttcctctcgatgtcaaccttcattaccttcaggntacaacacnntgagtgtgta

SEQ ID NO: 83458 - DNA, 428 bp, Glycine max
agcttatatatcaaagatatgacaacttatatgtcgttagctactcagacttagatagagtgggtcgcattgactctcggaagtctcaacgacaggatacatactcatgatggctaatggagcaatatcttggacaagtgcaaaacaatcattagtttctacttctaccatgaaggttgagtttatttcataatttgaagcaacatcatatggtatttggttaaaaagtttcatggccgatctacaagtgattgattacattcctagactggtaaaggtgtattgtgataatccagctgttgttttctggctaaagcaataaagagaaagtcaacattgacattagtgcttaccatgagggaacatgtccagtgaatgaaatatcatttaaccatcagtttgaactaagattgagaccccttgcaaaa

SEQ ID NO: 83459 - DNA, 451 bp, Glycine max
  unsure (1)..(451): unsure at all n locations
atgcgagaccgagaccaacatgttatctatcatcagcaagtaccaagaagaattaaatctagccacggcccacgagcacaaagtggcggacgaatatgcccgagtgtacgcggaaaaggaggctagaggaagggtgattgactcgttacatcaagaggcaacgatgtggatagaccgatttgctcttactttgaacgggagtcaagaacttccccgattgctggccaaggccaaagcaatggcggatgcctactccgcccccgaggagatccacagactcctcagctattgtcagcatatgatagacttaatggcccatataattacgaaccgctaacgagtntgtattgtcattcaaaccttgactagttataactttctgaataaaatgagtttatccccgcgttnttacttcaaaatcagtgtgaatcanatcactcccacattttat

SEQ ID NO: 83460 - DNA, 447 bp, Glycine max
agcttaatcaacacccagtattctgtgtctattctctatccactactggctctaaactaatcagaaaagattagttggttgtgtttgcacaatgactaaatctatgatcgtcttaaagagggatttacaatcaacacttatttttttctctcaatatgttcaaggtgttctgagagttttttctaactttacaagaatatccataatgctttttatagaaataataatgaatatttttgcacaaatggtagttcttatcttcaaagcttctgatataatataggtctcatcttcaagagtccattgtctcacaataggtagaattcttcacttgttcttcgtttgatgaatgtggtcgttgaaacatttattacttgcattaaatgtacatcctttcttcatggagtgagtccactctttgtcactggcgtgttgaacactgtaaca

SEQ ID NO: 83461 - DNA, 354 bp, Glycine max
ataaataaggacttgcaaagatattgtagaacaaacatgtttgcttcacaaccgtatattgtgcaacggcaacttagatgtactgcaactttacacaatactgcttagaaataacatttgtggtacttgcaatatcaatgaattgggtaaccccatacatttacctttttcctttgtattgatcttctcttcttgatatccacattaaatgacacctcaatgcagcctttgagttgaaatatagtaacataaggtgtcaaaagggatggattaaatgacatttacaatcgaattatcatcaaggatatatatacatacatgtgtacatatatatatttatatatatatacatat

SEQ ID NO: 83462 - DNA, 456 bp, Glycine max
  unsure (1)..(456): unsure at all n locations
agctnggcccganatcgacaccttgacacccattattgtttcgccccagatatcaagaatgggttcccacgataaaagaccccattgaaacacaaccttagactttntgaaccttggcctataaaaaagaatcctcattccttcctcgaagcaaaggacaacggaatcacctcaagggagagcgaatagaatgctaaaacctgatttcccaaagaaagggatgggaaaggagaagtgaaaagaaagaaaaggaagaaatggaaagaaagaaaaagaaagaagatgaaaataaagaaaagaacaaagaagaagggggaagattcccggtcgaaggttgaaaagaagtgaaaagggaaaaaagcaattctcgatcaatgaaagaaagaggacataaattcttcaaagccagattgccactcagaatcattcttgactggcaatatcccaccccacatg

SEQ ID NO: 83463 - DNA, 480 bp, Glycine max
  unsure (1)..(480): unsure at all n locations
cattacggacctatgaaactaagcttaagaatatgatcagattaagatcaagatttttaatcaagagaagacttaatcaagataagtatgaaaaggatttttgaaaaactgagtagcacatggatttttcacaaaacatgtttaccaaagagtttttactctctggtaatcgattaccagattgttgtaatcgattaccagtagcaaaatgtttntgaaaaagttttcaatttgaatttacaacgttccaattaatttcaaaaatctataatcgattacaatgttttgctaatcggtcacatcctttcacataaaagccttgtgtaatcgattacactgatttggtaatcgattaccagtgattgtntctaaataaatcaaaagatttaactcttcacaaagtttttgactttttcaaattcggtttaagtttttctaaaagttataactcttctaaatggtcctctnggccagacataa

SEQ ID NO: 83464 - DNA, 458 bp, Glycine max
  unsure (1)..(458): unsure at all n locations
agccttgcgganttggtcttcaccagtgaatgtatcgatgtcggtccgaanagaggcaaatttgatcatcctactaggacgactgagaaaactggggcaaatgaagagggtgagaaagagggagaaacccatgttgtgactgccattcctatacggccaagtttcccaccaacccaacaatgtcattactcagccaataacaaacctcctccttacccaccaaccagttatccataaaggccatccccaaatcaaccacaaagtctgtctaccgcacttccaatgacgaacaccacctttagcaaaaccaaaaacaccaaccaaaaatgaattttgcagcgagaaagcctatagaattcaccccaattccagtgtcctatgctaacttgctcccatatctacttgataattcaatggtagccataaccctagccaggttcatcaacctccatgtctcc

SEQ ID NO: 83465 - DNA, 408 bp, Glycine max
  unsure (1)..(408): unsure at all n locations
ttctcgctgcannaattatttcttggatggtgtctttgtttgtgcttggcattgggtgtgcggccagcaaactttgtggatgatataaggatggcctttgtggatgactgggtggtgggtaatgaaaaaggttgatattggctgagtaatgatgttgttgagctggtgggagattttccatgtaggaatgacagtcacagcatgggtttctccttcattctcaccctcttcatttgccctaattttctcattcgtccaagtaggatgattaaatgtgcctctttttagacctacctcaatcctttcgccggtgcaaactaaattatcaaagctcgaaggtgtgtagcccaccattcttttatagtagaacactggtaatgtgtctactatcatggttatcatactcct

SEQ ID NO: 83466 - DNA, 432 bp, Glycine max
  unsure (1)..(432): unsure at all n locations
agcttggatagatgtggcgttacaaggccattttgttatgttgagttacgctcgaacgtgaaattgtaagacctactagtgtcactattgatttagttcttacaaaaatgtcatgatctattttttcagacttctaaattataatctttattgccaatatcatactaatttgagctgcatttttatcatccttttggttgctacatttctagggtggttcccctctgcttatgtcaggagacaggagatgatacccgccagccagataacacaataactccacacgataccaacattggtccttttattatgtgaggcaaaanatgtatattattatcacggaatacatgcagcatttgaacagtcatagcatgtgcttgccttatttttgggtggttctatcatgtcatctgtacacgatgttgtatatgt

SEQ ID NO: 83467 - DNA, 430 bp, Glycine max
  unsure (1)..(430): unsure at all n locations
ctctaattacattgatgtttgcatttatgggatgaggttatatgccattcttgctttaagagtagtgtcccactggttaaattaactttccaaatgtttgccttctcacgaatggccccgaggaagcttgcctcaaagaggtccaagaaggacaaagcggtcgaaggaactatttccgctccggagtacgacagtcaccgttttatgagcgctgatcaccagcagcgcttcgaagccatcaatggatggtcggttctccgggagcgacgcgtccagctcatggacgacgagtatactgattttcatgaggaaatatggcgccggcagtgggcaccactggttactcctatgacacaagttgatccagaaatagtccttgagtttatgccaatgcttggccacagangnggcgtgcgtgacatgagatcct

SEQ ID NO: 83468 - DNA, 446 bp, Glycine max
  unsure (1)..(446): unsure at all n locations
tcttagtttcagatgatgcanatgggtgtgtagctacctcatgcacttctctaatgactatggcatcatttctggcgctaaactgctgggagttggaggccatcttctcaattaaatttctggctttagcaggagtcatgtctccaagggctccaccactggcagcatctatcatacttctctccatattactgagtccttcataaaaatattggagaagaagctgttctgaaatctgatggtgggggcaactggcacatagtttcttaaatctctcccagtactcatacaggctctctccactgaattgtctaatacctgagatatccttcctgatggatgtggtcctggaagcacggaaaaaattttctaagaatactctcttaaggtcatcccaactcgtgatggaccttggagcaaggtaatacagccagtcctttgtcact

SEQ ID NO: 83469 - DNA, 427 bp, Glycine max
  unsure (1)..(427): unsure at all n locations
tttattttttttccaagtaataacatcttgaattaatttttaacattatttttacaaattatagagatacgataggttgtataaatgataaagatagaacgttagaaatagaattatactgtacaaaaactgtaaccttaatttttagattntaaattgaacattactttcatgttcattngtcactacaagaaaaatgacatatacctacgcataaaaactgtcattataaataaaaaatcagtaggtaaatgtatgatagactttgtcctacggacgttttctctgtcaactttgaggggggtatagtgacggctaattgtctgtcactatangtttcacctactatgtataatgtgtaagttaaagtcattaacttctacttacatttcctaactgtaggtaaaaagtctttaatatgtatcta

SEQ ID NO: 83470 - DNA, 425 bp, Glycine max
  unsure (1)..(425): unsure at all n locations
agatgtgactctcacattganttgaatttattcgttcatacacactggtaatcgattaccaaaacattgtaatcgattacaacattntgaaatcaattggaacgttgtaaattcagttgaaagcctttttgaaaaccattttgctactggtaatcgattacaatattctggtaatcgattaccagagagtaaaaactctttggtaaacaggttttgagaaaagccatgtgctactcagtttttgaaaaaactttttcatacttatctttattaagtcttctcttgattcttgagtcttgagtcttgaatcttgaaacttgattcttgatctttgaaatcacaatttctctttgaacctcgaagtgttcttgattcaatcttgaactcattctatgattcttgagatcattatctnttgtatcatg

SEQ ID NO: 83471 - DNA, 362 bp, Glycine max
  unsure (1)..(362): unsure at all n locations
gggaagttcatttaaccttggaacccacacttttgattgaaatggatgaaccctaaattttggtgatgtgaaaatatgatttattttcattttttcctctatttgacctactgggaatgatggatgtattattttctttttttgagtacaaaaatggattcattgatcccaaaaacttggtaaaacatttaaaattcgttgaatntggctctgtataactctagatattgcaattgaagttaatatcaatatacccttaaggatctgaattacgttcataactttcaatgtccttactggatacccaccacctctccaacactactgtttactaggctgactgggctatgaacaacatgaat

SEQ ID NO: 83472 - DNA, 373 bp, Glycine max
  unsure (1)..(373): unsure at all n locations
ttgtatgttcctcaaggactcattggaatctctaagtcttgaaatcttttgtaaaccataatcgcagcattaataaatgtgggttaacgatttgcatctcaacctcctgtgttgtgtcttttacattttattgtctttaagaacatgcaccctcgatcttgcctactgaatccggagccattcggctcgatcaatggggtgtcgtaagcgtttaagtaaaattgaacacgataacgcctgtttaattattacatttatcgttcaatcataaacatgcatgcattngcatcttatcatccagatcttgcaaatggaaagatgaataaagagtcattttgagtgatggtcaacatcacaccaatttaggtaagca

SEQ ID NO: 83473 - DNA, 401 bp, Glycine max
tgacaatactgtacactatgtccggttgagttccgtaatatatcgagacgctcaaaatttagatccgaagctctgagaaaattgaatcgacaataactctatacacggatgtccggttgagtcctgtaatatatcgagaccctgcaaattgaaaacggaagctcgtaggaaattcaaacgacaataactatttactcggatgttcgattgaatcgggtaatatatcgggacgctcaaaattgacactagaagctttgagcaaattgaaatgacaataactttatacacggatgtccggctgaacctgtaacatatcgagacgctccaatttacatcgaagctctgagaatattaaccgacataactcttacacggatgtccggtgagtcctgtatatatcc

SEQ ID NO: 83474 - DNA, 459 bp, Glycine max
  unsure (1)..(459): unsure at all n locations
agacatgatactgtcagggttgtttggttcaaggatataagggatgccccacattatttccatgacacaaatgcaaaaatgatgatttggaaactttatgcaaaactggtcatgcatgcacctatgtggacactcaagtgtcaaatttttatggtcatgtgatgctagggctcaggattcatttcctctattntagtcaacccaacgtttccaaaatatgttcttttatcaatttgtgcattcatccgagtccatnttgggcgtctgggaaaatcttcacagcattcacccttcaggtgtatacacattttttcaaaaactagttatgatcagtgaattntttcaaagaaaagttggaagtcatctcttttcaaaagcatgttggtttttcagctcgacaacttattttccctttttctcctttnttttttcattatcaattggttatttctttttctt

SEQ ID NO: 83475 - DNA, 353 bp, Glycine max
  unsure (1)..(353): unsure at all n locations
gcaccgcgctgcgctgcgtgattgcacattctttggcagtcgcatgagcnatagacanggtatggaggaggccctacatgatctttgatcctccctacaatcatacttggtccaggatttatctncacggcgacaaagaatgatgaaaccctagtgtgggttcgatttcctggccttgaccttttactatgatgaaagcattctcttggctctggcaacgaccattggcaatccaattagtgttaattcaaataccctagacataagacatggaagggttgcgagagtttgggtgcaaattgatttggacaaacctgttgtggggaagatttggctaaagggtcactggcata

SEQ ID NO: 83476 - DNA, 402 bp, Glycine max
ttgcttcttggaagatgaatggcagcggaatggagaaaggaagagagagaggagacgccacttcaaggagaagatgagtctagaagaagctcaccatcatatgaggccatggataagagcttggaggaagaaggagatgaatgaagggagagggagagaagagcacgaaattttgtgctctaaatgagctttgagatctgaagtttaatattcaaatgatcaaagttcaaaaaaaatgcacacacatgacctctatttatagcctaagtgtcacacacaattggagggaaattcacatttcacttgaatttgaaattgaatttgtggagccaaactttggagccaaaatttcactaattatgaattagtgaatttagttatggttcagcccactaatccaag

SEQ ID NO: 83477 - DNA, 395 bp, Glycine max
  unsure (1)..(395): unsure at all n locations
accaatgtaaacataccagaaaattaaatctttttgttaacggtttggcaagtatatcatatgtctaagtagtaaagactcagaagtctaagtgtcgatttccacaaggactttgctttgtacttgtgttgaataatttccaatttataagaggaaaagataagatgagtaaaaagaacagcaactaaataatagatattaatagaaaacaaaagaagtaatagggaattcaatgagatgagaatgttagaacctagcatgccttatnttcctaagatgtattatttgatattcttctctagcaatcacgtgaaattttcctacccacatctattagaatacttgtccctgatgtctcacaatgacaagctatttaactatctatctccaaacgt

SEQ ID NO: 83478 - DNA, 351 bp, Glycine max
taactaaatgaagaaaatgacccccgacaattatataataaccgtacattcatccttaactagaaaattgtgttcattatattgccaaatactaataaaaaatttaatgtgatggtagcttgaacaaaaaaaaaaaaagtacagcaaatattcttcatagcattcatggtactgtccacaagtagtagataatgttgtgacaacagatattcaaaaaaaaaactcaagatagtaaatcgttctccaaagaaacattcattaaattggagcttaaccattatagattaatcatccaaaatataagagagtagccatgaatcacttacgagcttgagtactttcgaaccctaa

SEQ ID NO: 83479 - DNA, 456 bp, Glycine max
  unsure (1)..(456): unsure at all n locations
agcttggagaggatgcttcaatggaggatattatagagggagagaaagagagagggggagcacgaaattgaaggaataaaagagggagagaagtggaactttgaagtatgtctcacaagactctcattcatcaaagttacaacaagtgttacacatgcttctatttatagactaggtagcttccttgagaagctttgttgagaaaacttccttgagaagcttctttgagaaagcttccttgagaagctagagctttagctacacacacccctctcataactaagctcacctccttgagaagcttccttaagaagattcctaaagaagctagagcttagctacacatacctctctaatagctaagctcacctccttgatatgagaagctagagcttagctacacacccnctataatagctaagctcacccncatgacananaacataaaaatacaaa

SEQ ID NO: 83480 - DNA, 449 bp, Glycine max
  unsure (1)..(449): unsure at all n locations
tatcctggaggagttctatgttctctagactggactaatacatttgctgcccaagtttcattgtcttgcaagtgaagatcctcataagcatctcaaggtgttccatattgtctgttccaccatgaaggcccctgatgtccaggaagatcatatctttctaaaggcttttcctcattctctggagggagtagcgaaagattggctgtactaccttgctcccaggtccattaccagctgggatgaccttaagagggtgttcttggagaaattcttccctacatctaggaccactgccatcagaaaagatatttcaggcattaggcaacttattggagagagcttgtatgagtactgggaaagattcaagaaatngtgtgcaagctgtcctcaccaccagatttctgagcaactccttctacaatatttctatgagggacttagcaacatag

SEQ ID NO: 83481 - DNA, 427 bp, Glycine max
  unsure (1)..(427): unsure at all n locations
agctttgattaagttgcataaatttcctttntctgaaattataagtgggaaaattatatatatagagtgagtgtgaggagcaatacattagtaatgatttcgattctgttgttgttgtacttttcagtctcatatcaattttaaactggtctgcatccctccctactgttgtaatctcatctttacacctctattcaaacttgattttgggaaaaaaaaaccttcagttcgcaaacaccaagccctaaatatcccaaataaaacttccaactcactaccaaatttttcgacaccaaaattgtgaaattttacattgcttatgagaataccattaaaaatgaatcgatcaattcctgcttgcaaacttctccaaaccccaacaaaatccccaccatccaaacatacctctgcactgacattttactct

SEQ ID NO: 83482 - DNA, 401 bp, Glycine max
caatggagctatccatggattatcaatgctaagaaaattcaggatctaaagagggagctgaatgctttggaggttggtatttctggcagaatcctgactcaacctgaagtggagctcaagaagtcttttcaggagcacacttgacatgcaactaatgcctatgaatccatgttgaggcaaaaggctagagtgaaatggttaaaggaaggggacagaaattcagcttacttccataaactgataaatcacagaagaagacaaaatgctatacaaggttcgatcattgaaggggggtgggttcaggaccctagtagggttaaaaatgaggctcttaatcattctaaagatagattctctgagcagaatcttaacagaccaaccctagatggtgtgcaactacc

SEQ ID NO: 83483 - DNA, 446 bp, Glycine max
  unsure (1)..(446): unsure at all n locations
agcttaatggacgaagtgctaactggtgtatgtggtgcctaatcacgtattgacaaccctaggttgattttcacttagtaaatggaaatagagttggattaagtgattaactgatagggacgaattctccataacccaggataagagaatggcttctgaatcagaggaaacaacccatttttaatatcattagtttcgtattccagtttacttgttctgctccttaaatcacaaaacaaacaaaccccccccccctaatcgttactggtactgcaagtatattatgaacaatnggtttatcattgctcgttgggaaacgacctangatcacttcctagttactgcattttcatgtntatttgattcgggtacggcctcgatcagtgttcattatgctggcaagaatccttccacttgtggttgtgtcatgagaatcacacacggtc

SEQ ID NO: 83484 - DNA, 392 bp, Glycine max
  unsure (1)..(392): unsure at all n locations
aatgctactcttaaaacgaaaatggcatacaacctcctccaataaacacaaacatcaatgtaaatttagagcaaactcatgcacatacnttcttacgaacattcactcgcacaagatattcttctaattaagaaaaacgcacccacgcacaatcaaggcaccttcgttacctagatcacttatatgtacttccaaggtgtatttgctacctacatcacatgcatttcctttgctaaatttacatacatgcatactcaaagcactntggctaccaaaaattgcatacgtgcacattctggtatttctaatacctatacatacacaaacttcgtgatgaatcttggctacctacacaataaggtgctacatntcatgctttattcaagtgtttt

SEQ ID NO: 83485 - DNA, 284 bp, Glycine max
tgctgtacacataattttatccgaatcaagtaggattgcctcccaaggataatgtgcatccgcaaataacgagggggcaattgtccccataaagataaggcgcatctgccagtgctaactatcaagttgaggcatataaatcatatgtacccagcttgttgcatacacaactaatactaaaaatatactcggagggaatgtatttgtcatccacaatgattttatctgaatcaagtacgattgtctgccgaggataatacttattatttgtactagctcaattc

SEQ ID NO: 83486 - DNA, 341 bp, Glycine max
  unsure (1)..(341): unsure at all n locations
ctctactcggaaaccctcaatctatttataaattcttaagttatcaccatttggctccctcatatgcttcctattgatgtctcattatcttcccttactattccttccaatgttcatgaagcacttgatcatcctggctggcgacaggctatgattgttgaaatgcagactcttgaaataatgatactcgngaacttgttccccttcctctagcaagacaactgtgggttgtagatgggtctatactgtcaaagttgggcccaatggtgaaggtgatcggcttaggctcgctggtagctaaaggctacacacaaatatatggtcttgatattgtgatactt

SEQ ID NO: 83487 - DNA, 183 bp, Glycine max
  unsure (1)..(183): unsure at all n locations
catttacgcaacgagcataatgtaaacctttacggtttaaaagcttatagttgggctaagcttagagtttcattttgtaaggctgtgtgtcttttgttnttgaatntataatacaaggatctttcttcatctggtcctagtctctacccattctcattcattngcatgtttacttctttttct

SEQ ID NO: 83488 - DNA, 299 bp, Glycine max
  unsure (1)..(299): unsure at all n locations
tcatgaaatgatgcatgtttaatgtttagcatatagatattaccctgccttttactaatatggacaacctcaccagacatggcttcactaatatggcaataattcttattgaattcgatattgaagcctgtgtcacataatngactaatgctcangaggttatgctntagtccatcaacatatagaacattctntatctgagttttgtaccgatttccaatatttccttcntccataantntcccttttattgtgtctccaaaagtgatgtatccctcatctttngacacaaagtcagt

SEQ ID NO: 83489 - DNA, 407 bp, Glycine max
  unsure (1)..(407): unsure at all n locations
cattctgtcatgccttgacctctaattcccgctgatgaaataaatgggaggtgacatgcatcagagacttatgacttatgaactacctactaatttaccgtcatgctcctgattgaatacgttcctcttttatagtcttgtctcgtgttgtatactctcaattgtaacattgattcaaaaattaaaaaaaaaaagtatttatggtaaaaatcatagaaaaaaataatcattgatagcaccagccgtggacctatgcttatgtgaggattaacaaatacaccttctcantttttgtaaattaaaattacaattattaaaactctaaataatatcaacccatcgatcaatatatgaaatacaattnttaaatcactcaatactatcaattatttataatttttataata

SEQ ID NO: 83490 - DNA, 440 bp, Glycine max
  unsure (1)..(440): unsure at all n locations
gttttatggtttgaaatcgactaattaattatattgtataatgaanaatacatgtgtaaaataagagtaatttatatcttacattnttttctataaatattcctaatattctattaaaaaaatatcgagataaggtaaacacaatgtttttagaaacagaattattcaacaaagaaaattattatttgggaggagcatctagatttacttatttataatataataagagaagaatttattttttacttttgtatataaggtagttcatcaatagtattataaaaattaaccgtgtgctattttctttntttccacttcactaaattgttttggagacgggagacgggaaagcagttgatgatgtaaatagtacatgatggagctcgagtngatgattntacacagctcctgagattttctgagattttctctgggtcgat

SEQ ID NO: 83491 - DNA, 378 bp, Glycine max
  unsure (1)..(378): unsure at all n locations
tgtcaganatcacagtaaagaatgaatacaaattgcaactcattggtgaatgtactacaagaaatgggttatatacacaggatccaaaacagaacaagaataactaacaaaatgtatatatgtcataacagtttgacagctcattataacggactaaagctatatttacaacacaatcttgataatgatcaattttaaccctttagtggaagaagttgaacttgctaantaatgtggcttggtctttgcatgtgcgtgttagattttgtgcagatcagcgataattgaaaattataagcacaggtatataatatntgggaagaaataaatgcttggagaaatagctagccagcaacacccgtaaatttttgctgttct

SEQ ID NO: 83492 - DNA, 424 bp, Glycine max
  unsure (1)..(424): unsure at all n locations
ttgcggtaaagaaaaaacaaanaacagtataataaagttgtgaaaaggcaataaatatggcatattagggaaaataaaatttcatgatttggtcgggtagtctctttacatttcanattcccatatttataagaattagtttgtgtacctatgtcatccacgagtattgttttggttattgttgtgtataaattcaacaaaatataaataatttttattttttgaatatatgtatacacaattaaaaaataatttcactctaataatttaattgttagtgtaattttaggtaaatcgttccttctcatgagttaagtggtaaatttcctacttgatttaataaaagatgttcatctcaagagtttgatttcaaanaatattctttttactggtgaaaaatataaaactggtataatagtgaaaa

SEQ ID NO: 83493 - DNA, 443 bp, Glycine max
  unsure (1)..(443): unsure at all n locations
gtccgtgtcgcgccttacgcanatcgaaattgcttagcgcgntataagtggatttggcttagcgcgcttctctcgcttagaggatgagctgaagcggtgcgcttgattacctggagcgatgcgctcaacgaacccgacaactcatcttcttttggattcttccttgcgcttagccactaagtgttgcgcttagcgtatgcttgctaagccagcagattggcttagcgagaaggtgaaaataacacttttgccaatttgcctaattaacctaaaattgagagaaattgattatttaacacacaaaacaaaagtataaattatctattacctatatttaatagaaagtacttataatattacaaaacaactataaattggagaagtttgatacaatatacataacttttatacataaatgttagtcattntcaccaactaacaac

SEQ ID NO: 83494 - DNA, 408 bp, Glycine max
catttttttggatcaatatcggtgaataatattttttttgccgagatgggctaatgttttcctgggcgaataaatggaaacatgccagttgcggcccgaacaaaaagtcggttgagctcgtacagaaaaacctagccgaactacattgtaaattttttatgccacaccaaaacaagaaaacttcctctgtcgtaaaaaaaacattatctgccagcgagcgtttttaaaaaaatgcgcaatgtcggctgaaaattatcagtcggggctatctcatgaccgatgtcggatattgagttttccattcaatccgtgaacaaaatttgcatgatgtcggtaaggaaatggtcgatccgcctcatcctgtgaagcttcatttatagaccttgatcggtcatgtttcctggccga

SEQ ID NO: 83495 - DNA, 263 bp, Glycine max
  unsure (1)..(263): unsure at all n locations
cataaaaaaagtacaatgtactttggctaggtttttcgtgcgagttccaccgacattnntgttcggccaggaaaacattagcccacctctgcaaaanaaatatttgctaaccgtcttcatgcatatntcattcaacgatngaatagaaaactcaatagccgacaacggtcgtgaaatagtcccgactgatatttttcagcccgcattgcgcatttctttntanaaaaacgctcgctgggcagatatgtttttntcaccatcga

SEQ ID NO: 83496 - DNA, 445 bp, Glycine max
  unsure (1)..(445): unsure at all n locations
tggcctttatgcgcccacctctttgagtggcatttggattgattaatgcatcttaatctctatctatctatatgtacctcatgcctcattctggtaagggaggaagaatgtttcttaaggtagaaaattcttcagtgcataatactctctattttaatcgattaccaggttgttcgtaatcgattacaagaagtgcttgtagcttgtagagagattatagtttcgatttaatcaattactagttatctataatcgattacatagttcagttgataccatgtctggtttttcatgagtctctgctctaattgattaccaggtggatggaatcaattactttgttcttaaaagtgttcccataagtgttcgacggtcggtaagtgcacccgatcgctcaagtagtatanaacacgtagtgaatactgagtatcgaactctcgagtct

SEQ ID NO: 83497 - DNA, 407 bp, Glycine max
  unsure (1)..(407): unsure at all n locations
cactgcttcattattgtttttcagtacaatacagatatggctcccgatcagaaccagcttcagagtatgactaagcgagagcatgagtccattaatgaatatgcccaaagatggagagatctcgcagcccaagtcgtaccgcccatgacggagagggagatgatcacaattatggtagatacgttacccatgttctactatgaaaagctgataggctacatgccagctaactttgcggatctcgtcttcgccggagaaaggattgaatccggactaccaaaaggcaagttcgaatatgcttccaatgtggcccccaacaacaacaaaagagccccagtagtgggcgcgaggaataaggaatgagacgcncaagcgngtcaccaccgcccgatgtggatgaaagcacc

SEQ ID NO: 83498 - DNA, 427 bp, Glycine max
agcttgtagggttaaagtctcacgattgttatatgctcatgcaacaattgttagccatggctatacgagacatcttgccaaacaaagtcaggttagcgataacttgcttgtgctttttcttccatgttatatgtagcaaagtcattgatccagtcatgtttgatgagttggaaaatgaggccgcaattatactgtgccagttggagatgtattttccccctgctttctttgacatcatgattcacttgattgtgcatctggtcagagaaatcaaatgttgtggtcctgtttatctatggtggatgtacccggttgagcaatacatgaagatcttaaaagggtatacaaagaatctatatcatccagaagcatctattgttgagaggtacattgcagaagaagccattgaattttgttcagaatactt

SEQ ID NO: 83499 - DNA, 357 bp, Glycine max
  unsure (1)..(357): unsure at all n locations
tcactaactctgggttttatgaactggtaggtggtggagatatatnttatgctggcttgaatatcatttntctgtacatatgtcaacttcctattgatcagatgtgtggcacatatgtcaactcctgttatatgttctgtaacagacattttcagcttattaaaatttgttggcaggccatacgatcatgagatggtggacttgtagtttgagtgaactggttntctgaaaatggagtatctacttgtaataatcttgcttggatacctcttctatttggttataattatgctaatgtacgatttattttcaactctctttctcgtgtttaatttgccagcttctcttaattgtgac

SEQ ID NO: 83500 - DNA, 429 bp, Glycine max
  unsure (1)..(429): unsure at all n locations
ttaagtcacctgcggcatgcaagcttgtcttgtgcagaattagggtacactcattntttgagaattctagagcaaggagaccacaatgctaatttcaagatagaagctctggaggcagcaagaggagcagctttgcagagaagcctagggttcttcaatttgagagagattagtgagctagagagtgattgtgaggtactgagaagaggaggagggatcccccttcttgtgtaaggaacaattattctatactctcaatctcatttgtgttanggtttttctgtaatggctggctaaacacccttgtaatggctcgccatatcccttgccttgccttccaagtatttccgtggcaggcccactattccattccgaatntgcttcatgcgacccaactcttttgctgaatccncaatcacaactgcaatc

SEQ ID NO: 83501 - DNA, 404 bp, Glycine max
  unsure (1)..(404): unsure at all n locations
tgtgcatttatgaatntaatttcagtagttatatgtttttaatcatagaattntgtgctatatatatgtatgtgattgatttagtaaagtttgacatagaaatagaaactgtttgagctagattttccttgagttttttatgccaaaagtgagttctttgcatgttataacatagacataaccttaaaattttcccaaatcagagttttctagcaaaagttacaaataaaataagtttaaggacctttactaaaatgaaaagtctgtcacgaatttggactaagagttacaaaagtatgggttgtttntattaaattntntaccttanaatgagttttaggtttanaatgtanggagcacataagattgtgaaattcgactctagacaccgaagtgctaaatag

SEQ ID NO: 83502 - DNA, 275 bp, Glycine max
gacgatgaattattctccgtcttagaagacttctttttgacaacgcaaacctaatactttttgtttttctttatgtctgcaaaaaccaatgttggccagaactggcttaaacatatctctaccagttatagatggacctacgaactctgcttttttgttcgacccaaagacaaggaaaatcttgcgtccacagccactcctcacccatatcatgaccccaacgtacaacctaccatgagagttgttgctttttttatgtttgttttgggctggag

SEQ ID NO: 83503 - DNA, 402 bp, Glycine max
ttttcattctcttctccctttgccaaaaagaatttgctaaggactaacctcctgaattcttttagcgtctctcttctctcttttccaaaagaacaagggactaaccgcctgaattcttttgtgtctcccttctcccttgtcaaagaattcaaaacgacacagtctgagaattcttttgattcttcccattccctaatacaaaagcgttcaaaggtttaaccgcctgagaattcttttgtatccccattcacaaagtatcaaaggtttaacagcctgagatcattgtcttaacacattggagggtacatcctttgtggcacacgtagagggtacatctacttgggtttgactgagaacaagagagggtacatctcttgtggatcagttctagtggaggataca

SEQ ID NO: 83504 - DNA, 407 bp, Glycine max
  unsure (1)..(407): unsure at all n locations
gctttttggagtagaaacatgggttctttttattntatttaaaaaaaaaagtcgtatctagtcaagatctgagagaccatacaaggttcctagggggttctaattatatgggccattaagtctatcatatgctgacaatagccgagaagcccatgaatttcttcgggggcggagtaagtgtccgccattgccttggccttggctaacaatcggggaagttcctgactcccgttcaaggtaagagcaaacctatccatccacatgggtgccttttggtgtaaagagtcgatcacccttcctctagcctcttttttcgcgtatacttgggcatactcgtccgcgaccctatgctcgtgggcccgggctagacttaactcttattggtacttggcgatgatagctagcat

SEQ ID NO: 83505 - DNA, 410 bp, Glycine max
  unsure (1)..(410): unsure at all n locations
acacctcaatattgtaggtggttatgtagcgaanataccttagatatgcatgtatgtaatttaggtagcaaaaaatacctcacaaaatatatatgtgtgtgtttaggtagtgaaaataccttagatatgcatgtatatagcaaaaatacctcacaaaacatatatatgtatgtttaggtagcaagataccttggatacgcatgtatatagcaaaaattcctcacaaaaatatacacatgtttaggtagcaaaatacctcatgaaaaaaaaacataaacaaacaagaacaaaaaatatatctttcggctgaaaaaccaacacgcctttgaaaagaaataacttccagcttttctttgaaaaagattcactgatcataacaccaatttttgaaaaaaaatgtgtatacacct

SEQ ID NO: 83506 - DNA, 413 bp, Glycine max
  unsure (1)..(413): unsure at all n locations
agctnttcgattcattctatgtacccgttgttgtccacattgngtttcgtgccattttattctcgttntgtttactttttataccccctgttgacgtgcttaagccattttacttaagtcatttctcgcttaacttaaaaataaaataaatttccaccgaacgtttgaattgtattatccattaacttcggttaaaataaattccgaccgttcggtcgtgccgtaaccacgttggaaatcaaaaagaggtaaaaaataatataataatcaaaaagacatcttttagtaaaataaagcggaaaatcaatcggacgttttctctttgggatttctcattcttaatcgaatggattaataactaaagtgaaactaaaggctaaaatcaattcgcctagtcaagctcgtccataaaa

SEQ ID NO: 83507 - DNA, 433 bp, Glycine max
  unsure (1)..(433): unsure at all n locations
caccatagttccatttatatcagagattgacgattcaaattacatatttataagagaccaacccaacaccaagcaaccacagcttaaaacacccgtaacaaatcctagaacatttgaatttgcaaaggcgggccatgaccactttattctaaaacttcaaacacaacacatacttattatttattgatacatgtattacagctatctctgcttgaaggttatgcatgttgatctcacttgcagctgcatgggtcgcaagtgcagtttgatccacagttgcagccaccgttctcagctgcaacacccatttcagcaccctcgaattgggccttcaccggcccaacacccaaaactagagtctcattngtgatcttctcaacgtagtcaaaagagtactttgttgcactgcaatacatgaaaaaataacatacat

SEQ ID NO: 83508 - DNA, 279 bp, Glycine max
ctgcaacttttagcaatcaatggttattacttatcactcggatggccgattcgagcgcattatatatttagacgctcgaaactgcacaatggatgctcttgagcaatctccatggtcataacttttaactcggaggaccgattcacgcccattatatctggagacgttcaaattgacaatggaactctgagcaatcaaatgcataactttactcgagtcgattacgccaaatttttagaccccgaattgacaaggagcttcgacatcaatggcatactt

SEQ ID NO: 83509 - DNA, 395 bp, Glycine max
  unsure (1)..(395): unsure at all n locations
tgattttggtcatagctgctgtactgagattcgagcatctcgatatactacgagaatcaatccgacatccgagtaaaaagttattgtcgttagatattgctcagagcttctgtttccaattacgagcgtctcgatatattacgagactcatacggacatccgagtaaaagttattgtagttntgattttgctcagagcttctgtcctgaatttcgagcgtctcgatatattacgggacattatcggacatccgagtaaaaagttatggtcgtttggaatttcttagagcttttgttttcaattttgagcgtctcgatatataacgagactcaatcggacatccgagntaaaagttattatcgttagaatttgtcagagcttcattttcaattacg

SEQ ID NO: 83510 - DNA, 462 bp, Glycine max
  unsure (1)..(462): unsure at all n locations
agctntgagtaccaactcgcacctncaagcttatcaatgagcttcatgaatagtggtatcgaaaaatgatctttgatagttatcgcgttgagtgtacgataattgacacaaaatcgccttgtgccattgcatttcctaaccaagagtacaggggaggaaaaaggattggtgttagggcagatgattcccttctgtaacatctaatccacctgagtttcaatttcgtgtttctagaaggataatggtatgggaaaacattcacatgcttcgagttangaagaaggtgaatgtggtgattgaaaggtcttgacagaggtaagtattgcggggtctgaaacagggaagcaaacttggtggtgatggtttaaatatcaaggattcattgagccgatctgggttgaaatgagctctgtgggaataattcgaatgtggaagaaggcactagcactgtcttttcgaact

SEQ ID NO: 83511 - DNA, 440 bp, Glycine max
  unsure (1)..(440): unsure at all n locations
agtcgattaccatatgtgtgtaatcgattacacagtgcaaattttgaattcaaattttaatagcttgtggaaatcaagtttggccactggtaatcaattacatcctctggtaatcgattaccagagaagtaatttggtgaaaaaaactttttaacttaaatttcttgcccaaaccttttgctacttcaattggaattcccttcctatttaatataccctttctaagactctagagattgtcttgatcatccatcttgaatatctttaatttctttggcttgaataaagctttgagacgcatgtgaaactttggcatcatcaaagcattcagcttgatcctttgtctacaatctccccttttttgatgatgacaatccnttgaatcaagacaagctatatacaagatgatagcacgttcacacaacccttactccccctaa

SEQ ID NO: 83512 - DNA, 427 bp, Glycine max
  unsure (1)..(427): unsure at all n locations
agcttgtanggttaaagtctcacgattatcacatgcttatgcaacaattgttagtcgtggctatacgagacatcttgccaaacaaagtcaggttaacgataactcgcctgtgaattttcttccatgctatatgtagcaaagtcattgatccagtcatgtttgatgagttggaaaataaggccacaattatactgtgccaattggagatgtattttccccctgctttctttgacatcatgattcacttgattgtgcatctggtcagagaaatcaaatgttgtggtcctgtttatctacggtgaatgtacccgattgagcgatacatgaagatcttaaaagggtatacaaagaatctatatcatccagaagcatctattgttaagaggtacattgcagaagaagccattgaattttgttcagaatactt

SEQ ID NO: 83513 - DNA, 453 bp, Glycine max
  unsure (1)..(453): unsure at all n locations
aagggttganaccttttcctctatgatctttgatgaacttcaaacccactttagatggcatgctaacagaattgtagttcttcatttgaaacttgtctagaatttcttgcacatacttctttntgagaaataaaaataccaacagtagattgcaccacttcaatattgagaaaataatgcatttttccaagatcaatcatttcaaattcaagcatcatatactgtttaaaattttcaatcatggcactatcatttcctatataaattaaatcatccacatataaacaaacaatgagcattttacctccatttctaattctttgtaaaaagcgtatgctcatatggacatttcttaaacccttccttagaaaaataagcatctatacgactataccaagctcttggagcttgttntagtccatatagtgcctttttttaatntatacaccttat

SEQ ID NO: 83514 - DNA, 358 bp, Glycine max
  unsure (1)..(358): unsure at all n locations
cttctncctcttgactgatcctatgcggttctgccaccgtttctattttctttttaatggtttccatttaaatctttgcatgattacttaactgttttcatatncgttctttattcattttatcatttctggattttcatcgntgttcttacttctcacttgtccatttgatccctttagtgtgataagagataatttaattttgttttgaattgtttttataaaaaaacattgtgacttctaaggtaaccatattatacttgaattaaaagatagtaaaacttaaattaaataatagagtagattaataataggtaattaactaatactttacataaatctgaattagaaatggaca

SEQ ID NO: 83515 - DNA, 420 bp, Glycine max
  unsure (1)..(420): unsure at all n locations
catgtctcttcattcttcttcctcttttcacttttgttttttcctttctctagcacaaatttcatggcttttccattggtgatgatcatggaaggctaaacacttaatcaatccaaggatccactcatagcaaggttgaatttgagttctggttttgtatttctaatctttgtgaatgttcatctttttcttcaatcctatttttgattttcatgattatgattatgcttangattgaaaatggattaagttatggattcataagtgaatttgagttctagttttgattctcttcaatcctggtgtttataagtgaattgtggtatgaaccaaattgtattgcatttttgagttgacctacgttagtcctgtattacagaatttcctagttntatttgtttttagaatgattcgatagtc

SEQ ID NO: 83516 - DNA, 347 bp, Glycine max
aaaaataagcctatgttgaataagtggaagtttttctaggataaatgctctcttataaccctaattttttaaatcctagaaaaaccataatttctttgattagctaggccacattacaagccaataaaagtccttagtgatccaccaagtgtaagcaggataactttaactgagatgaagtgcaaaattgggaacattaattgcaggtcggagaaatttaaacactcactcaagacacttgtgcgcagagagaaacactaaagccttgtgaggaaaaatgaggcaagccaacctgattgatttctactacaaaccaattccatctcaatggttggttatgcttccac

SEQ ID NO: 83517 - DNA, 276 bp, Glycine max
  unsure (1)..(276): unsure at all n locations
atgcttcaatggaagaaaaaaaagagggagagaaagagagaggggggagcacgaaattgaaggaaaaaaaaagggagagaagttgaactttgagttgtgtctcacaagactctcattcatcacagtcacaacaagtgttacacatgcttctatttatagactangtagctttcttgagaagctntcttgagaaaacttcctagagaagcttctttgagaaaacttccttangaagctagagcttanctacacacacctctctcataactaagctca

SEQ ID NO: 83518 - DNA, 261 bp, Glycine max
  unsure (1)..(261): unsure at all n locations
aaagagatgagatgttctaatgaatgagagaggaatgttnaccatggaacgagtgtattgtccgcagggaagtgtgtaaccctgtgacggaaagaagatgatttcgaagacaaacgttatttaagttatttgtgttcaaaagaacggggtatacttagagaaaagggagtgaatattgctttgcgtaatacaggatccatctggaaaaatattggcagggtgttataatcatgttccttataagataaagaacaagaaaat

SEQ ID NO: 83519 - DNA, 421 bp, Glycine max
  unsure (1)..(421): unsure at all n locations
atactctcagtcacctgacgctgcagcttcaaccaggggagatggactttttcttgtgctagaaagaatcaatgacaatgcttacaaagttgagctgcccgatgagtataatgttagttccaccttcaatgtctctgatttatctctttttgatgcagatggagaatccgatttgaggacaaatccttctcaagagggagagaatgatgaggacatgaccaagagcaagggcaaggatccacttgaaggacttggaggacctatgacaagggctagagcaaggaaagccaaggaagctcttcaacaagtgttgtccatactatttgaatacaagcccaagtttcaaggagaaaagtccaaggttgtgagttgtatcatggcccanatggaggaggactaaatgacaccactctatttcaat

SEQ ID NO: 83520 - DNA, 389 bp, Glycine max
  unsure (1)..(389): unsure at all n locations
acttgaccttccaactctcaaagcctgactctctctgcactcataacatcagagtctcactttctaaccctgagttaactctacccttcacctgtaacagttntccataagagatctcagcatataaacatcacaaacatcatgacaaaaaccctaaaacagaatgggtatgtctaactcatccaaacatggcaatttcaacaagctttcaacaagagtctgcacaaataaccatcatgaagcagaaaactaacagaactacccatcatatcttccaaaatcccatacccacgaaatttaagagagaaagaagtccacccgaacctgaaatgtcgaagtcccactcgtagacacgcacttcacgactccgaaaatgctctcctttcacg

SEQ ID NO: 83521 - DNA, 460 bp, Glycine max
  unsure (1)..(460): unsure at all n locations
agctngacaataatctgtttgtaaactatctatacattattatagncaaggcatatgagtaaataatatattaaattttatcaaaaaactttttaaaatattattttttttgcacaagaattatattttttatataaattattggacgagtatgggtagggaattgatatacctaatccccaataggagagattgaaaaaaaaattcacgtccatcataaatcggaaaaagaacgattttgagagaaaaatgaaaagaaaaaaccacacattccttcccatttcaccccattgtcatgtgtagtttacatgaattttcataatttttccaactctaatggactntggacaaagtgtatttgggtcaagtttaacttttccttagttatattnttaacttttacaaaagtatgctattnnttttatagaagccacatanaaacttcaaacagtcaaatttg

SEQ ID NO: 83522 - DNA, 433 bp, Glycine max
atgagagagcggtccatccatagcgtggttgtaatttaagagttagtcgattgctcaaagaccaaaagaaactagactcagcgtgcatgcgagacagagaccaacatgttagctatcatcaccaagtgcgcaagaagaactaagtctagccacgacccacgaacatacggtggcggacgactatgcccaagtgtacgcggaaaaagatgctagatgaagggtgatcgactcgttacacctaaaggcaaccatgtggatggaccgatttgctcttacctctaacgggagtcaagaacttccccgtttgctagccaaggcccaagcaatggcggacacctactccacccccgatgagatacacagacttctggactattgtcagcatatgatatattgaattgcccatattattaggaaccgctacggaactcgt

SEQ ID NO: 83523 - DNA, 404 bp, Glycine max
  unsure (1)..(404): unsure at all n locations
atccttaagtcacctgcggcatgcagcttgaatgaggagtgttgattgtgtgttacttcctgcttntattgttgaccacagagtggtacctggagatatgtcgcgggggtcaggagaccttggggacgtcaagtggggtgctatttgccaaaaccaagcttgaccaatcccgacccaacccgggcatagtcggtcagtgagaacatgtgacgtacctaagcaggcgagctcctggcagtcaacagataaaaggaaaacaagaccacatagcaaggaggcttgtggtggctggccagctgtgaatnttgtgtaatatgtggattgtggcctctggtaatcgattaccaagggtgggtaatcgattacaaggcttaaaattgaagacagggggctaagatggtctc

SEQ ID NO: 83524 - DNA, 449 bp, Glycine max
  unsure (1)..(449): unsure at all n locations
ctactctctntataactatgctatgtgctcgcgactggtccctttcttcctttcgcaactngagttcactattgctaccccatagagctccgcgaaatttgttccggccatactcttccttgcgagccctcttggtctcttgttcaagggctcttgcggaaattgcattctcttcccgtaacccggcacactccttccgaacgtgtgtagcggccaacttgaacttctccttggcaagatttgcctttcctaactcgcttttgagagcttggacttcttcgtcctcttccggtgcttcaaaactctctttgctgacgacttttaacttggcgagccaatctaaacctcgtatatgaactttcagccattcgtggtacccaccaatgatgccattacgaatgcctctaagctcttgatctttctttaacggggtttcccacgccttatgg

SEQ ID NO: 83525 - DNA, 429 bp, Glycine max
  unsure (1)..(429): unsure at all n locations
agcttgngttcctaggcctagaatctcattctggcactcattntaaatccttcatgctgtccctatacatataaaacagtcccacaatcccaagcttacaaaaccatgcccatatgtcattgaggcatttcaccgggcacttggtgggcgcatgttttggcatgaatagcaaaagaatgcaggcaatgtggcatgccccattactccaaaatgcaacataagcctaaggccatcccttacaaccccttaatttagcgaaaacaagcttggattcacatgtgtattgcttcacgaatttcgcaaaaaataagcaactaaagcactaaaacacatcaagggagagcccaataactaagggaaagtgcacttaccttctgggagtgaaataaagcgtgaaaagggaagcaaaaactcaataatggaagcttg

SEQ ID NO: 83526 - DNA, 432 bp, Glycine max
  unsure (1)..(432): unsure at all n locations
atggcttgcctcggactcactctcgtgccacttcggaagatntaagccaagcccctacttttgaggggcaactcccgccttatgacgactatcccgggcaagacgatgaggaaggagatacccatctcggccccctgctccacctcaaagatccgtccccacatgaactaccccaaccgaacatagtccgccatatcccggcctcacccacacctgtaaaagaatctgtactttcgaatatgccgccaatatggcccccaacaacaacagaagagccccagtagtgggcgcgaggaaaaaggaaggagacgcccacgcggtcaccaccgccccgacgtggatgaaagcaccccanaatatccaaagctcataccagcccaatcccccaaattttttaatccgagccgggaantctctcccgactcaagtaaa

SEQ ID NO: 83527 - DNA, 467 bp, Glycine max
  unsure (1)..(467): unsure at all n locations
atccttaagcacctgggctgcagctttcgcaagctacggaatttctatgacctaccctnggnagaagtctccacagaggccattgcctccctcgcccagtattatgatcagtcgttgaggtgcttcacctttggggacttccagctatcacccatgggggaagaatttgaagagatcctatgatgtcctctagggggaaggacaccatacctcttctcagggttctatccctaattagctagaatttctaagatagtccaaatctcggcgcaggaattagaccacaaaaagcaagtcgaaaatggggtggttggaataccgagaaaatatttggaggaaaaagcaagaatcttggcaagtaaaggcgaatgggccccgttcatagacattctcgcgcttgtgatcttcggaggagtcctcttttcaaatgtggatgggttgggtggacctagcagcatcgacgcttt

SEQ ID NO: 83528 - DNA, 426 bp, Glycine max
  unsure (1)..(426): unsure at all n locations
acccgtgaactgaaaaattattaacaactatgaatcttcaaaaacgggcgagaatcttcgtgtaattactcacggaaacgttacggaagcgcctcgacttggattttcttcacggaactaattttcctcagaaatttcgagagagagagagagaagtgcctaaggggttgaacccttttcttcttcacttctccccctatttatagcaaaataggggagaagcttgccgcccagctcgcccaggcgagcaaggttgcttcctccagaagcaacagccttctggaggaatcttctggagggcccaagtgggccagaatgctatttacaccctttttttactaaatgcaccccccttttatntttttggtaattctttttccgtacgttacgaaactttacaaatttcgtaacgatacttattttcct

SEQ ID NO: 83529 - DNA, 432 bp, Glycine max
  unsure (1)..(432): unsure at all n locations
cttacccgttgaagatcgaagaacgatgaagaacgaatgaagaacgtcgaagaacggtcgaaaaccttcgcgaaattcctcacggaaaacgttacggaaacgtttcggaagcgctcggcttagattntcttcacggaaacaatttttccaagaaaattcgaaagagagagaagtgcctaaagggctgaacccttttccttctcacttcctcccctatttatagcaaaataagggagatgcttgccgcccagctcgcccaggcgagcagggttgcttcctccagaagcaacagccttctggaggaatattctggagggcccaagtgggcctagttgctatttgcaaccccattnttactaagtacacccnctgcctttntttntgtgattctttnttcgtaaggtacggaaacttatgaatttcgtaacgata

SEQ ID NO: 83530 - DNA, 444 bp, Glycine max
  unsure (1)..(444): unsure at all n locations
cacataagaatcaccgggttgattcttctctgnggctgtcttactggtttagccccatcttctaaatttattcgatgcatacatgtggatgggctaataccaggaatatctgccagggtctagcctatagctntcttatgcttcttgagaacagataacaacttcccctcttgcttatcagcaagggaggcagatataattattggaaaacttttgctatcatccaagtaagcatattttaaatttgatggcagaggcatcaattntggtgtgggcggttggatagtggtagaaagagatggtttctcagcctgcacctcatgaagaaagtccgagggttgtgtacttactganacatggttagttcgatctgactctantaaatcaatctcaagaggaagacatcactagacatgntatcaatatcaaattcagaatcactct

SEQ ID NO: 83531 - DNA, 426 bp, Glycine max
  unsure (1)..(426): unsure at all n locations
ctgtgttcttaatctctgcnagcaacaccagagaagttcatctgtgaagtctcggtcaaaggtaagtagccctgtccgtcaagagttngttttccttccatgattgaacaatgcttgaacccaatgtaattgcatgcatatgctaccctagtccgcctatttgtgtgcctttgtgtttgccttgtagaacttagttatcactttagttcaattgaaaatagtttgatgagcaaacctattntaggtgtgtggggtctttaagatggtctgaagaaattcttgtatgaatntaaggcagcagctacagtcaactaaagttacactttntgcctctaagttggaacaaatgtatgtaccttcctctttgcctctaagttgaaacatttcattaattatacactaacttggtgaanaccaatctccttg

SEQ ID NO: 83532 - DNA, 428 bp, Glycine max
  unsure (1)..(428): unsure at all n locations
tctgaatgggaattagaaactctacatatctaaaaaaattatgcacgaagatgcactntacaacaaagaacaaatcanattttattccatctatcacaagatatcaaattacctgttcttggaacatatgaaattcgtcatagctgagggagtcatcactgtttgagtcaaggagctgcatcatttctcgggcatcttctcctggcgcaccaagctcctccatcacttgtgtaagttcctcaatgctaattntatcgtctccgttcttgtcaagaaggcaaaacgctctatccctctggtcaatttcaattcctttatgattngtactngtcagaaaatctttaaggcacagcgtagtcaattcagttgcagccaacatgatggtcttcagacgctttgcctgagcaacaacaactaanacatacatg

SEQ ID NO: 83533 - DNA, 461 bp, Glycine max
  unsure (1)..(461): unsure at all n locations
cgcttctttctctgaatangatgtatgtggctctcctttaatttggaggtattttggtcttttctattcattattaatattggaaccgctatttattgattcaatattttaatataacattttattaataaatatattaaaaaaaaagggaaacacgcgagcttccttttttctttttatagcataaataaacgtttatttagttacagtcccgatggaagagcaaaccattattttttcaaagttgaagggcatctctgcaaattaccatgtacatacaaagttggtctaatgtagttacgtttgtatttttttaaaggagatatatttttattttacaataatcacaccgtagatacaacttcatacatattattccaaccctcatcattaagttaaccctagttagtgtagatgtaagtttctgtttntggtgtaggtgtaagcaaattattttgtga

SEQ ID NO: 83534 - DNA, 446 bp, Glycine max
  unsure (1)..(446): unsure at all n locations
agctttcatggaaatgagttgtaggctgatatgcttttttgattttanngaatttttttgaaaattattnttgatttctgggaccacttttaaggttnttggggtctctggatccattggtatatataacaaagccatttgagcactctaagtatttccttttgaatttcttttctttttctcaaaatctatttaagacaatgtttggtttttcaaactttttgtgggatgattttggagaaaccctctagggattattttaccatagtcataaggaatccccacaaaaattggcatggcgtaaaattgagtgggaatttttttatgatccaaaagaccatatgtgaaccttatatcagaagaggcaaatgaattggtgaaaaatctctactgtgattcgaaccttggaatagttatatgtnggaatatggacctaaagaagtatt

SEQ ID NO: 83535 - DNA, 421 bp, Glycine max
  unsure (1)..(421): unsure at all n locations
tcagccctcctggtaattcgagaatcacttgaaattagtgaanaaaattgtttccgtgaagaanatccaagtcgaggcgcttccgtaacgtttccgtgggtgatttcgcaaagattttcaaccgttcttcgacgttcttcgttcatgcttcgccgttcttcggtcttcaaccggtaagtttccgaaatcaaacttttcaattcattctatgtacccttagtggtcctcatttgttttcacgtgcttttattttcatttcatttactttccgtacccccttttgacgtgctttagtcatttgcttaagtcattttctcgcctaatcaaaaaataaaataaatttccactgatcgtttgaattgtaatatcccgtaatttctgttaaaatgaaatccgaccgttcggtcatgccgtaatcacg

SEQ ID NO: 83536 - DNA, 374 bp, Glycine max
  unsure (1)..(374): unsure at all n locations
tattgattttttttttcatgaaacgactcacgatatcatgtgatatataatatacttattttatttttgaaatatttcaattacactgttaattntccattatctattacatgattattcatatataacatatatttcatatgtttaaccattacattaattatctactgaagagtatattatttttatttatttaagatttgattcaaaatatttaagcatccgtcttagattactatacgatgcctatatgaaaaatatttaaatttgaacatacaatgtattcaaatattgatccatataaaatccaagagttaacatcattaaattactaaattataatattcaaatatttttatcataaacatttttta

SEQ ID NO: 83537 - DNA, 392 bp, Glycine max
  unsure (1)..(392): unsure at all n locations
cttaccaacttctttcaaaggagattatcccttgtatgtgctttntgttaccaacttctttccaatacctaatttgtttacctgcaaagaacttgtgggacatgtgaagggaatgtttttgggagaaaaactccaccttccactaggatcttgtgaacttgcatttcctttgaggggcaaaggttagttctactttatttttttaaaacacacgaatagacatagcatgatatcattacagtactttcacaagcaaataatgtgggaacattacatagacataacatgacaacatcacagtactttcaagagcatataatgtgggaacttgtataaagttaatgcttttaccagcaatggatgacttgtttntaagtaacacatacttctgg

SEQ ID NO: 83538 - DNA, 400 bp, Glycine max
aaaaaaagtttaaatgagtctagtgactcttgggttttcatatccttgttgagtgttttgaacaccccttccaatattactctgctgcataagatcccacttctaatttcttttggagattgggattgtcaaattgcctcttagccatattaagtgaggtgtcatctttattactactaaccaaatgacagtatttaagtagcactgatttatttaagaaaatggtgggatagtttgaaattttgaagaaaaaaaatgacaatatttaagtaatactgatttctttaagaaaatagtgggataatatgaaatcttaaatttaaaaatatacttttctttcaaaataacaatagttggtttataatgcttaaaagagtaaaaaatctatttatccatataa

SEQ ID NO: 83539 - DNA, 387 bp, Glycine max
  unsure (1)..(387): unsure at all n locations
acaagacattcaaccttattcttccatgaatatattcaatcatttgagaaaattttaactttaagaaaaagttggattctactctaaaagtcattggtggcgacatatcagcaattcctggattatatgatgcaatagaggtttggactactcccattttatgttaatgaaatatccattagcagctttcacgattcttttctgtagcttaacatctctgactctgatgatgaatatgtcatgttaatcgtcacagagcacattctgttatttgaaagcatttccagtattgatgtggaaacttcgtactttaaattgttgctgacttcanagtatatattacgtgcctgtcactcttctatcattataaatgccatgaatctcatg

SEQ ID NO: 83540 - DNA, 127 bp, Glycine max
gacttagggacgtcctggacaaaaacacggtcgtctgtgtcacatctgatgatgaaacatacccaactctctcggctatcgtgcgccattctcgcttaaacacacaaggactgagaaggagcacact

SEQ ID NO: 83541 - DNA, 451 bp, Glycine max
  unsure (1)..(451): unsure at all n locations
agctngagtataattcattacttgtgttattatcctacatcaaacaattggattattgatgtttctatcacaatcaagtgatagttgatatctccatatgtgcgtacactatgattatgtttttgtttctagaattcatttggaatgtctattgttgattctaaatgagtgatctctcttgatttaaaagttaccatctcctaatcatttaagtgttcattntgttatgggttgctcatattccaatcatgtctagttaaactgcttgataatctatctttgttacttctactacaaataaagagagacttcacccatgacaatcacgttaagatgttttaagaggaaatacttgagtaggcatgatccttgttacctgtagatgaaagtcaaacttagtaagacgtgtacctgtgttccttgaggatatgcttagttaccacctatgtgc

SEQ ID NO: 83542 - DNA, 430 bp, Glycine max
  unsure (1)..(430): unsure at all n locations
ggaagtgtggagggtgaactcctactnttattcattgaccacagagtggtacctggagatatgtcgcggnggtcaggagaccttgtggacgtcaggcggggtgctattgcccaaaaccaagcttgaccaatcccgacccaacccgggcatagtcagtcagtgagaacctgtgacgtacctaaacaggcgagctcctggcagtcaatcgataaaagaacaaagaccacaaagcaaggaggcttgtgtggtggctggccagctatggatcttgagtaatatttggaatatggcctctggtaatcgattaccaagggtgggtaatcgattacaaggcttanaaatgaagacaggaagttaagatggcctctggtaatcgattaccaatgctgtgtaatcgattaccaggcctagagatgggatcaggaacgtg

SEQ ID NO: 83543 - DNA, 419 bp, Glycine max
  unsure (1)..(419): unsure at all n locations
aagcaaatattgagtgtgaattgagttctgcattattaaactatttgaacaaaaacagaatatttaaagctatagaatgtgacaactatcaggttaaaagcgttagggagtgtcctattgaatttctcttgctgtataaaatgtgtttttctttatttaacgctatcatagtgttcttacactgagaaattactcaaaccatgattcctcacatgaatgagcctaactctctttagcctttgttcttgattcctcaacaaacttgttctaaaaaagttgcactaagcctacagtgtaaaataaactagatcactacactttattcctaaacatacagatntctagcttgctctatncaagtctaacgttntaaagcattntcccaattctaaaagcctaactatacacacanatgggtg

SEQ ID NO: 83544 - DNA, 460 bp, Glycine max
  unsure (1)..(460): unsure at all n locations
acatcttgatgcttcaactgacattactatcatattctgccttcttctattntcagattgngaatgcctctaacagcacctctgtcaatgattntcttcatgcctcttaagtgcagatgtccaaatctttgatgccatattttgacttcatcttctttggagaatagacatgtggaggagtaactggtttcttgaggtgtccataggtaacagatgtcctttgatctgctgcccttcattaggacttcactcttctcatttgtcaccaagcattctgactgtgtgaagtttacattgaatccttcatcacacaactgactgatgctgatcaagttcgcagtcagtcccttcaccagcagtactttgttcagactangaagtccatcatggactagctttcccattccagtgatctttcctttagagccatctncaaatgtcacatagctagtggagcagg

SEQ ID NO: 83545 - DNA, 388 bp, Glycine max
  unsure (1)..(388): unsure at all n locations
tgtatcagttcatttcttttaagcaatggatttgaaagaggaaaaagggatacaactctgttctacaagaactatgactcccaatttatattagttcaaatttatgtggacgacattatatttggtgctactaatgaactttgtgaggatttttctaagctaatgcaggctgaattcaaaataagtatgatgggggagctgaagttcttcttatgactacatataaaacaaacaaacaatgcaatctatatccatcaaaccatgtatgttaaggaacttctcaagaagttcaaactggaagatgcaagagaaatgaagactcatatgcatccaacggcatgtcttggattggatgangaatccaacaaagtagacaactcacaataca

SEQ ID NO: 83546 - DNA, 395 bp, Glycine max
  unsure (1)..(395): unsure at all n locations
ttatcactaaggtttaggtgacttanatgtaagttgaagattgcattctactagatgaaccttagttgaatggatgcattggaagttgattntgtttcaacttccaagagagcttatttattataggtggtggcaatcttcactataaatagagaagacagtcagtggagaaatacaacatatgaagagagagtgtgtgagaaaagagattgtgaatcatagtcactttgttgagagaaaagtgtctttgtgtgagagtgttatcatttcttgtaactatcgagtggggtactcgagtttgtatagtgatacactatntttgngtgggttacaatcttgtaatcattcttgtgatagtgaaaantattttgagacgattctgtttctgtggatgt

SEQ ID NO: 83547 - DNA, 395 bp, Glycine max
  unsure (1)..(395): unsure at all n locations
cttctggaggaatcttctggagggcccaagtatgcctggtggctatttgcaccccaatttttactaaatacacccnctgcctttntttggtgattcttttttcgtaaaggtacggaaacttacgaatttcgtaacgaatacttgtttctttccgtaatgttacggaaccttgcggattacataatcatcccttttttgacttacggaatgttacggaacctcactaattgtgcaatgatgcttccttttgatttccggtgtgtcacggaaccttacggattgtgcatcaatattttcttttgatttcccgcacgtcacggaatttcacaaattgcctaatgatgggtgtcaagcacctcacaatgaccaaacacaagttgcatgccaccaagcac

SEQ ID NO: 83548 - DNA, 376 bp, Glycine max
  unsure (1)..(376): unsure at all n locations
agtcaccgcggctgcagctttattagctgacattttatctataacacaagttgagttntattcagaaaattagagtttatctcttttatcttagtgagagtgattctcctaaattcttgagtgattcaagaacacccttgctgtatcaaaggactttcacaaccttagtgtgttgccctcgctggaaagagtgattctttccttcctatcatctccacccttgttctttcaaaccacaattccagaaaatccacctctgcccaaaattatctcgtgaccataactcccatttcacacactcaaattaagtgattcttgagcctaaattgaatttcaaaacgagacctttcacctcgttttggaatcacctcatttg

SEQ ID NO: 83549 - DNA, 460 bp, Glycine max
  unsure (1)..(460): unsure at all n locations
gatgagtttgtctgatatgacattctgtgaaaatgtttgaccatttgaatttctcgagtgcttccgttgtttaatttcaagcgtctcgatattttatgtcctcaaatcagacatcggagcgaaatgttatgaccattcgaatttgtcgagagcttccgtttttcaatttcgagcgtctagatgagttatgtcaccgaatcagacatctgagtgaaatgttatgaccattcgaatgtgtcgagagcttccgttgttcaatttcgagcgtctagatgagttatgtcaccgaatcggacatccgtgtaaaaagttatgaccattcggctntgtcgagagcttccgttgttcaatttcgagcgtctcgatatattatgtccccgaatcggacatccgtgtgaaaagtatgaccattggactttgtcgagagcttccgttgttcaaatttgagcgtctagatgag

SEQ ID NO: 83550 - DNA, 324 bp, Glycine max
  unsure (1)..(324): unsure at all n locations
aaatgctgatgcctagtgtacactggttttctaccatgtttcaattgtatatagcttgtgtcttcttcacagatggggcatgcatgatgacccttaacattgtaaccactgagattcccatatgctggaaagtcattaatggtacaaaaaagcattgcacgcatttcaaaagtctccttgcgaaacccatcaaacactaaaaaccccttgtcccataactntctcaggtcttcaatcaacgaacttagataaacatcaatgtcatttcctggctgtcttgggcccgatatcatcatacacaacatcttgtatttttgcttcatg

SEQ ID NO: 83551 - DNA, 284 bp, Glycine max
  unsure (1)..(284): unsure at all n locations
ttaaaactgttggttttgtttactgcaatgattggtattggtgcaccattttctttgttgctgagtgccattggtttgttttagggtataagaaaacaagacgtagtttgcattgggattttgctttgaacaatggttttgataaccctaaacactaacctaagactttgtgtctcactcctgtgcacattaagtgattgattcaagaaaaagaaagnaggttcatctggaacctatttccccttcaaactctaatcctcgttgtngggtgtcacttggtatgt

SEQ ID NO: 83552 - DNA, 487 bp, Glycine max
  unsure (1)..(487): unsure at all n locations
gtcccgtgatctctaagcaccgcggctgcagcttaagatgagtggcatccctgcagcccataattcgtacttcctcaccataaaaaatggtggtgaacctgctgtgtattgatgttctccctccattacaatttctctcaactcacagatcccttaaagataagagctctagataccaatttgttgtttttagttaataacagcacgcaaaaatatttaagaatgagagggagcataaaagaaagaaattgagactgcaaaggcttgttttattctgatatgaagcaacgtatttaaaaacatgaaaaagatagtaaatgctaacaaaaagattacaccactaacagatcatgcctagagaataggatcaaaactgctttatcctatcagtcaacatgactnttatttttcctaaaaaatagcataaaaatcttatctactatagtttggtagacagttccaatagtcacatcttaacaaaattaca

SEQ ID NO: 83553 - DNA, 441 bp, Glycine max
  unsure (1)..(441): unsure at all n locations
atgacatgaaggtacatcatcaacataatgatgtactgaaacaatgaataattgggaggtacatttagttatatgacttcaatctacatttaacttggtttattttgcaacatcctagcatttctactatgcaaactctatttttacctatgacgaactgattgaatgaataatggggagatatctaaggatgctgttggttggagctgcccttgagttcaacaaaatccaacaaattccacctattcaaagattagataaaaattgattagaaacacatganattntataaaaaggaaacaatttggtagtgtatgtcatgcgaaagctcttgtatactttctctaatttaagtgtagcaatgtgtttagggcttattggatntaaaagtgttgattggatntagaagtgctagcttgtacaaatctatctccttccctg

SEQ ID NO: 83554 - DNA, 210 bp, Glycine max
  unsure (1)..(210): unsure at all n locations
agcattattacatcaactgaaatactccaattattagtaggggaagagtaatgataagcctattagtgataggtttaacaacaagagaaaacgtctcatganagtcanaaccatggacttggtgaaagcccttnggccactaaccgagcttgtactagttgatggacccatccacattntctttgatctganaacccattacaccctact

SEQ ID NO: 83555 - DNA, 455 bp, Glycine max
  unsure (1)..(455): unsure at all n locations
tgcaaggaacggatgaaagtgttgatcttttaatgcactgcagaagagagatgactggatgaatgcttgtttcacgtaagcttcttgactttatcgttctctcccccgcccnccaaataccacaaaaattccgaacgctgtcatattgcaatctaattgtttaatacccaaatccttccctagctcttttccagtatcttgagcttgtaatcttccatcttaaaagcatactgactgatgcaatcttctgattaatttagacctgcatcagttacttgcttgcaagttgtagaatctcttattttccttttcacttcactggtttgcatgtccatacaattcgaactattttttatctttcaaagattggaatgacattaactnggtttttgatcctaatagataagtcatatcaatttagttcttgaaaagtggagactgaatgtcctctaaat

SEQ ID NO: 83556 - DNA, 362 bp, Glycine max
  unsure (1)..(362): unsure at all n locations
attttttggactaattatattgataattccttaccaaaattttgcagcccgccatcgatgaatgatggcgatatttattacttgtntttctggtttttctatccttatttccttctagaaaagaattatatatcccatactatatattcaacgataaanaagtgacagattaattatttactctaattcaatcgattgcataagatgcgtaatattataaacttctaccgataaaaaaaaatacatatntttcacaaacacgtagctggtgaggacctncaacgctaccttatanagaaaagatactacacacagcccgagtcattgatcatctatcaactgagaaacccaatgtggatctc

SEQ ID NO: 83557 - DNA, 433 bp, Glycine max
  unsure (1)..(433): unsure at all n locations
attcacttaaaagtgggtcccatattggcttcctaatttcagcttacctctttggatgtgagatcgtggcagtaaggtgcccaatttccatcatggattcagtcacaaaacaaacttcaagatgttggactgtctaacacggangatttagattctattcccatacggatgtgagaagcactttctcaggttttgtatttaaacctctcttacaatcatatccatggtgagctngngactacattaaagaatccattatctatccatactatngatctaagctcaaatcacttatgtggtaaattatcctatctttcaagtgatgtgtttcggttagatctctcaagcaattcattctctgaatccatgaaattagaatttctgaatcttgcatcacatatattgtcaggagaaataccacaatgttggatga

SEQ ID NO: 83558 - DNA, 322 bp, Glycine max
  unsure (1)..(322): unsure at all n locations
gctccaacactccatttgaaatctttctggattaaacttgtgagcatcacgcccccagagttgagggtcttgttgcagcactgagattggaatctgaatattcattccttttggaattaggatgccttttaaattaacaccttggagagctgttctaacaacaaaggctgctggcgaataaagcctcaaagtctcttgaatcaccatggtcaactgcaagtgtaacattnttatatatggccttcacagatcagtaagaatgctcatgaaacttggaaatgatcaactataattacaantaaaattgaggcacacaaaaatc

SEQ ID NO: 83559 - DNA, 428 bp, Glycine max
  unsure (1)..(428): unsure at all n locations
atgtgccctaccttgcggagggcatgcagatcaagtggcattttcaaaaggagaacacgcgggagtcgccaccaacaattattcgagggaaaatgttagaaaaaccaaaaagaaggtttgcgaatttcaaaaatgaaggttcgagagtttgttacgcatgggaaaggtattagcaccccatgtgctcgtcacaagggacgacagccatcaatcgagtgtgcaaaaaatgtgacttcaatattatttattnttcccttttcatatntattttttatttttttggggttgacaaaggggtcgcccttgctcctacgtatcctcaggtgcgatgaagaattcagacctacgtagttctttaagtctgaatgtttgtgttaaaattgatttatgtttttgagagaattatttaattgcannnacaaagtcat

SEQ ID NO: 83560 - DNA, 276 bp, Glycine max
tgctcatcgataatggcgccagtttaaacgtgatgcctaagagcactttggagaaaataccattctatgcgttccacttaaagacgagttcaatggtgggtcgtgccctcgacggcacccgccgagaggttatgggagagatctatctcccagtacagataggccctcacacctgtgcagtcacctttcaaataatggatattaaccccctctacacactgtctgttggggcgcccgtggatccactcaaagggagttgtttcctctacactccac

SEQ ID NO: 83561 - DNA, 449 bp, Glycine max
  unsure (1)..(449): unsure at all n locations
ttgatgtgccaaagcccaagtgattgattcaagattgattcaagaattcaagatcaagcatgaagaatccaatccaagattaaagagaagaaatcaagaagcaacaagtcaagacttcatataggataagttttaaaagattctttcaaaaatcaaatagcacagttttgttttacaaaagaattttctaaagttactagagtgattactctctgataatcgattaccaattgatagtaatcgattactagtgactagactggttttaaaatgttttcaaatgatttgtaacgttccaaaatgattttcanatagtataatcgattacactatattagtaatcgattacaagtgaatctgaacgttggaattcanatccaattgtgaagagtcacaacttttcataaaatacattgtataatcaattataccatggtggtaatcgatta

SEQ ID NO: 83562 - DNA, 450 bp, Glycine max
  unsure (1)..(450): unsure at all n locations
agcttcncgaanattgtacctctgtaaatgaataaaaggtacacagtgagaataatcgattctattagcttgtttgcattgatggtgccaccaagttggtcttatattgatcctttgtcgatcgaggtagatttccttgtactggataacttgtgtagacatttgtgcacctggtgctttaacatccatacgttattaaaaagggtttagaaattttacacgtacacacaactcctatatatatatatatatatatatatatatgttttcttataatttatgtcaatttcagctttgattcttgtattttaaaagttgtgtttttagagcttttttacagttttatatattttataaaaattggtcccactctgtgattctgattatattcttttatcgctaattataaatctggtgtatttagttaactagacgtcttctaattttaaa

SEQ ID NO: 83563 - DNA, 443 bp, Glycine max
  unsure (1)..(443): unsure at all n locations
tccctgacctatgcacactaattatgtgtctatctangtggccaaccatcacgctctatttccncctttatgaagggttttttgctgtccctaagtggatgattgtttggtaagagcccatgacatgagtcaaaccaacaaattttcctcacataatgtaatgtaaatgacttcttatgtttcatgcaatgtgaacagacaaatctaccatgagtccctcaaccagacaatatgccataagcaagaaagttattaataatccacatcaaagttgccttcatcataagattttgcttccttgacacatcatatgccaaaacgccactccataacttcttcagattgtcaatcanaagctctagataaacattaatgtcaaccctcgaattagatgggcccaatataaggcaactaanaaatatataagctttaaacatgcacat

SEQ ID NO: 83564 - DNA, 457 bp, Glycine max
  unsure (1)..(457): unsure at all n locations
ggcagcaagcttgtatttatagagaaaacaattataatcgtctataatcgattaaatgtataaagtaatcgattagattatctaagtaattgattaaagtgttcatctaacatctggaaaacaactcaagaataatgtaaacgatttgatgacctaagtaatcgattaaagtgttcttgttcacctctgaacaactaaacgagagagaagtaatcaattaaagcaaagacttctgaataaatcaatcattgtctgaaacaacagtgtaatcgattaaaatactatcatacttaattaaaccaatacaagacttaactctntaagcttcaaacaacttgttgtaattgattacgacaaatctgtaattaattaaaacaaagatgatgcacacattatgatgatgcacaatgcanaacanatatcanatgtactaagatgcaacaatcaagataacaac

SEQ ID NO: 83565 - DNA, 442 bp, Glycine max
  unsure (1)..(442): unsure at all n locations
ttcttagagtcctctacagggtggaggttgtgccatgttctcagaatgttcaaaactataatgctcaaaatcaccaataacagaatgctcaggatgctcaaaaggtactaaatgatgtctaactaatctatgaaatgtcctatctatcttaggatcaaagggatgtaagtcaggtggattgcctctagtcatacactatattcagcatgcacaactagttgccttcttatgcaagtaacagtgtaggtttgaactacaactaccattaaatgatatccaaatgacttanaattttgtgagcaaccttataaaatgatgagaagatagcacaaaaaaatttcaaatgaaaattcaaagtctaactatagaagctaaaaatgataagttaataaaaataagagaataatacttggaaaataaaaaacttttgacagaatcagaa

SEQ ID NO: 83566 - DNA, 422 bp, Glycine max
  unsure (1)..(422): unsure at all n locations
gctggggtgtgccgactgtgggtccatgaggggttgctggggttaacccatgcgggtgttgaagagacaggatgggcatctccttccttcctctttgcccctgtggccccgattcttttggcgttcacgttcgtggaggaaacgtaatcaaactttcctctcttcaatccaacctcgattctttcctcggcaaacaccagatccgcacagctggacggcatgtaacccactagcttctcatagtagaacactggcagagtgtctaccatcatggtgatcatctctctctcaaccatgggaggagctacttgtgccgccaaatccctccatcgctgcgcatattctttagagggttcaccctctntcttggaacatatctgcagttgagaccggcaggagccatatcagacttgactgatact

SEQ ID NO: 83567 - DNA, 420 bp, Glycine max
gtgccacatttatggaacttgtttgtgtcacatattgtatcattacttctcatcattggggcgctacttaagctaccaggtgccaccagctttgagcgtattctttgaaggattcatgctcattcttgcacatgttctagagctacattctatccggaggcatattagaattatacagatactgcctaatgaacgcaaccattacgtccttccaggaatggactcgggaaggttccagattagtgtaccaggtgacggctgccccagtaagactttcttagaagagatgcatcaatagattttcatctttcgcatatgctcacgttttcctgcagtacatcttcacgtgattcttgaagcaagtagtccccttgtatttatcgaaatccggcaccttgaacttcgaagggatgacgatgt

SEQ ID NO: 83568 - DNA, 415 bp, Glycine max
  unsure (1)..(415): unsure at all n locations
agcttcacttcttgagcactaagtctagacatcattgtacaggcaacacattcaactgcttcattgactgcattaacttgatcatagaacgaaaccaanagtaatggcaacatctgaatcacatacctgaacacaataattgtgaaaataattaaacaaaagcactataaaaataaaactacatttaaaatcaattatatattntagggatgaaatacttggcaacttacggttaaaatattcttccaagtgtttcacaagggcactcaaatccaagtaaagctccttcccaagattntgcagaactcctgcagtttaaaaagaaattaacaaaaaataatgttgggtgggtgttaagtaaacttaagctccttcacaaaggcactcgtggtttgcctcgtgcccctatgggttc

SEQ ID NO: 83569 - DNA, 413 bp, Glycine max
  unsure (1)..(413): unsure at all n locations
tgcatcatcatctacatgctcgatagatgaggacgaacgctatcttgcgcctctatctagaatacctaaaaggctcattatgcgcttaggacagcggagactcatcttgcagctgcttatagagctgttcaaccatttaccaggcatcatgtgctacaagaaacgcctccattacggagctcatattatcatggtgctcccctttagacgtggaacttggaaagatgccactccatagctcgccatgactatagagggatgtcttatcagaacctaagctctaataccactntgctggagaggagaaagtaatacgaagcatctaagagatatgcatgaggatgngatatttgaaagaagactagtgtttattactagagaaatgatttagttacggcttctattacaaatga

SEQ ID NO: 83570 - DNA, 396 bp, Glycine max
  unsure (1)..(396): unsure at all n locations
taaccctcatggctctcacagnctttagatatgggagccaattcaatccttgtgtccggactctcaaccacttatgatagccggcgatgataccattactgcttcccctaagctctctatcctttcttcacgccgcatcccatgccttacgaactccttggagtaccctcgccgtgcggtcactgaaaccccgtgcgatgaaaggcgcgatgctttcctctgatggcactcctctcatggngtagccaagctgtcttatggcgaggacgggattataattaatacaaccccttgttcccatcaagggaacatttggacatccttcgcatgaagatagaatcctgattctttctctcttctagcgagggaaccaattaacagacgcccctccatgct

SEQ ID NO: 83571 - DNA, 394 bp, Glycine max
  unsure (1)..(394): unsure at all n locations
tcctggcagtctacaaaataaaggaataaagaccacacagcaaggaggcttgtggtggctggccaactgtgaactttgattgatatgtgggttatggcctctggtaatccattaccaaaggtgggtaatcgattacaaggcttaaaaaatgaagacaggagactaagatggtctctggtaatcgattaccaacgggtgtaatcgattaccatgcttgagaaacgaagtgaggaaactaagatggtctctggtaatcgattaccaaggggtgtaatcgattaccacgctcgagaaacgaagtcaggaaactaanggagcctcctgtaatcgattaccaccctgtgtaatcgattacacagacggatgggtcactggtaatcgattaccacgtatg

SEQ ID NO: 83572 - DNA, 254 bp, Glycine max
  unsure (1)..(254): unsure at all n locations
taaagcatgtcgggaagagttactgcaaatctttgaggtgttcaacataaactctctatgggattaatccattcagaaacacatnttttacatccattngatataactttatattgctataagttggagatgaaagtaacatgcgtattgcctctagacgagttgtagatgcataagtttctttgtaatctataccttctagttgtgagtatactttagtaactaaccttgctntgttcttcacaaccttacca

SEQ ID NO: 83573 - DNA, 419 bp, Glycine max
atttcagagacagaaagcagtgaaaaaaaaatctgtacttactaagtgacgatatgtgtctgtttcaaagaaaaaaaaggacaatttgggcaaacgataagtcaatttctatcatactgaaaaagtaagaaatttaatgcgtgcttaactttttgtaatggataaattctcctataattattagtagtgaataaaaaattgttttcccgagcaatagaataaagctcgccccataagtcacatgagtaacacttaggcctcacatattttttgaaggataaaaggcacattaattaaactaggaaaatatacattggaacaactgtcaagttgtgacacaggtgtaacacatattctatagaaatttgctagaaacccttgctggtccatacaataccaactagagagatattagtgga

SEQ ID NO: 83574 - DNA, 427 bp, Glycine max
  unsure (1)..(427): unsure at all n locations
gagcagttaagcaagaccgtataccagtacaaggaagagctaagcttggcagcgactcataagcaaaggctagaggacgagtacaccaaggtatcaatcctacaagcagaaagggaagcaagggaaagggtgatcgattcattgcacagagaagcaatgatgtggatggacaggttcacctttactttgaatgggagtcaagagcttccccgactgctagccaaggccaaggcaatgggagatgagaactcgactcccaaggaggttcacaggctcctcaattattgccaacaaatgattatctgatggcccacataattaggagctactatggcaattgtattgtcgctttgattntgattagataaaccctttntgttccccaataaaatgaggggtgattaatcctgtgtgtttaaaactctat

SEQ ID NO: 83575 - DNA, 379 bp, Glycine max
  unsure (1)..(379): unsure at all n locations
actaccctggggggtattaataaatgcctaantaggtctcttccttataggtcccttaaataagggcacggaacaaacacccttcgtgccatttttacactggcatgccataataatatataaccttttgcttatggtcaatgaatattatcatacttgtgtacattcccgcattgtgtcttttgcataagcatcgcatatgggntctgtcttgatcccttctgtatacaaaccaacngagggtccgtgtcgccttcttaaaaacgtacgttgggcactttgctacccctagacattgtgtctaagaaagggacgaattcnnccgaccccgattctagatacatctgtgtatatgcattcttcatgcattatccattca

SEQ ID NO: 83576 - DNA, 275 bp, Glycine max
  unsure (1)..(275): unsure at all n locations
tacaaacatcaatgtaaatntagagcangcttatgcgcatatttccttacanacgttctcttgcacaagacattctattataccgtaaaaatgcacccatatacaatcaaggcagcttcgttacctagaatatntacacgtacttccaaggtgtatnntgtacttacatcacacacctccttggctaaatcacantacatgcatactcaaagcatttggggtaccanaaattngacatgtgcacatcttggtatttctaacacctatacatacac

SEQ ID NO: 83577 - DNA, 457 bp, Glycine max
gtatcacaaatatccccattcgctgaatatgtgatttctcaatcgttctctattttcttgaatgattatcattctccatgggtaattttctagagtagacacaagtcagtcttctatgttcggtggcaaagcttgtatgctttgtctcttggacagtatggtaagttttgtgacccagcatttctgacacgatgataattggtaaaaggggatatagtgatatcttgtataaatagtgttttgaactgctacgagtgcaaaaaatgtattgtccctaatttctcactcgtattaacttactacattaatttctgctctatatccctaatttcaatcgtttagtggagctttagtttttgtttttgcagaattgattcttaagttgtttgatctttaaattcattgggaatcggagtcttactagaatgaaatgttccccttgaaagtaccatgtctg

SEQ ID NO: 83578 - DNA, 243 bp, Glycine max
  unsure (1)..(243): unsure at all n locations
tctctgagttctgtccatccaaccactatagtttgggtcagcaaatctttggtgatacaacagggtgcatgtggcattactatctagcanatacttagtatgctctagttgatccttccatcttctagaaaaagttctactcacttcaccatacgactacatttaaagtaggtgtaatatcaaaatgagaataattcctttgtcaatntctcacaagactcgaatatcgatatgtatatcaaa

SEQ ID NO: 83579 - DNA, 450 bp, Glycine max
  unsure (1)..(450): unsure at all n locations
ctatttacatctttttctttctttatatacatgttgtctgtaacaacaataaacaaaataaacaaacctatctgtctgcctgttggtgcttttcattattttattttttttcaagaaagcataaattgttcatattatataaattataaattttatatgactttcattgatttgatgcaacaaactaatatttccttaatatatttacaaatgtgtttatcaaatccatttcattgattacaaaggtacgaaggtttcctagaatgagcataaaagtttataacagcgttcattgccaccaaaatcacctcacaaaaaaggtggtaaagggtatccaaagtttttttttataactagttntcaggtttccaacaattgctgctatgaaacgagtgcacanaattgatatggaatacttttgttaagatcaagtttgaatatggagatatg

SEQ ID NO: 83580 - DNA, 219 bp, Glycine max
tgaatcatgccatactcatttgttgcatggcctcctccacaagattcacaaacaaaacattaagtctaggagtagaggtagttgattgcaacctgaattgctaaggaagatcaatgatttgctatgtaagctcttccatttgcctagcgagaagttatgtttggctagatacgatcttgggattaacttctacaatctattgatggaacatggtctatc

SEQ ID NO: 83581 - DNA, 448 bp, Glycine max
  unsure (1)..(448): unsure at all n locations
agttgccggacggtcttcgtggacaaaactattggttgtgttgcgatgttgggctgaggcaacgtgctgggtgccggcccttcggggattgggggatagaactcgacatcccttcgagcatagtcttgagggtctttgtggacttcttcgggctgttgaggaggctctctttcaaggacgggagaagcaatatggcccgcatcgtcttgcaagacgggtggtgagtagttgggcggcaatccataagggtaagccgctcggttgtatcccaggtgagggctgccatcgtgccccagtgtgtcccttccccgtcctactatgtttgagggaggatggtgcgcagttgccaagagagttgggtctgcttcggcagccgaactgacagcggcagcggtggccgcgttctttntcatgagctgcctcattcctaacatggcctncatcatgg

SEQ ID NO: 83582 - DNA, 389 bp, Glycine max
  unsure (1)..(389): unsure at all n locations
actatactgacattagttgtgattgatacatnttttttaatatttataatacctcttacaaaatacacgacgtaatatattatttggacaataaaaacagtgtaatttaaaactattaaggaaaatattgtagaaatttttaaaaaacaagaatgtgatatgaaatgatgtaatttgccctaaaaaacattctacatggttatttccttctcttagagcacatggaatctcagtctagttctttcactattacacctaggcatcaaatataaagggttaagggtaacatagatgtcctggtaagggtcagagcatcatgtaatcaatttcaagctccaaatntaaatttcatgcaattagagtgtgaatgtgggtcaaccttgcttatc

SEQ ID NO: 83583 - DNA, 406 bp, Glycine max
  unsure (1)..(406): unsure at all n locations
atgtattttaatttttgaataacactattagctttaaaaaaataaagtgaccacctaaagcttgaacacctattagtatttatattttttaaaaaaaatatgtattgacatcaactcgtcattggcttccaggttagtggattaggcaaaatagaccaatacaaactcacgggttaagtcacctaacccattgatccaaagtttacattgtcacctctacattagtgacttttttgtgccttttgttcctttaagctttntgtgtataaaaatatattttttcttgtgtgaaatattngtttgaattcagttttaactatataataaaatggatggttaagtntaatatatatttaaacagtcttgatcatttgattatgaggactnggatannattatattcttc

SEQ ID NO: 83584 - DNA, 444 bp, Glycine max
  unsure (1)..(444): unsure at all n locations
tactgataaagaatatctcttaattaaaataaataagaattaagttttaaaagtttaatgccaatgtttaaaatgatacctacaaataataactatacagttgactataataatcaattatatgataaaaaaattaataatgaattatgaaatcacaccgcctagctttaataaggaggaccgggtagcagccacctaattagaccccgcttgtcacagcgttttacattgggaaacattttgtaaattaaattttaaaaaatatactttaaagtattttaaaatgttatcctttccgattatatttttacgatcacaattttcagtttcgctcaaactaacttattcagctgttgtcatgtgtcaacaacaggaataatttacatttttttaanatttntaacnatttattntaatttaactctcttatctctttntttcttc

SEQ ID NO: 83585 - DNA, 428 bp, Glycine max
  unsure (1)..(428): unsure at all n locations
tctctagaatggaaagctatgggctgaagagttcttgccctacatgttaggaacctanaaatgaattgagggttccgttaaaaagagatgagaaaaacagagaaaagaaaggaagagagaatactttcgctgtgtttatttccaaaggtttcccttcacaaagggtttttcctttttccaagaaagctaatgctcagatccctaatggtaatgtcagaatgcccactcctctataccttctactgtttcagctcattccctacctctacatcttcaactgcctaactgttcctactaactacatctactccctggcccaatcactacacttcctaactaagtggaaaccanaagtatcaatatttgataatggcttggtgagattcagacaggagctntngctctttgatatgatcatatattatctc

SEQ ID NO: 83586 - DNA, 458 bp, Glycine max
  unsure (1)..(458): unsure at all n locations
agcttgcccagcgagtcatttgtctcttctcgcactcagcgtgcccagctcgctaagccaaatttcactaactcgcgcttagtgagccaatcttgctaagcgagccgtcagaatccgaaacatcaaggagcctttaaaacactaaagttggcgtaaaacaagataggagtcaaaaaacagagctaggggagaagctagagcgacaganacaaagcctccaagaaagcttaggttagaggagtgagattagagttctagaggttggaggagacatcctcaaccattcttagccattnttttccctcaaaatctatcctttctgctgaacctttgatgtaacactnttactatctatntaatgttggttttatgtggtcattgcttctatctatggttaattttgcatgcttgtggctngataacccatttgtatgtatagttaggaattttagcacggg

SEQ ID NO: 83587 - DNA, 459 bp, Glycine max
  unsure (1)..(459): unsure at all n locations
cttcattntctttgcatgctctntgctagtatattaaatatatacaattatgttcatccttttctcttagtagcttaattataatttatttggcataattntatcatctgctttacatcatttttcacaattaaacagaagacctattctaaattaattaagattcaggattttcttaattagttcagtatattagaacgaatgttagcatttagtaaattttaggtttggtttcattctaaaaattattttttattctatcaacttttaaataaaggttctcacatcgacaaggagattcaaacacacgtccatgtgggatataagtccaatccttaccaaatggactaacattngttggctcaactactactacctctatncaatttattatcaccaccacaatcacaattngttgatagtcacaaccaccaatgtgatcgcagcanataccattat

SEQ ID NO: 83588 - DNA, 415 bp, Glycine max
  unsure (1)..(415): unsure at all n locations
agctntgagcaacttcaaacgacaataactttntactcggatgtctgattgagtcccgtaatatatcgagacgctcgaacttgaataccgaagctctgagataattcaaacgacaataactttntactcggatgtctgattgagacccgtaatatatccagacgctcgaaattgaataccgaagctctgagcaaattcaaaagacaataagtttttactcgtatattcgattgagtcccgtaatatatcgaaaggctcgaaattgaagatcgaagctctgagcaaattcaaaagacaatcaacgtttactcggatgtctgactgagtcctgtaacatatcgagacgctcgaaattgttatcgaagctctgagcaaattcaaacgacaataacattgtactcggatgtcagattga

SEQ ID NO: 83589 - DNA, 417 bp, Glycine max
  unsure (1)..(417): unsure at all n locations
tcgagtaaaagttattgtcgtttgaatttgctcagagcttcggtattccatttcaagcatctcgatatattacgggactcaatcagacatccaagtaaaaagttattgtcgtttgaatttgctcagagcttcgataatcaatttcgagcttcttgatatattacgggactcagtcagacatccgagtaaaaagttattgtcgttcgaatttgctcagagcttcggtcttcaatttcgagcgtctcgacatattacgggactcaatcagacatccgagtaaaaaagtgattgtcgtttgaatttgctcaaagcttcaacattcaattntgagcgtcttgatatattacgatactcaatcggacatccgagtaaaacgttattgtcgttggaatntgctcagagcttcggcattccatt

SEQ ID NO: 83590 - DNA, 452 bp, Glycine max
  unsure (1)..(452): unsure at all n locations
agcttatcagaaaggaaatgggtatttactacctcaagctaatattaagaaggtggcagagtgtttcttttgcaagaagaagggacacatgaagaagaattgcaccaggttccagaaatggcttgagaagaaaggtaaatcaatctcattagtatgttatgaatctaatatggttagtgttaatattaacacctcggggattgattatggatctactattcatattgcaaattctttatagggtatgcaaaacctaaggaaaccagtgggaagtgagcaaagcattntatcaggcaataagctaggctcacatgtggaggccattggaactagcattttgactttaagtagtggctntattttataaatagaaaggactttttatgtaccaagttttttccgaacttgatttctatttcacggcttgtaccgttggatattcctttaatttc

SEQ ID NO: 83591 - DNA, 443 bp, Glycine max
  unsure (1)..(443): unsure at all n locations
caaatgttacatctataatcatcaatgtagcacaagagatacatttaaccactatttgagaatggctctatnggtctgcaaatatgacgggaaaaaatttcaccagggacatttgatgcttcagttgaagagtccatgcaccattatttttgtctatagcgcctgtattcccttgtagcttaagtagccatacctttgatgccaaaggtaagtgagatcggaggaagtatgtagccattcttcaataaaggcagtgatgttggagctntcattgaaaaggataaacatatgggtggtacttatctttgtgtgtgtgcaatcaagcctttacatgtatgataaatattgcatatccccatttttatgagaatggcaagacctttttcttgcaattgntccatactanacanatgttgtctaagctaaggaacataatatacatc

SEQ ID NO: 83592 - DNA, 427 bp, Glycine max
  unsure (1)..(427): unsure at all n locations
agcttgatttaagtcacatgagtgtttatttcttggttattccacttctcacaaaggttacaaatgtatatctcctaatggcaaattatatgtttccaaatatgttgtcttcaatgagcttaaatatccttacaatgatctttttccatacttatccaactctgtcactccttctaagagtgatttttttacctattgctcatattcccattatatcacctgcttctaataatcttagtcctccttcccaaaatgttgaaactaattctacttctttaagtggtgatccttttatgtctcttaacattgagttccctaattcccaaggtgtcacaccatcttctcctctttccaatgtngaaccaaattttgtaactaatgaacactctaacacntgttatgacttaaacagatattcaagtgaact

SEQ ID NO: 83593 - DNA, 455 bp, Glycine max
  unsure (1)..(455): unsure at all n locations
tgattctntagggaactcatgatgtaattagcttatgaaaaaccgcactctaaaaagagtctagccaaatattttggaggatctaacaaccttgacaaactattaatgtataataaaagtcctatggacaaatctagtcatggatagaaggggtaagaaatttgctcataattagtttctaataggtcatcaagtctgtttctaccactacttagtaagggtgatcatgaatgagttaggtagggttgggttaaagcctaaacccattatccaacttaatcaaaattgtataggttgactttnttaanatttgattttcgttcttttaaaaagatgtccgttttcatcctttaagtttaagatacaccacttttggttctttaagtgatntagatagcactttataaatgaatgaaaagtgggttatatagtgcttgaggaccaaatgtggtgta

SEQ ID NO: 83594 - DNA, 445 bp, Glycine max
ttaagtcaccgcggctgcagcttaacattcaaattcgagcgtctcgtttattatatgactcagtcagacatccgagaaaaaagttattgacgtttgaatttgctcagagcttcaacattcaatttcgagcgtgtcgctatattacgggactatatcagacatccgagtaaaaagatattgtcgtttgaatttgctcagagcttcaacattcaatttcgagcgtgtcgatatattacgggactcaatcagacatccgagtaaaatgttattgtcgtttgaatttgctcagagcttcaacattcaagttcgagcgtctcgttatattatacgactcaattagacatccgagtaaaaagttattgtcatttgaatttgctctgagcttcaacattcaatttcgagcgtgtcgatatattacgggactcaatcagacatcccgagtaaa

SEQ ID NO: 83595 - DNA, 358 bp, Glycine max
  unsure (1)..(358): unsure at all n locations
gagacgctcgaattgaatgttgagctttgaccaattcaacgacacaaacttttactcggatgtctgattgagtcccgtcatatatcgagacgctcgaaatngaatgttgaacctctgagccaattcaaacgaaacatcacttntactcggatgtctgattgagtcccgcaatatattgagacgctataaatggaatggtgaagctntgagcaaattcaaacaacaataactttttactcagatgtctgatggcgtcccgtaatatatcgagacgctcgaaattgaatgttgaagctctgagccaattcacacgacaataacttnttactcggatggatgatngagtcccgtatataac

SEQ ID NO: 83596 - DNA, 457 bp, Glycine max
  unsure (1)..(457): unsure at all n locations
ctcacaagatgatttttactctaatgtctgattgagtcccataatatatcgagacgctcgaaattgaatacggaagctntgagaaaattcaaacgataataactttttactcggatttccgattgagtcctgcaatatattgagacgctctaaatttaatatggaagctttgagcaaattcaaacaacaatagcttcttactcagatgttcgattgagtcccgtaatatatcgagatgctaaaaattgaaaacggaagctcctagaaaactcaaacaacaatgactttttactcggatgtctgattgagtgttgtaatatatcgagacgctcgaaattgaatacgtaatctccaagaaaatccaaacaacaataactntttactcaaatgttcgattgtgtccncaaatatattgggacgctaggaattgaaaacggaagctctaagcaaattcaag

SEQ ID NO: 83597 - DNA, 403 bp, Glycine max
  unsure (1)..(403): unsure at all n locations
aatctccgctnganacctacctaaagcgaaatggccttagtagcttgatatcagagcagcaaacaaattcagcttcaaatgtgcaagcacagacaaccaatgatagtgagggaaaacacaatgaggattgtggaaccgctttggttattcatgagagggaaagcagtcctgaagagaacagtgggcaagacagagagcaaaacaattcactctcatgaaatcttgccagttatattataatttttttttccttttttttaactcaaaaatcattttacaagaatccttgcataaattataaaattataggagggtcatttgnatgtctatatttttttttcttggtaatggtnggctgggcttatgggtgngaaattccccccaaactcaatacctatatacg

SEQ ID NO: 83598 - DNA, 125 bp, Glycine max
ttagaatctgttgatttgataaattagggacaacagatacattctatattatagattttacttttaaggacaaagacaattattgccaaatagattattagcattgatatcctaactcgtggtac

SEQ ID NO: 83599 - DNA, 405 bp, Glycine max
  unsure (1)..(405): unsure at all n locations
catagaccccagactcttgcaacaggtgcagatgcagatttctgattcatggcaagctgagttactatgttgaccaaggcattaagttttccctcaagctttttattttcagcaaatgaagatgaatccgtggccacctcatggactcctctaaggacaatagcatcatttcttgcactgaatttttgggagttggaagccattttctcaatcaaattcctagcctcagcaggagtcatatcaccaagggctccaccactggtagcatcaatcatactcctcaccatgttgctaagtcccttatagaaatattgcagaaggagttgctcagaaatctggtggtgaggacagctngcacacaatttcttgaatcttttccaatactcatacaagctctcttcacta

SEQ ID NO: 83600 - DNA, 350 bp, Glycine max
  unsure (1)..(350): unsure at all n locations
tatttctgtatggtatgagatgaaatgccaaggttaagacttgtggttggtggttatgatggaatgagtctaaacacgcttgagtgaaacaatgactgtgaggctttggttgatgatccttccttgatatttgtcattcttactagtgtacttcaattgttactctaatgcatacgttcctatctttgaaaagctgcatgtttgtgaagggcatttgattgaagcattccatgatattcatttcatatgattaaatttttctgtgaaacaaacaccactttgtttaaccactggtatttgtcactcgaggacanagtgaattgtctttctttgctaaggacaagcaaact

SEQ ID NO: 83601 - DNA, 376 bp, Glycine max
  unsure (1)..(376): unsure at all n locations
ctatctatggatcttagctcattagagaatggtttgaaagcatccgagcatacattgtatgtcttcattttctttcatagagaagagttcatacttatgagtgaggagatcgtagttgtcctctttactcgtgacgttccttcatatgttacatacagagtgtctcacatttgtttggcacttctaaagatgcgtaccttggtgtattcttcttttgaaagatcacacaacatcacattctaagccttggagttagcataaatctgagtctttgttcctccatccattgacctctangaatntcattcagttcatcatcatatggaatataatcccccatttccaccacatccccatagatctgatgaatcaattc

SEQ ID NO: 83602 - DNA, 438 bp, Glycine max
  unsure (1)..(438): unsure at all n locations
aatgtcaagagtgggtgttgtataagcataacaagactttctgtgataggtttaaagataccatctttgcatgtgagaatgcttcagaaacattaagaaagctagcagataagcctaaaagaaatgatataacttggcaaggatacgacataaacaaagtattcattttacacaaaagcacaagatgagaaaagtacaatgcagaacagcggggtcacccttacgggctgaatctcaacacttcgcaagtgtgaatgacaccaatccctgtgtagcttccatcccttactttgggttcattgatgaaaattgggagcttaactatgtgaaatttactgtatgtattttcaaatgtaaatgggttgatagcaacaccggtgcgcacaccgatgatatangaattacattggtagacctaaagaaactgggtaccacaac

SEQ ID NO: 83603 - DNA, 400 bp, Glycine max
  unsure (1)..(400): unsure at all n locations
tgcagctggggctgtgtttcgagtcccttatttttgtnttgaaatgaggggaaggtgttgggtgaagaaaactctcccctcccctttttttaaccattttcgtgcagggggtggctccccaggtgagctaacctgcattttttttttagggatgacataagtatggctctctacgggtcggcgttcgcttactcgaacccccttaagggtagatgagacatccgatacttaccttaaagacaccttaacaataattaatgggagtttaaaggatactcggctatccctcagcttgcacttccgcttgtccagtgctgggcatgtggtgacgatctattgatcgtgatcctagcctctacttgcgtccgtccctaagtacctgaaagtaggaaatgacatt

SEQ ID NO: 83604 - DNA, 462 bp, Glycine max
  unsure (1)..(462): unsure at all n locations
ctctgcacaacaacacaaaaatatctagtgatgttggtatgatctatgccataatctttaaccaagaattagatccagaanaaccttagaatggattgaaatatcaaaaaccatcgatcgaaaaattgcgtatgaactccacgatgaactgattgcattggtgctttactttgaatctttcatatagaactagaaccatcatagtttcctcatccaattcggaggattgaactcgttattctagtgtgatgccaatggttctcattgaaaaaattaacagttgaagtttgtcctttcatgctttntatgattctggatctatggattggtaatgacaaaactgcatcaagattatgcgctcatcctgttcactagttcaccagaaactccttcacgagcatttgcaaanaaagaggagcanatacgagaagaatcagatctagaatggaaccaaattagatt

SEQ ID NO: 83605 - DNA, 301 bp, Glycine max
  unsure (1)..(301): unsure at all n locations
tctttctggattaaactngtgagcatcaggcccccagagttgagggtcttggtgcagcactgagattggaatctgaatattcattccttttggaattaggatgccttttaaattaacaccttggagagctgttctaacaacaaaggctgctggcgaataaagcctcaaagtctcttgaatcaccatggtcaactgcaagtgtaacattnttatatatggccttcacagatcagtaagaatgctcatgaaacttggaaatgatcaactataattacaataaaanttgaggcacanaaaaatc

SEQ ID NO: 83606 - DNA, 271 bp, Glycine max
tcaaaagagaacccggatcccacacattattcaggaaatgtaaaaaccaaagttgaattcaaatgaggtcaagtgttaccatggaagtatacacccatgtgctctcacaaggacacagcatcatcgatggcaaaatgtgactcatatattattttccctttatattattttatttttgggtgacaagggcgcctgctctcgtatctcagtgcatgaaattaacctctagtcttagctgaatgttggtaatgattatgtttgaaattattta

SEQ ID NO: 83607 - DNA, 145 bp, Glycine max
tattaatataaaacactactaataaagagtttacggaaaaaaagtgcaaactccggagttatactggttcggcacacccttgagctacggcagtcccaagcacccgttgagagtccactatcttgtaaaatcctttacaagttct

SEQ ID NO: 83608 - DNA, 299 bp, Glycine max
  unsure (1)..(299): unsure at all n locations
gcacactgtctggaagcattctctttgtcaccaagcacaattccttacgaccataactggggttcatgaagctaagcgccattcatggtagctaagccgaattccttacggcaatgtgagcgctaagcgagtccttatcagctaagcgcatgctcctctgtacttaagatgcatcattntagctaagccagccattgccttgcttatcgagagttgcaacttttcggatctacaaacctcgctaggcagtcttatcctagcgctaagccaagcatgtgtgttaaaaaaaactgattttg

SEQ ID NO: 83609 - DNA, 341 bp, Glycine max
  unsure (1)..(341): unsure at all n locations
ctcacgacagaataagcatcttttattngcttccaatgaacacatggaataattactgtgaatctaaaggatactgggctgctttacagcagcactttacgcttgtcctacgctaggcataggacgacgaccctactggcgcaaccctagcctctctttgcgtgcgtccataaatacctgaaagtacgaaacaacgaggtgtggaaaatctcaaccgcgtcctcgtcttaccttgattggattttgcgtttaactatgtctcgacccctaatggtagctcgagatgatacttgccctattttaccacaacaatatgcatgcgtatgcatatgcatgaacat

SEQ ID NO: 83610 - DNA, 416 bp, Glycine max
  unsure (1)..(416): unsure at all n locations
ttaagaattcttctacacctttntctaaaacaaaaaattattgtttgaaaataaccttgaaaatagataacagttttcacaaataaagactcagacgatagaaacaaatatgtgttttcagacaatatcagattcaaaccctaagtcaatttaaacatagagagtaaacaaactatcaaacacagagatatataccggtttgtctcaaccaccaagactacgtctagttcatggtaaacaccaagttccaccaactttgtcaaagttacaagtatttatcactcccacatatggctttacaactcaagctttacaacaatcttgaaacaacccagtattctttgtcctaccaagccactgttagctctaaataaatcaaaagatttgaagtttgtggctcactgacttattcttaa

SEQ ID NO: 83611 - DNA, 470 bp, Glycine max
  unsure (1)..(470): unsure at all n locations
atccttaagtcacctgcngctgcagctttaatgggggttaatattcttatgtgtggaaagagatacttgcatgaactatgtgagggtttcctccagtttacttgttcttgactagacatgacaattttcctagacatggcattaaaactactcccatgttcttgacctataattggatgaagtttgtagccttgattggtgtagttctggtagttcccttgcctttggtttttcttgtattgaacttcctcctgaatcatgccatactcatttgttgcatggcctcctccacaagattcacaaacaaaacattaagtctaggagtagaggtagttgattgcaacctgaattgctaaggaagatcaatgattngctatgtaagctcttccattngcctagtgagaagnttatgttttgctaagatacgatcttgggtattaacttctagcaatctattngatggaactatg

SEQ ID NO: 83612 - DNA, 454 bp, Glycine max
  unsure (1)..(454): unsure at all n locations
cttcagttgcggngacagtcttccgtgttcttaactatnnggtgtgttgcgatgttgggctgaggcaacgtgctgggtgccggcccttcggggattgggggatagaactcgacatcccttcgagcatagtcttgagggtctttgtggacttcttcgggctgttgaggaggctctctttcaaggacgggagaagcaatatggcccgcatcgtcttgcaagacgggtggtgagtagttgggcggcaatccataagggtaagccgctcggttgtatcccaggtgagggctgccatcgtgccccagtgtgtcccttccccgtcctactatgnttgagggaggatggtgcgcagttgccaagagagttgggtctgcttcggcagccgaactgacagcggcagcggtggccgcgttcttttccatgagctgcctcanttctaacatggcctncatcatgg

SEQ ID NO: 83613 - DNA, 446 bp, Glycine max
  unsure (1)..(446): unsure at all n locations
agcttcggtntaaaattcgagcgttacgatttattacgggactcaatcagacttctgagtgaaatgttattgtcgttggaatctgctacgagcttcggttntaaatnttgagcgtctcgatatattaccggactcaatcggagttccgagtgaaatgttattgtcgntagcatttgctgcgagcttcgattntaaatttcgagcgtctcgatatattacgggactcaatcggacttccgagtgaaatgttattgtcgttcaaatttgctacgagcttcgattttaaatttcgagcgtcacgatatattacgggactcaatcggacttccgagtgaaatgttattgtcgttcgaatttgctacgagctttggttttaaatttcgagcgtctcgatatattacgggactcaatcngacttccgagtgaaatggtattggtcgtagcat

SEQ ID NO: 83614 - DNA, 384 bp, Glycine max
tccgtagaatatctagacgctcggactttattaccgacgcttcgagcttatattggcgagaatgacttttcactcggaagtcctattgtgtgccggaatatatcgagacgctgcgagtttagaatcgaagctcgtagagaattcgtacgacactaactcctcactcggaagctcgatcggtcccggatagatcgagacgctcataattaagacccaggctctcatagacatataacgacaatgacttttgactcggaaggcctattgagtcccggaatatatcgagacgctcgaaatataaaaccgaagcacgtagcaaattctaacgacaataacatttcactcggaagtctgatagagtctcgtaatatatagtgacgctcg

SEQ ID NO: 83615 - DNA, 458 bp, Glycine max
  unsure (1)..(458): unsure at all n locations
ggacttaagcacctgggctgcagctttcaaaattcgaaggcatacgttttacacagatgtccaattcggggtcataatatatcgagacgctcgaaattgaacaacggaagctctcgagaaaatcgaatggtcataacttttcacacgaatgttcgattcggggacataactcatctagacgctcgaaattgaacaatggatgctctcgagaaattcgaatggtcataagttttaacacggatgtccgattcgtggacgtattatatcgagacgctcgaaattgaacaacggaagctccggagaaatttgaatggtcataacatttcactcggatgcccgattcgggaacataatatatcgagacgctctgaaatgaacaccggaagctctcgagaaaatcgaatggtcataagttntcacacggatgtccgattcggggacatactcatctacacgct

SEQ ID NO: 83616 - DNA, 490 bp, Glycine max
  unsure (1)..(490): unsure at all n locations
acactatgaatactcnnnnnnnnnttaacaagccactacacagcagccccatgatattatcataaggatgcacagaccaaagttgcgtatgtaaaaaaattgtatgaccaagtgaatgtgcangatgcatagaagaatgacagctatgccgagcaagcccaacagaaaaggaaggaagtggtacttgaacccggtgatgatcttggacatttgaggacaaatgttttccaagaaggagggaatgatgagaatcatgaaacaggccaaatacagtctaaaggcccaagtggagaacgacgatagcccaaatggagaaggacaaaacccccgagtggagaaggatgatagcccaagtggagaacgatgaangcccacaggcatagacactatcatgactattaatggatactgaaggccaagattaatttgaatgcccataatatatatgttctatctagatataattttgatgaaatttggcgagagtttc

SEQ ID NO: 83617 - DNA, 351 bp, Glycine max
  unsure (1)..(351): unsure at all n locations
gcattactctatgattgatttcatattacatctcaatctctaatagtagccaataccaaaaaataaaatggtcgagaagtgtgggaaacacgccttaattccagccttgaggggtgtatttattcttacattgcctagagatatggcttgaataaagcatataaatcttgggtaattctcacattacaagccaattttgtggggctgtattaggttctgagcccaaactctaagatgttttctagatccattattggtcatctgcattgccacgctccaagcctgatagaggactatccaaagaggaagagnttggctggggtgggctaacatggatgaaccaatcacttg

SEQ ID NO: 83618 - DNA, 453 bp, Glycine max
  unsure (1)..(453): unsure at all n locations
agatgagtaccttagattctatcttcttttatttgagggtgcacagngtatagagagctacatagaccaatggggttgccatttggagttggttgtgaagcaactgctcaagaccgagtgcaggctctcagctattgtctttgagaaaatcggtccacaagcatggatggggtgttttgcaaagattgccattgaatcangaattctttcttttattcaatttggaaggattgttactgagaggaagaatgaccccttcaagttgttgaacctgctgtccatattcaaggtcttaaatggtctaaggctaatattcaaccagcttttcagtgtgaaagcttgtaaagaaattaggactgtgactgaggatctcataaaacaagtagtcaatggtgccagtgaggtattctggcaacttccagcacaagttaggttgcanagaccgactttctc

SEQ ID NO: 83619 - DNA, 311 bp, Glycine max
  unsure (1)..(311): unsure at all n locations
agcttgcgaatggaagcatagatatctctctatcgatggcagaataaccctcattaattntgttttaacagccttacccatttacttgctgtcttttttcagaatccctaaaaaagtggttcacaagatagtctctattcagagaaactttctttggagaggtggcaatgaggcagcaaagatcccttgggtcaagtggcactactaaaaaaaaagctctctacatcgcccaattaacatcggttatagctaaaaccgatgttagcgaaagcgtagtggcattntgtaaataagtagacttagttaacatc

SEQ ID NO: 83620 - DNA, 453 bp, Glycine max
  unsure (1)..(453): unsure at all n locations
aaatgaggaaggtggaaggtagacttcctacttttattcggtgaccacagagtggtacctggagatatgtcgcgggggtcaggagaccttggggacgtcaggtggggtgctattgcccaaaaccaagcttgaccaatcccgacccaacccgggcatagtcagtcagtgagaacctgtgatgtacctaaacaggcgagctcctggcagtcaaccgataaaagaacaaagaccacaaagcaaggaggcttgtgtggtggctggccagctgtgaatcttgagtgatatatgggatatggccactggtaatcgattaccaagggtgggtaatcgattacaaggcttaaaaacgagatcaggaagctaagagggcttctgctaatcgattacaaaggggcgtaattgattaccaggcttagaaatgggactgngaatgtgaaggggcctctggtaatc

SEQ ID NO: 83621 - DNA, 389 bp, Glycine max
  unsure (1)..(389): unsure at all n locations
tctaagatcaaaattcaaagatagtatcaatagttgcaaaaaagagctaaatgagcttangcatagagatgataatgaatctgtcaaaaaattcaaccgtattaaggatgagctttcaaggtaggtagttcgtgaggaagcattttggaagtagcggtctaaggtttattttgcctctgtgatggagacaaaaatacaggttctttcatgcctccactactagtagaaggaagcacaatcgtttggagaagctcaccatagatgatggcattgttgttacctctcaaaaagggattaaagcaacgtgcgaggactacttccaaaatttatgaggatgacttggtcattgaatttgtgcaatgcangaattatgaggatgataattatta

SEQ ID NO: 83622 - DNA, 109 bp, Glycine max
ccaatttccgaaccaaacccaattggttattattctcttggaattaaattaaaacaccttattagtccagtagggcccaatggataaactacattattaatttaacaat

SEQ ID NO: 83623 - DNA, 392 bp, Glycine max
gacctaacactttttctgagcttaacctcattggctctcacagtctttagaattgggagccaatccaatccttgtgttcgaactctcagccacttatgatagccgccgatgatcccattactgcttcccctaagctctctgtgctttcttcacgccgcatcacatgccttgcgaactccttggagtacctttgcattggggtcactcgaaccccgtgtaatgaaaggcgtgatgctttcatctaatggcgctcctctcatggggtagccaagctgtcttatggcgaggacaggattataatttatacaaccccttgttccgattaagggaacgattggaatccttccatgaagaagaatctgatcttctttctctacaagggaaccaataca

SEQ ID NO: 83624 - DNA, 385 bp, Glycine max
  unsure (1)..(385): unsure at all n locations
ctacctgattatcctggtagccctttgttccttgttcccttcctggtttgagctcactacagccttagtgaaaacctgatttaccatatcttaggaatttggagcttggaattgtttgggaataagtgggggggttttgttcattggacacttgtttgtggctatcttatgatgattttgggcatacttgatgacattgatattggtaaatgttnacatgctgaagaaatgttgttctcaaagccaagagtaaaaaaataaaaaaaaaaatcgaaaataatccaaaaaaaaaaaaaaaaacaataagttgatgaataaatctaaatggccaagatgatgaactcttggtctctctcatgttaatcttacttactcgttatattct

SEQ ID NO: 83625 - DNA, 305 bp, Glycine max
aacttcttgcgctactcaatggtgtgaaaaactttgtaatacttatcttgattgagtcttcgctggattcttgaatcttgagacttgaatcttgatcttgattattcttgaatctttatcttgaatcttgattctttaaacttgacacttgattcttgaatctttgcttgaaactttgcttaactctcgattctttggcataatcaaaataacccttggaagacattgcttccacacacagtttgcaaaacataatctatctacacagtgcagataaatttctttggtaatgtttataagataaa

SEQ ID NO: 83626 - DNA, 460 bp, Glycine max
gtgtagaaggcgaaactcctcttttattcgttactcacagagaggtacctggagatatgtcgcggaggtcaggagaccttggagacgtcaggtggggtgctattgcccaaaaccaagcttgaccaatcccgacccaacccgggcatagttggtcagtgagaacctgtgatgtacctaaacaggcgagctcctggcagtcaacagataaaaggaacaaagaccacaaagcaaggaggcttgtggtggctggccagctatgaacttgattgatgtgtgagagatagcctctggtaatcgattaccaagggtgggtaatcgattacaaggcttaaaaatgaagacaggagactaagatggtctctggtaatcgattaccacggcgtgtaatcgattaccaggcttgaaaacgatgtcaggaagccaagggagcttctggtaatcgattactacgggatgtaat

SEQ ID NO: 83627 - DNA, 315 bp, Glycine max
  unsure (1)..(315): unsure at all n locations
actccttaatgctaaattcattagagacatcagatattctacttggctcgccatcatcgtcatggtcaaaaaggtcaaaggcaaatggcgaatatgcaccgactacactgatctaaacagggcgtgccctaaagatgattaccctctgcacaacatcgaanaactgtggaaggaatgccttccaagattattttgatgatgccaaagaatcaagtgtaaaacaagtttcaagaatcaagatcaagattcaagattcaacgtaagtatcaagactcangagtcaagaatcaagagaagactcaatcaagataagta

SEQ ID NO: 83628 - DNA, 338 bp, Glycine max
gagtacgtgagctcagatggaggtgggcaacaggggatggtgggtttatgcgcgctttgtggatgtgaaaaacttgctgtgcaccatctgccgaccgccacctagtaccacatgtgatgggtaccccataatcctacaagcttgagatgacgaagtgttgaagggagaaacttcctgcttttattgttgaccacagagtggtacctggagatatgtcgcgggggtcaggagaccttgtggacgtcaggtggggtgctattgcccaaaaccaagcttgaccaatcccgacccaacccgggcatagtcggtcagtgagaacctgtgatgtacctaaacag

SEQ ID NO: 83629 - DNA, 408 bp, Glycine max
  unsure (1)..(408): unsure at all n locations
ctttataggttaggtgtggtcattaaaaacaaggggtacggtggtaattaacctacttctacgtagtggtgaaattaacttgtaggatgagtaatgggtgattcatgagaaactaacctaatgttatcataatcatatctatgtacatatatataagtgttaatgatcatcttaaatttatgtatggtgttttgcatataatagtagaatttagcttggtaggttccttcacgattngaaattaattgcatgaccattntctctgagggctcttaattagctctcataacagcacggtccttcaagttgtaacaaatgtttctctgtattatcattctcttttccagcaacgagaaccgagtatattcgacatgttgcatggtaacctcgtttcattcacgcacacta

SEQ ID NO: 83630 - DNA, 395 bp, Glycine max
  unsure (1)..(395): unsure at all n locations
agggttcttcttccatatggaaagctcgtttctttacactttagaaattggtttttgagagcttagcaaatgagtagtgaaaggggaaaccctttgaaaaaaggaaactgtacgatgagagctctttctactggtttagttcattctcaatcaaacaaatttgtgtaattgaaggcaaacaaaacaaaatacctgatcgaaagatgcaatttctacaccttcaatttgcaagccatctactccattgctgtcatctgcaaaatggtaaaagcatcctaaattattttaggggataaaattcagataatttgacagtagaataccactntagtagtgagtgcataatcaaaatgagtttatcatcattcttgatatgaaattaaatcatttatgat

SEQ ID NO: 83631 - DNA, 344 bp, Glycine max
  unsure (1)..(344): unsure at all n locations
atattccaatatttaaagaaagagaaataggtgacccatattataataaaatattttttataatatatgagttcatatttttttcaaaagtaaaaatatcaaatatgtattttttgtatttttatttatttggactacaaatgagataaaatggtaataggtgacacatattatcattcgaatattttttcattaattttatatttttaaaataaataagttttcataaaagggagaaaaatgaatgcatattagttttcataaatttcattnntaatttattattctaactaaatatgtgtgtatatacctataggacaagatggatataaaatcctcatact

SEQ ID NO: 83632 - DNA, 425 bp, Glycine max
  unsure (1)..(425): unsure at all n locations
taaaccactaaagttaattacccctgatatcagagacgctaatcactcaattntgaatcataaagattcctcaataaccgagaaacccaaattaaataaaaagaaaaaacaacaatcttgacatgcgatcaataaggcctttgagctttgacattcaccaagaattataaatgaaaaaatttcaagaaatcgatgaaatcaaagacactaataaatcacaataatttctcagaaacaaagaaaccaaaactaaattacgaaaatgaaatcatgatgctagatttaaaaggtctttcacttgtacgaaaaatgaagccggagaaagtgtaattccggaacttagtgagaagattgagaaaaacagtgcatcngtttaatctcccaacaaatgtgacagacatgcaacatgcaacanaagcagaact

SEQ ID NO: 83633 - DNA, 446 bp, Glycine max
  unsure (1)..(446): unsure at all n locations
agctntagtggctcttaatttgaagcaatatttgacattcncataatgtattccctgacattntctttaccttgataattcatggaaatcaagttctgaaggagagtacttgtttttgcctcatcgctnnttgcaaagcgcttttcaatttcaacaaggaattctttggcactagttatataatctgaaacagtgcccctaaagacctcaggaatgtcatgcttaatgatcataagactcatgcaatttgagtgatctcacctctcatgaagtttcctctggtcagaggtactggaattcgtaggagaagggggtttctcaatcctaatgtaatgtctagatccatgcagccaagaacaattngcatgttctctttctagntccttaaaattgtaccattaagacctggaatcgaattcagattagcagatatagtagcaacaact

SEQ ID NO: 83634 - DNA, 454 bp, Glycine max
  unsure (1)..(454): unsure at all n locations
tgctgcattcactaataatgagttggtcactgtttcgtcctgagaataacaattggtgaccacaacaacgctagaggtggtaaaggacaacggtctttcaaataaacctgttgtgtgtgaacaaacattattaactcaaatgaaccagggaagtgattgcataattcttagactaactactttcaatgtacctaaacaaaatgatttccaaacacgtgaccgacacatatcatgcgatgcacagaagaatcgggtggtagttgacttctaagaggaaaaaatgtcatgctttgttgtcgagacaacaacacaaggattacgttataccgtgatgcaatgacatatctcatctctgttatatccatccacttgtccacactaacctgaatcaagcanacatacacatctaagttatttaaagttngttcttaanaaaaataacctaaaaaaatac

SEQ ID NO: 83635 - DNA, 425 bp, Glycine max
  unsure (1)..(425): unsure at all n locations
gtcgatctcacatggntgaagcatttctacaaaacagtgtgaccctaactggtcttcctatgattntacctaatgagagtgacctgacttactaatgtgtggtttggcttggcatgtacttctaggagcccgatgaggtttttcactagcatggtaccacattgcatatatgattgagtcttagtgtatctatggcataacgcctgtgtaatgatcattgtgactngttatataatggtgtgtaatgaattgtgtgtgagatgcggtattatatntacgatgtgttgtcttgaatatgagattaatcgtgtgtcataccctaatttcatccagggactattgtttgatggcatgcaacctttggttgaccgcttcgaggtacttggcacccttttgtgcacaatacgttgaagtccgagacatgt

SEQ ID NO: 83636 - DNA, 423 bp, Glycine max
caattctatggcttagtcctttatgaaagactgggtttgaggcaatatgaagagcagcctgattatcacaatacaacttcatttgcaactcttcacaaaacctcaattcttgcagaaattgtttaatccacatgagttcacaagtaaccatagccatagatcaatattcagcttcagcactagaccgagtgacaacagtttgcttcttgcttttccaagagataagatttcctctaatgaagacacaataacctgatgtagacctcctatccatgggacaactagcccaatcagcatcacaatattccaatagttgcgtattacccttgtcttcatacaacaatccttggtcaggagctctcttaacatatctcagaatatgcatgacagcatttcaatggtccaaatgaggattctgcataa

SEQ ID NO: 83637 - DNA, 342 bp, Glycine max
  unsure (1)..(342): unsure at all n locations
tgacctttattctcttagggttcatgggaaccccttgatcacaatttaaaaaattaagaanagtaaagcaatagaacatacctttttctgtattttcatgttgattattcctaccaaaaagtatgacaaacctaaggtgtcccatatgagtgcctaagtttgtattgaaactaanaataagaaaaaacctacctaatgagtccctatgtacacaaatcatgaagatgttgggtgcacgagtgattntacaaaagagtgttgcaccacccanaacattcatcacaccacctattntagggatgtggtgcctaataatacctattttgggcaccaacaaagcac

SEQ ID NO: 83638 - DNA, 422 bp, Glycine max
  unsure (1)..(422): unsure at all n locations
gaggcagatctgatcatatgctgtgataatgccaaaaaactagggcaaatgaagagggtgagaatgagggagaagcccatgctgtgactgccattcctatacagccaagtttgccaccaacccaactatgtcattactcagccaataaccaaccttctccttacccaccggccaattatccacaaaggccatccctaaaacaaccacaaagtctgtctaccgcacttccaatgacgaacatcacctttagcacaatccanaaacaccaaccaagaaatgaattntgcagcgagaaagcctggagaattcaccccaattccagtgtcctatgctgactggctcccatatctacttgataattcaatggtagccataancctagccaagggtcatcaacctncatttctccgagaatacgactc

SEQ ID NO: 83639 - DNA, 392 bp, Glycine max
  unsure (1)..(392): unsure at all n locations
gctatcacagcccagcaaaagcagagcaaaggcagaaaactctgctcaaacaccaaccaaaatcacagcttttctcacttaaagaccacagtaacaatttcttcgatccaattcgttaaccggtggatcgactccaaaattttactggaagtctatagtgcataagcctacattgtgaccgttgggatctactagcaaacatcaagaactcattctgtactactctttccacagccaaccacacataagcatttttctgcacttgtgcaaaatcatgctgcacaatttcacagcaaaaatctgcacaaagtgcagatttcgaanatcacacttnctctcatncaatcttgcccaaatcacttnctacaagtnccaaatcatgcatcaatcat

SEQ ID NO: 83640 - DNA, 456 bp, Glycine max
  unsure (1)..(456): unsure at all n locations
nnnnaactctttattagagttaagaattctttaccgttacatttatttgtttattattttttctatttagtttgaggcaaaatgatatattttcttgtactaatattccaattttctaatattgcaatttcactcgcagagcaaatatggcacatgctcttatcatgagtttcgaaaagaatatcacaactacaaaaagaagcttctacatcggttgaaaaccggtatctacgacgggccccacaccgtctttgttccagatgtcgttgtatgtcgacaacaacaacatcggtcatcctaggacccgtctttgtaatgcaagaatacaacgtcagtggctataaaagaatagacgttataaaaaaggattcaacgacgcacatattagacaacccgtcgttggtttggtccatttcaacgtcgggttcgcaagacttcatcgtttgtgtgtccata

SEQ ID NO: 83641 - DNA, 369 bp, Glycine max
  unsure (1)..(369): unsure at all n locations
gcatagcatggggtgaatcaatcatgttatatagattctcaacattcaatataaatccaatgccattaccaacataccaaaatggcaaagaagtcattatcaccagctatcaactttgacgacatactagtcttggcacagntaaatagtgaatcctttcccagcttttcaacctaacatcattggcgttcaaatattctagcaatgacatctagtgacaatcaaaggagagaagagaccagaaaaaaaaggttcaacatcctgattacttaagcttaaaaaatatgcatacaaaaaataaaaagtttattaaggagatcttaccttgacatctagtttttcttctacatanttacaagcctctcacat

SEQ ID NO: 83642 - DNA, 301 bp, Glycine max
gttattcattaaccactaaaaacatggcagaagaatggcttactggtgtctccattggtaattacaccaagtgcaccatccacatatacaagcgagacacaataattttctttaatgatgaagattggcagggcgttatatcaaatctaagacccaatgacaatgtggagaattttgtagttcttgtcatggattgacgggtgtgaagacagctctctatctaatatatgatgatgagtcaatcactgtgaaaatggagccatcacctaatgtgataatggagtcatcgtctacatgaaac

SEQ ID NO: 83643 - DNA, 338 bp, Glycine max
  unsure (1)..(338): unsure at all n locations
ggtcagcttcttatgcacttctctctctctcgaaattgctgaggaaaattagntccgtgaagaaaattcaagccgaggcgcttccgtaacgtttccgtgagtaattatgtgaagattctcgaccgttcttcaagattcatcgttcggtcttcgctttcttcagtcttcaacgggtaagtacctcaaaccgagcttttcaattcattctatgtacccatggtggtccacattntgtgtcatgtattattattctcggtttcattcgctttttatacccccttttgacgtgcttaagccatttatttaagtcatttcctcgcttgatctnaaaataaaat

SEQ ID NO: 83644 - DNA, 279 bp, Glycine max
  unsure (1)..(279): unsure at all n locations
tctganggtaccaaggctgtcaccaagttcactagctcttgaactgactattatgccccttcgcttcgatctaagtgtctcttgtaggaatatgttctatgtngaagnggtggtttattntttctttttggtgaaagcaatttgtacgtgaagaatatgggatttgtgatccttctttgatggattagttgcaatacagagacgatattattcctatcatatgttgcttgagtaataattcttcttctttcttttccanngtttatttattttattact

SEQ ID NO: 83645 - DNA, 303 bp, Glycine max
gtcccttggaatctacttcgaaataagaaaaaaagttgaccaaccctttaaatcagttgacaaataactaatactaattaaaaatacctagtgttttattttgagcgcctaccattatgccattacaaaagagcacacttgagagagagaagatatgtttgggaacatgctttttcgaagaaaactctattttatagggttaaaacatttttctctgtaattagaatcctttttcatcttattgtgataatattttccgtttaagctttacaaatatgttaatttatttttaacagattatct

SEQ ID NO: 83646 - DNA, 458 bp, Glycine max
  unsure (1)..(458): unsure at all n locations
agcttccaaagagctncataacatttaagatcgttctcaatatcattctagctcggaaccaatacatattcaaaacaacaaagtatttcacatcatcaaaacagagaaaagttccaaatgaaccacgtttaataacaatcatcatcttcaacgcgggagattgcaacagaagtaacgtcagctatcaatggttctgtcggttcacctatattgaaaaataaaagttagaatataaatatttaacttgacaaatttaattcaatctttaaaaagaataccttcatcatcagactccatttcagtgagtaaatagcattttcatttcccacattagaattaaaattacctatcaatataacacaatataaacaatgacaatctttaaaatatacaaaattattaactaattcagatacattcatatttaaatgaataaagtaaaaaattacccgagttct

SEQ ID NO: 83647 - DNA, 492 bp, Glycine max
  unsure (1)..(492): unsure at all n locations
cttaagcaccgagctgcagctggttgcatatgcacatttctgttttttattaacctggatagcaaggggatagttagttgagaattatgtttgatgacttccttatccttggatttctcagtgtcattgggtgactgagggttgtttctctctcttataaccttaactacagctgccatatgactgcttcctttntgaaactcattgaggatatcatatagaggcatatctgctggaaccctggataatttatgaacaataacttagttcaatgactgagttagaaagacaaaatacaatggcaccattggtcaaacctangaattctccggatggaaacagcactaactggagtctctgtttcagctcttacagtaagaaggttttntacctagcannataagagtggcaaaatggttttagcagctagtaccagacaaatatttcttttaagcattntggatacactatatataaacactcactagtaag

SEQ ID NO: 83648 - DNA, 477 bp, Glycine max
  unsure (1)..(477): unsure at all n locations
cactcaagctngagcaatgctntgagacgatatggtgtataactntgggaaaagctatgctgtcactcccctgagccaatataatttgaacctctgggataactatggtcaacgttgtatgtggtaagtagtataatttttctgtccacagatattttcaattctggtactgataattgatcaggacttcctattgtcaaaaagattttcaggaagtttggttcttcggggacattacagatntacagcgtctaacaatattgaggttagctagtggtgtgctgctagtgaggaggtggtaaacgctgcctgccgatacatgacagtagctgattaagaagcctcatcttctggtttctatctcgaagatatattgtttatggagttaggaaaatatttatttatgttatagttgtagctgcagcagaaacttgtacaggaaattctcgtgttatagacgtgctctgtaatataaaa

SEQ ID NO: 83649 - DNA, 456 bp, Glycine max
  unsure (1)..(456): unsure at all n locations
aagtcacctgangcatgcaagcttatattgctntagaaagacattaatgtatttcgttttatgtgttattattaaatnggcgtngcacagctatgatttaacaatcaccaatgatcttgtaaacttttagggctgtttaattgtcaagataaaatggtggataagaaagctgtatcaaagtaggcaaagatataagcttgataagcttttgtcttatctagtgtttcatacgtgtcatataacatagtaggtaagaatataaattgtatactaataaataacccttatgaaaggagggttatggtgatggcggtaaccacggcaggggtggtagttgtggtatacgtgggaaagtagtggtggtgacagatgtattagtgggagcatcagacaaagaagaattatgtgcaacagttaactcctgattgttagttatatttttcctaagtgttatta

SEQ ID NO: 83650 - DNA, 452 bp, Glycine max
  unsure (1)..(452): unsure at all n locations
gttgtaagactgacatcaactttcatactnctttgttattccttataatgaatgngccgcctaataagtagtgtctgaatttggatagagcctcantaatagctagcatactccttggtataaagctgatatgtttctgcattctaggtgccaatttctttgaaaaataatctattgggtggtcatctgttccacactgtttccacaccaatacgctgatgcatcaggattccagaataaatggttgagaataatctggtagtgataatactggagcctgctccatggcttctttgagcttgacaaatgctgcttctgcttcattatttcataagaaactgtctttttgtaaaagatcaggtcaatggtccaacaatattggcataatagtttattattctttattaaagcctgtttagcccataaatccccttaactgctgacattatttg

SEQ ID NO: 83651 - DNA, 502 bp, Glycine max
  unsure (1)..(502): unsure at all n locations
cggaccttaagcaccgcggctgcagctnnttaatttttttaatttgtaggttcatatgaactatacatgactatagactctattcatggttagcattntttggattaaatttcaatcttttgatcggatctcccatattctttatagtttctatcaagtattgtgtctattctcaaactagccaaagaaaattgaataattttagttaaatgatagcataaattgtaactaaccatgaccttgaaaattaaagggtacctgaaagtgaaactttcctcactctctctagctatttttattttgaaatgctacttaattcaaggaagaaagaagcacataaagttgtatatggaatgtgttgcaatgtggaataagcctgcgatagggtgagacttgtgagaatgcatagccctaaattctcaacaattacagtaaccacctcgtgaaggaacaacagctctttaatttcaccattcatattttaagttgatattttcattat

SEQ ID NO: 83652 - DNA, 485 bp, Glycine max
  unsure (1)..(485): unsure at all n locations
tgaatagaacaattctaaaaacaatanaatccncaaatccattgttaaaactctaattctaaaataaactcgtaaactgtgcagcagtagagaaccttgagatgtctctgcttttcccactccccattgatggcgtggatttgaccgagaacctaaaaggtaaagcttcgaaggttgtaactgttgttcctctgctttcatgtgttgagcagcgatgattgataaaaaagaaagtgcatttgtttagtttaagggaaggagtagaaacagcagaagcagcgacagcagcgtgtgacgaatgagcagcggaaagagcggcgtcnagtgttgggtgcggaagtggtagttgtctccatatggtgaaagagaanggtcgagggagatagaaaagacaaagtgggttggtgagagtcaccaagggaataaagataggattattggagaagagtggaattgatgcttgccgtgcaattcacggcatatat

SEQ ID NO: 83653 - DNA, 444 bp, Glycine max
  unsure (1)..(444): unsure at all n locations
ttaagtcacctgaggcatgcaagctntccaacactaaattntacagaaggtacctattactatttatgagaagtaatntgtgaaattatgataaggcacagtttatcataaacaatggttgaatnatgcagaaaaaacatataacccttaagatacacaaagatacatgtngtaattataactgtaatacacataaatcagatacatgtagtaatcgtaactgtaatacacataatgcaaatatcatgaacacaacattagtccacattaagaggtctaaacacatgtgttccaatgcacagacaaccatatgttcaaaacctagagattacaatntaaaagtaaatgccanacagcacanagcaattccaggccgattggtaaccaaaattccagttacagcatgtaaaaatngaagacatgctaagtacttactcatgatca

SEQ ID NO: 83654 - DNA, 414 bp, Glycine max
  unsure (1)..(414): unsure at all n locations
aactcagcttctaatttaaagggaatttttagcccagggtaaacctcaacananacccttgcagacgcttaatgtacaagtgatgaaaatgtttttcggccacagggtaagaaactggaccctgtgcattcaaaaacgtaccatacacgcncttcctanataaatgaattanaaagtcaatgttggggttattaggaatttatgatagcacggatcccaacatgcttcatgagggatcacatccgctcgccactctactaggctatctatacaatttanattgtttttcttttggcctaatatcataacagtgattccttnntgtacctttntttttttttttttgtctcaatacacattntcctttttatacattctgaatacaaaggatntatgaanactaatttttaaaac

SEQ ID NO: 83655 - DNA, 427 bp, Glycine max
  unsure (1)..(427): unsure at all n locations
agctntctcttaagtcctaaaagacatttcattctaagattaactcactataacccccaattaccactgaatccagatttagccttccaactctcaaagccttactctntnttccactcataacaccacattctcactntctaaccctaggttaactctacccttcatctctagcagttttccataagcaatttcagcacacaaacatcacaagcatcatcataaaaaccctataacagaatgggtaagcttgactcacaccaaacatgacaagtttaacatgctttcatcanatctcttcacaaataactatcataaaccatatacctagtaaaactacccatcatatctcccaaagtcccatacccacgagaatcatgtgagaaaaaagtctacccaaacctgagatntcgaagtcccacacgta

SEQ ID NO: 83656 - DNA, 502 bp, Glycine max
  unsure (1)..(502): unsure at all n locations
gcgtatgcgcatattnccttacaatcgttctctagcacaagacactataaaatgcacccatatacaatcaaggcagcttcgttacctagattatttacacgtacttccaaggtgtatttgttacttacatcacacacatctccttggctaaattcacatacatgcatactccaagcattntggggtaccaaaaattgcacctgtgcacatcttggtatttctaatacctatacatacacaaacttcatgatgaatcttgactatctacacaataaggtgctacatctcatgccttttttcaagtttttgctacctaaagccgcatgcaaattcaagcatattttcctttgctgactaaaattgtattcaaattatatatatatnttttggaatatgtctttnttcacataacaatcaacatatntatatatnnatttttgtgagacatttngactaccaaanaatatatatacatacattcaagtacttcgctattcatacc

SEQ ID NO: 83657 - DNA, 478 bp, Glycine max
  unsure (1)..(478): unsure at all n locations
agcttaagaaaaggccacactcccctcaaatatctgattntatgcttaaataggtggctgtgttcgtgctcatgcgcttagcgcaattctgagccgcttagcgcgcattagtgaattttggattagcgcgactntactcacttagcggatggactaaagcggtgcgcttagcaggatggtcctttgctcagcgaacaaggacaggtcatccttcatccagattcttcctcgcgcttagccgaggaatgttgtgcttagcggatggctcgctaactagcagattggcttagcgagagggtgaaaattagcacttcanaacttgccgtaataacttgaaattgagagaaaaatgnatattaaacacacacaatggaagtactaagtatttattacctatctntaacaaaaagtaattacaacactacaaaataaccatanattggaggagtttgatacaatntacacagggtttttacac

SEQ ID NO: 83658 - DNA, 453 bp, Glycine max
  unsure (1)..(453): unsure at all n locations
tcctgcttcttgtataacagctntgcactcttctttgggattcttcttggtatttgctccaaagctactggatgacttctcagctaactgcttggccagntgacccacctagatcttaaggttttttagggctgactcagtactcttatggttggaaatggccacttgcataaactgagctagtgtctcctccaatttggtggtcctctaaaaaatatatggcccttgttgaggtggcctgttggaaggtcctccctgatccttattgaattgattgccagggtgtgatctccattgcccttgctgattatagggaccttgttggaaccccgaanatcctccttggntggatccttgtctctgctgatttcccatgtaatgaacttcctatgtgttcttcaatgggaatggcatgacctgattcatgagcctcaccacacatggtacaacatg

SEQ ID NO: 83659 - DNA, 433 bp, Glycine max
  unsure (1)..(433): unsure at all n locations
tttatccggagctggtgaaagtcttctacacatgttctcatgtcaatttagaaggtaatctcttttctacagttaatggagtagaaatgattatcgatgttgaagtttggaaggcagtagccaaactggacatgagtagagtccaaaagtttgaagaatctactaataggtacaacaagatgcaaactcttagaggtatgatccttgacccacaaggaacccgaggaatcgcctaggtgtaggtggtttaactacagaagacagaatgctcgtgtagctcataacctatattctcactccaaggtcaagtaatcatgcataggtaactaacgatgatctatagattgtgtatgctctacgaattgatatccagatgaattangtactttcgattgaagaaaatcatgtgaagattcgctggctagtttattat

SEQ ID NO: 83660 - DNA, 462 bp, Glycine max
  unsure (1)..(462): unsure at all n locations
agctnggcaataggtgagaaagtgtccaaaatatttatcctngcttgttgngtgtaccctntcgcaatgagacgggccttgtatctatcaaggaagccatctgctctatacttgaccttataaatccatttgcaaccaatggttctcttaccgggtggtagaggttgaacaaccaaagtgttgttcatttcaagggcctaaatctcctcattcatggcttgactccattcagcaaatcgaattgcttgatgatagaactgaggctcataaatttttgagactttaaacacatagtctctgtaagttggagaaaggttgttgtacgtgaggtgattctggatggngtaagtgacattagagacatagtcatgaagatgagtaggtggtctaatgactctggttgacctgctcacatgtgcattgggtagaacatcanngttgggcaagggtctggtctatctc

SEQ ID NO: 83661 - DNA, 487 bp, Glycine max
  unsure (1)..(487): unsure at all n locations
atcgacaatgttntcaatgaaatcatgaatgcatgaatganattgatccaacgttgacatcttcctcttcngtttggttattcaaatgatgatgcacaacgtttaactgaagaaatgttattttgcaccgaatgtaatgcattcacatactcccagtaagacggatcgtgcttcgttgatctttatagtttggtgatttgtttcttttaagccccttttgtttttgaccttttaggaggaacacacatagaacttagatcagggtaggcaatttcccaaagtttactctttaaagtcactctgccacatacatcaagctcttctaaccgcttggatatgactgtcatctattcgcttatgcaaacttcgggcttagataaaccttggtctagaaaacttagcgtcttgcanaacatatggactgtgtcaagtggatgctaccacaacatatctagctagctacatgacatggaagacatgagtagtt

SEQ ID NO: 83662 - DNA, 250 bp, Glycine max
tcaagctttacttatgtagaaagccctgtttcctgtacttatttgagtcgaacgcgagcactgaccactgatcatgctaactccgacgcatcgtttcatgttcgactgagtgagacttatagcctataacatacttccaactactaccttgaacattcatgcagctacaaatgcctcaggtgtgattggataaaaccatacaagattgacaaacgaacgcgaacataactcacgccatcattaccgttag

SEQ ID NO: 83663 - DNA, 417 bp, Glycine max
  unsure (1)..(417): unsure at all n locations
cagcaacatcgcctgctcctcataagagagtntatcatctacattcaacaattgacttactagctgattggaactggtgatgtagtcatggagatcntcctccatctccattttgagttgatacaattccatcttcaaacaatggcgattagttagcgactntaatgcatagatattcttgagcttctcctacaaagactacgatgttgtctccttcaacacattgtgttttatcttgggagcaaagactaactgaatcatgctcacaaccctcantttggtcttagtacactcaatntcatntatagaagccgacctttcatcttgtaacgcctgatcaagaccttctgcaccaaaaggtctggaataatactctaccanatcataaaatntaattttccatcaaacaacaatatc

SEQ ID NO: 83664 - DNA, 271 bp, Glycine max
  unsure (1)..(271): unsure at all n locations
tgaaatctctcatagagaccaacgctctcaatccctctggaaaacaaatggaagaccacgcttatacgtctattccaccttgcatacaggcgtcgcacacaacaaaatatgtctctgtttatcaaaatcctactgatattgcacgatgactgaattctcacaatgcttatcctaatggtgtgtgtctggcgaaaaccnaacctcacaaaaaaggagagaaagtgcgactgcaatacgcagcccatattgacgcgccgcatttacatgtact

SEQ ID NO: 83665 - DNA, 428 bp, Glycine max
ctacattaggggacttccagctgtcactcatggtggaagaatttgaagagatcctacgatgtcctctatggggaaggagaccatacctcttctcagggttttatccctcattagctagaacttcaaagatagtccaaatctctgcgcaggaattagaccatggaaagcaagtcagaaatggggtggttggaataccgagaaacatgttggaggcaaaagcaagatccttggcaggtagaggcgaatgggccccgttcatagacattctcgcactattgatcttcggaggagtcctctttccaaatgtggatgggttggtggatctagcagtgatcgacgctgttctcgcctatcatgaccacaaggaaagcccggatgtcgctatgctagccgacctatatgacaccctctaccggagatgtgagaag

SEQ ID NO: 83666 - DNA, 307 bp, Glycine max
  unsure (1)..(307): unsure at all n locations
tgcaactgaaaaggcttacatttacatgccttggctnggacaggagcaacgattaaaatggatgcccctcattatatccatgatacacatgcataaaaaaatgatgatntggaaactgtatgcaaaacaggtcatgcttgcacctatgtggacactcaacagtccaatngttatggacctgtgatgctagggctcatgattcatatgctctattttgtccacccaacgtaatcgaaagatgttctatgctacagttcgtgcatttatgcgagtccattccggtcgtatcggaaaatctaaaaaggtt

SEQ ID NO: 83667 - DNA, 349 bp, Glycine max
atgtcaatccttaccctcgggagcgaaaaagaatataagggaaatttccaatcaatgaaaagagaaggaaaattttcaatgaaagaggaaataagaacagataggaaattcccaatctaagagtgtgagaaagataaagacaagaaagaaaattcccaaccaaagaatgggagaaagtaaaaagggaatgaagctcctggtcaaagaaaccagagaggtctttggaccagataatatctgaacagtacagaattgtcaccaaatgaacaaaaaggaaggataggaaaccacgacctataatggtcttctccctctaattaccaaccaaaatcccgtgcgctagcgaccc

SEQ ID NO: 83668 - DNA, 413 bp, Glycine max
  unsure (1)..(413): unsure at all n locations
agcttcggtattcaatttcgagcgtctcaatatattactgtactcaatcagacatccgactaaaaagttattgtcgtttgaattagctcggaggttcaaaattcaatttcgaacgtctcaatagaatacgggactcaatcagacatccgagcaaaaaggtattggcgtttgaattagctcagagcttcaaaattcaatttcgatcgtctcgatatattacgggtctcaatcaaacatctgagtaaaaaagttattgtcgtttgaatttgctgaaagcttcaactttcaatttcaagcgtctcgatatattacaggactcaatcagacatccgagtaanaagttatcgtcgtttgaatntggtcggagcttcaacattcaatttacagcgtctcgatataatacgggactcaat

SEQ ID NO: 83669 - DNA, 405 bp, Glycine max
  unsure (1)..(405): unsure at all n locations
ntgagcanantcagaacgacaataactgtttactcagatgtctgatagagtcccgtattacatcgagacgctcaatattgaatgttgaagctctcagcaaattcaaacgacaataactnttttactcagatgtctgatagagtcccgtaaaatgtcgagacgatcgaaattgaattctgaagctctgagctaatacaaacgtcaataatgttttgctcggatgtctgattgagtcccgtaatctattgagacgctcgaaatcgaattctgaagctcagagctaattcaaacgacaataactctttactcgaatgtctgattgagtcccgtaatacatcgagacgctcgaaattgaatgttgaagctctcagcacatgcaaacgacaataactttttactcggatg

SEQ ID NO: 83670 - DNA, 487 bp, Glycine max
  unsure (1)..(487): unsure at all n locations
tgcaagcttacattccccacaactagaggtaatttttataatttatattacccaacaaacaagtgatttgcatgctgcaaagatatcatttttatattactgaanatttactacaacagaaattatttttggctggaactttgcaatctttggataatgtctgcaattgagcaagaattcaatcacgctcattctaaatggcatcaattgcttatgagttatgacttatgagctatgaacaatcctttattaattgacggactcgtgttcattttatttanattggagtcacaattcgctactaagtaccagcaaaaactactaaagtgcaattggtgaattcataatgtttattatctaattaattgcttggaaaacaatgtttattaattggtaaactcanatcaaaatccaaagcacgaatgtgtggccgaatacttaaacttcatttgcgctttcaatatgcgatcaacagattcttcataat

SEQ ID NO: 83671 - DNA, 365 bp, Glycine max
  unsure (1)..(365): unsure at all n locations
ttgtgcagagcgcagaccttatgaacttagattcttctttctgaccgaatgaagtgatatctaacatctatatgctcggctctatcatgatgaacctgatccttggccaagcatatagcaataaggctatcacagtagatgttagcatattcttaattaattcccgagatcatttatcagacctcttagccaaattccctcttttgcagcttcaataagagccatatatttagcctcagtagttgacagggcaacaaaaggctgaagtgttgccttctaactcaccaagcagccactaacggtgtgagcataccctgttagggaccgtctctngacaagatcacacagcaaatctgcctctcaat

SEQ ID NO: 83672 - DNA, 479 bp, Glycine max
  unsure (1)..(479): unsure at all n locations
agctnggaaggggagtggccaccgccgcattcttctcatgttacgtcgtcgttaagggtggaggatgctttgggagcgtgggttcttcttcgacccaatgaagaagccatggatgctgcagatgcagaaatgtgtgtaatgtgagaatctttgaaatataaagaggaagaagaagaagctctttcgcgccataatttcgattcgcgccacgctcgcgccagcgccattttatttgtattttttataattctgggtcactagatggaaaaagacaagacctatataggctagagcccaacccaagaacattattaaaaataactaaatttcgatccgtaagccattttggtttaaaattntagttttataaaatttaagtattttatattatttctttcatttacaaaacaaattaaattcacaaaaacattaaaaaattatctataattaatatacaaatatatcaataaaacatatta

SEQ ID NO: 83673 - DNA, 488 bp, Glycine max
  unsure (1)..(488): unsure at all n locations
ngtcagctccttctggcatggttggaccagagtcattgttgattagcctcttggtcgtgattcagattcttcagctgcattaactagatcactcaagcagtatctgacagaggatcaaatnttcaggttttctaactaaaactgataatcttcaattcaactttaagattgtaaagtacattttataaaatgggaaatattatacaggattgaccactatcttgggaaagagcttgtggaaaatctttctgttctccgattctcaaatctcatctttgaaccattatggtcaaggcaatatataagacatgtacagttgatattctcagaagaatttggcactgaagggcgtggcgggtaacctctattccttaacagctttcacactttctgttcttataatggngattcttatacattctcatatctgtaccctgtgtaggtactttgaccacttatggatcataagagacattatgcgcaatcat

SEQ ID NO: 83674 - DNA, 451 bp, Glycine max
  unsure (1)..(451): unsure at all n locations
taagcaccgcggctgcagcttctgtcacagcttgcttctcgcgctgcttctagatctctgtctgaagctgccaaaaacgtaacacctccaactacagcttatcagtttgaggtctcctggagaacattttcaggtgatcttgctctgcangctcgtctattaaagggtgaccacttttttcggctcatttttaatttgattatattggcaatttctagcatatttggtatttgatagagcaagagatgcccatttatgcttaaatttctggtattcggtgctctgcttcatgttataatgaaccagctttctnttttgtatgttaggctatatctccccatgaattgccgaanatattcaaaaatgccttgtcttctaccatactaattgagatcatcaagtgtcttgcatctcttttcacgtaagtagtcatcntccaaagtaaatatca

SEQ ID NO: 83675 - DNA, 495 bp, Glycine max
  unsure (1)..(495): unsure at all n locations
ctaagcttaacgaatcaatcaaccgctgacatggcagaagaagaagaagatcgcaggattctggtggccgnggatgaaggcgaggagagcatgtatgctctctcatggtgcctcaagaacctttcttttcacaattccaaagacacccttattctcctatacgtcaagcccnctcgagtcacttattcagccttcgatggcacaggtatagttataggactaacaaaaaataagcttacctagctagttagcttggtgttattttgattaatcaattatgcgctgctgtgtggtgttgcttaatttttcaggatattnttttgcctctgacataacggctaccatggagaggtatagccaacaagttgccgattgcgtcttggagaaagccaagaaattggtaanaatattgaanatgacgtacctataccacattatcaataattactataatcttaatttagtacattacatatatgatgtatgtgctctctc

SEQ ID NO: 83676 - DNA, 419 bp, Glycine max
  unsure (1)..(419): unsure at all n locations
agctntgatgatatggtcttcaccgaagaaaggtatcnatgtgngtctaaanaagaggcaanatcttgatcatcatggcttttgattaatcccannaaaaaaaaaaaccttagggcaaaatgaaagaggggtgagaaatggagggagaaagccnattgctattgacttgccattccctataccagccaaagtttcccaccaaccccaacaatgtcattactcagccaataaacaaaccttctccttacccaccgcctagttatcgacaaaggccatccctaaatcaaccacaaagtatgtctaccgcacttccaatgacgaacatctnctttagcacaatccaaaaacacccgccaagaaatgagttttgcagcgaaaaaaaaaacctgtagaattcacccaaattccggtgtcctatg

SEQ ID NO: 83677 - DNA, 446 bp, Glycine max
  unsure (1)..(446): unsure at all n locations
ttggacacctatntngaatctcctatgctgtttctacatattatttttcagccccaccatcccaatgtttacaaaatcatattcatacaccattgtggcatttcaccgagcacttggtgagcgcatgtttggacatgaattgccagagaatgggagcaatgtggcatgccccattgcttcagaatacaacctatgacctaggccttttcattaaaatcctcaattcaagagaacaagcaccaaagcaaaccaaaactgcctcacaaatataagcatgttctcacaatttaaggcaccaaaagatgaagaaaacacatcaatgggaagcacaaacatcaaggatggaatacttacttgttggagtgaatagaaacaccaaanatgagagcaaaacgcgatcaatagtggcttatgggagcaagaaaccgcaagccttcgtgtcttta

SEQ ID NO: 83678 - DNA, 467 bp, Glycine max
  unsure (1)..(467): unsure at all n locations
agcttcatgatgaataaaaatgatctctatgtgtnntgatgataacaatgatgacattaaaagatgatgacaaaggtgatgaacaaaaagctcanagatcaaagaacaactcaagtgaatcaagaacaagtcaagagttcaagaatcaagaagaaagtctacaatcaagaatcaagattcaagattcaagatctcaagaatcaagatcaagattcaagactcaagattcaagaatgaagaanagactcaatcaagataagtattaaaaaggtttttcaaaactttgaatagcacatgaatttttgacagaacctttaccanagagtttntactctctggtaagtcgataccatattggtgtaatcgattaccagtagcaaaatgagttngaaaaagttttcaaactgaatttacaacgttccaaatattttcaaaaggctgtatcgatacaatgtttggtatcgata

SEQ ID NO: 83679 - DNA, 476 bp, Glycine max
  unsure (1)..(476): unsure at all n locations
atgccttggtcaacctaccaactcagcttgccatgaatcaganatctacacctgttgcaagagtctgtggtatatgttcttctgcagatcaccatacagatctatgtccttctttgcagcaatctggagtcaatgagcaacctaaagcttatgctgcaaacatttataatagacctcctcagcagcaaaaccaacaacagtagaataattatgacctttcaagcaatagatacaatccaggttggaggaatcatccaaatctgagatggacaagtcctccacaacaacaatagcctgtccctcattttcagaatgttgctggtccaagcaagccatatgttcctcctccaatacagcagcagtcacaacaaagacaacaagcaatttcaaccttccttagaagagttagtgagacaaatgaccttccagaatatgcaatttcagcaagagacaagaagcctcattcagagtctgac

SEQ ID NO: 83680 - DNA, 502 bp, Glycine max
  unsure (1)..(502): unsure at all n locations
ctcagagacacctgaggcatgcaagcttataatgaactntctttgcattgctactatctataattatagtaacaaactnttcttccaacatagcaggattatgatccataacaccgaggtgaaattggacttgctcattttagtcagagaagttaagcccattaaaattgacacagatgatacataagaatccaatgaattcaaaacatgtattacataataaaattcacataagtgttttgagacataaaatacatgtcatacatatgattcattcagataacggtcaatgtatattgatgttctcctttgggtgatacaccaacacataacatacaaacataatgatgctgaataaaatttaacattatntggcaattaaatatgcaccaattagtagtatctatttnctctaggcatataaataanactaatgatacatacaaatcgcctacaattatattcattaattataagaacaactaatcaacctttgggcgat

SEQ ID NO: 83681 - DNA, 427 bp, Glycine max
gtcataagtgactggctaatcagctctacacatatacatgtatatataacaagtagtaacaatgtgctttacctggactatatataatgaaatagcttccataacaacgccaatggacaaaccaagttcaactacaacaaactaattcagcttcacctggagttgatataatgagtaatggcattagaagaactgatagccaaaccaatttcaagtacaacaaactaattcagctttttctcaaccaaagtatgtcaaactagttgttagctattaaaagtgttagttattaatgtgtgttgactaactcacaaaattatccttcttaatgatactagattcaactaggctcttactatctaagtaagagagtaaagaacaagaacaataacttaacccaaaagtaaagtggcaattaaaagtacac

SEQ ID NO: 83682 - DNA, 310 bp, Glycine max
  unsure (1)..(310): unsure at all n locations
ctgcaagcctgtgccacccacatagcacaggttttttattgatgatcaacctaggttgtggctacaacattgagaatctctcccataaccaaatatgaaccaagtagtaaaagggtgaccaaagagttaccttttatcatcagccaaactagactattgttttcttctacagacctaaatcattttatatgttggcttaaaatattggtcgcaaagctgattatctacatcaaggaaaacaaacttgctcaccaagccattgggagagaaatcaatctctgccaaccaagttgcaaggaatgtttnatgc

SEQ ID NO: 83683 - DNA, 447 bp, Glycine max
  unsure (1)..(447): unsure at all n locations
tcatcatctntgcattccaacattganacggttgggatggcctatgcattccagctntaatagatgtacatgtgtgatattataaagttggaaagccttccctacccctctaaatctaccccacagtaactctttgataaaaatatttatttttattctaatattatttgttaattaatagtattacaaatagttgcattgtttcattgaacttgattacatcatggaggaggataaaagcaatgcatatataaatttaacctacacttctttntaagttgtcaattaattaaaaatccctttttatatagcttttaaaatatttattatttcctattaaaaatatctattattaaaattaacaaattaatatttatcataatttatgatttaataataataataaaatatactcctagtatatatacatattattttctattactt

SEQ ID NO: 83684 - DNA, 475 bp, Glycine max
  unsure (1)..(475): unsure at all n locations
agctntagaaacctacacggcgatccaacaggtctagcacaaagaaatataaatcgtttgatttgatgttatcaacaacctcagaataatttttttggcaatcctcgtcttttcgaactagccaatggaatgtcattataggtacatgacccactttttattggatgtatgttctnttcaattgaaatttggttgagatctagagaaaaccaacaactaaactcacccatgtaatgtactccatttatttaatgtgtttaaattatcagttcttaatttgagatatagtattctatttaatgattntctaaaagtatattgtatttttcaattaaataaaaagctataaatntatttttgattcctaantaaatatctaattttgtgttggctctttaataaacttttctttttcgttgagtccttaatttaaacaaaaatttaattttgtccttagaactntntatagtccctg

SEQ ID NO: 83685 - DNA, 293 bp, Glycine max
tcagatcccatcctttattgcttctattagagcatgcactctacctttgtagtggataaaaccacaatgggctaaagagttccttccaactatcaagagaagtgccaatcatgaatgcgtaccttgtcataggtctccttgcatccaaatctacagcatagtcaaaatctaaataaccaacaagagcactagaggtgtctccatggtagacaagtccaatatcagttgtacccattagtacccaaatatacatatcacaacttaccaatggtcacaacctaccctttcgcggg

SEQ ID NO: 83686 - DNA, 431 bp, Glycine max
  unsure (1)..(431): unsure at all n locations
agcttgagaaattcaaatggtcatatttttcatcttcatgtccgatctacgcgcataacatatggagacgctcgaaattaaacaacggatgttttcgaggaattgaaatggtcataactgttcactcgcatgtccgattcaggcgcatagcctatcgagacgctagaaatttaacaacggaagctcttgagaaattcaaatggtcataacttttcactcgcatgtccgattcaaacgcatagcgtatcgagacgctcaaaattgaacaacgaatgctctcgagaaattcaaatggtcataacttttcactcgcatgtccgattcaggcgcatagcgtatcgagacgctacaaatctaacaacgagagctctcgagaaattaaatggtcataacttttcattcgcatgtccgantcaggcgcataacatatc

SEQ ID NO: 83687 - DNA, 500 bp, Glycine max
  unsure (1)..(500): unsure at all n locations
catagcccaccatctnttcatagtatagtatcttttatgtgtctaccatcacgattatcgtctgcctttccatcattgggggtaccacctgngccgccagatccctccaccttttgggcgtgttctttgaaagatccgtccctctntatgcaaatgttctgtagttgcatcctatccggaaccatatcaaaattgtactaatactgcctaacaaaggcaaccattangtccttccaagaatggactcgggaaggttccaagtcagtataccaggtaacagctaccccaataagattttcttggaaggaatgtatcagcagttccttatctttngcgcatgtccccatcttccgataatacatctttagatggttcttggggcaagtagtccccttgtacttgtcaaagtccagcaccttgaacttgggaggggtgatgatattgtgttctaggaacaactctcttatgttggcaaggcataatcttcacctcccttcatg

SEQ ID NO: 83688 - DNA, 420 bp, Glycine max
  unsure (1)..(420): unsure at all n locations
ggctgcagcttctcctatttgctataataggggatttgtgaagaaganaagggttcagccccttaggcacttctctctctttcgaatttgctgaggaaaattatttccgtgaagaaaatccaagccgaggcgcttccgtaacgtttctgtcagtaattacgcgaagattcttgaccgttcttcaagatccatcgttcgttcttcgttttcttcagtcttcaacgggtaagtacctcaaaccaagcttttcaattcattatatgtacccgtggtggtgcacattgtgtttcatgtattttcattctcgttntcatttactttntatacccccttttgacgtgcttaagccatttatttaagtcatttctcgcctaatctaaaaataaaataaatttccaccgatcgtttgaattgtatcat

SEQ ID NO: 83689 - DNA, 491 bp, Glycine max
  unsure (1)..(491): unsure at all n locations
tatggcanaggaagaagaagaataaattcttgaagatgcttatttagattcanaggttgtaaaggattgtaataatcgttcttaanaatgcaagttatggacttgaatntatagactcttcatgtctggtcaaacaaaccattagaagagttataacctttagaaaaaattgaaaaccattggaagagttacatcttttgattnnttgtcaaaacttatcactggtaatcgattacctaatcattgtaatcgattacacaaagcatttttgtgaaaggatgtgactcttcacatttgaatttgaatttcaatgttcaaacactctggtaatcgattaccaatatattgtaatcaattacaccattttgaaattgattggaacgttgtaaattcagttgaaagctttntgaanacaaaacttgccactggtaatcaattacaataaactagtaatcgattcccagagagtnaaaaatctttggtaaaaagct

SEQ ID NO: 83690 - DNA, 453 bp, Glycine max
  unsure (1)..(453): unsure at all n locations
ggcttgagaagcttctatggagggtggatctttgagcttcaatgttgtccttcaacggggattttctaccatggagatgcagcggaagataaaggagaagaggtgagaggaggcaccacccactatggaataagccatggaagaaagagcttcaccaccaagagagtgtcttggataagaagcttagagaggaagcttcaattgagaaaaagagagagagagagggggaggggagcacgcactcgaaggaggaaaagagggagagacattgaactttgaagtgtgtctcataagactctcattcatcacaagtacaacaagtgttacacatgcttctatttatagcctaggtagcttccttgagaaacttccttgagaagtttccttgagaagcttccttgagaacgttccttgagaagctagagcttagctacacacatncctcttataact

SEQ ID NO: 83691 - DNA, 452 bp, Glycine max
  unsure (1)..(452): unsure at all n locations
cgcagctgcagctaaccgccaaacaagaacaacccttttgtttttttaaatttacagcgaacgaccttccatctggaagatgtgacttactattggagtacagaaatatatataaaatcaatttaaatatctctcgaaagaaaacactgatcagctgcatataaaactaaacaaatgttttcgaataggacttggcataatcaagccttaaaagcaaatttcatgctattgaattagttgatgcacaacatggcgaatatgctaatataactttcgggacacatcactctgagagggtatttgctatagaacatgatgccaaagcagcttaagatgctctnggtaacgctcaataacacattcaacgaatatgaaactgagattatgttctctgcccgagtgctacgactgagtgctacagatgctcgtctgattatgagagatacattatc

SEQ ID NO: 83692 - DNA, 404 bp, Glycine max
  unsure (1)..(404): unsure at all n locations
agcttctacatgtctagggttttctagagagagattggtctctgttccagagagtttgagagattntgctgtgtgaagagctgtagagaaccgagcttgaagaggaagtcgtcttgagaacttaagatgagtttgtgagtgattgtgatgttctagaggtggaggagacatcccaccacttgtatttcttcaatcctcatctttctcttctctttggtggtaaggaagcttttccagtatggaaagctananntctctgtggntctttccttgangtacttgatgaaatacctgtatattatttatgatgtttgtgtgtcactgtgcatagaactcatctacctgctttgcctgacacgagatgctgtgtttaggacattacagggaactatatattctagact

SEQ ID NO: 83693 - DNA, 497 bp, Glycine max
  unsure (1)..(497): unsure at all n locations
tatacaagggagcanaagatacaagtatcattcaaggtaagctaagtggtctaaagagcttgcgtctatacaattcatggccttcatcatgttctgattaattcanagatttatgcaaagatcattattcacagttagtcatttactcacagagtaaggtcacactctcatcggtttttggttcatgctnttctttcacaaccagtctatgtagtgactaaccattatattataagttcacactctggttctttctttgttcaacatgcacatttgctcaaattcatgaaaggaaacacacatctcatcttaagcatgcattcaatntaaaacaatgcataccaccattttcacaaaacanataaactacttcactgccataccatcaaaagttaagttaaactgttcacgatgcttcgagatgagaaactatactactcatgcacaagactaacaaanagtaactaatgtactaacatanaaagtatactaataat

SEQ ID NO: 83694 - DNA, 439 bp, Glycine max
  unsure (1)..(439): unsure at all n locations
agcttgttagcccaaagtnntctaaaaaacaatatatggatgatgatatataaanaagcctacggtgaataagtggaagttattctaggataaaagctctcttattaccactaattgttataaccgtgaaagaccataaatnctttgattagctaggccacataacacgccaagtaaagtgcttagtgatccaccaagtgtaagcaggataactttaactgggatgaagtgcaaattgggaacataatngcaggtcgtagaatttaaacactcactcagacacttgtgcgcaaaagaaacactgaagcctggtgaggaaaaatgaggcaagccaacccgatgaattctcttctaaaccaattccatctgaatgattgatatgcgtacaagcaagacatggcaatgcaataggtccacttagggattcgaacattgatct

SEQ ID NO: 83695 - DNA, 453 bp, Glycine max
  unsure (1)..(453): unsure at all n locations
gtagagcttctatggaggctggatctttgagcttcaattaggtcctttaatggtgattntccaccatggagatgcagtggaagacanaggagaagaggtgagaggaggcgccatccactnaggaataagccatggaagaaagagcttcaccaccaagatgaccttagataagaagcttgagaggatgcttcaatggagganaagaaagagggagagaaagagagaggggggagcacganattgaaggaagaaaaaagggagagaangtgaacttttgagtgtgtctcacaagactctcattcatcanagtcacaacaagtgttacacatgcttctatttatagactangtagcttccttgagaagctntcttgagaaaaacttcttgagaagcttctttgagaaaaacttcttangaagctagagcttagctacacacacccctctcataact

SEQ ID NO: 83696 - DNA, 452 bp, Glycine max
  unsure (1)..(452): unsure at all n locations
agcttggactaattacactaacaaattatgttatcttgtgtttagaaggttntagactactaatgagattcaaacaccaaatttaattggtcaccaaatattccaatattaaagaaagaagaaatggtgaaccatattatcattaaaatatttttttatttatataatgaaggttataattttttttcaaaggtaaaaataacaaaaatggaatttttggaattttaattaattggacttcaaatgaaaattaaagggtataagtgacacaatatatcaatccgatattttttcatttattttattattttaaaattaaatagtttttcataaagggagtaaaattgaatgatattagttttcataaatttaattttaatttataatctaactaatatgtgggatatactatagacaagatgatattaaatcctatactaactcatcctata

SEQ ID NO: 83697 - DNA, 319 bp, Glycine max
  unsure (1)..(319): unsure at all n locations
accagcttaaccataacccactaaagttcatacccggatttgagatctatatccaacngagctaatgagctcgtacaggaacccagttaatgacgaagacacatttcgacatgcgatcaatagctttgactcgacttacctaaatataatgaaagatttgagaatcgtgaatcaagacctgatatcacatgtgtttcgatctagaaccaaactgattcgatatgaatctgagctgatttaatgtcttctttgtcgaattgaagcggggagtgttcccgactattggagatgagattacatgcatcgttatttccactat

SEQ ID NO: 83698 - DNA, 438 bp, Glycine max
  unsure (1)..(438): unsure at all n locations
agcttgaaagtgtgtaaccaaccattttctcattgtataacaccggtaacgtgtatactatcattgtgatcatctttttctctgtcattgaaggtgccacttgagctgtcaaagtcctccacctctgggcgtattcctttgatgactcatagctctttttacacatgttttgtagttgcgttctatccggagccgtatcataattgtactgatattgcctaacgaaggcaaccattaggtccttccaagaatagactcgggaaggttccaagttagtgtcataccctaatntcgtccggggattattacttgacgacatgcaacctttngatggccgttcaagatacttggcacccttttgtgcacaatatgtaagtcttgagacgcaccggaagtcanaaggaagcagggttatgcgatccgtgaaattccgtaatg

SEQ ID NO: 83699 - DNA, 187 bp, Glycine max
cacgagcatataatcgcggatgagtatgctcaagtatattcggaaatagatgctagaggaagggtgatctactctttacaccaagaggcgaccatgtggatggatcggctagctcttaccttgaatgggaggcaagaacatcccccgatcgtacgcaaggccaaggcgagggcagacacctacttca

SEQ ID NO: 83700 - DNA, 472 bp, Glycine max
  unsure (1)..(472): unsure at all n locations
agcttgccagccaactcgcccaggcgatctaggttgcttcctccagaaggcaccgccttctggtggaacttcctggaaggcccaagtgggcctggttgctatttgcaaccccctatttactaaatacaccccctgcctttnttttgctgattctttttctgtaacgttacggaactttacgaatttcgtaacgatacttgttttctttcctaatgtcacggaaccttacggattacgtaatcatcccttttttggctntcggaatgttgcagaacctcacgaattgtgcaacaatgcttccttttgacttcaggcatgttacggaacctcacggattgtgcaacaatgcttcctttngacttccggcatgttacggaacctcacggatngtgcaacaatgcttccttttgacttccggcatgttacggaacttcacgaattgtgcaacaatgggtgccaagtacctcgaagc

SEQ ID NO: 83701 - DNA, 451 bp, Glycine max
actaagcttagcaacaggtcaacagaaaggaaaggtataaagtggcttttcatcaatgcacatccaagcatcagaagaacttcaaaagcatatgtcctgaagacagagaacagtcacacagatcaaagattctggaaacaaaatctccatttgaacacctggtgtgctgaatgcaacttgtcatccaagtcccaagctaagatacagaataaacaatttactttgtgggaggtggccaagataggttcaaattttactggttaatacaaaagcaaacacacatttgctagtctttagattatacacatcagacattaaaattagaataaagggaacttgcctttcaaccataagggttcatgatgtagtgccaatcaacacggtcatcatcatcaattagtgaatgcgcaacttactctacactctttgtgaccctgaagaatgcacattg

SEQ ID NO: 83702 - DNA, 482 bp, Glycine max
  unsure (1)..(482): unsure at all n locations
acacaagaaactaagcctgtttcttgaaggttgttcttataactttgatttggaggacttgttaagagcttcacctgaagtacttgngaagggatattatggaacaacatacatagccatcttggatgatggaacaacaatggttgtgaagaggttaagagaagtggcaatgggacataattatttgaacatcagatggagattgtccagacacttgatcatcacccatatgtgatttcgctgcgtgcttactactattccaaagatgaaaaactaataggttatgactactcaactgccgacaatttttccaagctattgcatggtaattactcttactttgaactttattctgattacacaaggttcatatttggcagtgtcgtctagctctcttttcttattatagatgtgaaaccacattaactacttattggtgtcaatattactatcaacacagtgatgctatatgcttaacatct

SEQ ID NO: 83703 - DNA, 438 bp, Glycine max
  unsure (1)..(438): unsure at all n locations
agctnttcgattcattctatgtacccgtggtgttccacattgtgtttcgggccattttattctcatttcatttactttttatacccccttttgacgtgcctaagccattttatttaagtcatttctcacttaaaccaaaaataaaataaaatttcatcgatcgtttgaattttattatccattaacttcggtaaaaatgaattccgaccgttcggtcgtgccgtaaccacgtttggatatcataaagagaagaaaaataaataatataataatcaaaaaacatcttttagtaaaaatagcggaaatcaatcgacatttctctttggattctcatcttaatgaattgctaaaactaaggtgaactaggctaaatcactccctagcagctcgtcgcaaaaaggttntgaaattgcatttcaattctactagaaaagggca

SEQ ID NO: 83704 - DNA, 130 bp, Glycine max
cgcactttaataaaggatgagcagcttacaaagactggtttggaacttgtcaggtcagcgcgtgccacatttttggatgagtaagttaattccgtggaaacactatgctcattagggctcttggttaaaa

SEQ ID NO: 83705 - DNA, 396 bp, Glycine max
  unsure (1)..(396): unsure at all n locations
ctgcctcaagagtccggaagacaagtatcagnaagaactagttccgctccggagtatgatagtcaccgctttaggagcgcggtacaccagcagcgcttcgaagccatcaaggggtggtcgtttctccgggagcgacgcgtccagctcagggacgacgagtatactgatttccaggaggaaatagggcgccggcggtgggcaccactggttactcccatggccaagtttgatccagaaatagtccttgagttntatgccaatgcttggccaacagaggagggcgtgcgtgacatgagatcctgggttaggggtcagtggatcccgttcgatgccgacgctatcggccagcttctgggatatccgttggtgttagaagagggccaggagtgcgagtat

SEQ ID NO: 83706 - DNA, 442 bp, Glycine max
  unsure (1)..(442): unsure at all n locations
gaaagagagcatgaggatcttaacaaaactcatcgagctcgtttagttgattctgtcctggaaaccacttcacctagtgatgtacaagacacgtctgtttgtgagaaggtcatggattaatggacaaaaaggtatctattggacaagagattcttcttaaggatcttcaagatttggaagaatgcggtaaatccttaaccacaactcttgaagattcagaagaagaacacaaggaaatgcttaaacaaaagcttttactgcagaaaaaaatgtgccctttctaatagagttcgataagtngaaaaaaaaactcagatctttggaggaaatgtcaacgttataaaaagggttcttctaatctatactataagcttagaggacgtgaggaactacctctatgaggagattggaatctnganggataacctacgcaaatttgtcg

SEQ ID NO: 83707 - DNA, 450 bp, Glycine max
  unsure (1)..(450): unsure at all n locations
accatgaatctcagctgtaccttaacaangatgagataattgtttgttataattttatccaaaactaacttgtattctggagaaacataaaattcttaaagcacaaacactacaacttgaataccatccccatcacctattcattatttagatttcatgctatcttatcccaatgcacgtgacactatcattgtgaaagaaagacaagtctatcatggtaaaggaatttagacaggaatatgtactctggaaatacctcactagatatgattgcaacaatagcagagatgatgttattgctacatatcatatgctttctctaaccaaggtgacttatgagtgacaatacattgagaaaatgactaactgcttgagaaatgataagtgtcacaattgaaaaagcatatactaatcttactctttgatatgcaagaagccacactcatttct

SEQ ID NO: 83708 - DNA, 218 bp, Glycine max
acaacttgatcaaatctcttagtgagatatctaaaatatttgctttaaccctctctgtgagaatggcctactactgtattaagcttgttaactattatgtctactatatacagaaaatacattcctaagtcgaattcctcttagatgtaaagatctctaatttgttgcgtaaatacacaaatactcatttctgttgttagcctattagtggctgacaa

SEQ ID NO: 83709 - DNA, 401 bp, Glycine max
  unsure (1)..(401): unsure at all n locations
ggatcttaagcaccccggctgcagctgaaatgctgtactgtatgagcgcgttaagtatttcttggatgtgacatggctgctagatagtcattgttttatctcacggctgacgcatcttttaccttagcacaagaccagccatatgaaggtagttgatttcctattgctgtcaaagcagactaacaatatggagcgctgacttctgcttgtctgtcggatggatcggaaagcatctacattntccttctatacaattatttagatcctagacaacgcctgattgaaaatgcaatgcatactgctgctaattggttactagatgtcatagaaatgtggctaacagccaaaggaatcaatgtattatagcattattgaactgtagatgatgtttctcacgatat

SEQ ID NO: 83710 - DNA, 464 bp, Glycine max
  unsure (1)..(464): unsure at all n locations
ctcaagctgggcccttaacgaaagatgagccgcattgagtcattcactatatggagattgtggcaggagccaaaggatccaaggagttagatctagacctgagaaccaatgacaacaacggngcactcagcgcgtcgtcagctcgcccagcgagtcgtttgtcctttctcgcacttagcgagcaaatcgcgctaagcgagccttcagaatctgaaacgccaaggagcctttaaaacactaaagttggccaaaatttgaagagagacagccagagagatgaaaaaaatagagcaagagaggaagctaaaacgacagagcctcggccttcaagaacgtttaggttctatgagtgattntacgattctagaggtggaggagacatcctcaaccatttgaaccttagttttccttcaaaatctatctctgtgtgaaagtactaacatgaatggaagactaaactcttg

SEQ ID NO: 83711 - DNA, 399 bp, Glycine max
  unsure (1)..(399): unsure at all n locations
agcttggactgtgctagagaganaaacaaatgttctatgttgtccaagagccatttctagggcaaaattgggtgttgaagagtcaacatttgattcggcgagatcttaggtgtaaattcagtttgaacaagtctaaataaatgttatgaactggtgtgaggtgagagtttgcttccaatttacctcattctaaatttcacttttcaaacctagaanacccactgaatggaggggtcgtggacacctagatcctgtgttgctgtgctttaaagcttgactttggtttagacatgattgatacatgatctgggacttgtangaattgatttgggcaagattggatgacggaaagtgtgattttcgaaatctgcacttatgcagaattttgctgtcaaaata

SEQ ID NO: 83712 - DNA, 508 bp, Glycine max
  unsure (1)..(508): unsure at all n locations
ctcagcttcacatcagaccacttccagggtgctggaactacttcacatttacttgattgngcctatgcaagttgaaagccttggaggaaagaggtatgcctatgttgttgtggatgatttctccagatttacctgggtcaactttatcagagagaaatcagacaccttngaagtattcaaagagttgagtctaagacttcaaagagaaaaagactgtgtcatcaagagaattangagtgaccatggcagagagtttgaaaacagcaagtntactgaattctgcacatctgaaggcatcactcatgagttctctgcagccatcacaccacaacaaaatggcatagttgaaaggaaaaacaggactntgcaagaagctgctanggtcatgccttcatgccaaagaacttcctataatctctgggctgaagccatgaacacagcatgctatatccacaacagagtcacacttagaagagggactccaaccacactgtatgaaatctggaga

SEQ ID NO: 83713 - DNA, 471 bp, Glycine max
  unsure (1)..(471): unsure at all n locations
agctngagacnttcaatattgagcctntgttccttttttcatttcatggaagcttcattaaaagtaaggggagtctttcacttcttgaaccctaaccttgttgcctttggaagctaggcttctttgcatgttgttttcatgtttaaaatttcgtgtctgcagccatgactagaactgcacaatatgttgtttttatggaagtttaaaggttaaaaatgagttctttgggtattaaagcataggattagccttaaatttcacttaaataagagtttcctagtaaaagttatgaataaaacaagttttaggagtatttattagataaaatctgtcacgaaaatgaactaactagtatanttgtatggactgtttttcttataattttgacctcacaaatgagntttgtaggtgtgaaaatgtanggtagcatataacatctgaaaaactgattcccggaatacctagaacact

SEQ ID NO: 83714 - DNA, 394 bp, Glycine max
  unsure (1)..(394): unsure at all n locations
gtgtactaatccagatgacaaggatttgcctatttctgtacatgtaataaaagttcttcagcttgaagaatcattgccggtgcttccacttgatatgcatgatcgatcttctccttctttaattacgaatacgcatgcacgggccacttattattcttcgcaatcactacccttcactaacagccttggaagtgctggacgcntatctgtcaagtcaaccttcgaattcatctattttggcactaagaacttgtgctatctatgtagaactcattccgttatatgtatgcgattacttctgtgtcttaatagatgtataaacggtttgaagataactttcttttgaatagtgtttattttacattcgtcagttattacactacgcttacacttc

SEQ ID NO: 83715 - DNA, 492 bp, Glycine max
  unsure (1)..(492): unsure at all n locations
atccttgagtcacctgcggcatgcaagctntaatgaggtcctttaatggtgattntccatcatggttatgcagcggaagacaaaggaggagaggaaagaggaggcgccatccactanggaataagccatggaagaaggagcttcaccaccaagatgagccttggataagaagcttggaaggatgcttcaatggaggaaaagaaagagggagagaaagagagaggggggagcacaaaattgaaggaataaaagagggagagaagtggaactttgaagtatgtctcacaagactctcattcatcaaagttacaacaagtgttacacatgcttctatttatagactaggtagcttccttgagaagctntcttgagaaaacttccttgagaagcttctttgagaaaacttccttgagaagctagagcttagctacacacacccctctcataactaangctcacctcttgagaaactngcttaagaagaatcctaaa

SEQ ID NO: 83716 - DNA, 437 bp, Glycine max
  unsure (1)..(437): unsure at all n locations
ctcagcttgagggtgacagccaccatctnttcatagagagtaccgattatgtgtctaccatcacgattatcgtctccctttccattattgggggtaccacctgagccgccagatccctccaccttttgggcgtgttctttgaatgatccgtccccctntttgcacatgttctgtagttgcatcctatccggaaccatatcaaattttgtactgatactgcctaacaaaggcaaccattaggtccttccaagaatggactcgggaaggttccaagttagtgtaccaggtaacagctaccccagtaagactttcttggaaggaatgtatcagcaattcctcatcttttgcgtattcccccatcttctaacaatacatctttagatggttcttgagacaagtagtccccttgtacttgtcaaagtccagcaccttgaact

SEQ ID NO: 83717 - DNA, 436 bp, Glycine max
  unsure (1)..(436): unsure at all n locations
cctgcggcatcaagcttaacatgggagatggccattcatttcttgaagatcattgacatgctacaagtgagctgccggtgagtataatggtaagtccacccttcattgtctttgatttacccttttttgatgcagatgtagaatcccaatttgaggaccaatcctttctcagaaggagagaatgatgaggacatgaccaagaagcagggcaaggatccactttgaggacttggaggacctatgacaagggctagagcaaggaaaccaaggaagctcttaacaagtgctgtcctactatttgatacagcccaatttcaagagaaagccagggtgtagttgttcatgcccaatggggaggataatgacacactttgctaatnttagagtgttagtttgctaaaaatgcccatcctgtaaagtgctgacaaaatatgtt

SEQ ID NO: 83718 - DNA, 479 bp, Glycine max
  unsure (1)..(479): unsure at all n locations
gaccggaccttaagcacctgcggctgcagcttagtcttcatattgatcccttatctcttacgttatgccacatggagaagtgatattggaggacccaaccaccaaaaggacatggactgcaaatggcaccagaatcaaacactacttaggtggtgatattgataggctcaccactattgtccaatttcaagaaacctaaccacaacaaggacttccagcttagaagacgttaaacaagtgcttctgggaggcaacctagtatttttgaactttgctttaatttgtgtgatctaaactntatgtcttatatttcttgattatatgtttgtgttgtctaaatattatcttaatttatgtttgaactatatctaatctaaacatataatcaagttntctactanaaaanaaggctactataaactcgcctgngcgagtgaatgtcagttttcaaaataaaaagaggggtggaatcagatttt

SEQ ID NO: 83719 - DNA, 413 bp, Glycine max
  unsure (1)..(413): unsure at all n locations
gtagcttataaactccaattacccgaaggatctcacattcatcatgtntttcattgttcaattcttaaagcatttcaccaattgccaatagaagcaagctatccagtagtgttactaccaataaaagttggcaaccaacctaccatcacacctcttgcaatcctcaacacacgttgggatcactctactgttgaacctagattgatggtgctagttcaatgggcgggcctatcccctgatgacacttcttgggaagattgggctagtttgaaagccacctatcaccttgaggacaaggtgtttttagatggcatggtggatgatacgataggaatcatggcccaacaagataccacaggcacgaatgataggcccacaggaagaatcactccaccaaacatctagaaaattat

SEQ ID NO: 83720 - DNA, 477 bp, Glycine max
  unsure (1)..(477): unsure at all n locations
agcttcaacgacggtgaatcgacaacgtatttttcacaatcttcgntggtacaaatcctgtctcattnttgtaaatatcagtaaaattacaactatgctttttaaaaatgaagtcaaagcctgatattgaagacaattctttggagaactgtaattgaaatcgctaattcaaagacgatttttgaaaatcatctttgaagttcaagtgttatggctcttatactcgtgccctttctttgcatctcacttcgtctcaatagcttgcaccctctcagagtctctntatgccctctctcactcacgtctctgtcaaaggtgcccagcactaccgttgaagcttccttctgccgaagcttgtgtgtggcctggttgtggattgtttttccctcattcccccatatgaagtagtggggtggttctaaagaaattgtggcttaagtatgggtattctctgaaaggtattaataaattcaatct

SEQ ID NO: 83721 - DNA, 466 bp, Glycine max
  unsure (1)..(466): unsure at all n locations
agtctataccgctgatctaatggaatgtgatcctatatatcttcttcctctgtagcgctctgaaagctagctcattacataaacaaagagatcttgtttcatctgatcttgcagntccaccttttctcatatcattttgcatgcttttgattctttggacatagttggtatagatatgacggtcgaatcttagaggatcctaacaacgacggttagcgaccatgtcttacagtacatataccccaacttatctgcctctagcacaaagaaggcattcctccatagttgttctcaatcatcacaccacaacataatggccctgttgaaatgataaacaagactctgcaagatactgctatggtcttgcttcatgcacaaaaactctcctatatcctctggctcgaccattaaccagcatgcttttcccacccaatccctttatatacgcactcaaacaactgtttaa

SEQ ID NO: 83722 - DNA, 450 bp, Glycine max
  unsure (1)..(450): unsure at all n locations
agctntgagaagataaaatntcctaattatgatgtagttatntaaaaattttaattgagggagaaattgttggagaataattcatatttcaaaataattgagatggtgaaaattcaaggagatttttttttaggaatntgatatgttttaaatctttaaaattttatctagatttttgtttttatttattttagggatttgtttctttttttaaaagactaggatatgttaatatttaaattttgtattgctatttagttctatatttaaatataaagccaaaaaaataaaaattatacgatatgttccatctaagatctcttggatgtatgggtaattttgttgtgtgtagagaagttttcccaaccgtgataaaaataggtaaaacaatgatgaattaaattgttggggttcacttcaccaaacaataccctatacanaggtcacata

SEQ ID NO: 83723 - DNA, 500 bp, Glycine max
  unsure (1)..(500): unsure at all n locations
ngcaagtaccttagataagggtaaaacaatataaataaagttttccatatnatacggctaattaatttgagaatatggattatgtaaattattagttcccctgcagaagtcaaaacatactcaatgcttcacaattcaactatttttctacaagggttccaattgtctttctcccttgtgttaaaaagaatgtgactatgagtgaccataaaacattcctttntttttatccnccaatacataaataaataaaaaccaaactcaaccttaaacaaataaaagttccaataattattaagacgcaatttgtatatatagcagtccaaggacatgacacanaacaattaacaagtataatcaaaacccatgagtccacaccatcaaacaaaagaaataagaaaagtcatcttaacacggctagaatattcaagtatatgtagcatttacaattcaccatanacatagcccncagcagtcccagctggtataaacatgtaaat

SEQ ID NO: 83724 - DNA, 469 bp, Glycine max
  unsure (1)..(469): unsure at all n locations
agcttcttcaattagcttcaattgaccatatntttgttctttatataaaggttacttctattagtaagagtttatctaaaactgtgtttgtcctgacttcttttgaaaagaacagccccaaaaatagctatggcaaatgctacctagtaatcacactttaagctatgaagtaatatacacctaaaagttatttaagtgaaagactttatggttccacaggtcctctttgggcctaataatagcatgatataatgatatcctaaatttatttcaatacaatatatggtttcaaagagaaaaataattntgaaaagaaacaagaaaaaagcagaaccattcattctgaacggataacagttagtttattcccacaaaaattcaatcattttctcatttacatcaaatataacggaagttagagaaccaccagcacggatggagtagagtaaatacctttggcagctcacct

SEQ ID NO: 83725 - DNA, 365 bp, Glycine max
  unsure (1)..(365): unsure at all n locations
ttgacgagatacttaaaggacttggcattatgttatatttgctatataagacaatgaatgtaatgtttggttaccttgagtacgtcagactcgcttattagacttttcttaagttggggtggtgttttgtgtgatgatgtgtgtgggtgcctctaacatcaatctcatgaattgaattaatgaataaatgcttcgaaagatgaagaatgctcanagcctcaaagcagatttgagaagctcgatgagatgcttaaacttagaatgactctaacgtttaggttaatatttgccacagaagaggaagaatataatgttatagaacattgtgtaccttgaacatgttaggcttgcttataatacttttt

SEQ ID NO: 83726 - DNA, 477 bp, Glycine max
  unsure (1)..(477): unsure at all n locations
agcttctacttatgtggcagggcgggcttcctttattttcttgtctccaacgcgagctctgaccactgttcttccttcccgcgatgcttcttttcatgtccgcctgagtgggcttatagcctaaaccatacttcccacgatttccttgggtttttatcaggctagttatgccgccgttgtctttgcctaaacccatcccgggttcataaccgttccccaacataactcgggccatcattaccgctgcatcggacagacaaggttgcccaaagagggagtccacggaggaaatgctgaccacctcanaagactggaaagcagtttctaacgattcttctgcggcttccacataaggcatggaggatgggcagcttaccaagatatcttcctcgcctgacacgatgaccaagtgcccctccactacgaatntcagcttttggtggagtgtagaaggcacaaactccactgagtggatca

SEQ ID NO: 83727 - DNA, 460 bp, Glycine max
  unsure (1)..(460): unsure at all n locations
ggatcttaagcaccgcggctgcaagctggatcagatcttatctataaatccttttaataaagacagagccactatgtagattatgaaaattccaaaagctgcccccttgatttttcctgccactgcccaaaattttgtccctgtgcacaaggtgctctcctgatgaagcctctgatgatactgctgcatcaccggtaacttgtgctgcaagttgctaaagataacacaacataggaggaaaatggtggcaaccatgaagtacaagtgagcgcttattctgaggccctttggggtttgtgggagtgatgccttggttattatcctcaagatcgaaattataatacctgtcacccagaaaaaataagactaattatttgtataagaacaaactttgactacatcangatatcaaagttacagcagaacttactctatatagattatgatatgtaatcttact

SEQ ID NO: 83728 - DNA, 404 bp, Glycine max
  unsure (1)..(404): unsure at all n locations
cttcaatggcgtcattatgaaaaaatctgaagaatctagctcttctagttaatattcttatatcgacatctatgtgctcttaacggataaattaaataaatgaaatcttttgatacttatgaagcaccttcaatgtaaacaatttaatttgtaataagtgttagctagtgttcaacttttagatagacataaagagtcagaagcatgcaattgccaattagaaaggattagaagaaaaacaganatgattatcctaaaaacaaggtttctagcagtagcacgagatgtcagctatgcttatctgaacacgaagcgtattattgatctacggcacgtatatgggcgtgcgtctctacaaatacttgatctnagtntntatcttttggcttttatcagtacacacc

SEQ ID NO: 83729 - DNA, 466 bp, Glycine max
  unsure (1)..(466): unsure at all n locations
agctnggagcattngaatctcaatatctgcaccattgtaatttcaaaaggatagggtgcaccaaccctcattacagcaaatggtacaaccaatgaataactcaggtccactctttcgtgattgatgatgatcacaagatggagaaatgaaaatgatatgtactctttcttttaataaagtgctagtccaatgagaaaaagaaacggaaagtgaaattctcctaggcttgctcgagtaaatatgaaagcatataggtcttttttgatcgatcgtatatggataggtctagttcaaattttgtgtaaataataataataataataataataataataataataataataataataatgggtaattaaaattntgattatactttggtcaatatgtaactttggtcccttcatttaaattgaaacatttgtctcttatataaaaaatcgtaatcggctaatcctaattt

SEQ ID NO: 83730 - DNA, 461 bp, Glycine max
  unsure (1)..(461): unsure at all n locations
tcagctgctgaangctttatggggttggacttgagcttcatgaggtcttcacggtgatttctacctggagatgcgcggaagatataggagaagaggtgagaggagggcaccacccactagggaataaaccatggaaagaaagagcttcaccaccaagagagtgtcttggataaaaagcttagagaggaagcttcaattgagaaaaagaagagagagagggggaggggagcacgcaatttgaggaggaaaagagggagaagaattgaactntgaagtgtgtctcataagactctcattcatcaaagttacaacaagtgttacacatgcttctatttatagcctaggtagcttccttgagaaacttccttgagaagtttccttgagaagcttccttgagaagtttccttgagaagctagagcttagctacacacatccctcttataactaagttcaccttctt

SEQ ID NO: 83731 - DNA, 483 bp, Glycine max
  unsure (1)..(483): unsure at all n locations
agcttgagaaggctctcggcgaccaattccctgatggagtacgtntacttggcctcgagaatttcggcaacacttgttactgcaacagcgtcttgcaggtcttcgatccgatttacgttttttccttttttattatatttttcttgttctataagtgttgatggcttattgattcatctatgcaaagtttgttgcagtatcttcaggagagtttagtactttaatgtatattattgttttggacattctgttgacctgttttagcagattctttgaagcgcttattcttagttttattaaaatttaaagttggatatgctcttcattatgtttcgttcgtagtattataagcgtctctttaggtgcatacgtcaattttaaagtggatgttgtcttgtagcactcaatatgtttaccatctctaanatatcaataaacgcactaaacatgtctggtgatagtacttgaagactgtcagtntgt

SEQ ID NO: 83732 - DNA, 490 bp, Glycine max
  unsure (1)..(490): unsure at all n locations
tctgttatgtgactccgganactggtgatactngataccatgtattntcttctaaatggatcatattcaatcattcttgatgtctcanaagccaaaatctcctagcacctagcatggtgatttcactntatntatgttagggtgccctaagcttgatcctttactgctgcacatttgtctcatgtgacatgtgagaaatctatattaatcaagttcaacaaagtagtcacgctaggctggtgctagatatatgtcttctaaattcatgagtttatcctaattccttggctgagctgggtggngaaatttagtttagtttatcttgatgaattgattagcactaaaatcttattaaacttatcttatntaatattattatctttaaaatactttcatttntntgagggtntagaataagtgattcnttttatttatgtttaatatcaagtttcaataaaggataagttaaaaaaaaaagtttcttattgag

SEQ ID NO: 83733 - DNA, 477 bp, Glycine max
  unsure (1)..(477): unsure at all n locations
agtcacctgcggcatgcaagcttatctagattatgttntagatattcgtgatttacaacctggcaatgtggaagttttaattcagtggcaaaatctcccttccagtgaaaatagttgggaattggtggctaaattacaaaaagttttttcgatttatcaccttgaggacaaggtgagtcttttaggtggggtattgataagcataagcataaaccacacatcaccaaggtgtacactcgtanactacgagcaagagaagcaataaccatggaccaccagcagtagggcgcacaacacccaaggggtgcataccacccaacagttacgacctacccaaagggtgcaaggtcagaagatgtgaatcaaggggacgtgacctttgggaacagtcacaaccaaccgttatgatccacctaanggatgcaaggtcangagaatgcgaatcagggggcatgacccttgggaatagtcataact

SEQ ID NO: 83734 - DNA, 430 bp, Glycine max
  unsure (1)..(430): unsure at all n locations
tcgtcctcttctntagtccagtcttcttctggcttctattcatcagtgggctntccttctgtgtccagcatcttgggatgttcccagcctttgatgacagctntccaggttctgctatccagtgatntgaggaaggccaccattcttgctttccagtattcatagttgcttccatcaagaattggtggtctgttcactggtcctccttctttctccatgttcatcagaatttatctccccagatctcactctgtgatttcgagtgttggctctgataccaattgaaattctgataccagggaacagatgtcgtacaggatgtcacgacatcacgcttcagaacatgcagtttatgtgtgtccgtatgaacagattaaacaagtaaataacacaagagaattgttacccagtcggtgcacctccctacatc

SEQ ID NO: 83735 - DNA, 332 bp, Glycine max
  unsure (1)..(332): unsure at all n locations
gatccttgagtcacctgcggcatgcaagcttcgcacttgataagggagaacacatgaacttcgctatgcaatgacattcatggtgctcccaaccaaggtggagtattgaggaatgcccttgagggccgcacttatggcatcattaaacttgacttccaacctcgaaggggaggacaccataacaggccttaacaagaacattcatgtggctcttggaaaagacgagaatgganggattgccttgagggtcctctcttangcaatcatggaatacagctccaatacttcgaaatggagaacacatgaacagccctaagcataacattcatgtg

SEQ ID NO: 83736 - DNA, 464 bp, Glycine max
  unsure (1)..(464): unsure at all n locations
actcagctctaaaggagccataccaatactggcttggtagctattggtgttagtnaacttcttcaatggcaaacaatccatccagctaccttgttgctctataatacacgcccgaagtagatcttccaaagtctgaatagttcgttcagtctgaccatctgtttgaggatgataagctgaactaagcttcagctttgtccccaaggcttcatgtagacttgttcaaaatcgcgaagtgaaccttggatccctgtctgatacaatactagaaggaattccatgcaaccttactacttccttgatgtacaactccactagcttctccattctatacttcatattcactggaataaaatgagcagatttggtgagtcgatctactatgacccacacagcatcatgtccacgactagtcttgggtaactagataccaatccatagattgctctccatttcattccgga

SEQ ID NO: 83737 - DNA, 390 bp, Glycine max
  unsure (1)..(390): unsure at all n locations
agccttgagccntaatcctgactcaccatanatcttgactttatgtgagaatgtcaattcttaccctcggaagcaaaaaaaaggggagagggaaaatttccaatcaaagatgaagcaaaaaatgagagaaggaatatttccaatcataggacaaaaagagaggaaagggaattcccaatcacagagtgggagaaagcacaaagaaaagaaagataattcccaatcaaagaatgggagaaagatcaaagagaagaagacagggaagaaagttcccgatcaaaaaagaataatatgcagaaaggtctttggaccggacaatatctgaacaatacagaatcgtcaccaaatgaataataagaatgaaagggaaccgtgacgctaaatggtctt

SEQ ID NO: 83738 - DNA, 484 bp, Glycine max
  unsure (1)..(484): unsure at all n locations
ctcagcttcacatcagaccacttccagggtgctggaactacttcacatgtacttgatggtgcctatgcaagttgaaagccttggaggaaagaggtatgcctatgttgctgtggatgatttctccagaattacctgngtcaactttatcagagagaaatcagacacctttgaagtattcaaggagttgagtctaagacttcaaagagaataagactgtgtcattaatacaatcaagagtgaccatcgcagagagcttgaaaacagcaagtttactgaattctgcacatctgaaggcatcactcatgagttctatgcagccattacaccacaacacaatggcatagttgaaaggaaatacaggactttgcaagaagctgctagggtcatgctgtatgccanagaacttctctatcatctctgggctgaagcatgaacacagcatgctacatccacaacagagtcacacttagaagagggcctccac

SEQ ID NO: 83739 - DNA, 279 bp, Glycine max
  unsure (1)..(279): unsure at all n locations
agcttccacactgttgacgagacgctgttagcttctcttcctgactaaccgatcctgaacgtacacccactgtataagccattgctcaaacaatgctcgcgttatacggcgaagataaacctaccatccctccgatcgtagaatctggaccacctctctccctaccanacgaccgcaagatgagtgctaaaacaaatggatatagagatctcacactatcctatccactctgtcagactatgcaggtaacaactgagatatgcacaacatccgccctga

SEQ ID NO: 83740 - DNA, 433 bp, Glycine max
agctggtggcgtgaccaatttagtgttgaaattatttaaactatctttggagtatgtggtggtagtggagatgttgggctgatacgcccgagacaagagcccacaactgatccgggtgggggatttgtgggctccgtcctgtggtatggaactatatgttattgagttatgattttatgtacactataataatagttctataataataggacaaaagggtacttgctaggattctctgttgtagatacaccacagctgtaatcctggccttgggctcagctggtatctaatactaacctctaggatagtattggtaccagctgtgtatatctctatgagttgtattgtcagtacccctggtacttttgcatatatataattacctatctatgctgagcacaaaaataaaataatagttctataataactgctc

SEQ ID NO: 83741 - DNA, 448 bp, Glycine max
  unsure (1)..(448): unsure at all n locations
gcataaactgcccatcacataagaggaataattatatttctgantttatcanaacttccaacctgcctttcatggagctatctccttccacctcttcaatttctttcatacctgagttgttgaccttcctactaaagtaggcaggcccaagtacctcttcaatttcttatttatatttggctaagattttgccttcataaaattaaaaatgtttaacatttgttctcgcaaaaattttagaatatttttctttgtaaaatttaaaatgtgttaagaaaattccaaagatagtttttggtatacctgaacctacatttgtaatttgcactaattgttttgtaacgtgtgacgggtgaatttctggctataaaaattatcatanatctactgtgtgacaattnttaactcttaaaattctcgtatatatacatatctgggtttataaaca

SEQ ID NO: 83742 - DNA, 443 bp, Glycine max
  unsure (1)..(443): unsure at all n locations
gcttgattggggagacgacgttagtcttattttcactngattattatcaactcatttaaaggaactttcaaggtaaaatgtccgattggggcttttctattattttattatgttattattattttcatatattttgattattttattattggtttttctttttttgatttaaccgaggttactgcatgaacgatcagttggattntgtttttatagagattaaacgagattacaacacaaatgatcggttgaaattcgttaaaaatggaagaaaagaataccgaaagtaaacgaagtaagaatgaaagcataccaatcaagaatggaccactgagggtgcatataatgaattgaaagccacgaattcaagaacttaacagatgaagatcgaagaacaaacgaagaacggcgaagaacttccatggaatcgcttacgaaaatgt

SEQ ID NO: 83743 - DNA, 414 bp, Glycine max
  unsure (1)..(414): unsure at all n locations
tgtcatcgantaccagaggagatcttcaganaatattctcatttgtctcagttctctcattggttcttgaatggccatcaaacgcctatatatatgtgacttgagacacgaatttgctaagagtttntcagaacgacaagtgtctattctctcataaagaataatcgatttatcctcttaagaattccttggccgattcaattgcaattcattaaggaatcatttgagtgctcagattgtaaaatctatctctttcaagagagactcattctttntctctttctaattcactaagggattaagagaccgacggtctctcgttgtgaaacaattctatacacacacgaaggattggccttgtgtgtttagaactttgaaaacggaaattacaagatagtggaactctcaagcggg

SEQ ID NO: 83744 - DNA, 466 bp, Glycine max
  unsure (1)..(466): unsure at all n locations
agctngcattcttacctaaccatntgccatatgtataatcaccgtcaattacaaaagtaaaattctagtttggtgtaacatgatatncaatttcatttctcttgaacttttcttcaatccttcccatgtatcatatttcttcaatcctaaaccacttaagaaatatggtatcatatttctttttgaaatacacattctcttactttttcttctaaccacaatttgaatgtttcatggaatcaaagttgtaattcatgaagctctaagtgattacttcatagcacctattaaattcaacatgttttcactataggtcaagccgacaagggctctagtgtcggtgttgctatgtggtgttcgtgggtgctcgcctatttgcaaaccagtgttcaccatcgtttcaatataaatgaaggaattatctgtggaacgaataacatgttaatcacaaaatcttcatattaat

SEQ ID NO: 83745 - DNA, 333 bp, Glycine max
  unsure (1)..(333): unsure at all n locations
ccactggcgaggacgcagatgatgcttgtaatctctgtgcgtggcanactatccatgcagcttccttgatgctctatgatacacgcccgatgtagatcttacatagtctgaatagatcgtccagtctgaccatcatgttgaggatgataagctgtactaatctagaattttcatcgctaagctatctgttatcttgaacatgacacatcacttgaccacgacatctctgtatgtcacaatgatacaatggattacttgcaaccttactaatgactcgatggacacattcactagctagaccacattattctctatattcactggaatagaatg

SEQ ID NO: 83746 - DNA, 443 bp, Glycine max
agcttgaaagagcccgggtagtcattgataagttcaagtccatagccatcaaagtctgaagagagtatgatgaactaagggacgtcaatatggccaccgatgaagccttggaatgagaaaccaagaaggcccgaaaggaagaacgcgaccaaaacaagttttgaggggctttatagggcagcaatagtgagctcaagctccgaagaggtgaaaggaatcatcacgggtcaaaggcatgatctggaaggacgagctaaaggcttgccttatgtcgaaaagaaatttgtcccaatagttaaagcgagactgaagggaatatgtgggccatcatcgataagtgcaaagagaagctaaatctagcggcgactcacgagcaagggctagaggatgagtacgccaagatatcagtagaaaggggaagcagggaaagggtaattgattca

SEQ ID NO: 83747 - DNA, 480 bp, Glycine max
  unsure (1)..(480): unsure at all n locations
tcctcggtgccattcctgcgaaggcaaacattnggaaagttagttntagtgtgacattactcttaaagcaaaaatggcatgtaacctcctcccatcaatacaaacatcaatgtaaatttagagcaagcttatgcgcatatttccctacgaacgttcacttgcacaagacatcctattaactaagaaaaatgcacccatatacaatcaaggtagcttccttacctagattatttacatgtacttccaaagtgtatttgttatttacatcatacacgccatcttgtcaaaatttacacacatgcatactcaaagcatttcggggtaccaaaaattgcacatgcgctcatcttggtatttctaatatctatacatatacaaacttcatgatgaatcttgactatctacacaatanagtgctacatttcatgcctttnttcaagtttttgctacctaaagccgcatgcaacttcaagcatattt

SEQ ID NO: 83748 - DNA, 410 bp, Glycine max
gctacctagtctataaatagaagcatgtgtaacacttggtgtaactttgatgaatgagagtcttgtgagacatacttcaaagttccacttctctccctcttttattccttcaatttcgagctcccccctctctctttctctccctctttcttttcctccattgaagcatccttccaagcttcttatccaaggctcatcttggtggtgaggctccttccctagtggatggcgcctcctctcacctcttctcctttgtcttccgctgcatctccatggtggaaaatgatgtcaatcttactgggcggatcgtttgatacaggctacgaaagttcggatgacgccacttccagcgaatgaagatatgtcatggtagacgccactgtcagtgaaggaagaatagtctgggtaga

SEQ ID NO: 83749 - DNA, 459 bp, Glycine max
  unsure (1)..(459): unsure at all n locations
agcattnggagaggttccatcaaccgccctaattccttgatgtctggtggatctaagctnttaaccttgacttggtagaacctcttgccggtttgatttgttcccatgcttgctaaagtgagacaaaagctggtgcaaatcaaaactccgatatctcatgggtggaatggatgaatgcatgaaggaatgcatataacacagatgtaatctangaatgcggnggtccggngaattcgtcctcttcttagacacaatgtctaggggtagcanagtgccccaacgtacgtttttaagaaggcgacacggaccctccgttggtttgtatacagaagggatcaagacagaacccatatgcgatgcctatgcaaaagacacaatgcgggaatgtacacagtatgataatattcactgaacataagcanaagggtatatgatactctatgcatggcagtgtaaaat

SEQ ID NO: 83750 - DNA, 462 bp, Glycine max
  unsure (1)..(462): unsure at all n locations
agctntatatattattcttaatattataaatatataacgctaaataaaagaatgtgtataatgttctcaaattatatattaatttaagattatcaaatttactaaatagtaatttgaatgcatattttaataataaaaacaatatatatttatttaataaaagttacgtaaactattcatctacatattttattatgttggaaaaaatgtgttgatttttgaatttattaaatattttgaatagacatgttataataaaaaataattaactactaactaatcataatgagttatattttttattatggaaaggaaatatgaattgttgtacacttgtgctaatatcttgggataaaatcttttaatttcttagcttcggcgttagagctaggtaaacggctttaggaacggctntaggatcatggagttgttaatccgttccacttacccaagagtaaatga

SEQ ID NO: 83751 - DNA, 497 bp, Glycine max
  unsure (1)..(497): unsure at all n locations
cgtgccttntcacgtctggaatatgagtgtagcatatatatctttagacccttangtgctttgctgatggcttcttcccgttccaagcttcaattggagtcttgtcttttacagacttagttggacatctgttgagtatgtaaacaacagtgtagactgcttcagcccagaatgtgttaggtagtcccttccccttgagcattgatctagccatttccataactgtgcaattctttctcttcgacactcccttttgttgagaagaatatgtgactgtaagttgtcgctcaatgccttcatcctcacaaaatctttcaaactcgcgagaggtgtactctttgccgtgatcacttcttagtacttttatccgtnttccactttgattntcagcaagggccttgaactttttgaatactccaaagacttctatattttcttttagaaaatatacctatgtcattctatagaagtcatcaatgaagagtatgaagtaccta

SEQ ID NO: 83752 - DNA, 513 bp, Glycine max
  unsure (1)..(513): unsure at all n locations
gatccttaagtcacctgcggcatgcaagctnntacagattggtcttcgccagagaaaggatcgatgtgggtctganaagaggcaaatttaatcatcctgcttgggcgaatgaganaactgnggcaaatgaagaaggtgaggatgagggagaaacccatgctgtgactgccattcctatacggccaagtttccaaccaacccaacaatgtcattacttatccaataacaaaacctctccttacccaccacccagttatccacaaaggccatccctaaatcaaccacaaagcctgtctaccgcacttccaatgacgaataccacttttagcacagaccanaacaccaaccaagaaatgaattntgcagcgaanaatcctgtaggttcaccccanattccgatgtcatatgctaaacttactcccatatctacttaatactgcaatggtagccataacccctgctaggtttcctcaaccttccattttccgagggtacgactcgaacacaatgtgt

SEQ ID NO: 83753 - DNA, 456 bp, Glycine max
  unsure (1)..(456): unsure at all n locations
gcttttatccagggcacattctggtggtgaagctccttcttccatggcttattccctagtggatggggtctcccctctcctcttctcctttgcctttcgctgcatctccatggtggaaaatcaccattgaagaacctcattgaagctcanagatccagcctccatagaagctccacaagcaagcttccatcatagagtctcttccagcttcgtggttcggtcatagagactnggcatctgctgttgtggccttgtagatgaaccaccctggtctctgttgaattggttaccagggtgattntgccactgtctctgctgttgatagtgttgattgttctgaaatcctggaaatacacttgtattgaaattgcctttgggctgattccccatatataattaacttcatgtaaaaatttctcttcatttgggatacaacatccagattcatgagctcta

SEQ ID NO: 83754 - DNA, 511 bp, Glycine max
  unsure (1)..(511): unsure at all n locations
atccttaagtcacctgcggcatgcaagcnttgatgatatggttgttagacaagtggctctagatatcttaagaagggggggttgaattaagatattccaaactacttccccaattaaaaatctatttgactttnttttaattgagttataaattcccttaacaatgaacttcttaaatattaattcaaataaaaaaatttgaatatgattataaagcaataataaataaaggagtttaagggaagagaaagtgcaaactcatatttatactggttcgaccacacccttgtgcctacgtccagtccccaaataacccgcttgagagttcgactatcttgtaaattccttttacaagttctaaacacacaaggacaatccttcctttgtgtttagaattcttttacaacaagagaccctcggtctcttaatcccttagagaattagaaggagaagaagaatgaatctctcttgaaagagatagaatntacaatctgagcactcanatgattcc

SEQ ID NO: 83755 - DNA, 314 bp, Glycine max
  unsure (1)..(314): unsure at all n locations
aactagctgaccgtctgtctgatatctctctgatttgatgcttacttccttgagctgatgtcttgatctctgactctctttgatgacttgagttttgcatcacctttgcatcatctttcttatcatctttgttatcatcaaaacatctttgaatcattcttgattcaccatgaagctntgcttctacacacgcaagttcaacgaaggggatctcgtcttatagaaggtatcccacgcccagagggaccataggggaaaatgggcttcatactacaaagggccttttgtcgtgaagaaagcctttttcatgcgga

SEQ ID NO: 83756 - DNA, 454 bp, Glycine max
  unsure (1)..(454): unsure at all n locations
cggatccttaagtcacctgcggcatgcaagctngagatgaggaagtgttgaagggtgaaacttcctgcttttattgttgaccacatagtggtacctggagatatgtcacggnggtcaggagaccttgaggacgtcaggtggtgtgctattgcccataaccaagcttgaccaatcccgacccaccccgagcatagtcggtcagtgagaacctgtgatgtacctaaacaggcgagctcctggcagtcaacagataaaaggaacaaagaccacaaagcatggaggtttgtggtggctggccagctctgaaacttgattgatatgtgagatatggtctctggtaatcgattaccaagggtgggtaatcgattacaaggcttaaaaatgaagataggaggctaagatggtctctggtaatcgattaccacggggtgtaatccattaccaggcttgaaaa

SEQ ID NO: 83757 - DNA, 453 bp, Glycine max
  unsure (1)..(453): unsure at all n locations
gagctacctgcngcatgcaagcttnctctctaagcttcttatccaagacactctcttagttgtgaagcttcttcttccatgacttattccctagtggatgacgcctnctttcacctcttctcctttatcttctgctccaactccatggctgaagatcaccattgaaggacctcattgatgttcaaagatccagcctccatagaagcttctcaagtaagcttccatcaagtggtatcagagcacaagaacttcaagtaggtgctccttaaacattcattaattttcagctttaccttctcctccattggtggttcttcattntttttctccatgtatttcctcacatgtcttgtgttgaaggttgttaacatgattctttagaatntttactggataaacttgctatagaagttagatttgatcttctatggntcaaatttcttgttcttgttc

SEQ ID NO: 83758 - DNA, 351 bp, Glycine max
gtgctaccttcatgctatatataccttgttggtaacgatacaacacttctgaaaagatcggactaaaactagcactcacgcataaatatgtacattagaaaaagaataaaaaacataggagataagatcacagaaatttcaggaattagtctaccttgcaggaggaactagtcttggatgttccagaaatgctactgctgcagggacatattatgacactattcctcggagtcttaccatttgaatcataacttttctacttaaatggatactcttctagagttttctaacgcgcctctttggacaaatgtttatgtccagaatcgggccaaacatgtgtgtctttatatt

SEQ ID NO: 83759 - DNA, 464 bp, Glycine max
agcttgagtataattcattacttgtgttatgtttcctcatcaaacaattggattattgatgtttctatcacaatcaagtgatagttgatatctccatatgtgcgtacactatgattatgtttttgtttctagaattcatttggaatgtctattgttgattctaaatgagtgatctctcttgatttaaaagttaccatctcctaatcatttaagtgttcaatttgttatgggttgctcatattccaatcatgtctagttaaactgcttgataatctatctttgttacttctactacaaataaagagagacttcacccatgacaatcacgttaagatgttttaagaggaaatacttgagtaggcatgatccttgttacctgtagatgaaagtcaaacttagtaagacgtgtacctgtgttccttgaggatatgcttagttaccacctatgtgcgagaatgagagtc

SEQ ID NO: 83760 - DNA, 470 bp, Glycine max
  unsure (1)..(470): unsure at all n locations
ggaagtgaggaagtgtggaagggtgagacttcctatctnttattcattgaccacagagtggtacctggagatatgtcgcggaggtcaggagaccttgtggacgtcaggcggngtgctattgcccaaaaccaagcttgaccaatcccgacccaacccgggcatagtcagtcagtgagaacctgtgacgtacctaaacaggcgagctcctgtcagtcaatcgataaaagaacaaagaccacaaagcaaggaggcttgtgtggtggctggccagctatggatcttgagtaatatttggaatatggcctctggtaatcgattaccaagggtgggtaatcgattacaaggcttaataatgaagacaggaagttaagatggcctctggtaatcgattaccaatgctgtgtaatcgattaccaggcctatagatgggatcacgaacgtgagaaggcttctggtaatcgattaccaat

SEQ ID NO: 83761 - DNA, 480 bp, Glycine max
  unsure (1)..(480): unsure at all n locations
agcttcagaccaaagcaattcagaatctatgtatctaaaacccctcaatgtagtggattntcaaggcttgagaagtgaaaatgagaatggcgtatatttggagcaaactctcatctcacacaagtctataacattgatctaaactcgctcanactagttntacgacgaagactctaccgaatcaaaattggactcctcaacacccaatttaccctagaaatgactcttgccttcactttggtcactgattatcctcctttgcacagcccaagctttcccacagtcctaaatgacatttcaaactaggattaactcactttaacctccaattaccactaaatccagatttagcttttcaaatcctcanagcatcacactnttccactcatatctctacattctcactttntaaccctaggttaactctacccttcatctctatctgttttccatcagcantntcagcacacaagcatcaca

SEQ ID NO: 83762 - DNA, 481 bp, Glycine max
  unsure (1)..(481): unsure at all n locations
cattacgtgacctatgatactcagctggattcctttagtagggaatctatccttcctaatatggagccaatctccagtcaccctcattaagaattagctcttttcttcctctattgcctttagttgaatacacctttgtttggttctctatttggttcttaaccctctcatgcaacttctttacaaactctaacctagattccccttctttatgtataaaagaagtgtccagtggaaggggaatgaggtctaacggtgttaggggattgaacccatagacaacctcaaaaggggatttcttggtggttctatgaacccccctattgtaggaaaattctacatgaggaagatactcatcccaagacttatggttgcctttcagaagagcccttaaagggtggataaagacctattcactacctcttgttgcccattagttngtggatgacaagtggtagagaaaagaanngttagtcctatc

SEQ ID NO: 83763 - DNA, 386 bp, Glycine max
  unsure (1)..(386): unsure at all n locations
agcttctcgatatattatgcacctgtttcagtctttcgtttganaagttatgaccatttgaatntcttgagagcttncgttgggcaatttcgagcgtctcgatatattatgcgcctgaattgaacttccgtgtgattagttatgaccatttgaatttctcgacagcttcggttgttcaatttcgagcgtctcggtatattatgcgtcagaatcggacttccgtgtgacaagttatgaccatttgaatttctcgagaagcttccgtgttcaatttcaagcttctcgatatgttatgcaccttaatcagacttccgtttgaaagttatgaccatttgaatntctcaagagcttccattgtttaatttcaagcttctcgatatattatg

SEQ ID NO: 83764 - DNA, 498 bp, Glycine max
  unsure (1)..(498): unsure at all n locations
tctatataagctgaaccatttatcaataaacacaagttgagttttattcagaanattagagtttatctcttttatcttagtgagagtgattctcctaaattcttgagtgattcaagaacaccctggctgtatcaaaggactttcacaacctttgtgtgttgccctcgctggaaagagtgattctttccttcctttcatcttcacccttgttctttcaaaccacaatttcagaaaatccacctctgcccagaattatctcgtggccataactcccattttacgcactcaaattaagtgattcttgagcctaaattgaatttcaaaacgagacctttcacctcgttntggaatcacctcatttggagccctgtagcttcagttattgccatttctatatttctgtcaagccaccacttaacctacgttntaccatcccattcatnncatttatgccaagaaccaccttattaagacccacgaaataaccaccttattttc

SEQ ID NO: 83765 - DNA, 401 bp, Glycine max
  unsure (1)..(401): unsure at all n locations
agccttccttctatacctgaaanagtgtatgagtatatttgcacataaagagaaagcatccaaacaaaaattatcatgcaggtggacctttgttctagtaattatgacttaacacaacctcttaatccttttcccattccacctagagccaattccaaccaaataaatgggagaagcgaataaggagatcttggagaccttcagaaaaggagaggtgaacatacctctgctagatgccctcaagcanattccaagatatgccaagtttctaaaggagctgtgtacccacaaaaggaagttcaaggacaatgaaaggattagcatgggcagaaatgtgtcagcattgatagggtaaattgttcctcacattcctgagaaatgntaggtgtcgcanactaccc

SEQ ID NO: 83766 - DNA, 476 bp, Glycine max
  unsure (1)..(476): unsure at all n locations
ggtgctggaactacttcacatgtacttgatggggcctatgcaagttgaaagccttggaggaaaaaggtatgcctatgttgttgtggatgatttctctagaattacctgngtcaactttatcagagaanagtcagacacctttgaagtattcaaggagttgagtctaagacttcaaagagaataagactgtgtcatcaagagaatcangagtgaccatggcagagaatttgaaacagcaggtttactgaattctgcacatctgaaggcatcactcatgagttctctgcagccattacaccacaacagaatggcatagttgagaggaaaaacaggactttgcaagaggctgctagggtcatgcttcatgccaaagaaacttcctataatctctgggctgaagccatgaacacagcatgctacatccacaacagagtcacactgagaagagggactccaaccacactgtatgaaatctg

SEQ ID NO: 83767 - DNA, 401 bp, Glycine max
  unsure (1)..(401): unsure at all n locations
gacagatatagagagatctcaaagcaagaaaaaaaaataagatgttaaaattcttccaatactttggttaccctgtttccaaaatattaattgtatctgattgcacaactttttaccatatttatataggttaattaataattttcacaaaagaaatatactagtatacagttaaaatgagattgagccctttattaattatcttggcattagaaaattaattccttaattactttgcaatanaaaaacatttcaatgtaaatatacaaccaaaatttattacacatatttttaattatgttgattgtcaaattaatttataaaacaattctcctaatcttaataacgaagtctgaatctaaagctcaacaatcaaactataatactttacttgctttata

SEQ ID NO: 83768 - DNA, 423 bp, Glycine max
  unsure (1)..(423): unsure at all n locations
agcttggaagcactttattcttactaattatattctaagcttagctagntaaggcatatgcatgtatctgaatttaattaggttcagtatctcacacatcgacaatgtaatcctaaaatgaaatggccgccataaaaaagaaagaaaaaaaaattgagagggttagtaaagggtcatccccatacagttcttacaaaaacattcgttaatagtttctctatggggaaaagttcagaattcagattttgaatgcaaacacaacttggacagatatattctagaagaacgataaatatatgattgctaatattatctggtttggcatataatttttttttacaaacttcctcagcggtttcacgcgcctctagatnttacttcatacgaattatataaaggatacaacctttatctactataatg

SEQ ID NO: 83769 - DNA, 403 bp, Glycine max
  unsure (1)..(403): unsure at all n locations
gaaggagctctctaatacttgctaatgctagaactaaagatctaaactatattgttataatgatgtgataagaggctagtttgtcattaatattctagattntaattcccatttatcataattataataagactataagagtctcatgttatgtactctatatacaaagaaattcatganattcacgaaactttcttagtttaacaagaagaacacagaacaacaacaatcatcgataacaatcatataactaataacatagcacattagaggcacgtgacaaataatttcacaagcaaaaccatnnttatgttctattcaatctattggtagatgtatgcaagtgccattgcagccttccanacaaataatatctattgtttggagaangaagatcatacat

SEQ ID NO: 83770 - DNA, 461 bp, Glycine max
  unsure (1)..(461): unsure at all n locations
agctngcaagtaagacttatatctaggaaggttttgtaagccaantcctcacggtcactggttctctcaagcacaagtgtttatgcaatttctcaatcaacaaccaacataagtctcaacttttgaatntcatctcatgccatacagtcacaaacacacaaattaaatctgaaggacttttcttggcttgtaatgaggctgggttgcaaacaattcatggtttctctaggatgcaaaaacttaagttctaggagagcattcatccttagatcaacagttttctcttttattccaactctattacttgcctttcaatatttatagcactntgcttcacttagcttcaataacagcacacactacagctttattcttgaatnttcttnntttttttattttagcaacttttacttggtggctttttgatatatgggtgtgttgtattggtctaaccatactgt

SEQ ID NO: 83771 - DNA, 456 bp, Glycine max
  unsure (1)..(456): unsure at all n locations
tncttgcgtntgctccaatnggaagcccttagtagttgaaatgtttggacattngtgcggaattcaatactcttgcaactcttgtaagaacattctcttgcacatttatacccccaagctactttttgaagaagttcaatttgagactgaaagccaattcaaaacaagggagaatgaccttcaaggtaatagattcttgcatggaatccttgaagaagaaaatggtattatctgcanatngtaagagtgagaccttcaatgaacctctcccaatatccaccttggacaattntttcctctgtcatttctaatcatgccatttagccctcttgtatttttttcctttagcaactttcaagaaaaggaaaggtgtcaatggattgccttgctagagccctctntgtgctatgaattcctttgtgggaccaccattcataagaacaaaaataaaggatg

SEQ ID NO: 83772 - DNA, 418 bp, Glycine max
  unsure (1)..(418): unsure at all n locations
caagcttgaagngtacactaaaagactcaactgctattagatttttattntgaagnnacattcaaaagggttcacatgcaatgaatgacttctgatttctatggattggctgattgttttttaagtatatctcacttcctccaccaggaaattactactgatgtcaacgtttctgctgatctttgcttggagtcgattgtgacatttccatggtacacaatcaaattcaacagctactatattgcggttattacatcctaactatggctgaatgatctgatggacgaaacagtgttcaatcctaatctaaagttgttcctgacatgagacactctaattcttagaagtaattgcacgctctatagctttccaagaagaagctttccgtcaaacaacacatgggttgtcacctctatga

SEQ ID NO: 83773 - DNA, 428 bp, Glycine max
  unsure (1)..(428): unsure at all n locations
gctatgctgcacttgcactngcatgctctntaatgctaccaataatttcttgaatccaatgattcttgagggaataccatagtaactntctccacattggaaaaaagaccgaaagaactttaaaatataccacctacccacccaagggtattatgcaaggccttcatgctccaatattatatcgaatccttgagtcgagtaatgcttcagcaactatatacatggtaaagaacatgagaatgaagtatacactaggcagtccggaatagacaattcgcatattatcaggattgaggctgcgatattttctggataaatanaaaaaaatgcagaatgggatgactcnaggcatttggtcaacactattcagatgatttaccaaataaggggaaaaaagaataatgcagaatgagaatttgcaatatgat

SEQ ID NO: 83774 - DNA, 476 bp, Glycine max
  unsure (1)..(476): unsure at all n locations
gctttatccatggcttcctatggtggngagtcttttctgtattatcttctccttgaagtggcgtgtccattcatctttctccttatccattccgctgcaatcagacatcaagaagcaaagaaatccattgatgaagaagatccaaggcctacaagctccaatggagcttacatcacaattcataatcaacttcacaattgaggaagggaacctaaattcgtgcaaggtaagttggagaaaattccagtccacacataggcctttntaaaatcaattttaatcatcaacaaacctaacttgccttgctctctgtgcatgtgatgaactatttctcgagcaacaagtgcattatctcctacgcctcttcctgagatgaaactgctctgacaagggtccaatatatcattcataaaggggtgaatcctgtgcacaagaatnntggacacggctntaaataatacattatagagaatgat

SEQ ID NO: 83775 - DNA, 505 bp, Glycine max
  unsure (1)..(505): unsure at all n locations
ctacgagacactctagacttgatctaccaccaccgccgccaccatcatcttagncttctatatttntttattactagnactnngnnntctagccgngtatttggctatattatgacacttgaacaatttagtatttctttatttgcatggtatgattgaacaattatgaattatgttatatgactatgtggntcttatatatatttgatctattcatgtttcttgcttcatgattggtttatattctttcatgattgtcttgtgaatgaatagtagtgtatgtatgtttcataattgttacgcactttggctatttgttgatgccaaagggggagagaaatacggattaaatcaagaactcacataagtaattaacttaatttcaagtgaagcataaactaaaaaacanagggggagaatggaaacttatgtgagtgatcgactaggaaacagtgtgtgtatgtgtttcttgattcacgagtgtcatcatcaaaaagggggagat

SEQ ID NO: 83776 - DNA, 395 bp, Glycine max
  unsure (1)..(395): unsure at all n locations
agctngagatgaggaagtgtagaagggtgaaacttcctgctnttattcgttgaccacagagtggtacctggagaatgtcgcggggtcaggagaacctttgggacgtcaggtggggtgctattgcccaaaccaagcttgaccaaatcccgaccaaccccggcatagtcggtcagtgagaacctgtgatgtacctaaacaggcgagctctttgcagtcaacagaataaaggaacaaagaccacaaagcaaggaggcttgtggtggctggccagctgtgaaactttgatgatatgtgagatatggcctctggtaatcgattaccaagggtgggtaatcgattacaaggcttaaaaatgaacacaggaggctaagatggtctctggtaatncgatacca

SEQ ID NO: 83777 - DNA, 480 bp, Glycine max
  unsure (1)..(480): unsure at all n locations
ctaagcttatatcctanattctctgttcttgagggactcatcctttgccatctatctttaatggngagggttaccactatggganaacctgaatgcanatctttatttgagccatagatttaaacatttgggaagcaatagaaataggaccttatgtacccaccatagtagatgcaagcactagcacaacaaccaaaaaacctagagatnaatggactgaggaggatagaagaagaatcaatataatcttaaagccaaaaacattattacgtttgccctaagaatagatgaatattttagagtgtcaaactattcaaatgcaaaggagatgtgggatactctccaacttacacatgaaggcaccactgatgtgaaaagatctagaatcaatacccttacacatgaatatgannatattagggatgaaccctatgagaacatncaaagtatgcanaaaagggtcacacacatagtcaatca

SEQ ID NO: 83778 - DNA, 484 bp, Glycine max
  unsure (1)..(484): unsure at all n locations
ttaagtcacctgcggcatgaagcntgaaggatgcttcaatggagaaaaagaatgagggatagaaagagagaggggggagcacgaaatngaaggaataaaagagggagagaagtggaacttttgaagtatgtctcacaagactctcattcatcaaaagtgcaacaagtgttacacatgtttctatttatggactaggtagcttcctggggaaactntcttgagaaaacttccttgagaagcatctttgaganaacttcttgagaagcatctttgagaaaacttccttgagaagctagaacttagctacacacccnnctatatagctaagctcacccctctgacaaaatacatgaaaatacaaaaaaagtccttactacaaagactactcaaaatgcctcgaaatacaaggctaaaaccctatactgctagaatggccanaatacaaggcctaaacgatggaaaaaacctattctaaatattacaa

SEQ ID NO: 83779 - DNA, 412 bp, Glycine max
  unsure (1)..(412): unsure at all n locations
acattctcccctttctcaagcaaattcttaattcttcttgtcntcatcaaatcttcatgagttacattctcccactctttgatgatgaccaccaccttgtgggtaggagccaccaccaagaanaaatatctatttgcatataggttacttccccctggttttggcatgattgcttatatgaaaacagtgaggaattcatattttcattatgtaacaattctcataaacatagacattnntctactatttaatcttatcttctctccctttgcacatcaaaacaatctgaatgagagaaaagagtacattgtgcatgatgaaatcagtgtacaaagcttnacatcttcatatatgagcaaacagtcataccatataaccataatcatcaatctaaattaataattatccatct

SEQ ID NO: 83780 - DNA, 200 bp, Glycine max
  unsure (1)..(200): unsure at all n locations
tggaaccctacaaggaattgcccccactagaggtttgaggcaaggggaccctntagctccttngctttntaatatagngggtgaaggtctcacttgtatgatgagagaggcccttcataanaacctttatagaagctatccgggttgggaagcanaanngagcctataatatccctccatatgttgatcatatagtcttt

SEQ ID NO: 83781 - DNA, 347 bp, Glycine max
  unsure (1)..(347): unsure at all n locations
aatatgtgaccatggcttgatatttaagatgagatcaatcatctatctttcaatcttgtctcanacatcattcaatatctttcaactctttctacagaaatttctaattttttttctttccatctttctaaaaggttttgttcaaaactttctcttcaagaaaagttctttggtcaaaaacctgtggtattcatcnttttcattctctggctcctttgctanagaacaaggactaaccgctgaattcttgggctctttctccttacaaagagtcaaggactaccgctgaaattctttgttcttccttccttagcaaagattcaaggataccgctgaaatcttgttct

SEQ ID NO: 83782 - DNA, 480 bp, Glycine max
  unsure (1)..(480): unsure at all n locations
agcttcccatcttttgcacagcttccataggactatggagggattagaaaaagctggaatgaccaacgcagagtcacactcaatccaaagggtcaaccaccctttgtctttggccacttcccaagcaagaataacaacaaaaatctcagcaaaaagagagtcttagatacgtatgcaagcggagaaacaaccaagcatacctccctgatgctcaccaaattaaaaataccactgaaaccagcatgaccaggagaaccatgagcagatccatctgtattacacttaatggtgccagccgaggagccctccaaagcacttccttgatatacttagccttacgaggatgaatatcaatagaaaaagctntaataatagaaaattcatgcatagaanaatcatcannattcatantaantatatatgatatatatatatatatatatatatatatatatatatatnattataatataatggatg

SEQ ID NO: 83783 - DNA, 474 bp, Glycine max
  unsure (1)..(474): unsure at all n locations
nttacatagaattctgcaagcaatacctttcttatatgtattacctgcctttctatatcctctgatgcaatcatctgcanaagcaatgagttttgaaacacatgacgtactatatgaaatcaaaccaacccaattcccctttctagatgtgacaaagaaatccataatagatcataatatagaaggaagcatagatgcaagagagacacattatttntaattcaggtgcggagggaagagtaaatgaaagaaattccatatcattcacactaccagtgagagttagagagagcatactctggactctaaattcattacaactgcatactccgtggatgtcttggcatggtcaagctgtacctgtgtaactgccattgcaggaagcctatatnntaattggcacataccangattcacagcangagaaaaaagcaacccagataaaccttgcccgggatgcaatgtattaatttt

SEQ ID NO: 83784 - DNA, 451 bp, Glycine max
  unsure (1)..(451): unsure at all n locations
agcttatcatgtctatggtagaagttacaatgctatattntntgcgacaatgtgcaatatatgctanttgttgatgcatntagttggggtcattgtagtcaaaatcaagattctacttaggatcaaaaggttagggaactataaatngtgtacttaataacactatcagtcaatcgcgagatcctacttaaaatataaaattgtgtttaaagatatacatatgcatagtaaaaagcattaatcttgcaaattatcttataataactaccagcatttgaataaactcatgtcaaatatgcacaagtcacaaactcacaacttaaacagttaaaccaaagttacaagttaacaaattccanatatagaagacatacgttatntgataacatataaaattcaatatgttggaagacgattctgacanagagagcagcataacaacanagcaatc

SEQ ID NO: 83785 - DNA, 389 bp, Glycine max
  unsure (1)..(389): unsure at all n locations
ngagatgaggaagtgtagaaggatgaaacttcctgtctttattgttgtccacggagtggtacctggagatatgtcgcgggggtcaggagaccctttgggacgtcanggtgggtgctattttccaaaacccagccttgacaaatctcgccccacccaggcatagtcagtcagtgagaccttgtgatgtacctaaacaggcgagctcctgacagtcaacagataaaaggacctagacacaaagcaggaggcttgatggggctggcagctgtaatcttggtgatatatggtatggctctggtatcattaccagggtgggtatcgattcaggctaaaaatgaaacagagctaaatgtctctgtatcgataccaaggggtgtatcataccagct

SEQ ID NO: 83786 - DNA, 146 bp, Glycine max
tgtccgacgcaacagtaatgatggcccgtgtatgttgtataacggttacgaacccggaatggcgttaggcaaagacaacggcggcataactagcctgataaatgccacaggaaatcatgggaggtatgggttatgctatacgccca

SEQ ID NO: 83787 - DNA, 100 bp, Glycine max
agcttctcggcttatgctgggaacgtctctagttcatacactcgtgcagcctaaggcacccacccagagggaagctccccaaggtccaactccgaacgcg

SEQ ID NO: 83788 - DNA, 408 bp, Glycine max
  unsure (1)..(408): unsure at all n locations
atactcagctttaatccagacactttcttggtggngaagcttctccttcattggctnatnctctaggggatgacancctctctcacctcttcttctttatcttcaactgcaccttcatgggtgaaaaacattaatggaggaacctaatggaacttaaagaatccttcttttaattaacctcttaagccagccttccatcagtgggtaatcagaacacaagaacttcaagtaagtgcaccttaaaccccattaattttagcttaccttctcctcaatgtgtgtctcatttggctcatgatctcgcacatgactgtgctgaatgtgtacatgatttttagaattcaccaataacttctatgagctgattgatttctatggtcaattatatatggtcttgacatgaatggt

SEQ ID NO: 83789 - DNA, 373 bp, Glycine max
  unsure (1)..(373): unsure at all n locations
gttcgctcagggcagtttgggcaaanaggtatcccattcttgaacacctacgatggtcgcactatccgctacccagaccctctcatcagagctaatgacaccattaagttggatttggaggagaacaagattgtcgatttcatcaagtttgatgttgggaatgtagtcatggtgacaggtggaaggaatatgggtcgtgttggagtgatcaagaacagagagaagcatatgggaagctntgagactatccatgttcaggatgccactggccacgagtttgcaactcgtatgggcaatgtgttcaccattggcaagggaacaaaaccatggatatctcttcccaagggtaaaggtattaaactatcaatcattg

SEQ ID NO: 83790 - DNA, 257 bp, Glycine max
  unsure (1)..(257): unsure at all n locations
atcctctgagtcacccgccgcatgcaagctnagagggagcgtttcccactctctctatgtattagaacaccaggcacgtgtatactatcatcgagataatctctgtctctgtttatgggggtgctacatgagtcgccaagccatattcatctgagggcgtattctttgaaagatatgtgcccccttttagcactctatatgtagctgcatcctatgcggagccatatgatgaattgtacttgacactcgtctaatga

SEQ ID NO: 83791 - DNA, 460 bp, Glycine max
  unsure (1)..(460): unsure at all n locations
ctcaatcattttctatatgtatgtgtattangaagcatcaacaagaatcaagccaaggctatttgtgcagcaatcaatggggaaaaacacaccanatgattatgatgatggatggctcaaattctcacaaaggtaaacttatcacttccaaattgagctttcaaaactatcatgacatgtagaggaaaaacaaggacttcanatcacaaaaatgtcaangagactntttattttcaaaaaattacccatttcttgaacatatcctataattcanagaanaacatgcaaagttgtacatgcaaacagaattgacctaacatattaaactaggaacccaacaaaactaacaaaattaacaaattaacacaactaacaaaattaacaaaaccaacaaaactagcanaaccaaagaacattccccccatacttaaacaacacattatcctcaatgtagcacaat

SEQ ID NO: 83792 - DNA, 297 bp, Glycine max
cgtacagaaatctaaatagcgcgctctatatatactcgatgattacacacacgtatatgtagaaacaagatatagaatggtattgtagaagaccaatgatgttatcctttactatactcattgtttacgaatctattggtatgctcactttccagatatgactaaaagacgatgaatataaatcttcggaatttaagggaatagagctacacacttcttcgattctctcgtcttcgtctcttgactcctcatatgtgtctttgatttaaaagtgtaataaaataactctcattctca

SEQ ID NO: 83793 - DNA, 408 bp, Glycine max
  unsure (1)..(408): unsure at all n locations
gcttcacggaaatggcaaccctcgagtatatcccttttctcagtatgcnacaaggatccatgataaagaacgcgcccagtttcataaacagatagtgatatacaaagtgcatccaattcccgacgcacacttgagatctctttatactggttcaaacaatatctactttcagagtcataaatgtccacacagtttctgttcaaacttcatgtgcaaaccccatataccattgccgatcaccatccgttcaatttctgaacaaaagacctgctgctgctgccatacagatagcgatgccctggataacagagccatatactccatccttctgcacaaagcgactagggtatctctaatgataacgaacgctctatcgacatatactcattattccggcatgatctcctg

SEQ ID NO: 83794 - DNA, 166 bp, Glycine max
  unsure (1)..(166): unsure at all n locations
gaagcaagatagttgagtgtttttacattcctgtgaatggtnttacaaaacttatatcaaaagtggtaatgggatatttcccaggccacattcccaagaagcttggttaacacaccctggaaccagaaccaacccaatggtccaaacttcccttcccattttccac

SEQ ID NO: 83795 - DNA, 488 bp, Glycine max
  unsure (1)..(488): unsure at all n locations
tctaagtcacctgcggcatgcaagcttcntccccaattatctataaataggnggtgttttgttgtatataagggttcagccccttaggcacttctctctctttcgaatttgcttatgaaaattgtttccgtgaagaagatccaagccgaggcgctttcgtaacgtttccgtaacgtttccgtgagtgatttcgcgaaggttttcgaccgttcttcgacgttcttcattcgttcttcatcgntcttcagtcttcaacgggtaagtacctcanaccatgcttttcaattcattctatgtacccgtggtggaccacatttggatacatgtatttttattctcgtttcgtttactttttatacccccttctgacgtgcttaagccattatatttaagtcatctctcgcttaacctaagaataaaataaattttcaccgatcatttgaattgtatatccgttaactntggttgaaatgaattccgaccgatcg

SEQ ID NO: 83796 - DNA, 461 bp, Glycine max
  unsure (1)..(461): unsure at all n locations
gaggaggataaagctctcttgcttctgaattccttaccattatccttttatcatttcaaggatgcaattctntatggcaaagatcaagacattaccctataagaagtccagacctcaacaaggaccaaggagatgcaaaaacagcaaggctctaaatctgaggataatggtgaaagcctgaatatttcaaaggaaaggagtgaaaaaagggaacaagaagaaaaaagtccatatcaaggtcaagggattcaaagaatggctagaaaacaaagttcaaatgctttaattgtcacacaactggtcatttcaagaaagactgcccatacaagatcaagaaaggatctttggactctgctgacatatttgaagcctctgaaggttatgagagtgcanngtgtttaataacttctaataccaaaacacaagcagaatggattatggattctggatgctcatatcac

SEQ ID NO: 83797 - DNA, 462 bp, Glycine max
  unsure (1)..(462): unsure at all n locations
atccttgagtcacctgcggcatgcaagcttgcgggagtgataactnntctttttgatgtgggtgtcgggcaatccgcctttctttttttatgtaccgatgtctatttgagggcttgggtctcatctttcccttgaccggcttctaatatgcttttcttgagcacctgaacctgggccctttccaacttcaccccaaccaggtggctatggtgacgaccttaaagattttgtgcctttctttcacatttgacctagtgtgcttgtttcttgaaaacanatgtaacgaaactttgtacatcngntttatggaaccgatgtaacaaaacatgtaacatcatntaagctactctactcttctatcgtgacgctcagtctcgctttactctactcttctattttgacctcgtgtcgtctcactactttgcttactctaacgcatntcctcagtgttaacttgcactc

SEQ ID NO: 83798 - DNA, 386 bp, Glycine max
  unsure (1)..(386): unsure at all n locations
ttagctttggtttcactttggttatttttaactccttataagagaacattcanggtaaatgaccggttgaaacttatctttntgatgattaaccgaggttatagcacaaacgatcgtttgaattttattttaacggtgattaaatgagattacaacacaaacgatctggtgaaattcattttaacattgattaagtgagattacgacacanacgatagaataaaattcattntaacattgattaagtgagatgacgacttanacgatcagtcgaaactcgcttaaaacaaagaanaagatcaccgatggtagaagaatgaagatgaagacatgncaagcaaggatggacccctaagggtgcatagaatgaattcaagctttcaaat

SEQ ID NO: 83799 - DNA, 446 bp, Glycine max
  unsure (1)..(446): unsure at all n locations
agcttaccttgaagaacagtacgttgcagggcgtgtcatctctcataagagcacgatgaccctaggttgtggtggtgcgaaaaaaacgcgacgcagaggtagcggaggctcgancatgtaccctttcttttgcagagctcacggtggtgcaaggggagatgagctcaataggagatgccgactgatagcacaattttcagatagtgatttctaggtacgtgtgttcaattagcgtgcaagggggacatatatgaaagcatgttaacgacggtgtatttgaaaacccgtctttgagagtcaatatttctatgatggtgtttacaaatacaccgtctttgataagctccggcctaaccaacanagatggtgttagcaaaaaacgtcgttgtagacatcacgcgccatgcacattgtgaaaagcaaagcttcaagcttattttgatgat

SEQ ID NO: 83800 - DNA, 474 bp, Glycine max
  unsure (1)..(474): unsure at all n locations
ctaagcttcgccgcagatcctcttgaagactaggcctagactaaactttattatcttatcaacataattaaaaccaaaacctaatccacagatccctcttgtaagactaagtttcgatcctgcttcaatcaagttctaaggcaatagtacatttcccaatgctaaagtcacctaactatgcacacaaatggatgatcagaccaaaagcatacaaacattaagcattgaaggaagcattgaacacagaaaacataatcaattagatattaagtatttacatcagctgttcattagaaatcccagactagggtgtttagctagccattacagaagaaaccctaacaataataagcttacaaaacctaggtatctcttgcaaagctgctcctcttgctgcatncagagctctattcccgaaatangcattgtggtgtgctgtgcaattctgtgctctggcccttctttcaagttcta

SEQ ID NO: 83801 - DNA, 272 bp, Glycine max
gacaaactctagcaccacttcttcaaggataggcttacgatctatgttcatcatggtggcctcttcacattcctttagagattccagaacaaaatcttctagaatgtcttcaaattccttcgctgttaaggcaacaaatcttacatccttcactaggtttgttttatgttttttagcagataaagccttcacagaaactatgatgacttgttctattgttgaagcttacttcctttccaaggtctgatcaagattttccttcttccttgatt

SEQ ID NO: 83802 - DNA, 351 bp, Glycine max
  unsure (1)..(351): unsure at all n locations
tctccnctattntgctataaatagggggagaagtgaagaagatttctaagccgaggcgcttccgtaacgtttccgtgagtaattacgcgaagattctcgaccgttcttcaagattcatcgntcgttcttcggtttcttcagtcttcaacgggtaagtacctcaaaccaagcttttcaattcattatatgtacccgtggtgggccacattggggttcatgtggttttattctcngtttcatttactttttatacctccttttgacgtgcttaagccatttatttaagtcattcctcgcttaatctaaaaataaaataaatntccaccgatcgtttggaatggatcatctgat

SEQ ID NO: 83803 - DNA, 500 bp, Glycine max
cttaagcgcctgcagctgcaagctagcatagcatgaacaaagagatttttagttatctaagtaagagaacaacatatgatttgtgataccactagagctggtttgtgtggtcatgatgagcaaagtggattggtttaagcgatgacattgtggagacaaccatgcatggacgttcaagaaagtgaaacatggggtttaataatgacttcattttgtagctacaataaatttgaatcatgtagtgcttaaattagactgtaaaatgatagttggcgagataaatactgcatgtggcgatagacaaaattgagaaatattgttgttgaatgtagaaatatcttagttgctcattcatcctatggaattggatttgttaagaggtaagctgctaatggagttgctcatgagttagcaaggatgacttcattgatccctagcctatactctattaatcatgtaattccttgtattgagcattgcagaagcaaataacacaagaa

SEQ ID NO: 83804 - DNA, 442 bp, Glycine max
gccacacctgtgtgcatctccaactttttctcttattccacgactccattataccgggctggaagaacactaaatctgcggcacgaccaataagaactccttaataccggcaacattgtccaaccaaacccaatggaggaaaaaaactacttaccaccccatctataataaagtgtagatcgaacggcgcgaactgaacgctggccgaagatgttcgacgatggcgcgaggcgatgaataagatagctacaaaggagacgatgacctctaggagggttgaaagttgtgcacgtagtccagtatagaatgaggacacaagccacattggttcatgtactgcaagactataacggtgctctccagaaacatgagggagaagcagcgttatagacagtcatttctagcactgtctatgctgacgaagtgctaattacagaaatat

SEQ ID NO: 83805 - DNA, 469 bp, Glycine max
  unsure (1)..(469): unsure at all n locations
agctttatataagctgacctttatcatattccaagttgagtnntattcagaagattagagtttatctcttttatcttagtgagagtgattctcctaaattcttgagtgattcaagaacaccttggctgtatcaaaggactttcacaacctttgtgtgttgccctcgctggaaagagtgattctttccttcctttcatcatcacccttgttctttcaaaccacaattccagaaaatccacctctgcccagaattatctcgtggccataactcccattntacgcactcaaattaagtgattcttgagcctaaattgaatntcaaaacgagacctttcacctcgttttggaatcacctcatttggagccctgtagcttcagttattgccatttctatatttctgtccagccaccacttaacctacgttttaccatcccattcatttcatttatgccaagaaccaccttatta

SEQ ID NO: 83806 - DNA, 387 bp, Glycine max
  unsure (1)..(387): unsure at all n locations
gatgacgagctttntctttcttggaaggtactacaagatatggtacttccacaccttcatccacaactntgtcactattactcttctttgcattcttattagttttttcttctttttcatttttttttcattttctattgctttttctacttctttttctgtttcttggtccgttcattctttattcttgaccattatttgttcctttttttcttgattactttcacctctcacctcattnttcttgccatcagtactttnttttgtcaaaagttttctttntatgcacaacattatcctcatcctcagcctccacaaaccttttactccttgtcatcacaactntgcattcctccttgggattctgttctgtatttgccacaaaac

SEQ ID NO: 83807 - DNA, 469 bp, Glycine max
  unsure (1)..(469): unsure at all n locations
agctaacagaggcctgcggcatgcaagctagttgactnttacaataaaacgttaaatgttatattaacataatntatgattcaatgtcaatgtgaattntttttacaatgtcattacatgatcgaacattaaactcttcttattaccacatggtggtatcttttgttaaaaaaaattcctccaagtacaagttaattaaaatatcgatgactagctttcgacaagattaaggtgacgttggttctatcaaaatattgtctttcgataaaagatggtttcttgacaaaatattatgcacatggaagaatagagtgctcgcaggacgagtttgaatttgaattgaatanaagtacaaaagtagcgaaagggttacttgagacatagacgtcgtagactaaataataggaacttgtgactcgtgcaaaatctatantcaacattagtggtaaagttataataaataccttac

SEQ ID NO: 83808 - DNA, 412 bp, Glycine max
  unsure (1)..(412): unsure at all n locations
ccttcacagnttagtcattntaagatctcttataactgtcataaggagaaatgatctcttaatgagctcatttcatactgtgtgcaagaagaggaaaggttgaagcaagaaaggactgaaactgctcatgttataagtacctctaaagacaagggcaaaagaaaaaagaactgangagcccaagaatgaagctgctaaggtccaacacaaaagaaacaaaattaaggtgacaattgtttcttttgcagtaagcttcgacatgtaaagaagaaatgtaccaaatatcatgattgacatgtaaagaaaggtatgtttcttacnttggttngttctgaggtcaatttagcttcagtacctacaaacactcggtggttagattctggtgccactactaacatcagtgtttcaatgc

SEQ ID NO: 83809 - DNA, 429 bp, Glycine max
  unsure (1)..(429): unsure at all n locations
agctagcacgttcatggcgctctatttccacttttattaccctcnnccttcgctagattgataataatgtntcttcaagacacaaccaacttggatcagatagaaacacaaacgccattcatttcttgtcgctcggaatccattatctcaacaactttaaatagtatttacgcatacaaaaatgcgtattggcacaacagaatttccaaagcaaaggataggctaacatgttctgaatatcacaccatatttatatatataaacatatcacacatgtcatagagtcgatatataaaaaatcaaagtaaggactcacatataaantttccttgcctatgtcaacgtgagttctccaataacacactgctagagcacacaaatcaacagttctgatatccaatcagattcagagcaaatgcctacctcata

SEQ ID NO: 83810 - DNA, 277 bp, Glycine max
cactagacacactcctttcgatgacccaatacaatctacttaatctccaataagcacatttctgaccttgctaatcaccatcggacgactttgggtgacttactaacgatactaccctacatattgtgagacacccacatacactatctttttaattatacgctgctaataaagctaataaataaactcacatgaacatggacatgcccctgtctttcataggaccttggcagtgtcagcgacccatatctgtgcttcatatctttggctagaatct

SEQ ID NO: 83811 - DNA, 240 bp, Glycine max
atatcgccataaatgatgacactctctcgggcatccgatgaaagagttattgtggcttgaattatctaagacatctcgtaactaatgtggagggtctcgatagttcacaggactgaaccggacagtctagccaaaagctagtgttaagtcaatatataagagctccagatctaaatctcgagcgtagggtatattgcgggactcatgagacatccgagaaaaagttattgtcggttgatt

SEQ ID NO: 83812 - DNA, 410 bp, Glycine max
  unsure (1)..(410): unsure at all n locations
tttcattcttctagaatctagataccattactccattccttcttccctctggtccagactcattgatcattaatattgattgcaggaaaaagcactattgcatgtgctttgagtcgaagcttgcactccaaaggaaaactgtcttacatccttgatggtgacaatattcggcatggtctanaccaagatcttagtttcagagcagaagatcgttctgaaaacattagaaggattggtgagtttatctggtttttcttatgttgctttctaaatgctttccctgatatcttccgaattatatttattggtttattaataattagacatcacgaattaaaattttcacgtgaggtggctaaactctttgcagatgctggtgttatntgcatcacttagttaatatcaccata

SEQ ID NO: 83813 - DNA, 265 bp, Glycine max
tctcaaattagccttgaattatttgacctaccaataatttgctaataagataacatctttttcaaatacctgtaactaaaaacattattaaaactctatctcatatcatcaactattttcatgatataattattttttcaagggaacactctgatttgatcctagcatgctcacaccatcttttataagaagttagactttatctcaattaaaaagtgccgcattaatacgacaactatcattaaagtgtacattgtgcgtcact

SEQ ID NO: 83814 - DNA, 174 bp, Glycine max
acaaagactcagagagaaggaggctgagtttcacacacgacgacgcagtagtcgaacaaggagacaagacatctgcctcagttatatataaaaggtacatgacatatgcctgtagctaatatgacgaaaaaaattaaagaaaaattgattattgatattatttttataaccgct

SEQ ID NO: 83815 - DNA, 460 bp, Glycine max
  unsure (1)..(460): unsure at all n locations
ctgcacctactggtcctgngntacctgcctggccagctngatatgatactacatgttgtgtttattcncgttnttctatntattaagagcacttgtggttttcgatttacatattcttttaacatactaaaaaatgaggctattgttagtttttgtggcacaggacgatattggcataactatctgttccaatatgtagagtaacatggatgattttntgtggatgttctgatagaatcagcgcctgtcatccacggtgttatagtcctttttggagaaaacgtgcacccttttgaatttcaatcttcatgtagaaatatataagtgatactgagataatgtcaaagaattatcgtcgcatgaacatactagctagtttctgattccctatcattgttgcttcaatcagtctcgccatatcgtgcttcgagcactgtgaaagtctggaatctttatgatt

SEQ ID NO: 83816 - DNA, 124 bp, Glycine max
  unsure (1)..(124): unsure at all n locations
taccctcaattcaatggagtttctagggttgagaagtgaaattgagaatgaggtaaattggagcanactctcacctcacacaagtctataacatcaatctaaacttgctcaaactggatttaca

SEQ ID NO: 83817 - DNA, 364 bp, Glycine max
  unsure (1)..(364): unsure at all n locations
tcatttatcagctttctttcctactattcttatgagaagtttatcgaaacaggtcctagctcatgtggtcttggtgctacagctgcacccatgatcagttagtttactggaagactggttgctntggtacanactcacattcatgcctctgtagagattattattcccaacaatgaattaaggtgggtaattttgttntatttggaagtattagtgtgaactgttgagtaagacccttcttttcttaataacccaaacagtcggaaaatacagaagatggaactaccacagnttgtattctttctgaatatgggaagggacacccttcaatctctaccaaatctgtggacacctgcaccccaat

SEQ ID NO: 83818 - DNA, 316 bp, Glycine max
  unsure (1)..(316): unsure at all n locations
tgttctcagtatgaaaattaatagtccaatgcacaaaatcagaatattcagaatcaccaacaacanaatactcagaatgctcaaaatgcacagaatgactangatgcacactatgcctaactaatctatgaaaggttctatctatttcangatcaaagggttgtaaatcacctggattgcccctagtcgtgcactagatgcaacaaatcatgtgtttctcanacaagcaccaggggaggggtaanactacaactatagtccaacgatatccaaatgaagttaaattttgtgagcaatnaccctaaatcatgaaaag

SEQ ID NO: 83819 - DNA, 293 bp, Glycine max
  unsure (1)..(293): unsure at all n locations
cttaatggctgagtgtaactgaaattgtggcnaccaaatgtcacccccaacagcccacaagtcagccaccatttggtcttccanaaggctgatgcctangttgccaatngngcccttattacaactngaactaaacctaactaaagtccttttagttgattaacccanaacatatntttggtcagccaactntacaaggagtgngccattatttagacaaactaaacactctanaatngaaacaaggtggtgtcattagtccttctccatttgggccatgatacaactcacaa

SEQ ID NO: 83820 - DNA, 551 bp, Glycine max
  unsure (1)..(551): unsure at all n locations
agctntngtatatatactggctgccncagcaacactttctcctgagtgctctctgaaattcaaatggctggcaatctcatttgaatgactcctctgtgaaagggtatcaactggcattctggaattatcaagggtgacacaagcagcagagaaatcaacagaccagtccctgaccctgcaattcctagaatcaatctctgaaatacaatcttgccttccataaacaccaccaggccatctttttctactatcacactcgtcattntgtgaaggctgttcacgtctagcanatttgtggaatgagggtatctttggaagctgtaacagggtattacatctggcttctgcagaggcatatgcctgcaaagaagcaacattgaatctttaatgaacatggcaaccannaagcgaaaggaatcatangatatattaagaggtaatacaataatctatgcatattttgacatcagacataccanttaacatatatanatacatatgtatctatacccagtcacaaacatgtgaaaacatcaattnacatattaaat

SEQ ID NO: 83821 - DNA, 387 bp, Glycine max
  unsure (1)..(387): unsure at all n locations
atatgcatcntggttgtgggaacagttaatatatccgctactgtcacaagtatacacgtactcgatttatgcatgcttgtttcgggtaaatctcttgataatatcttggattttatctcgatacataactatgattagatgagaattaaacacaagtctcatgtttaaatagatcattcctgataatatctctatttaaacactacctaatagatattcttaatcacatattaaagaagaatttattacgcttaaaatattttaagttcccgtatatataggattatcttcagaatcctttagattaatgactttttaggataaactaatattattatttatttatcatttatactatcctcacatccaactagtgttttctttgta

SEQ ID NO: 83822 - DNA, 541 bp, Glycine max
  unsure (1)..(541): unsure at all n locations
atcctctgagncacctgcggcatcaagcttctagtttagatgatgcgatgggttgtatttattcatgcactcctctaatgactatggcatcatttctggcactaaactgctgggaagtggaggccatcttctcaattaaatttctggcttaagtangagtcatgtcttcaagggctccaccactggcagcatctatcatacttctctccatattactgagtccttcataanaagattggagaagaagctgttctgaaatctgatggtggnggcaactggcacatagtttcttaaatctctcccagtactcatacaggctctctccactgagttgtctaatacctgagatatccttcctgatggctgtggtcctggaagcanggaanatttttctaagaatactctttaagtcatccaactcggatggacttggacaaggaatacagccagcctttgcacttctctatgagtaggaaagcttagaatatgtatctcttgactctgnggttcatggtgacagacatgtgaatcttcaatgttg

SEQ ID NO: 83823 - DNA, 457 bp, Glycine max
  unsure (1)..(457): unsure at all n locations
ctaagcttcttctcacattctaccgctaccnacattgacctgacctttgtcacatgggccaaaacattacccttagcgcagacgccccatccacctccttcacagtctcaacccatcaaattagacgaactttccagacccataacatctcgactctggttcatatcaccaccaccccggattcatcctgaccttcatcagcctcttcgtcaccttcttcatgccttacagaagacacctccatcccagtctcgataaccaatgtnctgactcgctacccanacattnttgcagaacccactcagtttccttctccacgagacattcaacatcagcattatcttctttctcaaaccaccccaatcaacgtccacccttatagatacccacactgtcagaanacagaaatcgagaaatagatgtcggccatgcttgacactaacctcatccaacctag

SEQ ID NO: 83824 - DNA, 352 bp, Glycine max
  unsure (1)..(352): unsure at all n locations
agcttagctacacacncnctataatagntaagctctctccctttccaaaaatacatgaaaatacaaaaaaaaagtccctactacaaagactactcanaatgccctgaaatacaaggctaaaatcctatactactagaatggccaaaatacaaggcccataagaaggagaaacctattctaatatttacaaaaaaagagtggatccaaccttgacccatgggctcaaaaatctacccaaaggttcatgagaaccctagggcattctttagtagctctagcccaatcctcttggagtcttctatccaataccccttgggggtaggatngcatcatgcacttaacgcgttcatcg

SEQ ID NO: 83825 - DNA, 335 bp, Glycine max
caatagcatcatttctagcattgaattgttgggagttggaagccatcttctcaatcaaattcctagcctcaagaggggtcatatcaccaagagctccaccattggcagcatcaatcatactcctctccatgtcgctaagtccctcgtagaaatattaaagaatgagatgctcataaatctggtggtgaagacagcttgcacacacattcttgaatcttaccagtactcatacaagctttctctactaagttgcctgatgcctgaaatggtctttctgatggcagtggtcctagatgcacggaagaatttctccagaacaccctcttatcgtcatc

SEQ ID NO: 83826 - DNA, 269 bp, Glycine max
  unsure (1)..(269): unsure at all n locations
tcttaatactaactattttgaattctttagttcctgaatgtacaaccttcanatttgtgctcgctccccctcttntgtttatgcacaaaatcaaataaatatcanacaaaacatggatagaaatgtcatcgntattattacttgaaccataaggaataacatctaaacangtaatttaaaacgcaatttatttattttttggtatttntattaattacaattttacttcaatatctanagttttaatctacttaagtggaggatgttga

SEQ ID NO: 83827 - DNA, 211 bp, Glycine max
taagtaagatttatgaaattcctgtaaagaatattgcttatacgacctaatatatcgattaaggccatgcagtggtgttatgctagacaagtgtgctgtttgtcgtgaataaaagctgtatcatatcaactgaataacaagtaagtttgattatactcattaattatctaactggaaataatgcgtatatcgattacgtggtgtttttcta

SEQ ID NO: 83828 - DNA, 365 bp, Glycine max
  unsure (1)..(365): unsure at all n locations
agcttctaaactttatacaagaatgatgctcttatattatcttcttggacaagtggcctcagatatcttaagaaggggggttgaattaagatatcacagactattccctaattaaaaattctacttttaatttaacccaacaacccaagattcctttatacaagaactcctagataataatgaaaattaatcttactaaatagaaataacaataaataaacaatanaggagtttaagggagaagaaaatgcaaacttagaattatactagttcggccacacccttgtgcctatgtccagtccccaagcaacccgcttgagagttccactttcttgcanaatccctttacaagttctgaaccacac

SEQ ID NO: 83829 - DNA, 281 bp, Glycine max
  unsure (1)..(281): unsure at all n locations
ctagatccttatttatccacacccctctattaactaaaataacctccttaaaaaataattacggatgaaaataacgcaacacagaatatgttatctctaataaggtgtcaacgtgggaacccagttgtttcttttttaagagacngtngggagttggatggacaatatcttttttggaggaggacaccttgataaatcttgttatgagtcccctgttattttttctcttttatagggtctcagcacgtataccatactatatattcaagagttatgtggct

SEQ ID NO: 83830 - DNA, 314 bp, Glycine max
cggtgatgcgacacacgacatcgcactacaccatcttgtatggaaaaacaacgcgggctaaaaaaacaacgtataataggatcacgacccatataagaaccgcggtgtggatcattcacacgtgatacacgcgtgtttgtcatttaacgcggagctaccacgcgtgatcttcttcacgcggtaaaggccgcgtgttgcagatataacgcggtctaccccgcgtgtggaatacattaaacgatattacacgcgtgaaattgcgtgacaatggttccttagttaaacactcttttccaactttttgaactaaaact

SEQ ID NO: 83831 - DNA, 406 bp, Glycine max
  unsure (1)..(406): unsure at all n locations
tgcttaattttatgaaccttggaaantatttgtacatccattttcttatcattatattcacatcagcgagcattacatctgctataatcattctattgaaggcaagactgacttccaacacatcgttacatacactgcaaatcaatgatggcgatatctttaccgcccttattgagcaagactctaatggtaaaataggtttaagtatttatatgtaatagttgtgggataggagtgttgctgttccatattttattaattttgtggagaatttgtcctacatgnatcatgaggctgttgtgtactactacttagccatcaaggaccaatgactggatttttgttttacatagctcattggcctcatgacaagcacaagcacatttgtttggtcttcttatgacta

SEQ ID NO: 83832 - DNA, 305 bp, Glycine max
  unsure (1)..(305): unsure at all n locations
tatgatgcacaagttctctacatatctatatcctggtaaatatacaaggagatctaaacatgcaaatcaattcanatgacatnattagatcaaacaacgganattaaatattacgagcgtacctncaaccattgcaaatcgaacgctaagcggtgcatacatgaacctaaagacagttntggtcttccagacccttactcgctctgaatagatgatgtattcttttctgaatagagaagtcagtttggtgatacaaaactgagaacaccccatcctattttatagagttgtccatcacagagctc

SEQ ID NO: 83833 - DNA, 321 bp, Glycine max
  unsure (1)..(321): unsure at all n locations
cacagctggtgtaaaccttttagtanaagacaacacaaaaattgaaagaagaaaaaaaatattaccttattactttgacacttttttactntattctcaaaacttagcanaagctttcactcacatcacaatcctaataccatagaggtcaccctggcaatggcatcactcttcaataattggatntccttgtcattgatgtttctcattaaaacgagttaacaacacaagactcgagcaacatgctactttntcttctgtaaatgtgtgacatgggcatagcataagaaataattaaagataatacccaaacaataatct

SEQ ID NO: 83834 - DNA, 411 bp, Glycine max
  unsure (1)..(411): unsure at all n locations
tatgcaccatgaactcgctggccgctcttgtcctangtcgacctacatgctgctatgcacaaggtgtttgtttgttttatcgtgagaagaattaagtacgtacaatgggaagaagctgatctctcttggtaaacttcaaggatcaagtcaaggtattgtaaccttgcatctaccctaactgttaagaaccacgccagctcgctaacatgccgtctgatgtctgactcctcacttgcaccagacgtcttacttcagtagaatatacatgttgtgcttgcttcaagacatttaaattaattatgtactgatgggaacaaatatctacatcataaaacattactgtcactttacatatataaaagtaacaactatatttaattgtatggagagctttctaacatatctattttt

SEQ ID NO: 83835 - DNA, 356 bp, Glycine max
  unsure (1)..(356): unsure at all n locations
atagagagagagaangtggcataaaaaattgaaggaagaaaaggagagaagttaaactttgaagtgtgtctcacaagtttctcatttatcanagntatgacangtgttacacataattctatttacagcctagtacataggaagctttcctgagaaagcaggaaggtagcttncttgggaagctatangaagaaaaacttcttgagaagctagagggaggctactcacacccttccaatagctaatctcacccccattccaaaatacatgaaaatacaaaaatttcttactacaaagactacttaanatgcccttgaatacaacactanaaccctaaactactagggtaccctaac

SEQ ID NO: 83836 - DNA, 126 bp, Glycine max
  unsure (1)..(126): unsure at all n locations
gcttcgttacctagaatatttacacgtacctncaacgtgtatttgttacttacatcacacacatcttcttggcttaactcacatacatgcctactccaacattttggggcaccaaaaaatgcacat

SEQ ID NO: 83837 - DNA, 432 bp, Glycine max
  unsure (1)..(432): unsure at all n locations
cttggtcatgaacttaagagtaccaattaattctttaaaggacattgagtcaagaatttttaacacccttaacattngtacttgttaatgtggctccttgtagagcttgttcatcaatgaagtcctttgcttctttaagatcaatggcagcggaatggagaaagaggaaaggttattggagatgccacttcaaggagaagatgagtcaagaacaagctcaccaccatangaagctatggataagagcttgaaggtangaaaagatgggtggagggaaagggagagaaaggaacanaatntnggagggagaatgnggctannnattgagtctaattctaaatgatcaagtacaaantcatacacaggtctctattatagctaatgtcgacanaatggagggaattgattatattcaattcactgaattaattg

SEQ ID NO: 83838 - DNA, 360 bp, Glycine max
  unsure (1)..(360): unsure at all n locations
aaatacagcttggaaaatatatggtgcacacgtatgctcatgtaatatgtctaccacgagatatngttaatttgtgaaagttgtaactcgggtatctaaatttcttcatttctcttcatcacgtttgattgtcattttatatcataaataatataccctcttttttcatgcagagtattgcaatagaatngcagagcgagcaacagttgggataattagctatgtctattgganattaaagggtgtttctatgtgatttgaatcttcagctgtatttatttaacctatactatgttctttgtgtaaagctntattgcactcctaaatatccataaccaagtgtattatacattttcgtga

SEQ ID NO: 83839 - DNA, 446 bp, Glycine max
  unsure (1)..(446): unsure at all n locations
tatcttaacgcaaaanatgtcatgctaattcctctgattntagaacgaactcatgtaacctatttatgccaacgcgtatgtgtggaatatcctactatttatatcaacatagaggccatccaacacattctaattgtcatacatatacgcattngaaaagaacatacattctcacgcncaaggcattgcgtcaaaactcacacttaatttatatcctaaacattngctatntacaaactacctacatatgttngaaatatatatcatacanaattttattggttcactcacatttattcatatnggcaagctatntacattatgcacacacttgcattcnaaaagggaattccgtgctatcatacatnntattangaagcgacctcatattcattcacctttttgcaagaattcatgcccctttatttacctatatatacatacta

SEQ ID NO: 83840 - DNA, 457 bp, Glycine max
  unsure (1)..(457): unsure at all n locations
actgtatatgttactatcgttgttattattctttcttcgncattgagagagacactangggctgncaagtcccttcaccttttgngcgtactcttgaaagaattgtgcncacttctngcacatattctgtagtcgcattctatccgaagccatatactaacactggctaacgaaggcaaccattatgtcctttcaagaatgggctcgggaaggggtccaagtaagtgtaccagctacccccgagtaagactttcttttggagggaatgtatcagcaattcctcatcttttgcatatgccaccatcttctgacaatacatctttagatggttcttggggcaactagtccccttgtacttgtcgaagtccagcaccttgaacttgngaggggtgatgatattgngtactangaacaactcttctanggtagcanaggcataatcttcaccttctttaat

SEQ ID NO: 83841 - DNA, 269 bp, Glycine max
  unsure (1)..(269): unsure at all n locations
cagcatctttggcactcataantcacttaannatagtgaggaaaagaaagaaggaaaaatatccaagccgatatgcttctgtaacgcttccgtgacatttccatgatcaatntcactaacattcttcaccattcttcattcgttcttcatcgttcattgatcttcgaccggntagttntcgatttcgaagctttgaattcattctatgcacccttangggccattcttgctttgatctttcatcttcatctcgttactntcgggatcta

SEQ ID NO: 83842 - DNA, 331 bp, Glycine max
  unsure (1)..(331): unsure at all n locations
gctctatgggaccgatcttgagcttanagatgtcctttcatggttatttccaccatggagatcagcggaagataaggagaagggtgagaaaagcggcatcactatggaatatccatggaagaaggagcttcgcaccaagaatgtgccttgtgatagaagctatgagaggatgcttcaatgtgggaaaagaaagacagagagagaaagagagaatggggagcatgaatattgatgatgataatgtganagaangtgaactttgagtgtgtatcacaagactctcattcatcanagttacaacaagtggtacacatacttctatttatagact

SEQ ID NO: 83843 - DNA, 339 bp, Glycine max
  unsure (1)..(339): unsure at all n locations
atcatttatcttggatttcttggagtcttggtttggatgaaacataagaagcgttgttctttggcatcatcaaaacttcatgacatatttgcttctacagtttctttatggtggtgccaantntggngttcattnttaatttcgtcttatgtcttngnttcaatctttgtnaatatatatgacttctggtggcatctctaggttntctttngaatacctatgttattctggcatctttatttcttcgagaatctctngaatgtggggtnggtgaactgactctatacttcattaatactntatngaatatatgtaactntcacttcttccgagaactct

SEQ ID NO: 83844 - DNA, 305 bp, Glycine max
  unsure (1)..(305): unsure at all n locations
ctacttcattnnntgtggaaaaatgaatatgttntctagnaattntaattcattttagaattggaacnatttgntatatgtntaattcattattggatcctgtgattgtaccaattggtttacatgttgaatatngtgaactgagcttttgtgctgtaacaatgtcataatagctttatattngtgagaagtcaatctcatttcagcattatgtgtatcttgactttattctagaacaacactantctcttcttcatcgacacatcatgttgtgatgcttggccttgaggctatagagctatgtt

SEQ ID NO: 83845 - DNA, 408 bp, Glycine max
  unsure (1)..(408): unsure at all n locations
tggtnaagctaacacctaaatttttttaatttcttacaaaggaaacggtggcttgagattatccatagtgtatatatgttagcaatggattactcaagtgttactccacctcatgctcctctatcttatgacatagttgaaagaaaacatcgtactatgctagacatgataaatgctatgctctttatattgcatgtcatattcttaacattccctatacaaatttagaaaaaaaaacccttatgtattatggatatatagaaaaccatatntgaaatatctcacagtgtggggtgtctcgcanaggtgatattcctattattaagaaaaaaattgaaccaaaaactattggttgggcatatctnggatattncttggatagtactacttatagaattttagttataa

SEQ ID NO: 83846 - DNA, 387 bp, Glycine max
  unsure (1)..(387): unsure at all n locations
aatanacatcgcatacaagagagttataatactcacacattatgntcaatcaattgatgagttagattntcttggtgtttaacctgaaaatgccactggctctaatagaggcagttttatcaatcctgaaggttctttacctattntgagtcgttgcttggagtaattgaatgatattttatgattaaaaaattatatcaaaanattcttgtataataantttctatacattttttaagatttacatcttttttgcttaatttctttctatattttcttatcatgttggttaanaattagatcaaaataattaagctacagatttgtcgtttaaaaatagtatcgtacaaaaaaatgagtcaagggaggatcaaactgaactgacac

SEQ ID NO: 83847 - DNA, 321 bp, Glycine max
  unsure (1)..(321): unsure at all n locations
accaataatatggtttaatttaacatttattcccaccgcaataactaaccccatgtacgctaatccttcaaccggtctncaataatagcatttatttncactgcactaactactccaacgccagtccttcaactgtcttccaataatatgttntgaattagtatttatatattctcacaaaccatntatcttccaaacctatccaagcttgtgaccttcctcatctcaaacntttgcatctatgtccatatgaataggagtattatattcaagtataaaaattcatacggggggaacaagcntatatgtgcattcacctct

SEQ ID NO: 83848 - DNA, 355 bp, Glycine max
  unsure (1)..(355): unsure at all n locations
ttattactatcataagagttgttctaataagaattaattgaacatcccaatctttcgtagataaaaattaaaaagctttttagtaataaataaataaataaataaatatagagcaaataataggctgagtaccctaggtataaatagttatgttaagtcagctgcctccttttggcctcatttccgttgttccccttctcctctcnaaaccctttcttttttccgcaacccaccaaaccagtctcagaaaaatgacgatctcgaacccgttcaccgttggatctgtgtgaaatatgagtatcatgttcgcaacacaattccgtgcattctcaccgttgggaaatttgatatcatg

SEQ ID NO: 83849 - DNA, 484 bp, Glycine max
  unsure (1)..(484): unsure at all n locations
agcttatcnaaatctgaanaggacttcatattttttatagattaanaacatcttcaaagaaaacatgaagaaaagacatataattatatagaaatttctactcaaccatgtgatgactttgaaagtgtaaagctaaagacaacaaagcttcaccttaaaaatgaggaaacttggtaagaaaaatctagtctattggaaaatcaactagaaggcttacaaaataagtatgccacactcagtaaacttcatgattgcctaattgaggaaagatgtaatctattgaaataatattcacaagtccataagaattatgaaaacttggaggcaagtaaagataacttatgggttgaatgcaaaggatataagaaaagcctgaaattctcaaatgaataacttgaataatatgaagttctccaaaacaatctcaagatgtgcacacttcacaagagatggattctagagaacttatccaattgtggatcat

SEQ ID NO: 83850 - DNA, 394 bp, Glycine max
  unsure (1)..(394): unsure at all n locations
tgctcttccctagctctaattttagagcgtggacttcttcattctcttncggagcttcgaagttctcctcattgataactttcaacttggagagccaatctaacccttgcgtatgaactcgtagccattcatgataaccaccggatgatgccattatcggatgccccctaagttctttattctttcctcaacgggacttctncacgccttgtgggactcttgtacaaccttgagactttggcaccgaaatctctacaaggaaggcgagagctctctttgttgcactcccctatggngaccctactgtctatggcagtggggatatagtaataaaaccgtcgtccataacggaatgtagggtagtccccatgaaaaaaactcctcatttcttctt

SEQ ID NO: 83851 - DNA, 211 bp, Glycine max
  unsure (1)..(211): unsure at all n locations
ttctttgatctttcgtactgatctgatcttgatgttagacatttgattgatggtatgcatgtggagaaaaatggttgtgatagtgtgatggggactctnnctaacattncaggcaagatgaaggatggcttcaatacctgtcaagatctagctgatatgggcatacgaatcacagtgcatccaaggctaatgggaaaaaattacttgccct

SEQ ID NO: 83852 - DNA, 225 bp, Glycine max
  unsure (1)..(225): unsure at all n locations
tattactagctattttgaattctttagttcctgaatgtacaacctttcaaatggtgctccgtccactctttggttctgcgaaaaagaaaatccatatccaagaaaacatggagagaatngtcatggntattattanctcgaacccagaaggaataaccatctaaacaaagtcattttattcttagaatgtgaaaactctgcatatttatggagaaacatgggtat

SEQ ID NO: 83853 - DNA, 500 bp, Glycine max
  unsure (1)..(500): unsure at all n locations
taatggtgactccctgggtggaacctctgatatgaaaggtgtggttggtagaaactgcaaccctcanatcactagctagctatggctggaagatttgcatgacatgacaaactcaagactcaagaggaagaagttatgttactacagctatatcttgcatgctagctgatacaatgaattgtatgtgccttcanacaaattaaattttagtatcataatatatatatatatatatatatatatatatatatatatatattatttccgggagatggttttgaagagaaaggacaaccaaaaagtgttccttaattctatatgcatgttatgaaaacatacaaaataagtacggatatatgaagatgattatatctacatacatgatatgatgtttttagtttagatataaaactgtattaacctctctatacatagaaccaatccacatatcatagagagggaattaaatgagtattatatccaaacatattttcactcta

SEQ ID NO: 83854 - DNA, 251 bp, Glycine max
  unsure (1)..(251): unsure at all n locations
atatatgggccatcanatctatcatgtgttgacagtaattgattagcccatgaatctnctctggggccgtacacactttggccatggtgtttgctttggctaagagacgcgggaggtcttgacttccattcaaggtcaaggcgaacctatccatccacatagtcgcttcttgatgcaatgcatcaatcaccctccctcttgcttcttttcggcatacacttgtgcaaaatcctccactagactttgttcat

SEQ ID NO: 83855 - DNA, 294 bp, Glycine max
  unsure (1)..(294): unsure at all n locations
tggctaccctgtgaacattcatctctacatttccctccttcagtccatttttgatctaagggatgagacatcagtgcttgatgaggtggatgagcaacttgatctgataaagaanacatggtcaacactggggatcaataagccaatccacaatgtgtgtttcacatgggtgatgtttcaacaatatgtagaaaccgggcagatagaacctgaccttctttgtgcctcatataccatatngaatgaggtggcanatgatgctatgaaagaaagggattccttgtatgttgagat

SEQ ID NO: 83856 - DNA, 262 bp, Glycine max
  unsure (1)..(262): unsure at all n locations
atttgaattaaaaaaatcttataattacattccagagtgtgtgttctttcttctncaattctctcccgtgaacctagaacctttactctangntctggccaaacacaatatttgatgactccttcaatgttactggcaactagtcaccactatccaccacccgttacaagcctccctcctcactccattnttatctnctcttgctctccttctagttngagtccttttccttcttcgtagactcgttgagtcacttcaactc

SEQ ID NO: 83857 - DNA, 403 bp, Glycine max
  unsure (1)..(403): unsure at all n locations
aatatcattcaatcctgaacccctttgacatatcccaaatctctcatcaaggtccctgatgttattaaaatcaccaaggatgcaccaaaggtcccctaataaagactgttaagcttgttaacttagtcccacagcagcctcttgttttgaatttcgcagtgagagtaaatngtaagaacactgacttngtgagctttcctcacccattcacctctcanaaaataaaaccacttncaacaactttcatctgtaattaaaggtttgtcacttcagaggacaatataccttatgtngtatactagctggctgatctccagctaactccgcatctnccataatgatggcacattatttatcaactgactctcntcttgtctctgatgcagatatataacatgctctg

SEQ ID NO: 83858 - DNA, 328 bp, Glycine max
  unsure (1)..(328): unsure at all n locations
gtgatggagtataaacacattanaatgctttctttgttacccactctgtgaatattatcatctttntaaattttggaatagatgcaacatgtctttttatattaaaatttgaagagtactttaccagaatttntaaacttctagaanatactttctgggatacaaaattaaaattatgtattttggaaaatacattttggaatgatatttaaaattttgtatttcagaaagtactttacgaatataaaaaataaacagtaattntgaaatgtattttctataatgatgatattggggtattttgaatatactaggtatntatattaat

SEQ ID NO: 83859 - DNA, 227 bp, Glycine max
ataaaaatattgagagtatgttgaaagtatggatagaagacgtgaatgctggaaataaacctcacaaccactttactaagcttgggtgggcaaatattacagaaaaagtcatataagataacaaaattgacatatgagtataaacaattcacaaataggcgagagtctctataaacaaggaatgacaattatggtgctattaagcttattgggaacgacactagtct

SEQ ID NO: 83860 - DNA, 371 bp, Glycine max
  unsure (1)..(371): unsure at all n locations
ctacaaagggtttagcaaacaccacaaaccttagcaattctcttatctcttcataatcagggtggacatattgtaaagtcataatctagaaaaaacaagggaaaaaatttcaaccctgagcccacaaaaacaaagagttttgtcagaagttaaattcaaagacaataaattactctcataggtggacactngaaaaatggngcttaccataggcaggttcaaatgtccaaatgaccatatattaactctttttattgagaaanataanatatagaactcanaaaagactaagatatcanggcacanaatgataatgatgatgaaataaatatngatactttggaccttaacaactcatgggttaacatgga

SEQ ID NO: 83861 - DNA, 176 bp, Glycine max
aaataatggcgactccctgcgtggaacctctgattcgaaaggcgcggatggtagatactgcaaccctcacatcactagctagctatggctggaagatttgcatgacatgacaaactcatgactcaagacgaagaagctatgttactacagctataatctgcatgctagctgataca

SEQ ID NO: 83862 - DNA, 339 bp, Glycine max
  unsure (1)..(339): unsure at all n locations
agcttcatggtgaatcaaagatgattcatatgtgtttttatgatacnangangataaccaaagatgatgaccaaggagatgaccaaaagctcaaagatcaatcaaagaacaacttgagtgaatcaagaacaattcaagagtttcagataagaatcaagaagaatttcagactcaagaagaatggttagagtcaagaatcaagattcaaggttcaagatctcaagaatcaagatcaagattcaagactcgagattcaagaatcaagagaaggcttaatcaagataagtatgaaaagtttttttcanaaatggagtagcacatgagttttctcaaaacatg

SEQ ID NO: 83863 - DNA, 445 bp, Glycine max
  unsure (1)..(445): unsure at all n locations
gttcctgttctgcatataattgaatcttcacattaaagntatgtgcattatatattctacagaattggtagagatattaaacacaaatataatgaactaataaatacagaagttaattatattgaatcagtatcgataggtatccctaagccaattgaactgtgacaatatattaattacatccaaaagtttatgaagatgttactcttacaccagccaatgacagtagcttgtgagagcaacatatgcaatatctgaaatttttagtctcttctccacaaaaaaattacttagaaactcctgactgcaagaaaaatagcagataagatgccacatatatactggagtgaccaagctttaccnattgtaatagcctggttgatatgatatcactatacaaatataatatggcatttataactacactaaacagtatacatacact

SEQ ID NO: 83864 - DNA, 282 bp, Glycine max
  unsure (1)..(282): unsure at all n locations
gtcccctctctacttattcgaaacactggaaatcataagacttcgccctcactttcaccctcttttgccctggaaaatagcttaacacacattaatattatgccttttgggtttttcttatcaattntcctaacaattatanttccacaatatatanttgcataactaagcatctactaatgtgattntgcttcgaagcatctctagcatgtgatnganacactgtgaactacataatactagagatgaaaccactatgaataattacaantataaataatt

SEQ ID NO: 83865 - DNA, 393 bp, Glycine max
  unsure (1)..(393): unsure at all n locations
tatattcaaagtttagatctaacgatctaagaattntctccataatgtctacatcatcaagctcttcaccacttctcttaagatgattggtcgatgctaagactctagagaaatagtcggagatgacttcaccttctctcatatgcaaggtttgaaacttaactcttacactatgaagacgtaccttcttgatcggatctgctcccttatacgagggttgaagcttctccaggcttctttaccgacttgcttctgaacctttngaaagcatcatcattaatcctgtagatagataagagcctctgctcttttctgagctctaactattctttggtttgaaaaacaccctcatctctgcttagtgtgacttctctactattccaacatctacac

SEQ ID NO: 83866 - DNA, 337 bp, Glycine max
  unsure (1)..(337): unsure at all n locations
agtattacactactgatgaaaggaaagagtatgtctctcttctcagatctttctctcactctcaacaatcgaaatccanaaccctaccaacaccacactcaatcgaaattcttcattctcttctcatcgatggggcagaagtctctgatctacacgttcgtgtcgcggggaacagtgattctcgcggagtacaccgaattcagcggaaacttcaactccaacgccttccagtgccttcagaagctccctgccaccaacaacaagttcacctacaattgcgcacacaccttcaattacctcgtcgacaatggctacaagatggtcctcgtactttctt

SEQ ID NO: 83867 - DNA, 213 bp, Glycine max
  unsure (1)..(213): unsure at all n locations
gcatattttaaatttgatggcagaggcttcaattctggtgtggccttgtggatagtggtagaaaaagatgtttctcagcctgtacctcataagnagtcaaaagatgtgtacttctgaaacatgtagtctatctgctctagaaatcatctcgaaggcaacataccagcatgtatcatatcattcagatcctctcacatcaatcaactatgacag

SEQ ID NO: 83868 - DNA, 412 bp, Glycine max
  unsure (1)..(412): unsure at all n locations
gatcgaagaacgaatgaagaactgtctaataacggttgttacctttgcgaaattcttcacggagaacgttacggaaacgtttcggaagcacctcggcttagattgtcttcacggaaacaatttttccaagcaaattcgaaagagagagaagtgcctaaggggctgaaccctnttcttcttcacttcctctcctatntatagcaaaataggggaggtggtttgccgccagctcgcccatgcgagccaggttgcttctccagaagcaacagccttctggaggaatattctggagggcccaagtgggcctgggtgctatntgcacccacattnttactaagtacaccccctctgcttttttttggtgattcttctttcgtaaagttacggaaacatactaatttcgtaacgatac

SEQ ID NO: 83869 - DNA, 442 bp, Glycine max
  unsure (1)..(442): unsure at all n locations
acgctctgattgagacgaatgaatgaagatttncataataactgcgaccacgagcanggaaagcaccgttaattatatgcctttccaagaggagaggagtgatgttcactggaagaaattataaacaaggaatccaagcagacacaaccaacaaaccacaacctgcacaaacaccaaaatgatcaggcaacacacatgagaataaatattagatattttatctattcatggtcctgatcaatctttatgcgaagtcaaatttttaatttatcatgtaaagattaatctgaatcattgtaatagttttccgcacacatgtatatatatgctntcttgtntgcctacatcttaccanaatagaatgtttatgccgacggatttnngtgagaatcttgtcacttgatatctccgagtactatattctcgagcaagcatcctgtag

SEQ ID NO: 83870 - DNA, 216 bp, Glycine max
  unsure (1)..(216): unsure at all n locations
ggcaaagtgcaatcatccgagcatatgaaagttaccaatctttggaaagtcaagcggttatgttacaatcgaanaaatcaacagggcatgcaatgcccagttaataaacctgtttatggattcattccacaacactgccaagtgccagtgagtttatggaaccccacagctagcggatacagcacatccatccatagatatatgatagcatatcat

SEQ ID NO: 83871 - DNA, 297 bp, Glycine max
acaatgcaatcatgtccttgcttatcgaactcctcaattctttcttctccaattctctttggattcctcccaaactcacgttaaaaaaatgaacgcctctcgatcgcagatgaatgggatcttttgacatgaagctagcgtggtcttcatgtatgtaagaatgagtttggagagtgtaatttcttattcttccctttccaaacgttgagttcattttttacgataattaataattcactaatcgtggaggtgagagttacaagacgttttaatattataatgacaataacacaaatt

SEQ ID NO: 83872 - DNA, 460 bp, Glycine max
  unsure (1)..(460): unsure at all n locations
atccttaagcaccgcggctgcagcttctagcggttctaatatatgggttattaagtctatcacatgctgacaatagctgagaagtctatggatctcctaggaggcggagtaggtgtcccgcattgctttgtccttggcaagcaatccgggaagttctcgactctcgttcaagggaagagcgaatcggtccatccacatcgttgcctcttaatgtaacgagtcgatcacccttcctctagccctcttttctgcatacacttgagcatactcgtccgccactctatgctngtgggtcgcggctagaattagttcttcttggtactcggtgataatagctaacatgttggtctctgtctcgcataacccgtgaggcanacttcttttggacctcgagcaagccttcaattcatctttcaagatcaaattgtccactcgtgaatggtccctttctctctttgga

SEQ ID NO: 83873 - DNA, 346 bp, Glycine max
  unsure (1)..(346): unsure at all n locations
tctggagttcgccgcaaatccgtgtcgacacattacttgttccatcttttatcgccaaccaaatggcgatggtgacgcccggaagaatatacctgtctcctttcccttggtggtacaaccccaacgcaacctacacgtatcattggggtacctgtggcattcaatagaacaatgtgtggccttcaagcataaggtccaaagtatgatcgatgtggggtggctaacattccaagaagacagtccaaatgtatagaccanatcacttgccaatagtgggggaatcaacaataatgcaagagaggagtgcggactttggaggccaaagcatatgaaagacgtggtaacc

SEQ ID NO: 83874 - DNA, 85 bp, Glycine max
  unsure (1)..(85): unsure at all n locations
cacctactccgccccgaagagatcatgggcttctcnggctattgcagcatatgataaacttaatggcccacatanatagaaatcg

SEQ ID NO: 83875 - DNA, 360 bp, Glycine max
  unsure (1)..(360): unsure at all n locations
ttctctacaattgcatcacctctcaataagctcgtgattaataatgtggcatttagatggggtgaaaaacaagagctagcacttgctttgctcaatgaaaatcttactaaggcacctgttctagctcttgctgactnttctaaaactttngagctagaatttgatgcctctggagtgggagttagagatgtattgttacaaggtgggcaccctattgcttattttagtngaaaacttcatagttgcacccttaaaatacccacctatgataaaaagctntatgccttaataagagccctccaaacttgtgagcattacctttgttccaaggaatttgtcattcatagttatcatcaatca

SEQ ID NO: 83876 - DNA, 385 bp, Glycine max
  unsure (1)..(385): unsure at all n locations
tgagaacccttatcccaacccccattagacaaccacgcgacacaacccaacaccaccaccacataagatcacacacacacacacacatagaggtccacacacattaagacacagaataagacacaaacacactgagccacagacacacacagagacccacacacaaagacacacacactgagtcatatacacacacatacacaaacacactcacacacatggacagacacacacacacataaagagacanacacacacacacacagataaagagacaaccacaaacacacacactcacacacacacagatatagagacaaacacacacacacacacacacacacagtctcacacacatatagagacagacaacacacaacacact

SEQ ID NO: 83877 - DNA, 200 bp, Glycine max
gagagagagagagagagagagagagagagactaggctcataacaacgcattactctctatgaacccaatgtggctccttatgcgatagaaatcacttgtcacacacaacaattgggcaacataacgactatagttacaatcatccaacattcataacaaacaatatgtcgagggtcgaacacccccgaatccataccaca

SEQ ID NO: 83878 - DNA, 269 bp, Glycine max
  unsure (1)..(269): unsure at all n locations
tgtgatcatcaaattacaaaaatggctatatgcttgatgctcatgaatactaaaaaatatattaacacatataaagattaacgctatgacagataatntatcaaaatacttaaaataattatttaagacaacaactaatattatgaactatggggatgtgaccgaaaatggaaatccttttatcctgtcatatataacatntttctcataatanaaactggacatgacatgacactgaataacaaaaatacattattaattcatggtac

SEQ ID NO: 83879 - DNA, 186 bp, Glycine max
  unsure (1)..(186): unsure at all n locations
tatatatatactaaattatctttgctgagtaaagaacaagaatgggaatttatgaagataccaatgtgttagttataagaagattatgcacaaatgaatatcataatcctttcagtgttcatctcttaacattntctgtgatacgaaccttttcatctctaatatgaatacactcctgtaaatata

SEQ ID NO: 83880 - DNA, 392 bp, Glycine max
  unsure (1)..(392): unsure at all n locations
cctcatcgtctctcacagtctntagaattgggagccaatccagtccttgtgttcggactctcagccacttatgatagccgncgatgatcccattactgcttcccctaagctctctgtcctttcttcacgccgcatcccatgccttgcgaactccttggagtaccctcgcgttgtggtcactgaaacctcgtgcgatgaaaggcgtgatgctttcgtctgatggcactcctctcatgggacatccttcgcatgaagatagaatacttgattctttcttccttctagcgagggaagccattaacagacgcccctccatgctagccaagagtnggtgcacaacaaacaattcttggcgccgctctttcacatccccggtcgaacgtgtcatacat

SEQ ID NO: 83881 - DNA, 349 bp, Glycine max
tggaaaaaaaaaaaattaactattcttgcccctccctagcttttacttttgcatgactcaagacaggtttcatgaggttataaatttacatggacatgtctgacgtgataaaaagattgcaatctttcctatatattaatttctattcatgatttttctacttgacaccaatcaatctctggatctgctttctgcttatggggattacaaaccatttgaaattagatttctgacatttatggacaacattttgttatatgcatggagcagcgggaacatcaatttggtgggcaggattgactaatgccacgttcacaaattgcagtgacacctttactctatattgctc

SEQ ID NO: 83882 - DNA, 362 bp, Glycine max
  unsure (1)..(362): unsure at all n locations
taagtctcattcaagtccttgttgccgccgttggtaattaatgtatattaacgagtcactcaagtattgatggtgaagggaacaagtgtcggaacaccgtgcagatgcctttcactgctaatgaagctanaatactactannngtttaattttgaaaggagttgcttaaattgtatacacttacgattacttttgtcttatagtcagaagcaagatacattttanggataacgngctgtatgtggatcctaaatttttacttgtcaatgatatccatttcaatttcttgaaacgaacacgatttcccgggctgaanatatttgtgtatacttgannaaaaggaaattacanaaactagagtg

SEQ ID NO: 83883 - DNA, 222 bp, Glycine max
agcatcaacattaagcttgatgaaaattgacacaaaacacaatcataatatttgattacatagtgtcatagaatcccactaggtgttactaccattcaagaacctacataatgaataaagcgaaatgtgttctaccaaaagaggatctctcttctagatctacctactttactaaatttctcaagcaaactagttatgccagtgtctttgtcttagatcttc

SEQ ID NO: 83884 - DNA, 281 bp, Glycine max
  unsure (1)..(281): unsure at all n locations
ttgttatgacaaatccattcatgtggagggggttaaaaccatntatgtgtcttcacctaacctattgtcggttcatgaatccatgtttatggctttgaatcttgatcttttatgggtngtgcttgtgcatatntngtcattatcactacanaaattgttttactaactaccaaatatattaaagttgtttgtatgagtagataggcccaaacagggacaaattcaaaggtggaggtctgttgccacccttgcacacatgttctcacatctttctttctctc

SEQ ID NO: 83885 - DNA, 356 bp, Glycine max
  unsure (1)..(356): unsure at all n locations
ctgagctgcagctgaatggagttgacgtctaagataagttgtatttacttctaaccattgaaacatcagatcaaggaatgagaacaagtaggagtgacatccttgacaatcaaattagggaggatgtgatgttgctggattaagtagtagtatgagtacgagtagttagttgaaactataagggtgtatagctacatgtgcagtgataaaaatattagtgatcatgaatgagatgatgagagtgcagaaagtttaatttagaattcttagttcctctattttctcaancaattcttgtatcttctcttattctcttattctcaatcaggttaatactaactatattgtagtattct

SEQ ID NO: 83886 - DNA, 113 bp, Glycine max
tcagctctatccaggctcatctgggggaagctcttccttatggttattcttaaggatgggcctctctcacctcttttctttgcttcgctgcatctcatggggaaaataccatt

SEQ ID NO: 83887 - DNA, 476 bp, Glycine max
  unsure (1)..(476): unsure at all n locations
acctgcggctgcagcttctatccaagctcatcttggggtttagcctcattttttggcnnatccctagaggaggagcctcttctaactcttcttctttgtcttccgctgcatctccatggtggaaaatcagcattaaaggacctcattgaagctcaaagatccagcctccatagaaagccccacaagcaagcttccatcacaaatcgctcgggtcttttttcttataaatttggtccatatgtctagaacattcagtaaaaattgcagctcaaaacacgtagtcactatatcccagtaatatatacaagttcgcatggtcaagctgccagcaccatagatttcacctaaaaatcagagtagtgctatgttgctaaagctggatagctacaattgtgtttgctatgctcaatatcttgaaaaaacattcagagacttagactattttatccacaattcagcccactaacacacaactc

SEQ ID NO: 83888 - DNA, 416 bp, Glycine max
  unsure (1)..(416): unsure at all n locations
gcttctccctatttgctatnataggggtagatgtgtagtttattatggncagccccttaggcacttctctctctctcgaaatagctgaggaaagatagctccgtgaagaanatccaagacgaggcgcttccgtaacgtttccgtgagtaattacgcgaagattctcgaccgttcttcaagattcatcgttcgttcttcngttttttcagtcttcaacgggtaagtacctcaaaccgagcttttcaattcattctatgtacccgtggtggtccacattntgtttcatggtattttattctcgtttccatttactttntatacccncttntgacgtgcttaagccatntatttaagccatttctcgcttaatctataaataaaatacacttccaccgatcgtttgaattgatcatctg

SEQ ID NO: 83889 - DNA, 418 bp, Glycine max
  unsure (1)..(418): unsure at all n locations
atcaatccaggaggatatcatagtttaaccaccaagcaaatattatatctcaaagttaaccacttgacagaaacaacaaggctgaaccatcaagagcataagctaaaatcaatgcttaaccactcaagatagaagcaaaacaataattcagtgcttaaccatccatggcaaaaacttanacaatggttaatcaccatggacagaagcttacatcaacanaatagagatatcacanaatctatcttcaatgatatattttcacaaacactttgtaaatcaacaacaaccatggcttaaccatccatgacagaagctanaagaatacttaaccaccatgaanagaagcttataatatcaaatcaagcctaaanggctgnaacaataagccaaaatcttcaaaagcatttaatgaaacacc

SEQ ID NO: 83890 - DNA, 359 bp, Glycine max
  unsure (1)..(359): unsure at all n locations
cacggttgagatgatgtccaactaaatatatagtatgatatgtcgttgtatcggtcttggtctctgtttcagaaacatatattaatgtgatataaaacgtcgtgaatgtctcattgttctatgggtcctaagatacatctactttgtttattctactttccctatgttcattcttcagaacacnatgaatagatcactaacggatcattcgattgtatatattattcgttgtggaccatgttactagtagtacgaatgatgttatgtctcatgtatggctaattcatgcatacgtaatnattatattatgttatcttaagctgatacttctttctatcgacatctttntatctgctcac

SEQ ID NO: 83891 - DNA, 301 bp, Glycine max
  unsure (1)..(301): unsure at all n locations
gcactatggatgccactttgtgangaacaatcatacaagatgaaggtttggccatatatagttttggtttcgcttagctccgcgatanggaagattcttacctttagttggtagnttcttactctctgtgtcacatagagtttatgttttttgttgaactacattgtatactctacaacagtgtgtttctccttcttctcactcaatgtatttgaaattacctccaataatgtaaggaatgttttgcttgacgttcacataatttggattacacatttgattgatgccatgtgtgtaatat

SEQ ID NO: 83892 - DNA, 386 bp, Glycine max
  unsure (1)..(386): unsure at all n locations
agagncacctgcggcatgcaagcttaccanatcacacaagtagtataaaatggacagttcatttattattttctcgaaggactcggacaatatttgataatttacacacttttgacttattagacaaaatataagcggacttgactaacaattattaagaaccaaaataaagatgagaacttaaaaataaaattaataaaaatagttttatgattctcaaggatctagacgggagaaaaagcattgcacgaaacaatgattatgaatcttcgggtttaactttactgaactacctgttcatgcatacacaagttattaatcaatatttatcatttntttggttacaccaactcataaaaatgctaaatccctaatttcttataaga

SEQ ID NO: 83893 - DNA, 378 bp, Glycine max
  unsure (1)..(378): unsure at all n locations
acagctcatataataggttcttcccaagaacttatacgtcacatatgtccaagtctcccagaatataatagattcttctccaaatgagttttgggacaacacaactggacagtagttttgtgagactaacctaggaactcgcacgaataaaaataaaggttctganaaagatatttccctcgtgattgactgaacctcgttgtataatcaggttatcaatcaaaaatatattgataatctatatattaaataggaacaataccattaagttgatactttaccattacacacgaataaactattaaatatgacattatattgtcttatcagaataattatataaattaaatttacttttaatattaattataaaatatc

SEQ ID NO: 83894 - DNA, 240 bp, Glycine max
  unsure (1)..(240): unsure at all n locations
cccggcatttacgcaacgagcataatgtaaacctttacggttngtaaaagctctatagttgggcctaagctttagagttttccttttgttaaggctctgtgtcttttgtggttgaatttataatacaaggatctttcttcatctgttcctacgtctctacccattctcattcatttgcatggttacttctttntctgaaatggcagatccgatgacgagtcccccgaangactaatacct

SEQ ID NO: 83895 - DNA, 286 bp, Glycine max
  unsure (1)..(286): unsure at all n locations
gtctagacgcatgaaagctaatgatggtaactgacgagactatagagtggtaaactattcaatangctngacatgagactgatgaagccaacttaacaaaaatcacaacatggaatctgccttcagaccacctattcagaagcaactagacanttaagtgcatcccaaccttcacaccannatgtatcatagtagttctggaatggcagccttgtaacaaactctgtgaagaaaaaggtgacatttggactcatattcttcatccaaagaatgcaaaaatggagct

SEQ ID NO: 83896 - DNA, 519 bp, Glycine max
  unsure (1)..(519): unsure at all n locations
agcttgatggttgcagcgngaatcaaaactcttggtcattaccacatcaccagcaagaatcacactcaatcgtaccggggacttctattttgcatgcaccatccaaggccattgcaacagtggccaaaagctgagcatttgcaccatcacaagcacttcttcaccttcaactcaaggtccttctccttcttctggaaccactcctaccccaccttcttccggcgacgaaacaccgcctncccaatctcccccgaccgagcctggttcaactacacctcctccatcgcgaggcgaggctacctccctttgtgcaactntctctattcttctcatcaccccttttaatcaactcatngntgntntaaagnttggtcctagaagagntntttgcttatttgcgtaacaaggaatgccagcgaacctcttcgacatttcttttagctacacttttatatgaatgtgaaattattaaaatctctatatggtgagtacactctaataaagactcatagatcatga

SEQ ID NO: 83897 - DNA, 281 bp, Glycine max
  unsure (1)..(281): unsure at all n locations
taaaatattatggttaatcttaagaatgaatattttggcgaatatatacctttatgaaaatggagatgatccacanttacatactctgcttatttcatcaccattgtatngattaagattacatatacgggatgggtaatttattggatatagtatttttaaatggaatcgtataatcgtctaatctaatcaattaacttaatgaaggcataatatcaattggttatgaagtgacnnagtaacatattttaaaagtattttttatcaagagatttatgacg

SEQ ID NO: 83898 - DNA, 329 bp, Glycine max
  unsure (1)..(329): unsure at all n locations
tctgatatataatacaattctgataaatggcctataaatagaaattcaacatcagaagaaactgtgaacatggatggtaaacgtccaacagagatcaatcagccttctaagattcttgttatgtatatacctcctttggtctcgaatataagcaaaaaaataactaattaaagttggttagaataatttaattataccaatttcatntanaagatanacccttttcattaaatatccttccttggaactcgatatcaagaataaaagagtgtcattggaaacaaaacctcaattaaataaagggcattntaagaatggtctcattaaat

SEQ ID NO: 83899 - DNA, 370 bp, Glycine max
aagcgacgcagctgcagctgatcataaagcaatagtcagcatctatttttttcacgaatctgcagaggtttcataactaaagtatataggtgttgccacatgaaaagagaaaaatattaccttcttggtcatctactctgctgtgtggcacagtatgctaaccacgaaactgatttcaggaaatcagtttgataggatcacacctatttttgattattgtaacagatccagtctataaggtactttgaactggatagcttactaagaaaggataactaatagaacaactatgattatatcctttcatatgacagggaataataggcttatgttgtctaactaatactctatcgataaataatatcatatt

SEQ ID NO: 83900 - DNA, 198 bp, Glycine max
  unsure (1)..(198): unsure at all n locations
tagacaatgatcactgagattgaaattttatattatttctgatagagattanattagtaagagtaaaaaaaaacagtcatattcattcactgcatgaagacattgcatataactatgttaagagacaatgtacaatatatatatttcatgagggacacctgtgattgtttcaaatatagttctaattgcttacactat

SEQ ID NO: 83901 - DNA, 251 bp, Glycine max
agttattacgcgaagattctcgatccgtcttcaagaatcatcggtcgtcttcgtttcttcagcttaacgggtagtcctcaaccagctttcattattctatgtcccgtggggccacatttgtcatgattttatttcgtccattcgtttatcccctttgacggctagcattattaagcttttgctaattaaataaataattcccgacgtgaatgatatcgtatttgtaaataatcgacgtcgcggcgacccgt

SEQ ID NO: 83902 - DNA, 80 bp, Glycine max
tgcctaatgtctatccctccttagcacactcttatgtgtgccctgcaggcagtcgcctaagaggaagagaccttgtggaa

SEQ ID NO: 83903 - DNA, 360 bp, Glycine max
  unsure (1)..(360): unsure at all n locations
tccatcatctatctttcaatcttctctcaacatncttcaatacctttcaactctttctacaaaattttctcttcatctttctgaanagtgttgttcaatattttctctttcaagaaaatttctttgatcaaaaacttgtgctattcatctttataattctcttctccctttgcaaaagaacgaacgaatagccacctaaattctttgtgtctctcttccccttacaaagattcgaggactaaccgctgagaatctttgatatcacttcccttagcaaaattcaaggctaccgctgaattctttgttccttcaagatcaaggctaccgctgaaatcttgccaaccatggaggcatcttggg

SEQ ID NO: 83904 - DNA, 406 bp, Glycine max
  unsure (1)..(406): unsure at all n locations
atgaagtttcttccttcatagggaatattctattacttccttggcattttgccttaggttagattcatccacttgccgattctattaaatttggtttcctttggacttatatgtaaatgttccttgaattttatgaagggagaaatagaaatcaccaaggtctggcatgtgctattattcttaaggtatgggagatanaagttagtgcaaagaatgctgtcaaacgtgggatctagaacacaaacaatgaactgatggctgangagctgaagggtggtattngtaaatttgcaattattttgttgtgcattcatgcttgtatcaagtctaatgcattgtattcatagaagtctgactgtcaagaaaaaacacaattgatgtaatctatataagttttggatctatc

SEQ ID NO: 83905 - DNA, 386 bp, Glycine max
  unsure (1)..(386): unsure at all n locations
attccctagggatgggctccctctctcttctcttaccttcgctgatctcatgggtaaataccatgaggactcatgagctaagatcagcctctagagctcacagcagcttcatagtggaatanagcacaaacttagtanggctcttaacatcattaatttttgttaccttctttcattgtgggtctcattttctcaatgatctcctacatgtctgtgctaaatgttntagcatgatttttagagttncactgggataacttgtatagaactagattgattctaggtcaattctgtctgtctgacataatggtagttagtcttgagtttctgtatttgtgtgaccacctaatctaaaactaagcaaaactaaattaggctgtactatg

SEQ ID NO: 83906 - DNA, 482 bp, Glycine max
  unsure (1)..(482): unsure at all n locations
agcttctagcggttctaatatatgggcattaattcttcacatgctgacaatagctgagaagtctatggatcttctatgaggcggagtaggtgtccgccattgcttttgccttggcaagcaatcggggaagttctcgactctcgttcaagggtaagagcgaatcggtccatccacatcggtgcctcttaatgtaacgagtcgatcacccttcctctagcctncttttctgcatacactggggcatactcgtccgccactctatgcttgtgggtcgcggctagaattagttcttcttggtacttggtgataatagctaacatgtnggtctctgtctcgcataaccgttgaggcaaacttcttttggacctcgagcaagccttcaattcatctttcaagatcaaatngtccactcgtgattggtccctttctctctttggagttaagcttgcttttgtaccccacagagcccctcagaacttgtc

SEQ ID NO: 83907 - DNA, 354 bp, Glycine max
  unsure (1)..(354): unsure at all n locations
aagctctgagttcccgcattccgtgtcgacttttactgttcatcttgatcgcaacaaatgggatgtgaccccgaaaattacctgtctctttccttggggtcaacccaacgcacctacacgtatatggggtacctgggcattaataaacaatggtggcttcaacataggtccaagttgatcgatgggngggtaacattcagaagacatcaaatgaagacaatcacttgccatatggggacaacaataatgcaaaaggatgcgacttgaggccaagcnataaaactggaacctctagagttatcttagcgctgcaagcggcatattcttgatacacaagggatctgttatacatcg

SEQ ID NO: 83908 - DNA, 383 bp, Glycine max
  unsure (1)..(383): unsure at all n locations
acttggtaattactaacataattcaactcacattcttctttagatgtacttttttcacttcaatactatttgtacatagaccagggaatgggtttcatactattaaggttcccagattatactacattaccaattttattagatcttacaaagccctattaagcataatataatcgagtttgatgatngaaaaaaaatttggtaaagagacgtgatgtagatataagttaagaatagtaaaatattaatttttgcattaaataacattgcgatcggcccgctttaatttgcattatttcgttccctgccttgcacctgaaacttaaaccaaacccatgtgcgtttaataaaacaactgcactttgtacacacacctttatata

SEQ ID NO: 83909 - DNA, 353 bp, Glycine max
atactcgtacaagaattatccctgcaacaagctattgaatggaccacttcctaaccaatatagtaataggttatataaaatgcccctatttctattcattaaggatctttaggaaactaaatgctttgagtaaagaaccctttatctacataatcttattttcatttagaatattttattatgaaatataataaaaattatttgatatttctaactacatatcttatttgacaatataaagaccttgaatggaaaaatatatctattaagactgattataaaataaggtaatagaaaaattagatactagtaataatttcacacaatgttcaccccatagtgagtgcttaccc

SEQ ID NO: 83910 - DNA, 476 bp, Glycine max
  unsure (1)..(476): unsure at all n locations
ctgcagctttgagtcacacattcgngtgatgtttcatttacattcacacaaataatagaatctatccccttacccttaaacttatcaatattctccttttaaggaagaacatgtttgtgttgaacaaactcccgtgtatgcacctttgaagaaagccatgtgttggatttcccctgtgggtactttnntgtccactttttcttcattcaaatatattcaagggaaatccagttttgtgtanagcgcactggatcgtaattattaaaaattaaacggatgattcgagtatcancacagggaactaatgtagcctaagtaagttacaaatgaacattcttgaagaacatgtttgatgtatttcaacagaattaactaaatttatgccaaactataatgaggtagtanatgcacagagtaaatgtggctttacaacactgtcatataaatattttatatctgccttgtttgtgactaat

SEQ ID NO: 83911 - DNA, 401 bp, Glycine max
  unsure (1)..(401): unsure at all n locations
catcactctagataatagttttaacatcgggtggtttcgatagtcaacatcgattnttaaccgatgttgaaaccaccgacgctaacattatcaatgctaacattggttttcanannaccgatgttaatatacactacacgacatcggtgtntaagaaanaaccgatgtcgtatagtacanaatggtaaaanaaccaaaactacaaaaacaacatcggtttagtcaaaatcgatgttgaattgcgtattctgangcgcttactacatcggttatgaacaaaccgatgtagaaagtaccttctacacatcgattnttggagaaatgatgtaaatgtgctatgatatcgcgtttagtaaaactgatgtagaaatgcctttacatcagtttagactaaccgatgt

SEQ ID NO: 83912 - DNA, 346 bp, Glycine max
  unsure (1)..(346): unsure at all n locations
agctggcttgtagagcttctatggtggctgtatctttgagcttcaatganggcctttaatggtgattntccaccatggagatgcagcggaagacaaaggagaagaggtaagaggcggcgccatccactatggaataagccatggaagaaggagcttcaccaccaagatgagccttggataagaagcttggagaggatgcttcaatggaggaaaagaaagagggacagaaagagagaggggggagcacgaaattgaaggaagaataagggagagaaagtgaactntgagttgtgtctcacaagactctcattcatcanagttacaacaagtggtacacatgcttcta

SEQ ID NO: 83913 - DNA, 203 bp, Glycine max
aaaaccgtatttttattaacaaacggtaacaacaccttcaaaacataaggtcctatttttaaataaggttttataatagttaacaacggcaatttcaatttctagtttttacctatcaggctggtatagcagaggcgaaagactttaagctcataacgtgactctaatactcataaataatgagcgcggtagatcactaagac

SEQ ID NO: 83914 - DNA, 468 bp, Glycine max
  unsure (1)..(468): unsure at all n locations
aaagtttgtatatatatcattatatatgtatgtatgagaacacacacatgagncgttaaccttccgagcacanaaaacacatacacacacatagttgtgctntattaagaatcttacctgggcagcagtgattccttttacttcaacgtaatcttccattttgaagcttttgactgggtcatataacttctttccctctgagactggttaattcttcaacaggccatggcaccaaatgtctccagtagaatcaaccacacagttcgcgaatcgctttatatttaacaaacaaccgacatgaatattaaatcaattccttaattgactagataaaaaaagactattcacatcataaaaaaactctatgcaacataaatgtctgatgnaataattcttaaagaacatatagtgcagctagtagttgagtaaaacttcttatctttttntcattcagtaaatctagtaaaa

SEQ ID NO: 83915 - DNA, 263 bp, Glycine max
tggatcaattgtatgatgtgagtgaattggaatgcatagatcatatgccttgaatgagcatgccgtcattagaagagaaagaacatgaaattaggattatgactgaaaatgctagtcagtttgtcagaatgattgtgaaggaatgccttaaccgtaacccggtgagagtgtgatctttaattgtgagagaacgactaacattaagtaatgatttttgattgatctctgaagtatggaatgaatgccatgaaatggggatgatg

SEQ ID NO: 83916 - DNA, 362 bp, Glycine max
  unsure (1)..(362): unsure at all n locations
cctcgacttctgctgcatgaataagactctggtatcaagcctccattcagttanacataaaatgaaaagcatattcatggccacagtctgaatatacaaacaaaactgtacattcgagaacatctgtcatgtaccaggaaccaatcaataaaaacatacagcttcggtatgctcagaacaagtaatcatgcataatgctctaaactctttcctatattttgcctgtagagttgtacctaacanacttaactaacccttaatagatccttcttactcatgagtcaagactctgctaaaatctaacattcattattttcctcgaaatcaagcacacaaacttgaagtctactacactaacatct

SEQ ID NO: 83917 - DNA, 424 bp, Glycine max
  unsure (1)..(424): unsure at all n locations
ctggcgcctcctctcacctcttcttctttgtcttccgctgcatctccatgggggaaaatcaccattaaaggacctcattggagctcaatgatccagccttcatagaaaccccacaagaaagcttgcatcaactatggatatgaacacccttttaccattatctattacaaacacttggtacgcttgccagaccaccatcacatgtggaataaccaaaatgcagtgtataacacttattatcataaagagtggatgccttttgattntaacgcatngngcactggatagatagtaaacanagcaagttatcttggacgatacannagtatngtaattcctttttatattgatcctgtccacttgtcananactcattagaacattagtaanttatacttaanntgtatcatcanaatccatgata

SEQ ID NO: 83918 - DNA, 269 bp, Glycine max
atgttacatgctatacactaccactaggaaactgactgactgatatggcgacatctaatcctatcatatggaattggtcacaatattcatcagtaattgaagaaataattcctcatttggggactagctatagaagcatggggctattgacttatatgaatataataagtaacttttgaaccaattggctatttcttcctcatatttcatttacttatctgttctagggagttttgatattttgaggcgtctattttctctcggatatt

SEQ ID NO: 83919 - DNA, 170 bp, Glycine max
agaagtctatccttccaatcaacacatccaagacctaatacttggaccacgtggaacagaatggaaccatggtacacaacagagagaatgtcgacagtcctatatcatcagttatatgactggatggtctaaaaaattggtattggtgttagatcaatagctatcttatc

SEQ ID NO: 83920 - DNA, 466 bp, Glycine max
  unsure (1)..(466): unsure at all n locations
agcgccttaactgctggactctgaattttaacattctttagtttattgacaatttaaacaatcctgaaaatgtgacttggaatgtattttcaaancagtcactggtaatcgagtaccattaanggtgtaatcgattacacattaacatatatgactcttcattttgaatnttgacnatacaacgtctagaaatactggtaatcgattacacaagttaaaaataattaatcacaagttgtaactcttgaaatttanatcttaatgtttaaaacactgtaatcaatactaccttctggtaatgatagcagagagtaaactctttggtatgatttgtgaaacttctgtctactcatgtttggaaacttgtttgactatctgatgagcttccctgttctgatctgagtctgatctgactgatatctgatctgatcttgactgatctgaagatcatactacttgtatgata

SEQ ID NO: 83921 - DNA, 320 bp, Glycine max
  unsure (1)..(320): unsure at all n locations
taccagtataattccgatatggctcccgatcgcactcagctgcagaatatgttccagaaagagggcgaaatctttaaagaatacgcaccgcggtggagagacctaacggcacaagtggcttcttccatggtagaaagagagatgatcaccatgatggtagacactctgncagtgttctactatgagaagctagtaggttacatgccgtccagcttcgcggacctagtggtcgccggggaaagaatcgaggtagggttgaaaagaggaaagttcgattacgtttccttcacgagtacgaatgccaaaagaatcgggacaat

SEQ ID NO: 83922 - DNA, 264 bp, Glycine max
  unsure (1)..(264): unsure at all n locations
gcgatatttggcttctctcctttcaaagaacaagactaaccctgaatctttgtgtctccttcntccttgtcaaagaattcanaacgacacagtctgagaatcttttattcttccattcctaaacanagtgttcaaggactaaactgctgagaattctttnttatccccattcacaaagtatcaaaggtttaacaccctgagatctttgtctcaacacattggagggtaccatccttgtggtacaagtagagggtacatctactt

SEQ ID NO: 83923 - DNA, 429 bp, Glycine max
  unsure (1)..(429): unsure at all n locations
agctnngtgaatcctagaaaaccatcatttgttggttttctatctcccattacaagcctagaaancatttggattcattntgtatgttcattgctgtatgatatgagatgaaatgcaaagggtgggacttgtgttagttggttatgatggaatgagcctaaacacttaagcttgagtgaaacaatgactctgaggttntggttgatgatccttccttgaattctgccatcctaactagcttattntagttgtgactctaatacgtgtgttcctatctttgaaaagctgcatgttngtgannaagcaattattgaagctttccatgatattcagttcattatggttgaattctctatgaagcaaacaccatttttgggtgaccactgtangttgcacttganggacactgaactgttctttctttacttg

SEQ ID NO: 83924 - DNA, 287 bp, Glycine max
  unsure (1)..(287): unsure at all n locations
atctcttttatcttagggagagtgagtctccttaattctcgagtggatcaagaacacacaggctgtatcaaaggactttcacaacccttgtgtggtgccctcaccggaaacagagattctttccttccttttatcttcaaccatgttctttcaaaccacaattccagaagattcacttctacccagaattatctcgttgccataactcccgtttaagcactcaacataagtgattctcgagcctaaattgaatntcaagatgagaccttcacctcgttntggaatca

SEQ ID NO: 83925 - DNA, 363 bp, Glycine max
  unsure (1)..(363): unsure at all n locations
tatcctggctcaactgtcaatgctagagatacatctgnatccttctcttatntgaaattgaaattgctggttgtgattcttctcacgcccctcttggatgacattatttgaaatgtaggaagaatcacatatttggattgagatgtcaatttcttagaaataagatgttgaattaagttcattcctatctatgctgtcatgaatatatgattaagaatccatntttattcctcttgcagggtattggctctggcctgaaaggagtgccaatgttagtaactaactagttatttgtcatatttacatgcctgctctgctatttatttgttgtttcctttaccattgcaacaatagcttggaagg

SEQ ID NO: 83926 - DNA, 169 bp, Glycine max
  unsure (1)..(169): unsure at all n locations
gcctgtgtgagctatgatgcacctggcttatgatgatgcaagtgtctgcatgcttaagtaatgtgcattgaacgaatctcctaagatttagtatcccggtatatacatgtctctggtcactcagctactccacatgctctcctcnagaatgaatggtaaactatgcatg

SEQ ID NO: 83927 - DNA, 429 bp, Glycine max
  unsure (1)..(429): unsure at all n locations
actatcacagccaagaaaatagggcgaaggcagaaaactctgcccaaaacaccaaccaaaatcacagcttttctcacttaaagaccccagtaacagttccttcgttccagttcgttaaccggtggatcgactcgaaaatttcactggaagtctctagtacataatcctacattttgaccggtgggatctactagaaaacacccagaactcattctgcatcactctttccacaaccagcaaatacataagcattttctgcacttatgctaaaattctggctgcacctattgacagcanaattctgcataagtgcagatttcgaaaaacacacatcccttcacccaatcttgcccanatcaattcctacaagtnccanatcatgtatcaatcatgtctaaaccaaagtcaagcttcaaaccacagcaacac

SEQ ID NO: 83928 - DNA, 338 bp, Glycine max
  unsure (1)..(338): unsure at all n locations
agatgtcatatgttaactaagcacactcaatagtcaaagaaaacatganaagatgtagaatatagtacanaatgtgaatatatctttctttctctcaacccttccctggttntctttcanaataaggcttaaatccattatctacaaaggagaatagcagtttcactgcatgcctaatttaaggggtagaaaatctttcacatacaaaaacagcttaacaggtaccagctaacttaagtgtngtcatgtgtgaatgtgtacaagagggcattcaatggacgtgcccaaattggtgccatctctatatttttttgttcagacatatgatattntcatat

SEQ ID NO: 83929 - DNA, 111 bp, Glycine max
ttacttgatcttctgatgcccggtaaacttggttcttcaaacttatatactacaaatttgagctcctgaaattctaaatccaaattgcttatattagaacgtctccccctt

SEQ ID NO: 83930 - DNA, 292 bp, Glycine max
ttctttcaattgcttagaaatgtttcggaaaaatcaaccgagcgctcatacgttcgacgttcggggattcgagttcacgtctacgttatctctagctacggaaacctaacacttcatcatctatgaccggggccaattgttatgatttatccgttcattacttaaccctcttgcggctaaccattattaacattctgctaacaaaaaaataattcacatcgtgatgatatcgtacttggtgaataatccaccgacgctgccgaccgtgaataaaaagtaaatattatattaa

SEQ ID NO: 83931 - DNA, 173 bp, Glycine max
ttaagggggtctacttctttagtactttaaaactttaagaatttagaactatcagactttagacacagttaaaaaatgacatgggattataagaactgaacctcagaactttctttctctattcgtcctttttttttttttctgactcttcactttcagccttgggcatcttc

SEQ ID NO: 83932 - DNA, 351 bp, Glycine max
  unsure (1)..(351): unsure at all n locations
ctcaagctttgatcaaagggctatgtatgtacaatcatggccttcatcatgttctcatttatacattncattctaaaattcagagattcatgcacagtatattactcacagctagtcgttcactcacagagtaaggtcgcactatcaccggttttcgttcagcttttctttcacaatcaatctgtctactaactaacaattctaaatgcaagttcacattcttggtctttctttgctaacatacatacttgctcanactcatgaanagaaacacagacttcatcaaaatcatgcactcaattcaaaataaagacatacacctcgaaatctgatacagaggtcagatgtcat

SEQ ID NO: 83933 - DNA, 345 bp, Glycine max
  unsure (1)..(345): unsure at all n locations
tggtctttaaatgtgcaagataaagtaaatttgcattaaaataaatgagaatagggaagagagaattggtaattccatttattttggttcggtcactttcttgtcctacgtccagtcctcaagtaacccacttgagatgttctactatccttgtaaattctttagaatttctgaacacacattgggattcctcacccttgtgtttgagtttctcacatgccaagagataaacaatctcttgattaccaactatcgagtttataagatgaacaanatgatttctctcttttagagcagatgatacgaacttgaagtcctagaagaattctcaataatttgcaagag

SEQ ID NO: 83934 - DNA, 78 bp, Glycine max
gaactagatctctctctgatatttatcaaagatgtaatgttgctgtaatggagcctgtagactacaatgaaactacca

SEQ ID NO: 83935 - DNA, 318 bp, Glycine max
  unsure (1)..(318): unsure at all n locations
aaattttctaacttagaaatgtttcttttcacttactcatgatgatgcatgatgaaataagatatgatatggactaagatgctacatccaatataacaaccaatacaaatacaactcaagagagttgggcatgtaaaagacaacatcttcaaaattntctctaagattcaagctntagtcttcatgttgttcatggtgctccccctatctataacactnttaactatacagccatcgnactctttctaataagtccattctgattgtgccattctaatgaatagattctgagcagctntctgatagcctctctgaaat

SEQ ID NO: 83936 - DNA, 382 bp, Glycine max
  unsure (1)..(382): unsure at all n locations
agctntcaccagatcatataagataaatgcttttattctntctgcagatatatcctnccaaacgtcaaattctccgcctatatattcaacctttccatcactggcacgtggagtgaatcttccttcatggtgcaatactaaagttatattgtcattcattctacacaatcagaaaccacaaacatggtcagatattaggaaataaaaaaacctacctcaaaaagcgcgaagacattgacattgtcaaaaagcgcgaagacacaatcagaaaccaaaaacattgtcatctataanaacagagcatcataaacgaaaataataaaggatcatatacctccctacgaagcgcgaagacaatgcagatgaaacccctcgaacatat

SEQ ID NO: 83937 - DNA, 457 bp, Glycine max
  unsure (1)..(457): unsure at all n locations
agcntgtagggcttgngtgggaaatgattgtgagactcaacttatataccaaccttatgctacaacaattgcagcaagacccactatctacaatgagataacaatttttggttaaaaccttgcatcttgtatgaaagatgntctctctttgggtttgtgttaggtcacaagaatgaatcccaaggaaccttctcaccattagaagatcaccttcttcataggggtaaacctcttcaatatgctcatcacccttggcttcaccctcacttccacttgaggaaggagaagaggtagcctcctcttggctactatagatgccttgacccctcatcatcatggttttctttgtggngcattaagaagcatgtggcctttctaatacatntgagcacttactgtactagtctatctgtaactacctttgaggattccttatatttacctatcatcttgctat

SEQ ID NO: 83938 - DNA, 322 bp, Glycine max
aagaatctatctgtcaatcatctctcaacatcatctttcaactctttctacagaatattctgattcatttctcttcatctttctaaaagatattgttcaaacactttgttttccaagaaaagttccttgttcaaaaacttgtgctattcatcttattcattctcttcttcctttgccaaaagaaccgaatgactaaccgcctgaattactttgtgtctctcttctccttacaaaagatgaaaggactaaccgcctgagaattcttctgattcttccctccccttaagcaaaagattcataggactaactgcctgagatatct

SEQ ID NO: 83939 - DNA, 409 bp, Glycine max
  unsure (1)..(409): unsure at all n locations
gctcacacattntaaaaggactcagttntatacaatgcgcaccgtaccaccgtaccccacatagcatacagnttagtgaccaacccacattagacaaaaataattcaaaaaaataaaaaaaataaattttaaaatttaaaatataaaatataaaatttaattcattttaaaaactaattatgaaatatctaataaaaaaatttaattttccaaaatgataatattatttatatcttaagctacttaaaaagtatttttacatcatgttacttaattataattctatccanatcaaatattatatcttcattcttaatcattgatcatatataaatacttaaatcataatttttaatttaatttactaattatatcccctattatagattatatttatataaatataaaa

SEQ ID NO: 83940 - DNA, 421 bp, Glycine max
  unsure (1)..(421): unsure at all n locations
tatggatcaatctttttaaaaaggtgatttcttggcacgcatcatgtataccatatggatgaaattngaattacttgcanggccacccaccctggatatgggccaagtccactttcccttatctaactgtgtttatgtccaagggtatttgtagagtngttgtgcttatctctcttcataacacttggaattattacagggagtctgacaattatatgaagatggtggtggagcaacaatagaatggcagcggcaatgaaataacaatgtgggttcccacatcaagagagtgaagaataaatcagtgtaaggacctgttgtntttatgctcgaacttgaccctactattctaagtgagctaagattgcccttattgctattcagatattacttggaacattatatcaattatctaatacat

SEQ ID NO: 83941 - DNA, 359 bp, Glycine max
  unsure (1)..(359): unsure at all n locations
tttcacacaaatgaaatctacgttttatacctatacttaagaanaacctatacactcaaaataccataatttgagagttgataaatttatacaagtttatccaaaagtagtcgtttcacgactacatggacccatatgatagataaatagatttttcattctacataagtgactggaacattatgtttattaaattanggatgagttaatgatatatatgtagtttatatgtgaactagtgcatatgtctatatgattgatgttaacatgtttggtgctcaagaaaaattttgtgccctgtcatgcaatgaactaaacttgagctaatgcaagatgattctggtatattgtatgatttg

SEQ ID NO: 83942 - DNA, 447 bp, Glycine max
  unsure (1)..(447): unsure at all n locations
agcttatgtgcctttttcctcccaacanaatatgtttcatatgattacagtcataatagaaaggcttagcactcgaccagggaaaaaagcaagacaaaagttaaacgagatcaacggttctctaaagaatcggcaatgcaaattccctattggtaggaaatataaggagaagggagagaaagaatttttttttttgtataataagaaaaacacaaaagaaataggagagaaaactcctaacattntgtatagtaagaatttntcataattgacttggaccattatatccctcctaacatgtntatgctgggttggcgtgtaaaggacctttntagtgatgttggcaattggaatnggatataccggtataatgggcctattatagtctaccccccatgtggtgctcccctctctttgctgggagacgtactgggctaataagtacta

SEQ ID NO: 83943 - DNA, 147 bp, Glycine max
  unsure (1)..(147): unsure at all n locations
gcttagcatggctccgtgaagaagccattngatctttaaggccgatcggaccgccttaatatgctcttgcactcactcatcgctgtgcatcatacatttggagtgagcgtcatacgggtgcctccccgctcttctagttatggtgag

SEQ ID NO: 83944 - DNA, 188 bp, Glycine max
ctatgtatttactccctatgcctgacagaaagtacccataacatgacaaaattaccgtgaaatgggagagtaagagacaattcatacaagttttatacacaaaagttacctattatgagagatgaacactaactagctatggaaaagcggaagaactaccatatattagggaaagtagcctcgtctta

SEQ ID NO: 83945 - DNA, 181 bp, Glycine max
gagcagcactatgtaaaatataattgttacttttatctttgacaaaaataatgaaatcattatcgtaggataattaatattactatagaaacatgtacaatacaaaactatcttggtaaaagatcagacgcaaatttgttctgaaggacccaacatgtgagtgaaataatagaaacaatat

SEQ ID NO: 83946 - DNA, 284 bp, Glycine max
  unsure (1)..(284): unsure at all n locations
agctaggcatgcatgtggccataatcatgaatatgatctattaaatgatgatttctcttngattctgattatccaacaccggcagaggagaatgcagaaatttggatatattacactcaactatctataaacacactagtatatatcggtggcattatatatgaagtaatcggaataagacattgtattgtgtccgagaagtgggaatactcacactttgtagcttgacggtatttctcttcatcttctcggtgtagattttttgaaatataataaaaatagtg

SEQ ID NO: 83947 - DNA, 410 bp, Glycine max
  unsure (1)..(410): unsure at all n locations
tgtgtctttatttttntattttagaaggggattttattttattttttgaatacgaataacataaaatttgcacgaattcaaacattgaatcattccagacataaaataatattacattaacttaaacacagtcgagagaaataaaattagcatcaattacaacaattaagtcatgctaattttgtgacaaggacatattatcttccatttcgattacatgcttactaaaaacaactaagatttctattggcccgaatttttgtccagtagttagaatgcactaacaccgttcacacaccatcgttggttttcagttcaataatgtcgaatttgataattttatctgaatactcatagtgacttggttgcaaaaaaaaatcgtcgtaccgattgtggttcataaataccat

SEQ ID NO: 83948 - DNA, 429 bp, Glycine max
  unsure (1)..(429): unsure at all n locations
ttaagtcacctgcagctgcaagcttaagataatntactcattgatattttatatgtgcttatntgtaacaagcttaaagtatagcaagctttagcttgaggttgaaggggtgttaaaatatatgaaaaacatccaacaatgtctggattatatctctagagtatcttagattatgttttagcctctgaccacccaatagttacgtccaaatgatgtgcaaacactaatattagtggagactggagaggagaaatctgaccaaaatggaaaaacttgaacaactaagtactacaataaaaaacatggcataatagtgaaaattggggaaaaaatgagcttaatagggagtcaagcaacaatgctaaccaattggacacaatgattactcagatgagaagttataagattgtagtgcttaacaacaagctg

SEQ ID NO: 83949 - DNA, 412 bp, Glycine max
  unsure (1)..(412): unsure at all n locations
tggaacatcaccaggctgtcaaacatgcaggtattatatgatactaagcacttttaaccgaagaaaataagtttttctcttcgattttaaagaagtttttagcttttgtttttctggtttcacgtttttgaatatgatcttaagaagttaacggttatggctttcattatttcttagtgagctttcaaacatgttatttttttccatctaacttcttcaaaattaatctccatgagttgatcttaattcgcttaactctcttattttttgctaaaaatattcgaagtttatccaaaacatatctggtatgatgtgatatatgtntattttttcgtctaacttattcaaagttaacatccatgagttgattttaattcgctcgactctttttttttttgcttaaaatgtcatg

SEQ ID NO: 83950 - DNA, 354 bp, Glycine max
  unsure (1)..(354): unsure at all n locations
tgtgcgaatcaagtcactcccacattctatctctagcatgcattgtatgttggnctcgtcctttgtcacgggaagccggaaggtccatatcaccttcttaattgtacacatggggcactgcgcccccaaatgcgcaagtaagaagagataattattcgggctctcgtgtccgtaaaatgcattcatatcatgcatcgcataagcatctcttcataatatcataatgaacatatcgctcctgcatttgtccgttatcatattccagcctcacattttgcatgagtcattgcatcatcatatgcgttcaacatactttntgtttgctcatacatgatccttgtattttcctctaca

SEQ ID NO: 83951 - DNA, 306 bp, Glycine max
  unsure (1)..(306): unsure at all n locations
gctattacactggtgtgcatttgtttggctgggaccccatgcgcataaattactattctcatcaatgaagctgctgtgttaaaactcttgtgggacgtattaacttcttctagccaatgggcttctttctgtccatcccgtttcctgaggcatgattctcacaaatatatcanatcattcatttggccaggtatcaacaacaaaatgagtcttttaagcttcactcctcccgataattggatatggtaaagtatgaagttctggagcaataaatgggtgtctgaaataatagcagatgccttaaat

SEQ ID NO: 83952 - DNA, 421 bp, Glycine max
tgtcacctacaacgagatgaattaaggttcaaatattctttgagagatctccatatttaatatccgattatgtctggaggatggttaccttcgaaggagaagacttgtgggaaaccaaaaaaaaaatggctacacattaacattagattatacattttttacatttaatgtataattaactaaaattatatttctaaattatacatttgttaaatatatgactttttttttgtcaccataacattgatatagagtaactacaaactaaccacaaaattctaacaaccacgtcatgaatatttcattgtattttacctcataatttgaccaagctccaaattcataagccataacacaatatttgacatatatttttcatatatcaactacaaactagccaacaatcttcttcactctaaca

SEQ ID NO: 83953 - DNA, 290 bp, Glycine max
attgacttcaataaaaacaaatgagtatttaaaataatgagatctaaaaaacaaatactatctaagacggttctacagataaccgtcttataaagtactacattctaagacagtctccgcacacgaccgtcttagaatgtactacattctaaaacgatcttggtggctgcgaccgcttagaatatatagtacattctaagacgtgcgtcttgaaccggtgttatacacccattaacattttacgacacgcgttacaacaacagtcgcggtaccaacctattatggtaaga

SEQ ID NO: 83954 - DNA, 326 bp, Glycine max
  unsure (1)..(326): unsure at all n locations
gaaactcaagctcctnggactaagnaaactccgactctagatagttactgattttcccaagccntngggggaatatgtactactcaatcttgacaaacctcctcaagaaggcacttgatcgattaatgaccgggacttaccaaatgtcacttgaatcaagggacccaaaatctaatcccacccaaccccgcgataggtgaaagagggaaatgtgaccatcgagtaaacaccttgaaaaaaaaagggtattatctcattaatcaaaataaggatacattattccctgggtcggatggatgtgaccctcgagtatcccaaaaacatct

SEQ ID NO: 83955 - DNA, 456 bp, Glycine max
  unsure (1)..(456): unsure at all n locations
agcttgttcagaaacgtgcatntgtgtgcattatactattcccgggacaccacaacanaatggtgtatcagaaaggcgaaatagaactttaatggatatggttaggagcatgttaatcaattagactttatccgtatccttgtggatatataccttgaaaactgccatgtagttgttgaacagggttcctagtaaggtaattccaaagacaccttttgaactgtggacaaataggatacctagtataaagaacctgcatgttnggggttgccaggcagaaataaggatttataatccgcaagaaagaaaattggatgcaagaacaatcaatggatatttcattggttatccagaaaagttaaaagggtatatatcttatttgtataatcatagtatgagaaattgtcaaactggaaatgcaaagttcattgganatgatgaaatcagtgggagtac

SEQ ID NO: 83956 - DNA, 413 bp, Glycine max
tgatgaagctaagggaaactgagtaccatattgttgttacaagttttcttatatctaccttttggacatgtcttaggtttatgctcttttatttagcagaaatttgttttcaatttcagctttgaataattgtaattacatcttttgaatttagaaatgaattacttattatttatttccatatgttggatggagagtttagaaatggaaaactcatttgagtgtaacattctgtttttttaaataaataaaaaagagttttattaaaaataaataattttaggaaaaaatagtgtttttgtaattaaataaatgactgaaaaaatgattctattaattaaaataataagttttgaaataaataaaataaacatatgttttagaaaataaagagatattttaatgggatattt

SEQ ID NO: 83957 - DNA, 449 bp, Glycine max
  unsure (1)..(449): unsure at all n locations
agcttgcagcgacggtccaatacatttactttttatnttacccttcttgcccttacatttattgcaccaacaactacgtcctatcatatttagaaggggctgctcatggaattcgaaggcacgagatgaaataagaaggatataattatgtatcgagtggactgcagggattggagtggattcctaccctcgtggtcttcacatattttgggtttcgcatacaatacatagttggattacgaacacctatatcagacgaccttgttagctcctcacatattattaggtctgcatatcatatataacagtaggttacgcataccaattcttcttgatgaaccttctattcgagatcctcttatacgaaaacataatattagtggataaatcactaatctggcttaatcataaatatttatgttagctctgacacttatcatctaaatttt

SEQ ID NO: 83958 - DNA, 407 bp, Glycine max
tactatgccactgcagagagtgttcgtgatcgttttattctggtacgatgatgtacttcttggattggaatttggatgcctataataatcatttgtgagtcaatagtgttttgtttataaacagttaggagtatgcatgtgtttcactttcatgttataatggtgattgatgatgttggtatctcaatagcaattgaagattgacatctgataaaatgtgtgcttttttttcttccctgtgatagagatctagcactgcaaactgggcattacgccaattgtagtgcttcggtgtatggaagtgagcacacctgtgtgcgtgtgtgaagtgatgaaccttttcacgggcatggattctgtcatgtcaaattttaacatgataaagtcgtgggtatgagaggatccat

SEQ ID NO: 83959 - DNA, 357 bp, Glycine max
  unsure (1)..(357): unsure at all n locations
agctntaacctcatcgtctctcacagtctttatatttgtgagtcaatcctatccttgtgttcggactctcagccacttatgatagccgccgatgcttccattactgctttcactaagctctatgtactttcttcacgccgcatcccatgccttgggaactccttggagtaccctcgcgttgtggtcactaaaactccgtgcgatgaaaggcgtgatgctttctactaatggcgctcctctcatggggtagcccagagttggtgcacaacanacaattcttgcgccgctcttttcacatccccggtcgaacgtggcatacatggtcaaaatggcgacgaccgggctttccttgcttga

SEQ ID NO: 83960 - DNA, 336 bp, Glycine max
gcaggacacaaaaaccagcttgaggctgtatattacgtcatcttgtcataagcgcatgctattattcctaaagatcccaatagcatactacacattattctttaaagtgaatgagggttgtaaataaatttgataacatggtctataaaatggtgtagtaacctaagtcgagcacataatatgatattgctggaaattgctcccaacgatttggggcaatactaaagacttgggtcaaatcacttgacaaaacagacaatatacactcagagtgggatcaaagcatttagactcaattcagaaagttaaactaatcagttaaacaaggaaaaaatc

SEQ ID NO: 83961 - DNA, 215 bp, Glycine max
  unsure (1)..(215): unsure at all n locations
tgcctcagaggaagaaatatttcaatttacaacgcaaatgtcattgcaagaatggtggataactagcaaactttggtcattcacatatgntgccaatntatactaatgccatatctnttcagagagagagtgatagagagagagagagagaactacccctgtgacatattatatgctctaccattctgatctcttgcagaatggatatctcttcg

SEQ ID NO: 83962 - DNA, 338 bp, Glycine max
tagctattaagattggagagaagtttactgaatatgtttctgggaagttgcaagtgtcacgaattggaacaatgtttctcaaatgttttggagacacaaattcatgtcggagacagtatccaacagttatagaagagctgtgccgtcattttttctctgcccgatcttaagaagtcaaccaccaacttcgatctacggaggaggagaatttactatagtatataaaggttgtctccaacataacggttcttctgattatatggaccattcttttggatcacaacatgcaaccaaaactctcaggtttcagccatagcgttcatggagcacgttttatg

SEQ ID NO: 83963 - DNA, 380 bp, Glycine max
  unsure (1)..(380): unsure at all n locations
agctttgtncgcaaaatcactattaccattgtaggtccaacgccttatacggaccgctttgcttttatcggttaacatggaccgctcaaaagcataaaataacatgtaactttaccactgttgcaactacataagtctgatattctcattgcaattgaagatacgtaggagcaaaagcctcgcttttgtcgaccaccccaagagatcgctaatggtccaatgccttaacgtttctctcttttcaaaacaagagattgtaatggtcaacaccttaacgttctctcctttcaaatcaaagataatttatgtccaccccttaaagaccttgtcggaaaatgacttggggaaagaacaaaaaataacaaatgcacctcctgatc

SEQ ID NO: 83964 - DNA, 349 bp, Glycine max
tcatgttacttcctggaaggatgttccggcaaagaatgttgtcagcgtagcggttccaggcatcctcagagatgaatctatgagtatcgtagtgaggctggggcctaaaagttgtggcttttcttttcctagaagccatctacacaaaagaaacatagaaaccaagttaaaacaggttttatttgtaatgacaagctgaaaaataaaactgaaattcagattgggcgcttagcgcgactaatgtgtggaagcaatgccttccaaggttattttgatgatgccaaagaatcaagagttaagcaaattccaaagattcaagatcaagtttcaagaattatctagatccaga

SEQ ID NO: 83965 - DNA, 397 bp, Glycine max
actcagctaggactatccctatccacaatataataacctttattatcattatatgctaggggtagggggaattaactaattaaggtagtcattggttgttgggtcttacaccctttcttagtttgcaaagaaggtacgtgtcattattcttgaatagtaaagcaaaggtggcgtcaaatgagtacaatgattatgaattgtcgtgtgttgtagtttccctattggccattggcttggtgtgtcgtacgacaaggaaatcatgcccccaaattttttttggctgctttccagtttgaactttgtatctccaaactcacatgggagggaagtggcgattggtaccacttttgaaatggtcaagaattcttagcggaagtatgatgcgctatgctatgtt

SEQ ID NO: 83966 - DNA, 252 bp, Glycine max
  unsure (1)..(252): unsure at all n locations
ctcactaagtagaatggatcattgtcaatgtccaacgccttanaatgatcacctcttaatgtaaaaaagaatcacttgataagcaagaactacgtatgtctgattttctcatcgcacttgaggatacgtatgagcaaaagccctgcttttgtctaccaccccaagagatcgttaatggtccaatgccttaacgtatctctcctttcaaaaaacaagagatcgtttatgggtcaacgcctcaacgtttctctc

SEQ ID NO: 83967 - DNA, 388 bp, Glycine max
  unsure (1)..(388): unsure at all n locations
ctgtacttggctcatctcctatcagagccctngctagatcaaacagtaaggtatcaatataaacttgttccccaagtaccaagtttgagtgttatagatatgatttgatcaccataaataggaaaatatctcagctgataattagggattatactcattattagtcattatgtttccttatattgtactcttgattcattataaatcagaataacatgtgtgacacaactacacaattgcagtaagtagcattgttatatggtatctaaagcttaggttattcttgacagaggaataacgaaaattgtgctctactgtccccaatggacctctatgctaactatcccntcttttcgcgattttcccattttcgccgcaatgtcccctt

SEQ ID NO: 83968 - DNA, 339 bp, Glycine max
agcttgtgcatccaataccctgatgatgatgttctatatgttcttaagattggactgattcatttgcttccaaagtttcatggccttgcaggtgaagacccgcacaaacatttgaaagaatttcacattgtctgctccaccatgaaacccccagatgtcccaaaagatcacatatttctgaaggcttttcctcattcattatagggagtggccaaagactggctgtattaccttgctccaaggtccatcacgagctgggatgaccttatgagagtatgcttataaaaatatttccctgctttcaggaccacagccatcatgaatgatatctcatgtata

SEQ ID NO: 83969 - DNA, 410 bp, Glycine max
tccatcaacacacatgcttctatttatagactaggtagcttccttgagaagctttcttgagaaaacttccttgagaagcttctttgagaaaacttccttgagaaactagagcttagctacacacacccctctcataactaagctcacctccttgaaaagcttccttaagaagatttctaaagaagctagagcttagctacacatacctctctaatagctaagctcacctccttgagatgagaagctagaacttagctacacaccccctataatagctaagctcacccccatgacaaaaaacatgaaaatataaaaaaaaaagtccttactacaaagactactcaaaatgccccgaaatacaagggctaaaccctatactactagaatggccaaaatacaaggcccaaacg

SEQ ID NO: 83970 - DNA, 372 bp, Glycine max
agcttgccacccatctcgccaaggcgagcatggttgtttatctccataagcaacagccttctggaggaatcttctggatggcccaagtgggcctggttgctatctgtaccaccatttttactaagtacaccccctgcctgttttggtgattcttttctcttaaaggtacggaaacttacgaatttctgccgatacttgatttctttccgtaatgatgcggagcctcgcgggatacataatcattcctctttgacttacggagtgtactgaacctctctaattgtgcaacgatcttccattgattttggggtgtacggaccttacggatggcatcattttttttgcttccggatgtccggaattacaattgct

SEQ ID NO: 83971 - DNA, 418 bp, Glycine max
cttggatccaacaatgaagtttgtgagagaactatgtattagtgatttgactcataccagtataaatcaatccctccctccctcctctttctctctctctctctctcacacacacacacatatggggttcgttaatatactctcactcttttttcataaagagtctgttatcaagctatacacatgtactgtttggatttcccatccagcacctgttgtctacaggcaattatttatcatgagttcatggccaattcatggagaaagtcccatctaaatagtgcaaaatttttactccaaaagccactagttcacacttttaatccatctctgcttaatccacatactttacacacacaaatcctcacccagagaatttttagcaaacacagggacagtgaacaatacaaaaggaatt

SEQ ID NO: 83972 - DNA, 270 bp, Glycine max
  unsure (1)..(270): unsure at all n locations
agcttccatcanaagcgatccacatgaagcatatcgncatgaattagtntcacgccaaagaggcaacggtcatttgtgagtgactacattaatggaatagttnacgtgtttgtgataatgttgatccaaagaagctggtctattttcattataaataccacccactagcattctgagatgacacaccactcatattatcacttacacaggtgaattcttctcgactcatggaaattatcaacacgcactccagtctctttatcttcctta

SEQ ID NO: 83973 - DNA, 415 bp, Glycine max
ctgagccaaaatcctgactcaccataaatctttatccgggtgagaatgtcaatccttaccctcggaagcgaaaggaaagaaggaagatttccaatcaaagagaaagcaaaaataaaagaaagagcagaaggaaaattccccaatcaaagagtgggagaaagcaaaaagaaaagaaagaaaattcccaatcaaagaatgggagaaagtaaaaaaggaagaagaagaaggaaagaaagctcctgatcagggattgaaggaaaacagaagaaatgtgcagagaggtctttggaccggacaatatctgaacaatacagaattgtcaccaaatgaacaaaaaaagaaggaatggaaaccacgacctataatggtcttctccctttgattaccaaccaaaatcccgtgcgctagcgacttt

SEQ ID NO: 83974 - DNA, 412 bp, Glycine max
agcttatataataaaggccaagaatgtcctgttctcatgatatgggaggcgagtctcatcttctcaactaccaactatcagagagacgcacgagacaacagctctggctcgcggacttcattcatcaagacaacttgtattgcacttcaaaagtcaactataagaagctaccccacctcttgttctccattccagagtctattttctgcggttctctcactatttctctttttacctaacataaaataaaaatattaactcaatgagaatattatctaatcatttttaaaataatctaaaacatttaataaatattttaaatggttatgtgaccttaacttattattaaaatacattatcattacagtaacaatattattataaatgatagttattattaaatatacaaata

SEQ ID NO: 83975 - DNA, 365 bp, Glycine max
tcttgtcatcagagagtgatgagataagatcactcttcactctttgatcaaaagctgtgctctgctgcaagccttctaaacaagtttcttcgtttgtcaaaacagcactaagaagggtttgctgatcttctgcttgagcggtgggaagaacatcgctagctttatcaacagtgtcaagtgcgtttgttaagtattcaaagtttagttcagcgaggaattgacaatcttcaagggctcgaattgtgggtagagacaaaaaggatctgtcttgaagaagtgaatttactgagttcaagaatttgcgggactgggacaaggactgtccgacagaaattcgaccgtagtcaacgatgctgccattttga

SEQ ID NO: 83976 - DNA, 396 bp, Glycine max
  unsure (1)..(396): unsure at all n locations
agctntatcgcagggtccttaacctctgacatttctgtgttgtaacagtntcaagttcaagaatctctctcttgttgctgcttctctctctagggaaaaaaatggggaaagaaacgaggganaatatattacataagtacagacagatacatatatagagaagttggtttggtgtagcgttgtgttgtgttcagtaactntcttgtgtgtctttttgtaatgttaattatttaattattattgatatgaaaacggataatgaatagtctgaagtctgaactgtgaagtggtgagggttgtttgtttgtgcttctattttacgaagacaattaattaaattgctgtttgccacttcagcaagtatgggaatttttgagccaaagttcttgtggctat

SEQ ID NO: 83977 - DNA, 415 bp, Glycine max
ttggttggtctagcactagcatttaacagtttatttgcgaataacagaaaaattagaaagccttcacaatgaatatagcacatacaagaacaagatgctaattgtttgaaattgtaaaatcaatttcataagttgcaagttatcttcttgtaagttgcagtgaacaagctgtggaaatggattgtcattggtgttggagcagctgttgcagcacttgtgtcctgctacttattctatgttttgaggagaaagtgcaaagaagaaggtaattacttaaaagaaattgttgtatggtatggtatattttttcatgacttataacttgaaatgtaatttcattgatttcatcagtggacagaaaaatgaagcgaaaggaactgttagttgaggttggaggtaatgcaatgggaaaata

SEQ ID NO: 83978 - DNA, 429 bp, Glycine max
  unsure (1)..(429): unsure at all n locations
agctngcaataatataatagcacagcatcagttaatgctcatagagaaatggtccaattcaagtccagctcaatctaaaattgcatacaggcatatctaagcaacaaccaataggtatcaccaaaatttcgatagaccttgctaaaattacaataagaaattataaaatttaactatatctgccttatcttaataacaaaatgcctaaagatgtgaagctacaatggcccttcatatgcatatccaaatgatataaggctataaaagaattactaagacatgcaacattgaattcttagcatttgataaagaattatgagattaatgtttctaaatctttcatctatttttttagagaaattaaccttttgctattagagcatactcttatatcgcagtatatataattgtagctaacataagtctgca

SEQ ID NO: 83979 - DNA, 413 bp, Glycine max
tctagaaggagatcaacttgatgttttatgcttcttgaaggtggcagtccatgaggaatctccttgggaaagacatctttaaattcctgcaataagggttgaacactaagagaaacataaatagttaactgattagaattgtcactctctctctcttgtgtatcactccatctctcacagataaaaatagacatgggtcttctaaacagtttgggccaaaattacaataaaaataaattataactaaacacttatataacttgggccttcaagttagtttgggccttcaacaacaattaatagtcttggtagtgcctctgcctctgagccttcatttttctccacttgggtcttcaatcatcatcaatggcagctatacaaatgaccagccttgtctctatgacgtgttgggc

SEQ ID NO: 83980 - DNA, 357 bp, Glycine max
tcggaagaaagtgatgaggtacaagccctatatgtagagcttgaaagagcccgagtagtcgaagagaagttcaagtccatagccatcaaagtctgaaaagagtatgatgaactaagggacgtccatatggccaccgctgaagccttggaacgagaaaccaagaaggcccgaaaggaagaacacgtgccagcaaagttttgaggggctttatagggcagcaatagtaagctcaagctccgaagaggtgaaaggaatcatcaagggtcaaaggcatgatctggaaggacgagctaaagggcttgcttatgtcgaaaagaaaattgtcccaacagttaaatgagactgaagggaatatgt

SEQ ID NO: 83981 - DNA, 387 bp, Glycine max
  unsure (1)..(387): unsure at all n locations
tggcatgacatatgatgatcatgaatggattattgttagcgagccacccacaaccgaaaacatcaatctaatggaagaagaagctctacatgagtcatctcaacaatggaacccttttgagtcttttatgattcagaagttggatgctatcctttatctccttcaaaacaccaagttgaagttcatagttccttatagaacattacaactaggcttgagaacatataaactaggttatctcttactaacctcttgaactcggatgaagatgaagtgtanctatgttcatgtgtttggttttgttggttgatggtctgtctgctatgtcaagttatgtctgccttattttaagatgatgataaagtcggttggcttttttaatgatta

SEQ ID NO: 83982 - DNA, 398 bp, Glycine max
tgtttaccccatgttgaatttgcttacaatagagctgttcatagcaccactaattgttctccttttgaagttgtttatggttttaacccactaactcctcttgatcttttgcctatgcctaatgtttctgtttttaagcataaagaaggtcaagcaaaggcggactatgtgaagaagcttcatgagagagtcaaagatcaaattgagaggaaaaataaaagctatgctaaacaagccaacaaagggagaaagaaggttgtcttcgaacccggagattgggtttgggtgcacatgagaaaagaaaggtttccggaacaaaggaaatcaaagcttcaaccaaggggagatggaccatttcaagtgcttgaaagaatcaatgacaatgcttacaaagttga

SEQ ID NO: 83983 - DNA, 208 bp, Glycine max
agcctttagacaatagcctaacatctgccatcttatggttatcggataacctgcatacacattctctgcaactctctccttttcatacatgagtatggattacataactgaatgaaccttttctatttctttcctcactagatgaggcggaaatatattgatggtgccagcgataacagcacggaatattaacagtttagctaagtga

SEQ ID NO: 83984 - DNA, 358 bp, Glycine max
  unsure (1)..(358): unsure at all n locations
tgaagcaacagctcgcctaagcgagcatgtngctttctccataatattcctgatgggtccagggctgaagaacaccttcttaattgattagttcacccccattttgagttttttttggcatatttccttctgaaacatcacgaaacctttctgatcacgccacaattggctttaacagctcacatgaccgacaaaaatccgtatgtcaaaaacaaattttcccggacgaaattagggtttacaattgcccttttttactatcttttattggaaataaaatggagtaagagaagacactattttattcagctgaattcctctgactaacattctgttagtttcgaaactttaaaagaag

SEQ ID NO: 83985 - DNA, 395 bp, Glycine max
accgcagctgcagctcacagctatagtgaatgttccatatattatgatgacccaaccattgaagaaatatctgaggtggcttcacaaattatgacagtatgtatcttgtaaactggttgctttttgtgaacacgaagctatccaaatgccaggtcacgtggagattattccaaagcttatactttgcgggatttatagttcggaaatacgttccaattatagagcgtgaactcacgattctgagatgtctatattctaagtccgtgattgggagtacatgactttgtcatgcagagtatagcttcatatctcgagtgatgtttatggcatcgcaccacttttatgtcgcactactttatgggatattaaaatttattcctaggatatactttatt

SEQ ID NO: 83986 - DNA, 349 bp, Glycine max
cctatagcccctatgcaccaaacaaagggagagattttttctcaattcaattctacgactacgagtgtttgattcctaatggggcggaacaggaaagcaccacctgaatgatcttaaaaacaaattgtatccaccttttcttcatttctgacaatttataaaaataaaattcacctgattcataaaataattattttaattaattaccttaactcccccaattatttatcttccccttttaaaaaataatattttatctctcttttcaccactaaatatttttttattagtgtgtgaagagaattctcttgtacattttataacaaacaattcttaaatcttctaaata

SEQ ID NO: 83987 - DNA, 412 bp, Glycine max
tcttgaaggagagggttatgatggacctgactcaattgaattggatcttgaggcagagatttctagtttggctcttgatattattgggcttggtgtgttcaactatgactatggttctgtcaccaaagaatctccagttattaaggtttgacttaaaggctatgcatttcaagtgtatactgatttattgattgtaaatgaaagtagacgtggtaattttctttcttatattttgtctccttaaaagcatctagctacctatctaatgtacttctttattaatatgtactcccgacgctcaatctctttcatgttacgtgttgaatatagcttctagttttctacaaacaattgtgcgggtaaaaaagaacacggacttatcaaaagtttatcatattgtcaataataaact

SEQ ID NO: 83988 - DNA, 60 bp, Glycine max
aacaatttatgaacaagagctttgcacaggtttaggggatcccataagatttattgtgaa

SEQ ID NO: 83989 - DNA, 305 bp, Glycine max
gtgtaagtataaaatattaaaatgtattcattttgaaactaattttaaatatctaactaataaatttatttttccaaatagaaatattatttatatctcacgctactctaaataggatttttacatcatgtttactcaatctataagtctattccaaaggaaaaaatatattgtcattcattagtcagtgatcatatatagacacctaaagtcttatcttttaatctattttactagattatatcgctattattagattcatattttatttaaaaattaagacggcggactgcagccttgataat

SEQ ID NO: 83990 - DNA, 390 bp, Glycine max
  unsure (1)..(390): unsure at all n locations
tcggaagaaagtgatgaggtacaagccctaaatgcatagcttgtaagagtccgagtagtcgaagagaagttcaagtccatagccatcaaaagtctgaaaagagtatgatgaactaagggacgtcaatatggccaccgctgaagccttggaacgagaaaccaagaaggcccgaaaggaagaacacgaccaaagcaaagttttgaggggctttatagggcagcaatagtgagctcacgctccaaagaggtgaaaggaatcatcacnggtcaaaggcatgatctggaaggacgagctaaaggttgccttatggcgaaaagaaatttggcccacagtaagcgagactgaaaggaattgtggccatcatctatagtgcaagagaactaaatcttc

SEQ ID NO: 83991 - DNA, 339 bp, Glycine max
  unsure (1)..(339): unsure at all n locations
tctacatgaacgatcttcccgggaatgatttcaacaacatcttcaagtcccttgcagcttcaagagaactgtgtaatgaataatagaagctgcgcatggaatctgttcatgtttttcaatggggtccaggatcttttatggcaagatctatccaaccaaaagactgcatttagttcattcctcgtacagccttatgtggctattcaaggtatactataatttctctgttaatctttcttaggagaccacacataatattcatttgactgtcataatttcaccgttaattatctatgtgtccagtgatattatgttaactatacaatancaccatattat

SEQ ID NO: 83992 - DNA, 414 bp, Glycine max
cttggaacaccttagtgaacatgtgggaattattataaggagtttgtcattcttccacttcccatgccaccctagagaaggtactcttcaacttcattttacaatccaactcatcaactttgtaacaagtttttctttatttggacgataatataacttatgctttgccatttctttttccacagaaatgtataggaaagccaagatgcacggtcactgtatcaaacagtaactttgggcaagacccttgtcctaatgtgttgaagcggttatcagttgaagctgtttgcgctccccactaattggagaagctgaatgattaaggaagcacccttttacgtgtagtgtgaagtgacttaacaagcacaccaaagaacaataatagtttaggtaaagaaagtgccataattgttt

SEQ ID NO: 83993 - DNA, 256 bp, Glycine max
atgctcagatgcctgttcaaggaatattttatctttagaaacaacaaacacttgatgatgaaaactcttttatgctagatgcgtctggagaaatgaggtacgaacctacacgctatcattcgaattcttcatagagataactctctgtctattcttattaagtttggaaagcgtctcaaacatctagaatactcttagacaatagactaaatgctttgatttacctttggttggtgatgatctagattaatcagtt

SEQ ID NO: 83994 - DNA, 413 bp, Glycine max
taacatcagaacctcaaacaaccaggcaaactattaagcactcattgcaggtctaaagttagcaagaaaagttgaagccaagtggctacgaagctacatagactcataacttgtccaaggacaagttgccaacatataccggaccaaggaaacagtactactcaagtactatcacatagcgaagtctctcatcaacaattttgggtgtttctaaatgtattacatccccagggaaagcaacatttgagtggacctactctctaagctagctagcattaagaaggtgttggcacctcaagacaatcatctatgagacactttaaactccaaccatagatgctgaggaaattatggtaggagaagagaagtaaccaaactaaatgatctcctacaagaacgtcctaatttggggg

SEQ ID NO: 83995 - DNA, 384 bp, Glycine max
tgtgcattcaatatcctgatgagggtgttccatatgttctcaagactggactaatacatttgctgcccaagtttcatggtcttgcaggtgaagatcctcataaacatcttaaggagttccatattgcttgttccaccatgaagccccctgacgtccaagaagatcatatctttctaaaggcttttcctcattctttggaggaaatggcaaaggattggctatactaccttgctcccaggtctattttcagctgggatgacctttagagggtgttcttggagaaattcttccctgcatctaggaccactgccattaaaaaagacatttcaggcttcagacaacttattggagaaagcttgtttaattcctggaaagaatcaaaaa

SEQ ID NO: 83996 - DNA, 68 bp, Glycine max
  unsure (1)..(68): unsure at all n locations
aggaacaaaaaccaaccgcggggngggagcgagcgaattttttctccaaaaatggggggcagggtgca

SEQ ID NO: 83997 - DNA, 332 bp, Glycine max
  unsure (1)..(332): unsure at all n locations
agcttctacaaaacttgtatagctatctctagacatataaacctcactcacttagaagaaaaaatatacttaaatgggtcatattcatatacctccccacggaatggctctggcgacctgtaaatgtgactgtgcatttgtttccttttccatatggccattcctgagcatcaatgacagaaataaagttagtttatacaggagatggagtttcaaatgtgtatgatattcacatcgtttttcttttgcatgaaatatatagatgagtggatntatttttccttcttctttggtgagaaanaacaaaaactcttcattcatgtatctataca

SEQ ID NO: 83998 - DNA, 335 bp, Glycine max
tgtccctcaagtcatcaagttctttccgccctacacaaaaaacaacaaaaatcagaaccattaaaatacaaaaaaaaaaaaaaaaaaaaccattaaactaaaactcaaaaatgcaatcaaataaatacatacttcaacaagacgggctttgctagccttgtctttctctttctccaaagcatgaagttccacttctagctgcattctcttcctttcaaggttatcaatttcctcaggctgactatcaagttgaaccctaacatttgcacaagcctcgtcaaccaaattaatcgcctcgccacgaagatgacgccctgaacaatcacaaaaaatat

SEQ ID NO: 83999 - DNA, 397 bp, Glycine max
  unsure (1)..(397): unsure at all n locations
agctntcataagtgaaatcaagtgcagccatttcccttatatgccactcacgaggtggaggttgagccattattttagaatgctcacaatcaggatgttcanaatcaccaaccacagaatgctcagactcaccaataacagaatgctcatgatgctcacaaagtacaaaatgttcaggataatcaagatgcacactatgcctaactaatatatgaaatgtcctatctatatcaggatcaaagggttggaagtcacctcgcattgcctctagtcatgcactatatgcagcagatcatgtgtttctcanacaaggcaaaagatggtggttaaaactacaactattcttaaacaatattctaatgagctataattttgtgagaaacaccctcatatcatg

SEQ ID NO: 84000 - DNA, 274 bp, Glycine max
tcaactcagtgttttgagagatgctccttgctcaagtccatgcaactatatctgaagtcacaccgtctgtgcgaaacttcttcatacctttcattctctatgtttacaactaaaagcctctagctgtgttctgatccgactataagtatctcaaaatactggttggcgaatctttcctaagcctcttatgttcaagaaaaattttctgactttgtaccaacttgaggtgtactctataagtactcttgctcactctcaccgcacatgcttatta

SEQ ID NO: 84001 - DNA, 337 bp, Glycine max
  unsure (1)..(337): unsure at all n locations
tcatctgaccggatcttaagcgacctgcggctgagcttaactcatattaaacctcacatcgatataactgatgngaagaatattgtaacatctgttgtgaacaccgatgttaatgtaatataacaacatcgattatttaaataacccgatgttatataataagaattacataaaaatggtgtatgtgttcataccaacggtggcaggtaacattggtgtttcatcaaaaccgatgttaacttctaaaacgttacatcgattctctgcaaaaactgatgttaattgccaatgttaacattgatttttcaaaaaactgatggtggattataccttaaca

SEQ ID NO: 84002 - DNA, 410 bp, Glycine max
tacaaatctgttttaagtccaagctcataaataaaataaaatctagacaagataagataagatttgataaaataaaatattgatgaaataaatctatataagataagatcaggatagatctagatgaaatagtgtctagattagataaaatctagataagatctgataaaattgtctgctgtcttcaagtccaagcccaattctggattcaagcccaattgtttatgattctcctgaaattaaatgaaagacacaaagttagtccaataggcccaaatgataaaactgcataattaatttgacaatcaaggtattgttttgaatctactctgaacagcaccaaaccacaatacaatggaggagatacatggagaatgagatgaagaacagaagatttaaggtaattgacc

SEQ ID NO: 84003 - DNA, 467 bp, Glycine max
agcttgtctgcatctaaatcatcataatattgttcattctcagaatgaacttgtgacatctcacaccctatatgattatcataccatataaaccgtaagccctaatatgaaaatcttgtcgattgctaattatatcacaaactataacattggcttggtaaaactatttttgggtagatactgaacttaaaactttgcttctaactggtacatatgacttttaccacatgacttaagtattggtagcattctcatttattacctgttaaagcattacttgcaccctcaacgttgttcataagtgccggagctgatatcatcgcaattgaaagttgttgcttctaattcttgtaaactcaccaacatgatcacttttgattgctattaacattcatcaaaaagagatttcctttattatacgtgtccaatgctgacctctaagaacactttgtgtgcatctaccttct

SEQ ID NO: 84004 - DNA, 427 bp, Glycine max
  unsure (1)..(427): unsure at all n locations
agcttattattagtgttatttagagaacttctcatcactgtaccattatattgatnngngactagcggacaatgttcaactatatcacatgcgaaccccatgatcttcattaccaatatttaaatatctattaggttactctgaattgcaacttcaaaaactatcttgctatcacattctgaagctctcttatctttgtgtatccatatatattaccaaaacacaatcttagttttgtcattagctcatcccaatataatgtccactcgaaagcagaccattcatactattatccattacgatggggaaatgcgtgactccgctgaaggagtggagttctattccaaataacgtgcatgtgacacaaagcatcacattagagacattgcatagagataaacaccaagagatataactcaaaccaacc

SEQ ID NO: 84005 - DNA, 398 bp, Glycine max
ctctagctaatactcaaagtttgttcctaaggactctacacttgcctcacctctctatgagctggtgaagaagaatgtggcattcacttggggtgaaagaaaaaagcacgtctttgctttcctcaaagaaaagctcatcaaggcacctgttctagctcttcctgacttttctaaaacttttgagctagaatgtgatgcctctggagtgggtgtgggagctgtattgttgcacgtgggcaccctattgcttattttagtgaaaaaaattatggtgccaccctcaactaccccacctatgataaagaactttatgccttaataagagccctccaaacttgggaacattatcttgttccccaggaatttggcattcatagtgatcacgaatcacttaaata

SEQ ID NO: 84006 - DNA, 343 bp, Glycine max
aggaactataaaactcagctactgatgatatagattatattgattttatttttgacttgtcgagaaggacgaccataaagagggtggcgcattacaaaacgcgataggagtacatattagtaacaacatgaaacacatacttgcaatgagggaacaatgttatgtaattatcctaagaataaaatttcctgactgcttagtgtttaactcaagctcattttatacatatcatgaaaacatgtgttttaagaatgtcaatgaaagaattactctaaaagcttgttgaagtacattcttaactaatgtggaaaaaatcatgataattacctcttttttcttacta

SEQ ID NO: 84007 - DNA, 349 bp, Glycine max
agctagctagtggagcttctatggagactgtatctttgagcttcaatgagggccttcaatggtgatttcccatcatggagatgcagtggaagataaaagagaagaggtgaggggaggcgttctccactatggaataagccatggaagaatgagcttctccaccaagagagtgtcttggataataagctcggagagggtgcttctatggaggagaagaatgagagagagggagatagagagaggggggagcacacaattgatggaagaaaagacggagagaagttgaactcttgtagttgtctcacaagactctcattcatcatagatactacaagtggtacacatgctt

SEQ ID NO: 84008 - DNA, 317 bp, Glycine max
  unsure (1)..(317): unsure at all n locations
ntataagcgcgggttcgggagacaaaggtcaagcgtttgcgatatgcgaagatggtattccgagtactttggatttggtacgaccatgccctcctgatttccagctgggaaattggcgagtggaggaacgccccggcatttacgcaacaagcataatgtaaacctttacggttttaaaagctctatagttgggcctaggctttagagttttttccttttgttaaagctttgtgtcttttgtttttgaatttataatacaaggatctttcttcatctgttcctggtctctacccattctcattcatttgcgtggttac

SEQ ID NO: 84009 - DNA, 397 bp, Glycine max
  unsure (1)..(397): unsure at all n locations
agcttctnttngagccaaacttaactcttcttctctataccatgacccangatagggagttttacccttaccctcngaagaaagaatgaatggatctctcaaaagaagtttctttactgttaagttggaatgcgctccaataagcaaaggagaaagagaaaatttccaatctaagattggaggaaagaaaaagaaaaagataattccgatcaaagatcagaagagagcttaagataaaagaaagaaaagaaaattcccaatccatgattggaagaaaactaaagaaatatacagaaaggtctttgggcgatcatgacaagcaagaaaggatagaaaggaaaccatgacttgcgatacatgaagcggtccccttcttgactaccaaccaaaatctttt

SEQ ID NO: 84010 - DNA, 413 bp, Glycine max
  unsure (1)..(413): unsure at all n locations
taatactactcanatctgaaattccaagtctaataacaaaaatcagtcaaagtagactgattccaaatcaagatacttatttaggaaaaatattttccaaattacactgattatattttccaaatcaggatacttcaaatttatatttcttaaaaaatacttatattatagtgtcatgtctaattttaaaaattacactatcgtcacacaagagataattaatgttaattctgctacttggggatggcttgcaggtaatatcatggattttcattacttttaaaagcaatggctagttaatccaggggagtgtctttggctcggacatgactaaattatgcttgctggtaacattttgtgtcattgaatggttggtgtttcatcgggaggcaatctgatgtgatcgtgtgagc

SEQ ID NO: 84011 - DNA, 478 bp, Glycine max
  unsure (1)..(478): unsure at all n locations
ctcgacccggatcttaagtcacctgagctgcagcttttttgaccttgacaggctactatctcttctttcataaccatgctatgtgctcgcgactggtccctttctttccttcgcaacttgaattcactattgctaccccatagagctccgtgaaatattgttcggacatactctttcttgcgagccctcttggtctcttgttcaagggctctagcggtaattgcattctctttccgtaaacccggccactcctttcgaacgtgtgtagcggccaacttgaacttcttcttggaagatttgcctttctaactcgttntgagagctggactttttgcctttccggtgcttaaattctcttcctgacactattacttgggagccaactaacctcgatataacttcaccattctggacccacatgatgcatacaatgcttagctctgacttcttacgggttccatgctatgattttgaagct

SEQ ID NO: 84012 - DNA, 376 bp, Glycine max
  unsure (1)..(376): unsure at all n locations
tgcctcanagaggtccaggaaggacaaggcggtctaaggaactagttccgccccggagtacgacagtcaccgctttaggagcgttgtacaccagcagcgcttcgaagccatcaagggatggtcgtttctccgggagcgacgcgtccagctcatggacgacgagtatactgatnttcaggaggaaataaggcgccggcggtgggcaccactggttactcctatggccaagtttgatccacaaatagtccttgaattttatgccaatgcttggccaacagaggagggcgtgcgtgacatgagatcctgggttaggggccagtggatcccgttcgatgccgatgctatcagccagctcctgggatatccgatggtattg

SEQ ID NO: 84013 - DNA, 158 bp, Glycine max
tgcttagagggtgcgaactcaccatcttctatagtatagtatcgataatgtgtctaccatcacgatcatcggctccctttccatcattgggggtaccacctgcgccgccgatacctaccctttgggcgtgcctttgaaggactgtctccttttgcaat

SEQ ID NO: 84014 - DNA, 422 bp, Glycine max
  unsure (1)..(422): unsure at all n locations
tctatagaaggttcgttcctaatttctctacaattgcatcacctctcaataagctcgtgaagaagaatgtggcatttatatggggtgaaaaacaagagctagcctttgctttgctcaatgaaaatcttactaaggcacctgttctagctcttgctgacttttctaaaacttttgagctagaatttgatgcctctggagtgggagttagagttgtattgttacaaggtgggcaccctattgcttattttagtgaaaaacttcatagtgccacccttaattaccccacctatgataaaaagctctatgccttaataagagccctccaaacttgggagcattaccttgtttccaaggaatttgtcattcatagntatcatcaatcacttaagtacattggagggcaaaccaaaggcattcaaaat

SEQ ID NO: 84015 - DNA, 380 bp, Glycine max
agctagtagatagctcgatgctctttcaaggctaacctagagtgtgatgagcctttggagaagcaatactcactaagggtggatcttgtgttgacgagcctctggagatgtgagactcatctatgacagaccttgggtatgacgagctcttggagaagtgagattcaccaaagatagactttgggtttcaaaaacctataagtctcaccaaagacaaaccttgggtttgatgagcctttggaaacacaagactcaccaaagacggaccttgggtttgatgagcctttggagaagcgagactcaccaatggcacaccttgcgtctaacgagccttcggagaggcaagactcactaagagcatgcattgggtgatgagtctt

SEQ ID NO: 84016 - DNA, 278 bp, Glycine max
tgtctcagagtttatgcgagacggagaccaacatgctagctatcatcgccaagtaccaagaagagttaggtctatccacggcccacgagcataggatcgcggacgagtatgcccaagtatgcgcggaaaaagaggctagaagaagggtgatcgactctttacaccaagaggcaaccatgtggatggatcggtttgctcttaccttgaacgggagtcaagaacttccccgcttgttagccaaggccaacgcgatggcggacacctactcctccccccaa

SEQ ID NO: 84017 - DNA, 389 bp, Glycine max
  unsure (1)..(389): unsure at all n locations
acctctaagncgactgcagcatgcaacttaggtaaatacttatactttcatggatcgaggttagatatgaagctacaggataatacacacaaacctgattgaatagagaaacatcttcatatgcatcagcgttggtggtgagaaagaacccacgccgttataactattggggtcaactattacttacttgcatttactatatttaccataaaagtaggtaatttctattttaaccatcgtttatcaatgttattccaacaaagccttattctgaataaaccctggctaacaagcaaggtccatgacgtcgaaactcagatcctctgtgttagtttaatacttgacactcgggcaatggttgcaaatggatttccttgacatattgtata

SEQ ID NO: 84018 - DNA, 342 bp, Glycine max
  unsure (1)..(342): unsure at all n locations
tgacagcttgagaatgatcattaaaactcaatattagcaagcacaacagttctgagtaaacagaaaacttggttacccacaataagcaatttaactataaatgggacaatgtcactntaccactttaagcataaaaaataagtacgttattactaatctccttcctcctcatatattcaaaacaaaataagccaacaaaagattacatttctagttttagacgtgaggattgatcaattatgttccaaacacagtgaatcatgttcatcaatctattagtcaaggcacctgacggcacaaactaaaagtatcatgctatctgatctgccactaacattaata

SEQ ID NO: 84019 - DNA, 412 bp, Glycine max
gtgaagaagaatagtttggaagaatatcatatatgtatatcgaatgtgcgccacagtcatttctatagactcttcatgtctggtcaaagaaaccattgaaagagtaatgactcttgagaaaaccatgttaagagttataactctcagattcttcttcaaaactgttcactggtaatcgattaccacgaaggtgtaatcgatacacaatgcattttatgaatagttgtgactcttctcaattggatttgaattccaacattcagattcacttgtaatcgattactaatatagtgtaatcgataacactatttgagaatcatctgtgaacgttgcgaaccatttgaaacatttcgagaccaagctggcactggtatcgatactgaaactgtaatcgataccagaagaatcctct

SEQ ID NO: 84020 - DNA, 389 bp, Glycine max
tagctagatgggttatttgagggtgattcttgtgtctggatcttaagaaaggtttatgttatgttctatttttatttaattgattgtggagatcttaaatcttgggataagaaagacgtaaataattatagtaaaaataatttctatattaaaatcattttacaaaaaaagtatgtaaataatttacatattaatttatgaaatctaattataaattgataaaataaaaataaaaatgttaattattcaaaataaaacataaaattatataaaataaaattaaaaagatttatataggcaatattcttaattttataattttgatatctgaaaaaacaaataactcttgacttaatgatacattaaaaataatatctatatatttaact

SEQ ID NO: 84021 - DNA, 334 bp, Glycine max
ttgaatgctctattcaatggagtggacaagaatatcttttactgatcaacacatgcacagtggccaaggatgcatgggagatcctgaaaaccacttcatgaaagaacctccaaagtaaagatgtccagattgcaactattggcttcaaaattccaaaatctgaagatgaaggaggaagaatgtattcatgacttccacatgaacattcttgaaattgccaatgcttgcactgccttgggagagaggatgacagatgaaaagctggtgagaaagatcctcagatccttgcctaaaagattcgacatgaaagtcactgtattataagagagcccac

SEQ ID NO: 84022 - DNA, 224 bp, Glycine max
  unsure (1)..(224): unsure at all n locations
agctntgaaagatcttcaagatcaaggctcgtttccttgttataaagacaaantcaagaatcttatgattctcctctgaccaatgatatggaggaacaatcaatttagacattttcattgacagacaggagaggactataattagtcataccaactccggacttgttcatactgaaatatatgaagaacaaataccttttgaccaccacggctctagctcagct

SEQ ID NO: 84023 - DNA, 430 bp, Glycine max
  unsure (1)..(430): unsure at all n locations
gacacttanaaactcagcttggcctattagacttaataatttgataattcgtgtataaaattacaaggaaatgttttttaaagaaatcataacattgatttggtactaaaaaaaaattaaagattcaactntctccactaataattaacaactaagatttattgataaaaaaatgatatattattttagaagtattcatagatcaatcaaatctattgataaaaaacatagatcaatcaaattttatgaagattggaaaaactcaatatggaaaagtgaaaaaagaaatatgtagtattaaaaatatttatttaaaagcatgtaagccaagtctaattacattaataaaaaagtaaaataaaaaaatgtatccaaaacattcagtttggaaaattctaaaaaaaaagagtattttaataaagaaaatatt

SEQ ID NO: 84024 - DNA, 319 bp, Glycine max
ttgtccaatatgcctttattctttcattacacatttattaatctctacatgcatattctcttattatgatgatgtgcaggtggattgtataaccactttttaaaaccccagttctaaaaatatgatttgaaaagttatttaagatggagaaaagagaaactttatcaattttatcattttacaaatatcatataggtggtgtaaaaacaacaactcctggttgaaatactttttcaaatacatacgatacggaaataactattaggacttatacagctaaacgactgattgactaagtgagtgtttactttcattctaa

SEQ ID NO: 84025 - DNA, 403 bp, Glycine max
  unsure (1)..(403): unsure at all n locations
ntaagaagaggtgttgaagaagtagaccctaataatttgttgacaaatgaagaagaatcaaataatttgaatggagaatcaaacaatattgaacaagacaatgaaggggaattagaaaatgactttgaagtttacaattttgaagaggattagacattgatgtttgttagtcagttataatatttgttattagtgatatgtttgttttcttttaatacttgaaaactttgttagtgtattttatttttgttgtcatatggaagtttgttagttatataattttcattcatcccaatattttatttgagtgtttatgttaaaatattattttctatatatagatatgtcatcaggtggtggttacccttccccgacccccgtcttatgactccattgggaaaag

SEQ ID NO: 84026 - DNA, 257 bp, Glycine max
cgacgcgacacaatacataagcttcgctaatattgtcttcgccagcgaaaggatctacgttggtctcaatagatgcagaattgagcattctactctgatgaatgaaaaccctggggcaaatgctacacatgatatttatgaaagaacccatggaggggctgccatacctacttgggcaaacacaccgcctataaaaaatgtcgtcggtcaacatatattcgatgcctatcgcatgacctatagtccggccattagct

SEQ ID NO: 84027 - DNA, 340 bp, Glycine max
tgcctggtgatacttgtgacccaaatgataatttttgtgatgctcattgcaaaacacatttcagatcagaatctgcacatggagctcgtggcttgaagatacatatttgcgtttgttatacttgctaaacataatgtttagctgtagcaatcccaagtttcacacctatattaattgaatgagtatatgatgaactgaataaaataaaataaaatgaccccatactatattttgatggtcattctgaacttatggatcctaatatgatttgagcctttctattctccttcacttaaggagataaatctactgtaagggcgttgttttaataatacatatt

SEQ ID NO: 84028 - DNA, 339 bp, Glycine max
  unsure (1)..(339): unsure at all n locations
cggacnccaagcacctgagcatgcagctagctcatctatttagagatctcttgtccatgccagagcctgttgtataatgtaacttattaaacatgatcaaccactagtgtaactgtctcataagatgctttaatattagtgtagtagcgataacaagtcgctcatgtgatcctatacactacataagtctccaaggctattttattatattcttgttatatcccaatgagcagattctaccctacactcgatatacacaaacaacatttaacaaatactttattaaaatacatctattcatcgaatttgaatagacaacctcgacattgtcatacctat

SEQ ID NO: 84029 - DNA, 394 bp, Glycine max
cccatctcatgtggtactatgtggcgagcaggcgattgtgctaaacaattcttcacattcacatatcacatataaacccaccataccctattgccaccttaactgagctgacgtactcccacgtagctcttatccttagttttctcaacaccaggtcccgatcaatcctaccaagcgtgcacaacatacaagcaatgtaacattctatcattacatactgacacacccaacacaacaaggcagaggcagaggagtctagccttaacacaaaccaatatcacagctttgtttcattctaataccccactaacattctcttctgttcagctacgtaaccgccggatggactacaaaaatatactggacgccgctagtacataatactacattttga

SEQ ID NO: 84030 - DNA, 415 bp, Glycine max
tgtacatgcatgaggttcttttcctgtacattttactacttatatttccctaatcagctcattcaatgaaatggaggtgctattgataccaatgcacaagttattttgtttcctcaagcgagattagttctatcttgcttcgctcaatttcccttctttttgatagtgaagaaaacttgatggttgaatctagttaccactaacaacttatgcaaaattttatgtagaaatgagttagcctaatatatgaaccagataccaaaagacagcatcagtaaacattcagactgctattcaaactcatacattttaatgtaccttgtgaagtcttaatgaacatataaaacggtaaaccgaaaaaggactttaattggttttaacgataatacacgattatttgccctagaaattttct

SEQ ID NO: 84031 - DNA, 409 bp, Glycine max
atcctcagagtcacctgaagctgcaagcttggccgcttggtcatttcatgactgaacgataggtagttatgaatggccaaaggcctaatactggttctgaacatcgaaaggaaactcttggttggggaagtgtccttatggcgaggcacctgctatatggcatcaagccttcttccaaaaacaacatacccaatattgaagcatacatacctcaatgctgtgctcgccaattcttacttaatcaaaacattccctaatctgtggtgagtattactatagacaattctcgacctacattggatgacgtagaattgcttacttaagctggtgaaacaatggaataacatgctatacatcacaatagaacgaggattgaataatatattagataaacttagtattctttaac

SEQ ID NO: 84032 - DNA, 373 bp, Glycine max
  unsure (1)..(373): unsure at all n locations
tccttgagaagtttccttgtgaagcatccttggtgagcaagtgttacacccctccattaactaagctcacccccatgcccaaatacatgaaggaagaaaacctccttgggcagcaagtgttacacctctncaatagttaagctcacccccataggaacacacacccctccaatagctaagctcacccccgcccccaaaatacatgaaaatacaaaaaagttcatactacaaagactactcaaaatgcccttaaatacaaggctaaaaccatatactgctagggtacccttaacttgtagaatagggttccctttaactaaattggccaaatacaaggccccaaaaaaggaaaacctattctaatatttacaat

SEQ ID NO: 84033 - DNA, 288 bp, Glycine max
tatatatcaaagatatgacaacttataatttgttttctactcagacttagattctgttggttgcattgactctcggaagtctcaacatctggatacatcttcatgatggctaatggagcaatatcttggacaagtgcaaaacaatcattagtttctacttcttaccatgaaagttgagtttatttcataatttgaagcaacctcatacggtatttggttaaaaagtatcatggccgatctacaagtgattgatacattcctaaactggtaaaagtgtattgggataat

SEQ ID NO: 84034 - DNA, 317 bp, Glycine max
ggctctaaatttacattgatgtttgtatttatgggaggaggttgtatgtcatttttgttttaagagtagtgtcccactggtaaaactaactttccaaatgtttgccttcgcaggaaatggccccgaggaagcttgcctcaaagaggtccaggaaggacaaggcagccgaaggaactagttccgctccggagtatgatagtcaccgctttatgagtgctgtacaccagcagcgcttctaggccatcaagggatggtcgtttctccgggagcgacgcgtccagctcatggacgacgagtatgctgatttccaggaggaa

SEQ ID NO: 84035 - DNA, 520 bp, Glycine max
  unsure (1)..(520): unsure at all n locations
agtcacctgaggctgcagctagcgggtgcgctagaggctatgtattcattatttttactaagtatgtgggcttagcgagctaggctcgcttagcccaatggttgctgcaatgaaatgagcttagcccatataggctcggcttagcgcacgactntcaacaaaaaaaatgactaagttacctgggcttagcgaatcagccccgcttagccacaggtatctcctcaagaagatgaatgttcttccccaaaagatgaactcgcttagcacggtaggcgtgcttagtgagttcgtctgaaaatgcatatattcatgcaatatcgatgaagtcgcttagcacagaatgcgcgcttatttgagtaatattctattctggattgaattttcaagttatatctcttagagtttatctattagtgtttgggttataacnaaaatttggagagctagtactagctgcctcataacgaattaatgaaccaggaatagtctaaagatgtcattgtgtgattaactacattat

SEQ ID NO: 84036 - DNA, 397 bp, Glycine max
  unsure (1)..(397): unsure at all n locations
tgactcacccaaacatggcaagttcaacatgctttcttcaaatttcttcacaaataaccatcatgaagcagaaacctagcaaaactacccatcatatcttccaaaacccaatacccacgataatttatgtgagaagaagtctacccaaacctgaaatttcgaggtcccacacgtagagatgcgcttcacgactccgaaaatgccttcctttcgcgatttcgagcagaaatggtgaccaaaggttggagctttgttgggcaacaatggtggatgagggaaaagatgaagaangctgcgtgagagagagggagagagcttctgaaatttgggctgagtgaggagagagaaagttgctttttggttttttaaaaaaagaagctttctcttttcctattac

SEQ ID NO: 84037 - DNA, 408 bp, Glycine max
  unsure (1)..(408): unsure at all n locations
tgccccttcatccttgagtatatcaaactaaagtcatttacagtttcaggtttcgttccttggaaatnttcaagtagcactttacataatgaactgaacttttcagaggctaagatatcgcggaacacacgctggcacccctcagttgtatcacggccatttgactcactagaaaatccgttgtgcacaacattttcatgtccattagcttcactctgtaatctataaaacaaactttctaattgcggagagcactcctgaccatctttgacaattntaagagtttcctgcagaaaaataagagcagagtaaaactgaaggaacaaaagtgaattagggcaagtagtgtatgcaggatatgtgtagttctaactgcagaaccaaccttcattgtatgggcacaactaa

SEQ ID NO: 84038 - DNA, 224 bp, Glycine max
  unsure (1)..(224): unsure at all n locations
ttaagcaccgcagctgcagctagcattgaatagcaaagccccactctatcattatgtattagacctgacatctcaaacagacaaatcatacgtaacaagacaattatagntgctgtgtgaatacctcacccactcaagtggatcacacaattatggctttggtgtaagaaacactcttgtgctttactgtttaaattcccttgagttcttaggcaattcaagag

SEQ ID NO: 84039 - DNA, 384 bp, Glycine max
accttaaaactcagcttctttttagacctcgatcggtcatctttccatctttgtcgaccgtcatttttttcgatccatttcggtgaataatatttttttgccgagatgggctaatgttttcctggccgaataaatgggaaaatgccagtttcggccgaaacgaaaagtcggttgagctcgcacaaaaaaacctagccgacctacattttaaatttttcatgcaaccccaaaacaagaaaactttctgtgccgtaaaaaaaaaaaaaaaaacatttcttgacaccgagctgtttgaaaaacaaaattgcgcaacgtcggctgaaaaatatcagtcggggcttcttcacgaccgatgtcggctatggagttttcaatccaatccgg

SEQ ID NO: 84040 - DNA, 404 bp, Glycine max
  unsure (1)..(404): unsure at all n locations
agcttgtcgaatatggagtacccatcacatgtggtactangtggcggncgggcgatggtgcanaacaattcttcacatgcacaaattacgaattacccaccattccttgttgcccacctccaactgagctcacgtactcccacgcagcccttattctcgttcctctcaacgccggggccacatcaatcctcccaagctttcacaacatccaggtaattctacatccaatcatcatggactaacaaaaccaagcgaaacagggcagaggtagaatactctgcccaaaacacaacttcaaatcacagctttcacatacaaataccccaagaacattatctttgttccaattataacccgtggatcgactcgaaattatactggcagtctctagtacataagctaca

SEQ ID NO: 84041 - DNA, 395 bp, Glycine max
  unsure (1)..(395): unsure at all n locations
cgacgcgatacaatactcaagcttacgctgcgnatatttacaatagacatcctcatcctcttcatcaaaatcaaccaccgcataacaattatgacctctccagcaacagatacaaccctggatggaggaatcaccctaatctcagatggtctagccctcagcaacaacaacagcagcctgctccttccttccaaaatgctgctggcccaagcagaccatacattcctccaccaatccaacaacaacaacagccccagaaacagccaacagttgaggctgctccacaaccttccctcgaaaacttgtgaggcaaatgactatgcaaaacatgcagttcaacaagagaacagagccctcattcagagcttaccaatcagatgggacaattggctaca

SEQ ID NO: 84042 - DNA, 328 bp, Glycine max
tccgcccggaactaagcaccgcggctgcagcttactatagtgatggaattatgttgtcttctttgcttgaaataaggggttcgacatagggattccctgtctcttcttctttacttctctcgcagaggaagatcaagtcagggtattctcaagcttgttcatgatggaatactcctacccatacttggtccttatggcattcaagcacctatgttggatctagtggcctctgaataaataagaaaagggggtggaaataattattcctcaacccttactaattaaaaaattactcttctaagactttcactatgttgctcagtcattg

SEQ ID NO: 84043 - DNA, 402 bp, Glycine max
tgcttctacatcaatgacctttgtaccttacactttttcttaggcattgaagccaaacacactactattggtgcttttctcccctctcagtccaaatacataactaatcttttatccaaagtcaacatgcagatccaactagcacctggttcgaaactgcatatggatggtattgattccttttctgatccaactttatacagatctatggttggagcattgcaatatgccaccataacacatccagacatagcttatgcaggcaataaactatgtcagtttatgcatagccctcttgaaagtcattggaaagctacaaaacgtgttctgtgatatctcaatggtattattgatcatgggttaccaatttatccttcacgaaatctttttatcactggctat

SEQ ID NO: 84044 - DNA, 321 bp, Glycine max
  unsure (1)..(321): unsure at all n locations
agcttaacnatagcatgcgaagtgtgtggtttatctatatcaattcccttatggtatcaaacataaaaagggaataagtaatattgtatgtgatgctctttctcggcgtcatgcattactttctatgcttgaaacaaaattgattggtcttgaacgctttaataacatgtatgaaaattatgaaactcttggagaacttgttacaaattgcgaagaatattcacaaaatggtttctatagacatgaatgctctcttttcaaagaaaacaaattgtgtgtgcctaaatgttctacaagaaatttgcttgtttttgaagcaca

SEQ ID NO: 84045 - DNA, 377 bp, Glycine max
tgagatgaggaagtgtagaagggtgaaactttctgcttttattcgttgaccacagagtggtacctggagatatgtcgcgggggtcaggagaccttgcggacgtcatgtggggtgctattgcccaaaaccaagcttgaccaatctcgacccaacccgggcatagtcagtcaatgagaacctgtgatgtacctaaacaggcgagctcctggcagtcaacagataaaaggaataaagaccacaaagcaaggaggcttgtggtggctggccagctatgaacttgattgatgtgtgagagatggcctctggtaatcgattaccacaggtgggtaatcgattacaaggcttaaaaatgaagacaggagactaagatggtctct

SEQ ID NO: 84046 - DNA, 280 bp, Glycine max
tagctaacatgcttagaaatcaagtgatcatgtatttcgaaattagggggagaaaacggatgcacattttatctatatacaattgtttgttgcttgcttgaatcttgatttcaagtattgtattgtcatcatcaaaaagggggagattgtagatgcaattgactctgatgttttgatgatgatcatgatgatgtgttgcaattgatgcaaatgggctttttaagattaaaattccagacaatacttccagattacaaggcacaacatcaagatgatcact

SEQ ID NO: 84047 - DNA, 410 bp, Glycine max
tgctaacccatggaagctcctaatatctcccattctttttggggtgggccattcttggatggccttgattttctcagggtccacttggaccccatttctaccaactacaaaacctaagaaaactatattatctacacaaaaggtacacttctctatatttgcatagagggtgtttttcctaaggactgaaagaacttgtctgagatgtcctaagtgaaaatctaggctcctactatacactaaaatatcatcaaaataaacaactacaaatctacctatgaaatcccttaagacatgatgcataagcctcataaaggtgcttggtgcattaatgagcccaaaaggcatcactagccattcatacaaacccaacttggtcttgaaaagcagttttcactcatcaccctttt

SEQ ID NO: 84048 - DNA, 272 bp, Glycine max
agctcgacgatgacaaataattttttttgtcgcacgctgagcgataatctgcttgctagaatggcctgtcgcacaagacggtgacacttgttggaaaaattgtctttcaggagaatgactcatttttctgaccgcaagaccccctgggagatgtttttgcattttgttgttttcaaacagaatacttttatattattgaataatcatttcattatgttaactttgcagatgtccaataaagtccggccctcataacaaacactgccccacgt

SEQ ID NO: 84049 - DNA, 337 bp, Glycine max
tgcctgtccgatgcatcaatagtgatggccctttttatgttgggggacggataccaacccggaatgggtttatgctaatacaacggtgacataaccttcctgataaatgccaaaggagatcgtgggaagtaatggattatgctataagcccactcatgcctacgtctttagaagcatcacgggaacgaatggcggtggtcaaagctcgcggttgtaacaatatagcgaaggaagcccgccatacgacctctgcttaactttataaacgcaggcctgggagacgagtgacaagtggtcgctttatacgaccatgatgttccgagtgcgatggatttgg

SEQ ID NO: 84050 - DNA, 447 bp, Glycine max
  unsure (1)..(447): unsure at all n locations
agctagatcaatacctaatatcctttatctatacctagtcactgctagctctanacaaatcaaaagagattagttggttgtgcttgcacaatgactaaatctatgattgtcttanagataaattnacaatcatcacttagtcttttctctccatatgttcaagggtgttctgataattttttaactttataagaataaaaaaaatggtttctacagaaagaataatgaatgttttcgtgcaaaagttgttgtttatatcttcacactttctggtatatataagcctcattttcaagtgttcgttgtctcacaacgagtagaattcttcacttgttcttcgtctgatgaatgtaggtgttggaatatttattgcttgcattaaatgcacgtcctttcttcttgtagagggtccactctatgtcgctggcgtgccgaacactacaacat

SEQ ID NO: 84051 - DNA, 410 bp, Glycine max
tttgaagaatcaataagttattggtcaaccttattatgctatcaaacattataaggaaattagaaccttcaaaactacattagccaaatttgttaatggaatggataatcttaacaaattgttaggatactgtagaaattcctcaaaaaaatttggaaatggatatgatggaaaggtatatgttcatgataaggacaccattatctgctacttctatggtaaaattggtcatacgacatccaagtgtaaagaccgactaaaaagggtatagtcaatacttttatggctaacacgaaaggacccaaaaagatttggtaccaaagaaaaagattatttctattacaaatgtccttgataacatgaaacagacacctatcatggtacctgaacagtggctgctcacgacatat

SEQ ID NO: 84052 - DNA, 300 bp, Glycine max
  unsure (1)..(300): unsure at all n locations
agcttgngcctcttatctaacttatgcaagtatgcctggcgtnacttcgagtttgtcatgcttctatctggcttgtcacacatcattccaaaatctggacatttcctccatctagatgtagcccttggctcgctcgcgcagatgttccatgctactgagtggtttcttgcacagatagtctgtgaacttgttcaggcatagtgcgaggagcatggaatagtatgctacctccgcgttgaaaatctggatctcgacagatgtgtgcgcaaatctgtccatgaatcttctgctcattggtta

SEQ ID NO: 84053 - DNA, 334 bp, Glycine max
tgacaagttctacatgggtcttattatgaggagtcttcattcggactttgatcatgtgcgtgatcaagtacttgatggggaccggattccatcaatggattccctcatcactagacttctctgcgtgcctcagttattggaagatgagaatcctactgatggagtggagacgtcagccatggttgcgtctcgaaggagaggaagcggccgcaacactagaggaagtcgtaatggaaggggtggacgtcctcattgcacctattgcaagaagaggtcgcaagagacttgctattcattacatgggtttcctgacaaagtcacacaagtttctaat

SEQ ID NO: 84054 - DNA, 323 bp, Glycine max
  unsure (1)..(323): unsure at all n locations
agcttagataganacattgaacacatgataatatcctcagatagataataaaaatatttacatcaagtactcagtagaaattcccaacaaaggatcttagccctctattacaagggagcagctttcacacataggagaaaggttttagagaaaactccaaattacaaagaagtggggatgtctccttcacctctaagaacctataaaataactctacaacctagaatctacctaaaagttaggacctttgcttccttgctcagctnttcctctattctttgcacataatatcgagtcagttcagacctctttcatgttgtcac

SEQ ID NO: 84055 - DNA, 223 bp, Glycine max
ctaacctcatcgtctgtgacagtctttatatttgtgagcgcatccaatccttgtgttcggactctcagccacttatgatagccgccgatgatcccattactgcttcccctgaactctctgtacttattttacaccggataccatgccttgcgaacatcttggaagacccctcccgtgggggcactgcaacccccagcgatcaaaggcgtgatgctatcgtctg

SEQ ID NO: 84056 - DNA, 362 bp, Glycine max
tgcattattgacttcttatatccaaccctgcgatttatgcttctctttgaagcaagcatgcacgagattcttttttatttttgccctccttttttgtctaaaggggttatatggttaaccttaataactttttttattatcattagattttggcttttgataatatattcatattccattaaagttaaatgtgacattaacacttatatcaggagtaatggctaattaagacctttatcaaggtaataatgttagaatttgaagtcttaataacattatatatatatatatatatatttatatatatatatatatatatatatatatatatatatttttataaatttggacagcctcttatt

SEQ ID NO: 84057 - DNA, 335 bp, Glycine max
  unsure (1)..(335): unsure at all n locations
agctgaatagatacacaagtcttgaatctactactcataggagaatttcaaaaataatgtccaagagtcacatctattcatatgagttatgaatggccatcaatggtctatttatatgtgactcgganactcgaatttaaagagaagttttattgcccaaaaagttttatcctctccaaagattaagagtttttctgaactaaaatgtcttatcctctcaaaaagattccttggtcaaccactcgcatattcaataaggaatttttgattgatctttattgtacaatctatctcttttaagagagatttcttcttctcttcttcttatctctgaa

SEQ ID NO: 84058 - DNA, 407 bp, Glycine max
  unsure (1)..(407): unsure at all n locations
tcctcggggccatttcttgcgaaggcaaacatttggattgttagttttaccaagaaatgctactcttaaaacaaaaacggcatacaacctcctttaataaacacaaacatcaatgtaaatttagagtaaactcatgcacatactttattacgaacgttcacttgcacaagatattctcctaactaagaaaaatgcacccacgcacaaccaaggcaccttcgtcactaaattatttatatgtacttccggggtgtatttgttacctaccatacatgtactntcttggctaaatttacacacacgcatactcaaagcattttgactaccaaaaattgcacacatgcacattctggtgtttctaatacctatgcatatacaaactttgtgatgaatcttggctatctaca

SEQ ID NO: 84059 - DNA, 363 bp, Glycine max
tgagaagaatgcttttaaaagaaagagggagagatagtatagaggggggagcacgaaattgaaggaataaaagagggagagaagtggaactttgaagtatgtctcacaagactctcattcatcaaagttacaacaagtgttacacatgcttctatttattgactaggtagcttccttgagaagatttcttgagaaaacttccttgagaagcttctttgagaaaacttccttgggaagttagagcttagctacacacacccctctcataactaagctcacctcctagagaagcttccttgagaagattccaaaagaagctagagcttagctacacacacctttttaatagcttagctcaacttc

SEQ ID NO: 84060 - DNA, 308 bp, Glycine max
tgatgatgaaaactatgatgggtcggtgccggtgattgtttgtgtttacgggaagaaggaaaataaaataaaatagaattaaataaaacctaatattctttaataagggtttgaaattggaaccccaatgagttgttttggggtcattaagatttgggattggagtcagaatgggttacttgtggttgatgataatcatgataagcggttgtgatgtggggttactactcatagggaccatttctaatggagcatgattttttaaattggaaaaattggaaaccttaattgttgtttacaaacttttg

SEQ ID NO: 84061 - DNA, 267 bp, Glycine max
acggaataaggacgcgcgcacttaaaatgaggttttttcttggcgacgcgatagctttgttagagactggtcacatgattttgatatgttggagatttgtaatgtaatattcgagtggtgtcctacgactgaggatattatacattctataaattatattatatgtctaaaaatatttttttggctcttctatgagaatcctggtcgtctcggtatatagcgcctgttatttttagtgcaaggcagggatctttttgtcattccttg

SEQ ID NO: 84062 - DNA, 151 bp, Glycine max
cgaatgaccattgtataggccatggggggatgttctttttcttaccatacgaggatggttgagctcttgaatttttatatagaaatgactaaagtagacatagacgaaaatggagtgaatagacaatttagtccctgagaaagtcccgact

SEQ ID NO: 84063 - DNA, 404 bp, Glycine max
tcctcaacagttgcaagcagtgtaacctgtccattcttcagtcatgttcattgggcgatgcaacatctatggcaaggcccatgagtcatgcatgtgcatggtccaagacgatgcatccaaagaaatcaactatatgaccaatccacattgtcaagggttccatcaaagaggacttccaggatacaatcagggaggaaatttctcttaaggccaaggttggagatcccaccccatgaataactttaatagaaataaaggagttccatctaatcggcctcccaatcaatggtctgatttatatgagagaaccaccaagctgtagaagcaaagcttcatggtgaatcaaaggtgattcaaaggtgtcttgatgataacaaaagatgatgacaaagggtgataccaaa

SEQ ID NO: 84064 - DNA, 401 bp, Glycine max
agcttgatcagccaatcatccactcttctttttcaagaagagaaagacaagaggtggatgcaactctctgcctccaaaggagaccataaggataccatcatctgatggctctagttcgtcagaaagtgagctaaccttcagacgcactccacaaccatccagtccaccaccagttcagtccaagaagtgtatctttcccatcaacacatccaagacctaatacttggatccacgtggaagcagaactggagaccatatgtacaactaacaggagaggatattgctcgtagcaagttctctactatacatccaatgcttataatgaacatgtgtatggatccctataaaataaatttgggtattttggtagcctatgatttcaatattgtctatcttttatt

SEQ ID NO: 84065 - DNA, 410 bp, Glycine max
tgtgactcttggaaatttctttaaaactagtcacttaaaaagttgtgacttttgaacgaatcttcagaaacaagtcacttgaagaattgtgacttttggaaatgtatttttcaaaatcagtcactggtaatcgattaccattaaggtgtaatcgattacacatcaacatatatgactcttcattttgaattttgaaaattaaaacgtttagaaatactggtaatcgattacacaagttaaaaatatttaatcacaagttgtaactcttgaaatttgaaatcttaatgttttaaaacactggtaatcaattactaccttctggtaattgattagcagagagtaaaactctttggtaatgattttgtgaaaacttcttgtgctactcaatgttttggaaaacttgttttgta

SEQ ID NO: 84066 - DNA, 234 bp, Glycine max
  unsure (1)..(234): unsure at all n locations
tgcttcccgtatccgtacttggaatgatctgattactgccttnctaaagcaataccaatattattccgatatggctcccgatcgcactcagctgcagaatatgttcaagagagagggcgagatctttatataatacgcacagcggtggagagacctagcggctcatgtggcttcctccatggtagaaagagagatgatcaccacgatggtatacactctgtccgtgttctactt

SEQ ID NO: 84067 - DNA, 391 bp, Glycine max
ttctgaagttttttggttttccaaaccttgaaaacttgtgctattcatccttttcattctcttctcccttttccaaaaagaattcaccaaggactaaccgcctgaattatttttgtgtctctcttctcccttttccaaaagaacaaaggactaaacgcctgaattcttttgtgtctcccttctcccttgtcaaagaattcaaaacgacacagtctgagaattcttttgattcttcccattccctaatacaaaagtgttcaaaggactaactgcctgagaattcttttttatccccattcacaaagtatcaaaggtttaacaccctgagatctttgtctcaacacattggagggtacatcctttgtggtacaagtagagggtacatctactt

SEQ ID NO: 84068 - DNA, 464 bp, Glycine max
  unsure (1)..(464): unsure at all n locations
agcttgtganatcaatggaatccaagatnccttttgacacaagtcattcaattctattcttagagatgtgacctaagctgttgtgccataatgcttttgagtttgtattatcaattctacgcttagtaccacgcaaatctgcattagaggattcatcatacgaagctattgtatcaagtgaatatagattattattaaccaagaggtgaatagttccaacaatatctgaattaatagatcacctaaacacattgtttccaaatgaacacaaataacccaatttgtccaaataagaaactgaaaccatatttcttctagatgactgtacaacacaagtgtcttctaattcaaataaataccagtacataataataatctaaaatgtgctattactttcacctctaccgatttaccactctcaacatagatacatctttcataatcaaatgggcgttcgatagctt

SEQ ID NO: 84069 - DNA, 357 bp, Glycine max
tgtagcttataagcttatcaactagtttttactttacattgcctacaagctaaaaaattagatggtagttgagagttgaaagttatcgagctagcttattgaactataagtttttgataaaattatatattatagtagcaaataaatataaaataataaaaatgaacatgttataagatatttttgtataaattttaattttattttatgcatggttaaatataaattttgacgtataatttttttttggttcatggagggtctaaaaggccaaactaattaatggcctctaaaaaaggaaacatgaacaactttggaaaaagaggaattgaattccagcatggcacgaattaaaaa

SEQ ID NO: 84070 - DNA, 233 bp, Glycine max
tctacttatgtggcaggggcggcttccttcactttcttgctccaacgccagctctgaccactgttctttcttcccgcgatgcttctttcatgtccgcctgagtgggcttaatacctaaaccataccttccacgaatcccttggggttttatcaagctaattatgccccccgtggcttttgccaaaaccatcccggggtcataaccggtcccccacaaaactcgggccctcatt

SEQ ID NO: 84071 - DNA, 335 bp, Glycine max
ctcgaccgggatccttaagcaccgcagctgcagctgatgacaatgcctattctggttgagttgatttggaatccgtgttcgtgattgatatgaatggatcgattgtatgatgcgagtgaatcggaatgcgtatatcatatgctatgaatgacatgccgtcattagaagagaaagaacatgacattaggatcatgactgaaaatgttagctggcttgtcaagttgaatgtgaaagaacacgttatccaccaacccggtgagagtgtgatctcttattgtgagagaacgactagcagcaagtaatgggttctgcatgaatctctgaatatggaatga

SEQ ID NO: 84072 - DNA, 283 bp, Glycine max
ttacattcttcctttggattcttctcagtatttacagtaaagctacttgacggcctatccgcttattgctttgcgagttggcctacttggacctccagattcttaatggtagactccattctcttctggttagacattgaaaccttcataaactgagctagagtctcttccagttttgtggtacgctcatagagactaggcacttgttgttgaggcctattggatggtccaccctggtctctattgaattgattgccagggtggttctgccatcgtctctaat

SEQ ID NO: 84073 - DNA, 321 bp, Glycine max
cgctccagaacaaaatagtagctaactgtttgttggcatgagtcacgaggctctggaagtaggaatcaaattgtcatcttcggcgcttgatgataaaacgataagcttatgacgataaaaaagcacatctttggaggcaacccttctttaatatctgtgatcgtggtttactatagcattgcatcaatgtcaactttattttctgcatgtgctaggtatatatcaacttgtactttatttatagatctagtggcgccacaaggtcaacatagtactggcctttacataaagaaatatgacttcttataacagaacatgaac

SEQ ID NO: 84074 - DNA, 332 bp, Glycine max
  unsure (1)..(332): unsure at all n locations
ngcttcatagaggttggatcattgagcttcattgttgttcttctatggtgattatcaaccatggatatgtagtggaaaataaaggagaagaggtgagaggaggcgccatccacttgggaatnagccatggtaggaggagcgtcaccacctagagagtgccttggataagaagcttatagagaaatctcctatggaggaatagactgatagagagagagagatggcctaaggcatgattttgaatgagaaaaagaaggagagaagttcaactntgaagtgtgtctcacaagttctacattcatcaaagatatgacaagtgttacagatgcttc

SEQ ID NO: 84075 - DNA, 362 bp, Glycine max
tgtaggccttggatcttgttcatcaatggagtctattgtttcttgaagttcactggcagcggaatggagaaggaagaaatatgattggagatgccacttcaaggagaagatgagtcaagcacaagctcactaccataggaagccatggataagagcttgaaggaggagaaaatgagtggagggagaaggagcatgaaaattctgtgcctcaaatgaggtctgaactttgaattataattctcaaatgatccaaggcctacaagctctacgtggagctacatcatgtggtatcagagcatcttgctttacatgatgttctattgcttcctctatctttctgtttggacaattcactctaattc

SEQ ID NO: 84076 - DNA, 320 bp, Glycine max
  unsure (1)..(320): unsure at all n locations
agcttagaggatctctcgagagcttgtgatgtgatatctttgttgtagggatggagtactcgctgtggtggaattcacctaccataataggtttcatgttaggttaggagtgatgtctttaacgctatgtctagaaagtgtaggacgttgccctgatagttctagtcaagagagagtttagtcgctagactagagtcagtgtggcccactataagataaacttgaaatagttgaacagttcaatttaattatcactatattcaagcaatgccaaatctgttttcttaccttacacactccagnggagtaatgagagtcat

SEQ ID NO: 84077 - DNA, 322 bp, Glycine max
ttcttacatgtagaaggttatttgttgaagtagtcatatttgtgacactggtggttcttgtaagcttcagattaattaaaagtttggcaaatattagttttattaagggtaagatatggaagatacatttagaaaaaattgatcatttttcatgtaaaatgttaagactttatatatatatatatatatatatatattcttaacgtccttgtcaatcataatttaactttgcttctataaaaaaaaaagtaaagctaatattaaatcatatactcaatatattaaactaatttgggaagctatttggtttatattcataaaa

SEQ ID NO: 84078 - DNA, 404 bp, Glycine max
tgcaacatgcgcgctaagcacgcgatctacatgcgctgtgcgatgcggtgtcgcgctgagcgcgcctacgaaggcccaaagcccacttccgcaactataaatagagagccagtccaaggaagaatacaacagaacaccacggcagaactccctctcctaggggtttcatttacaccctttctttctttcacccccttctcattataaagccctcaatggctgagtggctaaacccttagttagggcctggcacgcctagaaacccacacgatgtatgatgtactcttcactatttatcaatgcaataccaggttttctttcctatgttcttttctgcttttatcctgcatattcatctatctttatatcctggtaggagttagatgctcgggagaggatgactt

SEQ ID NO: 84079 - DNA, 428 bp, Glycine max
tagccttcaccagatcatataagatatatgcatttatgcaatctgcagatatatcctcccagacgtcaaattctccgcctatatattcaacctttccatcactggcacgtggagtgaatctttctccatggtgcaatactaaagttatattgtcattcattctacacaatcagaaaccacaaacatggtctgatatttagaaataaaaaaacctacctcataaagcgcgaagacattgacattgtcaataagcgcgaatacacaatcagaaaccaataacattgtcatctatataaacagagcatcttaaacgaaaataattaaggatcataaacctccctacgaagcgcgaagacaatgcagatgaaactcctcgaacatattataccccacatctaaccaccataacaatgcaaacgaattgaatg

SEQ ID NO: 84080 - DNA, 415 bp, Glycine max
tctcaggaggtgagcttagttattagaggggtgtgttatcctaatctctagcttctcaaggaagcttctcaataaagcttctcaaggaagattctcaagaaagcttataaggaagcttctcaatgaaactacctaggctataaatagaagtatgtgggacacttgtggcaactttgatgaatgagagtcttgtgagacacacttcaaagttcaacttctcttcttcttttccttcttcaatatgctgctaccccctctctctctgtctcttactttccctccattgaagcatacattacaagcttcttatacaaggcaccttcttggtggaaatctccatctccatggtgattacttatcatatgcatgacaataacatatctagggccagtcctacaatgtgtggattttactt

SEQ ID NO: 84081 - DNA, 349 bp, Glycine max
aatgatatttgaaacttattgcaaaccggtctgcctgcacctatgtggacactctaatggcaaatttatatggtcatgtgatgctaaagctcaagattcattttctctatattatatcaacccaattgttcccaaatatagttctttatccatttgtgcatgcattcgagaccattcttggcattcgggaaaaatttcacagcactcacccttcaggtgtatacacatttttctaaaattggtatgatccatgaatttctcatagaaagatggaagtctctctttttaaacatgttggttttagctaacaactaatttcgtttccatcttttctactgctttctttcta

SEQ ID NO: 84082 - DNA, 387 bp, Glycine max
tctagccaaatggacttaccttgaattaattctttttatagcccttttgagccttgtttccctttccttgttttgaagctcactacaagccttaagtgaaaaaccatgatatcaccatatccttaaggaattttggagctttggaattggtttgggaataagtgtggggggttgttgtttcattggacaacttgttttgttggctatgcttcatgatgtattttgggccatacttgatgtacattgtatatttggtaaatgttggacatgctgaatgaaatgtatgttctcaaaggctacaaagtaaaacatcaaacaagataaacaaaaatcgttaaaaagaatcgaaaaagaaaagacagcaataagttgagtgataagatctaa

SEQ ID NO: 84083 - DNA, 409 bp, Glycine max
  unsure (1)..(409): unsure at all n locations
atccttaagtcaccgcggctgcagcttaatccttnttaaatgatatgtgattgatntataatgnagaagaagaaacaataatcaatntaacaatgttctttaaatgtgcaagataaagtanattgcaataaaaataaatgagatatgggaagagagnaattgtaattcgatttattttggttcggtcacttcctgtacctacgtccagtcctcaagtaacccacttgagagtttctactatccttgtaaattctttagaatttctgaacacacattgggattcctcacccttgtgtttgagnttctcacatgccaagagataaacaatctcttgattacaactattgagttntataagatgagacaaatgatttctctctttagagcagatgatacgacttgaagtcct

SEQ ID NO: 84084 - DNA, 405 bp, Glycine max
tcaagttcaggaggagagcgaagaagatgttgatgactagccagttagaggaactagatctctctctgatatttatcaaagatgtaatgttgctgtaatggagcctgtagactacaatgaagctacaactgattcaaagtgggtaagtgcaatgaaggaggagcttgatatgattgaaaaacatcaaacatgggagctcacggagaaacctaaagataaaaatgtcattggagtgaaatgggtttataggaccaagcttaatgctgatggttctgtaaacaaacataaagcgaggcttgttgtgaagggatatgcgcagatgttccgggtagacttctcagaaactttttcttcggtttccaggttggataccataaggcctgtgttagctcttgctgcacaaaa

SEQ ID NO: 84085 - DNA, 415 bp, Glycine max
ttagagcaccgcagctgcagctgggccgacctctcttgattttacacaaaaattggagaggaagttatttctaaatgtcgtgtttatattttccttagagcattactctcagtactcgactgataccacagatgatgtagcgtaatgtgccgtactacacacactctcagatctattagcactctcttggactacactttttgtctttttgaataatggataatgcaccagctaacctctgacttctgctaatgttcatgtgtttgtgtttcttgttgctgctgacgataaaaggtatgatttatgagacaaatcaagcctagcctatatcatgcatgaatctcttgcaacaatgttccacgagagataactgactacttgattaccttaatagtggcaacattttacactataa

SEQ ID NO: 84086 - DNA, 411 bp, Glycine max
  unsure (1)..(411): unsure at all n locations
tatatagtgattcttaattatattcaatcttatttattgcccaatgcacaaactaatccttatattgttgatgcatatataactgtctcccaatactgaaattgaaagcgacaatgctagaaaagtttggaccttttctgtcatgagctctgattattggtcgctttcagctacttgcagaaataagcttttttctttctatattcngttgtgcttgcctcaaccacctgtagaaaataatcatgttttcatacaaaacaagactcaacatcaaaattctctataagttgaaataatataacatttatatacgcatttaattgtaagggctttgtacctaggctcttggctttattcttcagtctctaatagattaaacttaatttgatttcaagaacaatgccttctcaa

SEQ ID NO: 84087 - DNA, 258 bp, Glycine max
tataagcacgtttctgatcgatggagaaataagtggatactatggtgacccatgatttttggatctacttactggttatacaactatctatccgtagaattaacaagttgtatttaatagagatgttactttgattgaagaagctcattggaagaggtttagtctacttttgagacaataccgaagattcaacttgaattgtaagatgatgagttccgtcatagatacatcatgatacattctatattgaactcagat

SEQ ID NO: 84088 - DNA, 411 bp, Glycine max
  unsure (1)..(411): unsure at all n locations
tgagatgaggaagtgttgaagggtgaaacttcttgcttttattgttgaccacagagtggtacctggagatatgtcgcgggggtcaggagaccttggggacgtcaggtggggtgctattgcccaaaaccaagcttgaccaatcccgacccaacccgggcatagtcggtcagtgagaacctgtgatgtacctaagcaggcgagctcctggcagtcaacagataaaaggaacaaagaccacaaagcaaggaggcttgtggtggctggccagctgtgaattttgtgtgatatgtggattgtggcctctggtaatcgattaccaagggtgggtaatcgattacaaggcttaaaattgaagacaggaggctaagatggtctctggtaatcgattaccaaggggtgtnatcgattacc

SEQ ID NO: 84089 - DNA, 245 bp, Glycine max
  unsure (1)..(245): unsure at all n locations
agcttctacatatgtggcatggcgggcatcctatatcattttgtctgcgacgcgaaccttgaccatggatcttactttccgcgatgcttcttttcatgtccaccagagtgggctnataaccttaaccatactttccacagctctcttgggtatttatcaagcctgttatgtagccgttgctttttgctagacccattcctgggttattagcagtccccaacataatatcggccaatattatcgct

SEQ ID NO: 84090 - DNA, 54 bp, Glycine max
  unsure (1)..(54): unsure at all n locations
ntgtagacaaggaatcaagaagccacctataattaacctgatcctgctcttccc

SEQ ID NO: 84091 - DNA, 311 bp, Glycine max
  unsure (1)..(311): unsure at all n locations
gttgagcttgaagcgcgaacaattacatgtcctttataccttggtgaaccatgttgaaagcccacccccctggctttactctttgacattttatggatcaatccttttaaaaagttgatatcttggcacgcatcatgtatacgatatggatgaaattngtataacttgcagggccacccaccctggatatgggcccaggcccctttcgcttatctactgtggttatgtttccagggaatttgaagaaatgattgtgcgtatctttctttatttacacttgggatttttatcgggagtctggccattaaaat

SEQ ID NO: 84092 - DNA, 256 bp, Glycine max
tgctaatactaatttaaaaagatattaacaccaagagaaaaactattaatgatacctatctctatatataaacctatacacgtacaaataaccatataatcaagagaagttgaactaatttatacaagttttaaacacaataattagacgttttcaccgactaacatgggacaccatactgattacattaatatagtattttgtcatgtctaccataagctgactaggatacaattatggtttcatttaaatctag

SEQ ID NO: 84093 - DNA, 400 bp, Glycine max
  unsure (1)..(400): unsure at all n locations
tcccgccaatggtatttgaagtttaattataccattatttcctttggatttaaggaatatactattgatcagtgtatatatcggaaggtcagtgggagtaaggttatttttctaatcctgtatgttgatgatatattacttgcaactaatgatcttggtcttcttcatgagactaagaagtttttttctagtaactttgaaatgaaggatatgggtgaggcagctatgtgatacggatagaaatattctgaaatagatcacaacgattgttaggcttgtctcacaaagcatatatcaataaagtactacagagatttangatggaaaagtgctgaacatcacccgttccaattcagaaaggagacaaattagcctcgcacaatgtcctacaatgatctga

SEQ ID NO: 84094 - DNA, 359 bp, Glycine max
  unsure (1)..(359): unsure at all n locations
ctctatgtcaaataattaatattataataatnctggaaatgcatggaatacaaacctaagagatgtaaattcttgttttaagaaggctaatagagtatgctatacatctaatgtggtagcttaataagctatgttcctagtgtatgagaagaaggaatatgattgattggtacaaactcaacgatgaatgtcgtctttaataattgtccttacgcgcattgatgttccaaaaaaaaatagaattgattgtgcgccctacctagtcatttatgagacattatgagtctcaggttacatgactctgatctccgtatatatttgaactttcgtgaaatccttagaaattctggtgtcactat

SEQ ID NO: 84095 - DNA, 429 bp, Glycine max
  unsure (1)..(429): unsure at all n locations
agcttagtgaagatgatgaatttgtagttgaatttcacaaacaattgctagngtataaaagggttggggagaggtttggtatgactgttgcaatgaaagcaaggactgaaatatctcctggtaagtggaaaaatacacttataaatttgaatgattaattaataatatgtgtaaatgctaatgcatatgaattgcattttacagctgagtggtggaaattgtatggaggaaaaacaccacacttgcaaaccattgccattaaagttctaangttgacttgtagctcatcacgatgtgagagtaattggagtacctttgagcatgtaagtaactaacattcatggttttttttagattatganactttagaagctgaaattgaaactaagtaactaacattcatgttttttaaattattatagaatcact

SEQ ID NO: 84096 - DNA, 467 bp, Glycine max
  unsure (1)..(467): unsure at all n locations
ttaagtcacctgcggcatgcaagcttcttgaggaagcctcttaatgaagcttcttgtgaagctacatgagcttcctcggtaaaaatgctgcccagccgtcattaaccattggagcttctcaaaatttggtctacagcttcacaagacaattgtccatgatctgaccgttgggatcttcgagaagatgtctggagtgtgcgtgaagcttccattcccgagagcatttcttantttagcatttcagcctttgctttcgtgtagcttaagaaaaatgctatttcttctcctttctttcttccaaagccatntctaacgtcccaagaactttctgcatcacccttagccaccgcaaaccattgttgttctccattgaaactccacaacgagaggaacccgtcgattcgagcggaatcttccaacttggcttgtggtttcagtagagaatgaaaccctaatctgacctttta

SEQ ID NO: 84097 - DNA, 456 bp, Glycine max
taagaaccgcagctgcagctaagacctctaattctcatatttatcttttcttatggatatcagattacaagtactaacctacaacttcctaggctcaacttactaaaaagcaagttactagtacacgaaaacagctccataaatctgacctttgacactaactaccccaagctaattaagagtcatggggcctttaaaatatgatacaaagtcttaaatacataacataaagttaacctgaaatactacccatacatagaagccgcgaaaattaactaaaatatcttgaaattatagagatagagaaccctgcattaattataatttactatctgattactgctgctatatcatgagtacaaacaagttatcgatgaaataatagccaattgggcagactttggacattggaagatcatttatggtgtgtctaaatgaaagggtgaataataaagg

SEQ ID NO: 84098 - DNA, 438 bp, Glycine max
  unsure (1)..(438): unsure at all n locations
agcttggctatgactntatacatacactcttttctagaaataggcctataatcatttaaagattgaggatgacttgttttacgaataaggatcatgaaggaagcattgctgcctataggaaaccttccatcaaagtcgatttcatccacaaatctcttgaattcaggtttcaaaaccctccaaaaagccttaataaaattgaaattaaatccatcgggtgtcgggcatttgcctccaccacaattccaaacagcctctttaatctcttggtcagaaatagaggaagtgatcccctctgtttgattcaactatctcagattattagaggttgcactagaacgatcagcaccaatctgtacttcttcctcgtctaccagctcaatatctntcctttcaacttttgttttgtaaattacagtgtagtttacaaaagcaaag

SEQ ID NO: 84099 - DNA, 418 bp, Glycine max
agctcgttactgaaggtgagaagaatggtatatatgtcatgtttgctctgccagactactagttattcattcattctaagttacttctctctcatgtatatgtagaaagaagagaaacattagtggactgcatttgttaatttttttgttttgaaattacagatcacatgtacataggcacatgctttctgatgaatttgtacagtcagtacagtatacagtaatgagtggtggtttaagttaacatcagccacaagaaaattaggatgtagctataatactgcattgggctggtgttgggtttttaattcacatttcaaccattgtattaaaattcaattcacccatcttgtgaacaaagtttaggagaaaaaaaaaagagttttggaatatttggcggaagaattttttatgaatt

SEQ ID NO: 84100 - DNA, 439 bp, Glycine max
  unsure (1)..(439): unsure at all n locations
gcatgcaagctaggntcgaggtacttaccctttgatgatcgaagaacgatgaagaacgaatgaagaacgtcgaagaacgggtgaaatctttgcgaaattcctcacggaaaacgttacggaaacgtttcggaagcgcctcggcttagattttcttcacggaaacaatttttccaagcaaattcgaaagagagagaagtgcctaaggggctgaaccccttccttcttgccttcctcccctatttatagcaaaataggggaggtggttgccgcccagctcgcccaggcgagctcagctcgcccaggcgagcagggttgcttcctccagaagcaaccgccttctggaggaatattccgaagggcccaagtgggcctgggtgctatttgcacccccatctttactaaagacacccccctctgctgtgtttagtattcttttttc

SEQ ID NO: 84101 - DNA, 425 bp, Glycine max
agcttgtgtgaagagaaaacagaaaatgtttttttatacttttgcaattgtctatccactaagcgcagaccttgcgctaagcactcagtcttcacgtgctaagccgtgcttgcttgcgctaagcgcaaagacccctgattggttggctgaatagttcagctaagcgcacatcacttcgctaagccccacatctttgcggtaattgaactttaaccagtgggcttagcttggatgatgcgctaagcgccacttcatctcgggaaaaattttattgtagcagcgctaagccccaaagccattctgtaacttgagtttttaagctgggcttagcgggccaggaggcgataagcaccagtctcttacggggtttgaattcttggaagtgcgcttagcacgcctgttgcgctaagcctaaactactctct

SEQ ID NO: 84102 - DNA, 438 bp, Glycine max
  unsure (1)..(438): unsure at all n locations
agctntggcagatcaaggagaattgcctcattcattgacttattaacacttttggtgtttgggaccatactttttccaaatatagatgggcttgtggatttagcagcgattgatgctttttctgcttatcatcacagcaaggaaaacccagtcattgttgttttggccaatgcatatgacacatttgacatgagatgcaaaaagagcggtgcaagaattgtctgttgtacacctgctctttatgtgtggctggtctcccacattntttgttatgaaggtagacctgtctgctctctacaaggtcatcacatgtgccacctaaagggaaaagcaaattgggaggaactcttggcaggtgtggtaagagcgtccattagttggttgccccaatggaaagaacgaggcgctagagtgttgtgctcgtgtgaaggattccca

SEQ ID NO: 84103 - DNA, 384 bp, Glycine max
  unsure (1)..(384): unsure at all n locations
agctatctccctttctattacatatccttttcttttactgnatcttacattcataagaaatgacaattttattcccttctctgatgtggagtaacatagctttttagtataatgttatggcaccaagtcttttttgtatcatttcgctaatttgctgaatgcgtttttagaattttatggaaggacagatatctgtgtaataacaacatttttcaccctgtgtgcttgactgatagcttatgcatatagctgaatatatattacatctgaagttcatcatttacttcctaatatcaactattaatatatttctagtgtcttccatgtgatattttcatgtatcagccttgctatctatgctcttntttgggatactataacaac

SEQ ID NO: 84104 - DNA, 323 bp, Glycine max
  unsure (1)..(323): unsure at all n locations
agcttctcaaggaagtanactttttatatcttctctaggaagctacctagactataaatagaagcatgtgtaacacttgttgctactttgatgaacgagagtcttgtgagacacaactcaaagttcaaattctctccctttttcttccttcaatttcgagctcccccctctctctttctcttcctctttcttttnctccattgaagcatcctctccaagctttttatacaaagctcatcttggtggtgaagctccttcttccatggcctattccctagtggatggcgcctcctctcacctttttttctttgtcttccgctgca

SEQ ID NO: 84105 - DNA, 418 bp, Glycine max
  unsure (1)..(418): unsure at all n locations
agcttatccttatggcttgccttctgacttcactccccgtgccgccccggaagatttaagccaagcccctacttttgaggggcaactcccgccttatgacgactatcccgggcaagacgatgaggaaggagatacccattttggccccctgctccacctcaaagatccgtccccacatgaactaccccaaccgaacatagtccgccatatcccagcctcacccacacccgtaaaagaatatgttcccttcgcggaagataagggaaagattgaggcgcttgaagagaggttaagagcagtcgagggccatggcaattacccattctcggacttagcggatttatgtctcctgcccaatatcgtcattcctcccaagttcaaagtaccggactntgataagtacaaagggatgacatgt

SEQ ID NO: 84106 - DNA, 407 bp, Glycine max
  unsure (1)..(407): unsure at all n locations
agcttggataggaaataaaatgtctatatttcaaactgaacagntgcgagaacccaaatngaggtaaactgcattggttgattggctttactagcagttttttcttgatgtaattttaattatttttattatttgttgggtttttttggagaggaggggtaatgatacctatagcacccatttgcttttagtcctgctttaatccatcatgctttataattttgagaatgcacaagtctaagcagatgattacagtaattttcataacatctgttaattcgttaatacctttgttagataatacctttttgagaatccatgtgcagcatgtgtgttacgattattgcaaagatgcaacgtattttattttaatactactttcttctgctgctgatttgtgactgtgt

SEQ ID NO: 84107 - DNA, 442 bp, Glycine max
  unsure (1)..(442): unsure at all n locations
agcttcttagtctcacctgatgaagatgtattcttggctacttcatgcactcctctaatgaaaatagcatcatttctggcactaaattgctgggagttgaaagccatcttctcaattaaatttctggcttcagcaggggtcatgtctccaagggctccaccactggcagtatctatcatacttctctccatgttgttgagtccttcataaaaatattagagaagaagctgctcagaaatctggtggtgagggcaactagcacataattttttaaatctctcctagtattcgtataggctctctccactgagttgtctaatgcctgaaatatcttttctgatggtcgtggtcctagaagcagggaaaatnttttctaagaatactctcttgaggtcatcccagctcgtgatggaccttggagcaaggtaatatagcgagtctt

SEQ ID NO: 84108 - DNA, 438 bp, Glycine max
  unsure (1)..(438): unsure at all n locations
agctttagtgattgtgtgcaaccacagattttttattgagtgtcctcattaatatgttcaacagttgattttgcatgaatttctaattgtcataacatatgattcatggatatgatctaggcattctttctttcattacattttaagccactggccaaacagctatcccatttgtgccatttgcaagccctttgagccaaacacttgantattttggaacactaacctaggataaaagtttcctaccttaccttaggttaggagagcaagggtgttttcttatgaggatttctatcatttggtggctaatgtgatgtgaatacttcgtatttatgggtgttaaagaaaattaaatatttatcagaaaatataatagcatacatagaaaagaacataatgagaaaagataaagactaggaaacacatgttctttatgga

SEQ ID NO: 84109 - DNA, 451 bp, Glycine max
  unsure (1)..(451): unsure at all n locations
acctgcngcatgcgagcttggaaactttcgcgtttgaactttatgttctagatattattacgtgtggagtcagagagaacagggtggtggagaaatgaaggaatgcagatggcagtattataataatggtgatagtacaaattacctgtctcaattagtaagtcacatattattttagatgtagattaccttacctgtcaaaaattcaattgcaaatttgaatatttattaagtaacaattacagtttaaatccttgcttttgggtaagtgaaatatgaagggctttctcttttaccgaaacaacatgcttaagtttatatcttatcttctttttagaaggacaatttattcatcatttccctggcacttatggatagaaagtatttataatttaataagacttatttgtggtgcttcatccaaaagacgctattatattctctttaaaat

SEQ ID NO: 84110 - DNA, 349 bp, Glycine max
  unsure (1)..(349): unsure at all n locations
agctntgcttctacatgtgccttgcatgttatttgtgcggcgcagattcctccttggattccttgtcatactttgattcctctggtttttttctcttcttctttcttttcttcttcatttgcttttttgtcctccactttattttcctctggttttttctcttcctattcaaaacacacaaaaaaatcataacccggaatgatacattgatggtaattgaagacaaaaaagaggataagagaatggttatgcagacctcgcccattggtgttgacggctacaaagataaggttgttgctgtggatttttggtctctttttatttatggaatgtgtgtgggttttttttt

SEQ ID NO: 84111 - DNA, 317 bp, Glycine max
  unsure (1)..(317): unsure at all n locations
agcttatacatattaaagagcacgnaattgaattatttattatatcgaaacaaactatttgattacttgtgataaattataatacatgaatattactagttttgaaatagaaataattttggaaaagaacagcatatgaatggaaaatgatatttatataaattaacccaaaaacgctttttatttcttattttataatttttgagtcctgattcctgttacgttgcaacgggcgtgaagtgtangtgtgtccgcccgtgacgccatatcttcaccgccacttatacaacaggaagtgcttacccccactctcttta

SEQ ID NO: 84112 - DNA, 84 bp, Glycine max
gcggcgaaaacggaaaaaaacaggggggaccacgcccatatcagccacacgcgcccacagagatcacccctgcaagagacggaa

SEQ ID NO: 84113 - DNA, 444 bp, Glycine max
  unsure (1)..(444): unsure at all n locations
agcttccttaatcacctcattaagaactattatgtcatgtaggatgtgtctgttttttatgaaagctgtctgcctctcatcaataagaccagatatcacttgtctcaatctatttgctaataacttagctatcaccttgtacatacatccaatcaaggagattggtctgtagtcatcaaatgactgggggtgtttggttttgggaattagagctatgaaagaagcattattgcctctagggaagctgccatgcacatggaattcatctacaaatcttctgaagtcagttntcagcatttcccaaaattctttaatgaatttgaagttgaagccatcaggtccaggaacattgtccccatcacaactccacactgcttctttgatctccaaatccaaaaaaggaacaaccaaaaactccctctgctcctggtttattgaaaagaa

SEQ ID NO: 84114 - DNA, 322 bp, Glycine max
  unsure (1)..(322): unsure at all n locations
agctttgagcaaattcaaacgactataatctntttattcggaagtcggatggagtcccgttatatatccagacgctcgaaattgaatgttgaagctctgagcaaattcaaacgacaataacctttttactcatatgtcggatagaggcccgtaatatattgagacgctcgaaatggaataccgaagctctgagcaaattcaaacgacaataactttttactcggatgttcgattgagtcccgtaatatatcgaaacgctcgaaattgaatgttgaagctctgagcaagttcaaacgacaataaattgttactcggatgtccg

SEQ ID NO: 84115 - DNA, 362 bp, Glycine max
  unsure (1)..(362): unsure at all n locations
agcttgtacactaggcnntagttagaatcatcatgntgcaatgagaactttgaggtctctctttcttgggatttctactcttaccattactagtgttcttggttgtagaattgacaacaaaggtcatattgttagagtttatagaaggtatatgattgacaacaatntctctttgtgcttcttcttgaataacaagagaaaagacattaccaatgggggggagaggatcagagaggagaatctgaccccaaatttgagcaaaactatcatttaaacctattaaaaaagacatgacatattcagattcattgtaatcttgtagaagttgtaaccctcccatttgcattgaaaggttagtttat

SEQ ID NO: 84116 - DNA, 434 bp, Glycine max
  unsure (1)..(434): unsure at all n locations
caagcttggcctctcatattcatctttcttgaacctnnnctcaaaaaatcttttaacctcctctttgaccctatttggatattccatccattcccctcctaattgtgtgcctttcaccacattttttcttatcctccaattcatgattgaggaaaagaactttgaattgaaatccccttcttttacccatcttactcttgacttttgcattagcaaagattcattatattttgcaactatccaaaactcttcttgtaggtgtagttttctttgaaagctttcatcatccaaatttcattgttcctccaacagatcaagctattcaaatctttaactctctggttttgcttcctttgaaacatgccanattccaccaaattccatcttttcaaagccacgttgaccccntttagtttttccttacgaacatatgc

SEQ ID NO: 84117 - DNA, 431 bp, Glycine max
agctttactagccctccctgtctccttaatctccagatctaatgcacaaaacattaagccctcatattttcccttcagttgtctaaagagaaagctgaagcatgtcatgagagtaaggagacaagaacagcagtggaggacagatgatgaaatgtcatgttaattttcctgcagttcccagggcttggaagatggtaaaaaagtaaaagaattggaaattgctgaaagaaattcaccaattaatgcccatcctaatactggaaataggttgaattcatatcctgatacgaagaagaggaacaatattatcaagttgaaggattctgagttctgtatggagctggaagctgcttcatgtggtgaaagttgtaataagaacacatacaatacttcagtttgccattgtgaggaagatatattgaacatacata

SEQ ID NO: 84118 - DNA, 423 bp, Glycine max
  unsure (1)..(423): unsure at all n locations
agctntgnngtttttattattaattctattatttctatgtatactcnttggntatgcttgatgttttttattatttgataacactatttcacaggcatggctgttgcatattctgctccaaataggcatggatgcttgaaggtggttgaaaataattattgtgcttcaagacggggtatgttttcttctctgtcaatggttttttcccttgtgtgctttttctacgctttcaattatggcatcagttttcttcttaagtttttggtttctttggataacctacaggcggtgttcgctgtctatccatcttaaaccttatctttgccatcgtctttggtggtcttgccttgtttcttgttcaagcctcttgacaatgatgagcaactgttctaaacctctgttttggtgctatgaaattgcatg

SEQ ID NO: 84119 - DNA, 244 bp, Glycine max
  unsure (1)..(244): unsure at all n locations
agcttatntacctaaacttggagactctttggtacatttttcanaccacaagtatggaagaagatgatcaggtgaactcctctccccatgctcttatttcgtgcaaacatgaagggaaatgactacaatagattctatttcacaaaggctcattagctatggtgtacgctctcttttacaaggcttttgaacacttgaatgaccccctagggaggctagttgaacgtgccaagtgtgtaccaca

SEQ ID NO: 84120 - DNA, 342 bp, Glycine max
agcttcttccaacttagtagtcctctattagatgttatgtttttgttggattggcatgttcaaaggtccaccctggtctttgttgaactgattaccagggtgtgacctccactgtccttgttgattataaggaccctgctggaagcctgaaaatcttccttgggtataccctttgaaattctgataccaggggacagatgtcgtacaggatgtcacgacatcatgcttcagaacatgcagtttatgtgtgtccgtatgaacagattaaacaagtaaataacacaagagaattgtttacccagttcggtgcaacctcacctacatctgggggctaccaagcca

SEQ ID NO: 84121 - DNA, 329 bp, Glycine max
agcttcaggctgctcaattgctccaagtttcattatggaatggcagaggtctgtatggtggtcagcagaggagcataaaccacaaattcttgcgataggtacagatttctgattcaaggccagctgggttaccaagttaaccaatgcatctagtttgccttcaagcctcttagtttcagatgatgcatatgagtttgtagctacctaatgcactcctctaatgactatggcatcatttctggcgctaaactgctgggagttggaagccatcttctcaatcaagtttatggctatcagcagagtaatgttctcctaggatttcaccttgg

SEQ ID NO: 84122 - DNA, 264 bp, Glycine max
  unsure (1)..(264): unsure at all n locations
agctttntgctgcacaatcccnnanngttggtttgtgttattcaacggcccgcgctggaggtggccttcgtcattggaagtgcggcccacaggctctgtggttgatttatggatggcctttgtggataactgggacatgggtatggaggaggtccgttcttgactgattaacgacatagttgggttgggtgggaaacctctccagacatgattggcctgcacagtatgggtaactccctcatccctaccctgtttatttgaccc

SEQ ID NO: 84123 - DNA, 442 bp, Glycine max
  unsure (1)..(442): unsure at all n locations
agcttatatatcaaagatctgactatttgatattgttgactactcagactcaaattntgctggttgcgttgactttcgtaggttgacatctagatacatcttcatgatggctaatggagcaatatcttggagaagtgcaaaacaatcattagttgttacttctaccatggaggctgagtttatttcattatttgaagcgacatcatagggtatttggttaaaaagtttcatggccggtctccaagtgattgattctattcctagaccgatcaagatatagtgataattcaactactgtttttctggctaaaaacaataaaagtggaagtcgaagcanacacattgacattaaatatttagtcatgaaggaacatgtcanagcaaatgaaatcatcattgaaaacatatgtactggactaatgattgtagatccattgacaaa

SEQ ID NO: 84124 - DNA, 311 bp, Glycine max
agcttgtatcgatacactatctgtatttgtttcccgagcagatttcagaaaaaattctcaacagtcacatctttttatgtggttcttgaatggctatcaaaggcctatatatatgtgacttgagacacgaatttgctaaaaagttttgagaacaaaaaggtcttatcctcttaaaaagcaaaatcgttttatcctcttacaaattccttggccaaaacacttgtgattcaataaggaattatttgagtgctccaaatggtccatctatctctttaagaaaaaaatcctcttttcttcttcctcaatcctga

SEQ ID NO: 84125 - DNA, 283 bp, Glycine max
  unsure (1)..(283): unsure at all n locations
agcttggagaggatgcttcaatgtttgataagaaagaaggagagaaagagagagggcggnggggcacgaaattgaaggaagaaaaagggagagaagttgaactttgagttgtgtctcacaagactctcattcatcaaagttacaacaagtgttacacatgcttctatttatagactaggtagcttccttgagaagctttcttaagaaaacttccttgagaagcttctttgagaaaacttccttgagaagctagagcttagctacacacacccctctcataact

SEQ ID NO: 84126 - DNA, 298 bp, Glycine max
  unsure (1)..(298): unsure at all n locations
agcttctacttatatatattntatgtgtgtgtactctaattngnagttaacgtttaatatctaaatttcattatgtatttagtgtaatagaaaaaaaggaagtactaagtatgactattacgtgatgcattggatgtccactataatcttaggaagtttcaagaataattgggaaacgataattgtttatttcaaacaaatttgattttgttatgattggtattacattatttacttatgttttattttatcatgcagtattttaatgatgttagaccattgaaagcagagagattga

SEQ ID NO: 84127 - DNA, 303 bp, Glycine max
  unsure (1)..(303): unsure at all n locations
agcttcacgcacgctgccactnttgttatgttttaacaaaaggcacatctggttgaagcttttttgtctatgatatagccaccaaatgggctataccttatgcttttcaacatgtcatttatttggtaagacattttattgggttgtacccatgcagcattatcaacaagtagaattgaatgataggttgaaccactgaagcatattcttacttgcatagttcaagaaattacctgtgtactctagtgattgtataatgtattctctctctttacctgtactagggcccgcatctgttagcac

SEQ ID NO: 84128 - DNA, 303 bp, Glycine max
  unsure (1)..(303): unsure at all n locations
agcttacattgncaattgcttagattgtgcatanaaaggaaaaggtttgtgtggtggtcggcagaggagcataaaccacagagtctggcgacaggtgcaaattttttattcatggccagttgggttaccaggttaaccaaggcatctagtttaccttcaagcttcttagtcttgcctgatgaggatgaatttgtggctacttcatgcactcttctaatgacaatagcatcactcctggcactaaattgctgggagtttgaagccatcttctcaaataatattttggcttcagcacgggtcatg

SEQ ID NO: 84129 - DNA, 451 bp, Glycine max
  unsure (1)..(451): unsure at all n locations
agctntagctgtcttccacaagattgctgcacatgcctctggactaaatcatgtaataaataaaggtcaaaccagcagaacaaacaacaagacttttcaattagtaaaattatcaataataatgcaagtagtcaaccatatcactcactcactttctctctctctctctctcacatacacacacatatataatatatatgagaaagtatcaaataagagctcattgtgagaaatgaagaaaactaaaaatatagaccattagatcgtatttttaattggtgtcaaagtttgtgttgcttttttaattggtcctgttgtgcacaacacactgaccaatattgtcactcatagcctctatttctcacactgcccaacattgtccgtcacactctcagactcagcaacatacctttataaggctntaggtgtggcangaaaaacaatntcatga

SEQ ID NO: 84130 - DNA, 450 bp, Glycine max
  unsure (1)..(450): unsure at all n locations
agcttctnttaaagatggtgaggaggatattatctttgtccatagtgtgtcaagatgacctgatgatttccagtgagcccatagaactctctaagtttcgtccatccaacaagtagagttgggctcaccaaatcttggttatatatgacaaaatgcatgttgccactagagtgtagcagatgccacgtatgctctagttcatccttccatctaatgcatgacgtaatagccacactcaatgtttcctctttgcttattacactaaattcaataacaaattcaaagttatcccaatattcgtgtacaaattaataaaatgtcatttcggaaagatcaaacattgtntaaattatttattttaactctctcgtactcttagttggttttgttttcttttgcacttgtccaagttctttcccataatggattagtaagaatggacctaaattc

SEQ ID NO: 84131 - DNA, 214 bp, Glycine max
gcttcatcatctttgtattccaacatttattctgttgttctggcccatgcataccatctgtaatagatgtacatgttcgatattataaagttggaaagcctacactacccctctaaagtaactctttaataaaaagagtgacttgttattttaatatcatttggtaattaatagatttacaaatagccgcattgtgtcattgaacttgatttac

SEQ ID NO: 84132 - DNA, 407 bp, Glycine max
  unsure (1)..(407): unsure at all n locations
agcttcngatgcaactaccatagctgttttctttctagcataccttgncttcaaatttgattctccatccaaattcattgtctgaatatatgcaagcccactttgatcactcgtccccaacaagaccatgtcagccggaatggtctcatccgcaaagatcttaacaacctcaccagcttgtatttttttccattcctttgatcggaaatcaccagactgaagcaccagagactcccgggtgttctcattgcgatctgacctgtgcctccgccaatcctcatagccatccttaatagctgtgacacaaagcacaaactatagcgggaaaagagacactgtccttccaaacacagccagtggaggaagctgattgagcgcatcattagcaaggaaatacagatatgcca

SEQ ID NO: 84133 - DNA, 261 bp, Glycine max
  unsure (1)..(261): unsure at all n locations
agctntntgactcctgattctttggaactagcttaactctagattctttggcatcatcaaaataatcttggaaagcattgcttccacaatcttagctactataaatgtcttggcctctcataatcatggttatcttggtggggcattgagaagcaatgtgtactcttccaagacatttaaagcactttatagagctaatctctccttgcatactagccttaggaggttgcttttctattgccatcccttgtcatcttgggc

SEQ ID NO: 84134 - DNA, 423 bp, Glycine max
agcttgaaatgaggaagagtagattggttatacttcctgcttttattcgatgaccacagagtggtacctggagatatgtcgcgggggtcaggagaccttggggacgtcaggtggggtgctattgcccactaccaagcttgaccgatcccgacccaacccgggcatagtcagtcagtgagaacctgtgatgtacctaaacaggcgagctcctggcagtcaacagataaaaggaacaaaggccacaaagcaaggaggcttgtgtggtggctggccagctgtgaaccttgattgatatatgggatatggcctctggtaatcgattaccaagggtgggtaatcgattacaaggcttataaatgaagacaggagactaagatggtctctggtaatcgattaccaatggagtgtaatcgattaccatgc

SEQ ID NO: 84135 - DNA, 331 bp, Glycine max
  unsure (1)..(331): unsure at all n locations
agcttctcaagcaagcttccatatttgttatcatagtacaagagcttcaagtaggtgctccttaaaattccattaatattcagctttaccttctcctccattgttgtttcttcatttttttctccatgcatctcagatcaaggccgtacccgaatcaaataaacattaaaatgtagtaactaggaagtgatcctatgtcgttttccaacgagcaatgataaaccaaatgttcataatagatagtaggaaatagtaacaaattggggagggggggttgattcctctcataatattactactgagtaatatatcttttatatttgntattttc

SEQ ID NO: 84136 - DNA, 412 bp, Glycine max
  unsure (1)..(412): unsure at all n locations
tcgcctgctgcatgcagctttcgaatacgtataagatttctatttacggcaccntgatctgaaaaaccttgctcgtttgtaccgatgcaatattgaaatcactttagcacttgactctttgggctcctacctccatagccagttttaagcctgctaactatgcctcatacttggcctatgtgcaagatgctttaaatctataacatttcaactatgagaaagctatgctattcaacccttccaagatgaccccaacttcacttccatgctgattggacgagttgtccacatgtagagttcgtcatttatcttggaactaatgttgtggtgggcaaaattcatttacgaaatctgccaaccattgggcctgaatgctgcctctaggttcataatggatctgtgacctgataaa

SEQ ID NO: 84137 - DNA, 356 bp, Glycine max
  unsure (1)..(356): unsure at all n locations
ggaccttaagtcaccgcagctgcagcttaagtagaggaaacgatctttatagattttgacacggcttgacactacaaacaatacccaatttaagagaatctgcagccatatgccctattgagggaagggacaataaattgaccctggattttaaaccccaaaagattnacaatcactacttataaacattcttgaaggaaagcttgttaaatctaacaatgtcttatcaaccatgattagatggaaagataccgagcagatggggctatgcctctaatgaaaaactttgttgttcattgctaaatcatgaataaatgggaaactcatgttctacagaaatgaggggaaataggaga

SEQ ID NO: 84138 - DNA, 419 bp, Glycine max
agcttccatcacctcttttttgtacatgactggtgtagacgagtctatgggatgcgtgttgggtcaacatgatgactctgggaaaaaggaacaagccatttactacctaagctagaagtttaccgcatgtgagatgaattacacaatgctggaaaggacgtgctgcgccctggtataggcgtcacatcgtcttaggcagtacatgctcagtcataccacatggcttatctccaaaatggatcccgtgaaatacatctttgagaaaccggccctcacaggacgaatcgctaggtggcaggtactactatctgaattcgatattgtgtacgtcacccaaaaggcggtaaagggacgcgccttggcagattatttggcccagcaacccctccaggattatcggccgatgcaccctgagttcc

SEQ ID NO: 84139 - DNA, 428 bp, Glycine max
agcttgaaaaggatttatgatctgctgtgtttcgtgattcctgcgaattgtattgtttcttaaattgggaaaatccttgttggaccgtttctgggaatatctctgggattggtccaaagaagtcccaccattgcaaaaaccaattgggaaaattgtaaattgtgttggtcttgaaatatattagccatgaatgcttgaagcgggtattttggtgccaaaacaccttggtccaagcatcaacgtaatcccaataggtataacctaccggatcaaatggaactgaaaatctcttccctttgttcaagtctgaaccaaagtgtcttggttgaagaacttttagtatttggatggttgaatgggtgtttaacgtttggtcttttggatctttgaaatgtttgatagatactgagtttgaatctaccaaaatc

SEQ ID NO: 84140 - DNA, 443 bp, Glycine max
  unsure (1)..(443): unsure at all n locations
agctaagcacataagaattatggccaattcttagaatgatccttncagcaacactcaaatgcctatcaaaccaagtgtaccacaagccaaccccataagtctgcacattcacaatggaataattacacttgcacgacgttggtttgggcttcacgttgaggcaggggggctatcggtgtgtgccgttatcacgtgaaaatcgttctcgacattgtacctcttacctaacttctttttgggaaatgcagaatcatgaaatgcaggatgatgtagaagcatttcatgtggatttggttgggcatgtgccaaatttttgctccttatagcacaagaacataacctcttgtcaaagctgcgcacaaatgttgcatctgctacccagcctgtatcatcaaataagtggcatgcaccagttacccaaccatacaatagatgatgcacca

SEQ ID NO: 84141 - DNA, 429 bp, Glycine max
agcttcttagtctcacctgatgaattcttggttacttcatgcactcctctaatgacaatagcatcacttctggcactaaattgctggaagtttgaagccatcttctcaattaaatttttggcttcagcaggggtcatgtctccaagggctccaccactggcagcatctatcatacttctctccatgttgctgagtccttcataaaagtattggagaagaagctgctctgaaatctggtggtgagggcaactggcacataattttttaaatctctctcagtattcatataggctctctccactgagttgtctaatacctgaaatatcctttctgatggtcgtggtcctggaagcagggaaaatgttttctaagaatactctcttgaggtcatcccagctcgtgaagaaccttggagcaaggtaatatagc

SEQ ID NO: 84142 - DNA, 357 bp, Glycine max
  unsure (1)..(357): unsure at all n locations
agctntgcttcactacaaagtgggagtttgagtttcgtgttatcttgctaaagccatcgtttgttagttcctctatcctcagacctaactgttactcttgcgggaaagaaaaataagaagaacacataacaccatcaacaacagcccacacttcagtacaaaatagggaagaaggtaatatcaataatgggcggcgacagtcatggtggccagattctcgtctctaatggttgcagcgaacagaggggtggggggaaagaagaaagggaccgatacgatacaaaggagaatgaagattatgaaggggcgtgaggggtgggtggtgaataattgagggggaaaacattattctctcct

SEQ ID NO: 84143 - DNA, 326 bp, Glycine max
  unsure (1)..(326): unsure at all n locations
agcctatgctaagatagagagganacactagagttatttacttttgtcactccagaaggaaggagataggaaaggtttgacccctaatcatagatggaggaagctgaaccaatgttgacagcactacattagtggagaagcttggtttaaaaactacccctaaccctaagccttataagttgcaatggtcgagtgactatggtgagttggttgcggattaccaagcgttacttacatcttctattggaaagtatgatgatgaagtgcttggggatatggcccccatggaagccagacatgtgcgtctcgggagaccttggcaatat

SEQ ID NO: 84144 - DNA, 436 bp, Glycine max
tgcatgcactttcattaagagggttatacattctaattttcactaatgaactaattacttaaaagaaaagtttatttaaacacgaccccggatggtctaagtgttcccaaataaagatgaggttaatcaatcccatcgtagatgacgtcataaaagtgcatagtattttattttatgcatacattgttaaaaaaaatatatgtgtgtaattttattggaccacatgagatgaaatgaggttgattaatttcatttttaattagagttagttagacaaagtcttattgttatgagaataaatctggaaattcctctaacaaaaactaatctagacatgttaattatatatgaatgaggaaaataaaataattcataatctatatatatatatatatatatatatatatacatctatatatctatatatacatatata

SEQ ID NO: 84145 - DNA, 438 bp, Glycine max
  unsure (1)..(438): unsure at all n locations
agctttgaaactntttgtccttttttttttgntatgattcaaactattcttacactggacaagttgaaccaattccaaacaaggtcatattccatcgatttttttggtcatttaaggcatacattgatgtgttcgcatgttgtaaacccattgtgcaaatcgatggaacatggctatatggaagatacaaagggacactattaattgcagttgcacaagatggggctaacaacatatttccattggcatttgccattgtcgagggtgagacagtagatggttgacacttttctttacaaaacttgagaacacacgtgacaccacaacatggtatatgcttaatctttgataggaacgagtaaatcaaaagtgcatactaacaacctaacagtgagtggacaacagacaacttgtcacatgtgttctgtatctgacaca

SEQ ID NO: 84146 - DNA, 412 bp, Glycine max
  unsure (1)..(412): unsure at all n locations
ctgctaattgctctatgtgttgcatggaagggcaaaggtctgtatggtggtcagcagaggagcacaaaccacagacccttgtgacaggtacagatttctagttcaaggccagctgggttaccaagttaaccaatgcatccagtttgcctttaagcttcttagtttcagatgatgcagctgagtttgtagctacctcttgcactcctctaatgactatagcatcatttctggcgctaaactgatgggagttggaagccatcttctcaattagatnnttggcttcagcaggagtcatgtctctaagggctccaccactgggagcatctatcatacttctctccatattactgagtccttcataaaaatattggagaagaagctgctccgaattctgatggtgagggcaactgac

SEQ ID NO: 84147 - DNA, 299 bp, Glycine max
  unsure (1)..(299): unsure at all n locations
agcttcatatggagccatgccatttgtttattgattactgnnatnataagcgaactctatcaatggaagaaaactctcccagcttcccttctgctctaagacacatgctcttataaggtcctccaacgattgaatggtccgttcagtttggccatcagtctgaggatggttagctgaacttagtctaagctcggttcccaacgctctgttcaagctcttccaaaatctagaggtaaatctaggatctttgtcagatactatgctagatggcacaccatgtaacttgacaacctcactta

SEQ ID NO: 84148 - DNA, 431 bp, Glycine max
ggaccttaagcacctgcggctgcagctggaacggattttctatcatgtattcacctaaggcgctttggatctatatgctacattcatattccagacgcgaagagacacatgcttgaagacaagactatacgaggtacctgattaacgtcatctagtagatgaacatccagtcacttggaatgagaccattaccaattccttgaatttggtgatcacttgaatttgtacaaaatactcactaaagggtgtcatattgatgtctaaggtcttgctaaagcttaaagaacaaattctcagagatgatgtatgctatctgaatgaaacactccattttacaatatcactagtaacaacacttagcaggataattagatttaaagataacttgataagttattattacatataactatggatagacaatgttaatt

SEQ ID NO: 84149 - DNA, 438 bp, Glycine max
  unsure (1)..(438): unsure at all n locations
agctttgcttcaagcttgntgttgtattttataaacattttgcgtagtttgaaacgatcattgtttttccttattttttctgtgcttagaatgtgccaaaagagaatggtgtacattacttttgtggaacttcatgttaagcaagaaatgtggtattgtagtggtggtgatgaacttattataaacacataataaacgagattaattaagagctaaacatttagtggtagaaagtttattagttctcttgcagcttgatgcgctttaagaatttgattaacatgtacacaattacgtacactacccttttacttgggggaaggggaagaagaaacaccttaatcagcatctttgactaatgctttatcttttcaccaataatgttactatagagagnttcgcttgtctgtcttaatgaaatttattattgcaaagagc

SEQ ID NO: 84150 - DNA, 426 bp, Glycine max
gcatgcctgctgcatgcaagcttgcacaccagcattatttatatgttgttgtacaaaatgaactgactaactaactaaattccactaatatatagaggcactacccaaatagaatggatgggccttgattaggtccatcttatctacctaattaaactaattacgtaaaacaacagcccaaattcctagcccaattatttaagtacagaggttctgacttccaagtcgattttgaccatcgaaatggtaaaattggcgcatgcttacttgtgacaaaattgaggatatttttcttaaatttctagggactacttaacattccatttagagttctgtagtgtcccataggtcctgcacaaggtagatatatcgattaagcacaaaaatatgaaaataagccacaattatcaattgagctcaatcatt

SEQ ID NO: 84151 - DNA, 447 bp, Glycine max
agcttggccacctaaaggagttcgtccttaagttatagtcacacatgcccaagaatctgtacaaaccaaaatatagtcaagggaaggaccaagaacatgcaggtcagtcaaaaaggtggaggagccgaagccgctcgagggagagagaggagagacccctcgactaaccaaggcgagtcataaacaccatcactggaggttttgctagtgtaggggccactacctctacgggaaaaaggcacctacggctagttcgattagtcaaatatggtctctcgactccaagtatccaacatgccacccataaccttcatgtcaaatgacttcaaggcaatcaatccagtgcaggatgaccccatggttattagtgttgagatagccaacaacacagttaagaagacctttgtggaccaaggaagcttgaccgatatcttgtttgggaacatt

SEQ ID NO: 84152 - DNA, 428 bp, Glycine max
  unsure (1)..(428): unsure at all n locations
agctttngacataatggatgcatnngtttgattttttttatacgctaactntcgncggatcaagtttgctcagaataattaacaacgggcggtcgaattaattattaattgtaccttgactatttaaaaatctattcatcttaatgttactagatttaattgggcttctactacccagctaagaaagtaaagaacagtaattgaaacttaaccaaaagtaaaagcgataattaaaagtgcacagctgaaattaaaagtgtatggaataagaaacatacacaagaatttatactggttcggcaacaacccgtgcctacattcagtccccagcgactggtggaccttgatatttcttttcaccccttgtaaatcctttacaagtcaagatctactatggatgtaccctcccttgttctctntgaacaacc

SEQ ID NO: 84153 - DNA, 419 bp, Glycine max
agcttttagactatgcttatcatcagtatacttttgatgtctcttccgactgggctgataaacttctatgacttccccactaactgttgctttcttcagatacatactccgtaaattatctccatactctctatgtaaagatgccacaagaactgcctttacactatgattttttccggctgaagtttgcaaatccacttgtggcagtatcttatgcttcaaggtgcagcttaaaactagatccatgactgtttgttgtggagtagaaacgggactaaatactctaatctgtaagcctatccgattatctgccttggccaagtgttcctgatagtaatcgctgatcaagttccatgcctcgttcgaagggcgaaaatgtaacgcccctacggtggaaactgtgtcttctttgaaacatt

SEQ ID NO: 84154 - DNA, 409 bp, Glycine max
agctcgaataggatgctttaatggaggttaaatatatatattgggggagcaccaaattggaggaattaaagagggaaagaagcggaactttgaagtgtatcttatgagactttcattcatcaaagttacaacaagtgttacacatgcttctatttatagactaggtagcttccttgagaagctttcttaagaaaacttccttgagaagctttcttaagaaaacttccttgagaagtttctttgagaaaacttccttgagaagctagaagttaactactcacactcatctaaaaactaagctcaccttcttgagaagctttcttgagaagctagagcctatctacaccccccctctaagactaagctcacctccgtgaaagctttttgaaaactagagcttagtacccgc

SEQ ID NO: 84155 - DNA, 466 bp, Glycine max
  unsure (1)..(466): unsure at all n locations
ggatccttaagtcacctgcggcatgcaagcttgccttgaaaaagactattggtgtcctgaacaaacttgntcaagggccttggtaactgatgaggttgaagctggtgtagatagggtagaaggagctgatgaacataaccatcctacttcttcaagcactacaaactcatccaatggctctggctcaatgatgcatggaagctcatcatgctctcatgagaaccaaaagtattcaaaagttaaatcaaattgtgttgatagcgggtcaaaaatgattgtgaaagctagctacaggggtgatactattcgtttcaagtttgatccatcttcaagttgtttccagctatataaagaagttgcaacaaggttcaaattgcaaaatggatcattccagctcaaatatcttgatgatgaataggaatgggtgatgttggtgaatgactcggatttgcagaatgtcataaat

SEQ ID NO: 84156 - DNA, 437 bp, Glycine max
  unsure (1)..(437): unsure at all n locations
agcttttacatgtctatganaattatttattgcattctatagancgnctaaacgaaaatntttataaatcgtgctaaaactcatatcatacgctttcaaatgacgataatatatgaaataagtattcctttcagctattatataagtacagctagaatcaacatcataagtcggaatttcatgtcttttgtattttaccctacaaaaattgccaaggccttaacacatagtttcttcaaacaatatatgttggaccggtccaacaactaaatttctgtaaagtaaaataatgaaattatcgaatacattacacattcctgtacaagctaatggattatacaaattagagtaattttattttttcttactaaatctttatattatcccgcttattaaatagattaaaaatatattacatatctctcaagtgctcaaat

SEQ ID NO: 84157 - DNA, 157 bp, Glycine max
agccttctataattgtacaagatttaagtttcttataccactcgctggacaagcggcctcatatatcttaagaaagggggcgggggcatggtcttcctcctcctcctcatagtactatacccaccttaaaccaccccattcaccctcaaatatccac

SEQ ID NO: 84158 - DNA, 278 bp, Glycine max
  unsure (1)..(278): unsure at all n locations
agcttattaatactttggnttaattatgtcagattagaaaaagangggaaataatatttacttactatttgcatgtataataaatgaagatcattgaagaagatagaatgagagcagtctttatcatttcccaagtcatactttcaagatcgagaatatggacatcattgaatagcttcctgctcatatcttctccaccaaacaatataactcttgaaccaaccactggggcacactgtcccataaattgaaacatatacaaatatttacaaagaaat

SEQ ID NO: 84159 - DNA, 292 bp, Glycine max
agcttgatcaatacctaatatcctttaatgattccaagtcactgctagctctaaacaaatcaaaagagattagtcggttgtgcttgcacaatgactaaatctatgattgtcttaaagataaatttacaatcatcacttagtcttttctctacatatgttcaaggcgtttcgataattttttaactttataagaataaaaaaaatggtttttacagaaagaataatgaatgttttcgcgcaaaagttggtggttatatcttcaaactttctggtatatataggcctcattttc

SEQ ID NO: 84160 - DNA, 243 bp, Glycine max
  unsure (1)..(243): unsure at all n locations
ttaagtcacctgcggcatgcaagcttgaacaaacactttattttcattctttgncagacagaggcgcnagccagacaagctccagcctctctgatcgaagccatacccgaaataaataaacattaaaatgtagtaactaggaagtgatcctaggtcatttcccaatgatcaatgatacaccaaatgtgcaggacagatagttggaaaataataacgaatgggggggggggggtgatatattat

SEQ ID NO: 84161 - DNA, 367 bp, Glycine max
agctaggacgccacaaacatgtgtcttttccttcggcgataactgacaagatcaactctttgttctctgtgctgcactgcaatgaggaaaaatacctcgaagcctttcttcttgccttcatcacagagaggtaaccttgagtaggctctgctactaaccatcttcatgtcaatagctctactgatatgaagaattggtggataagatgtagcttcattaaaaaatgtacatctgttcagaattctagctgtcatatccaactcaatctgtgagggatttagatcaacacgattattgcatagaaatcttgtaataggcgtacggatgttgacatttttagaccactaaacctaagaagatgatttct

SEQ ID NO: 84162 - DNA, 444 bp, Glycine max
agcttttctgtttgaagagagaatggattatattcttgttgtacttccatgcttcagaatcagcggcgaaaatcccgtctccgaaggcctgaaaaatgtgacgaaactcgggtcccttgacgtagttgtggaaattcttgctcagcatgtggtggacgttgatggggtcgcaagtgaccaaatagtccatgttggtaaaccaaggtccaatgaactcaccagtgccaccatgtcgttgcaacacctgagttgaataatcatgggcacgccataaattgaagagtaattgtggtagcatgccaatgatagggtattctgtcaaaatggggtgtttgcaacatcgtctcctatggaagaagtattggaagaagaggattgctgcaattattgctgctgcatagccatacatggttgcaatgaaataaatcataaagcatatatttg

SEQ ID NO: 84163 - DNA, 449 bp, Glycine max
  unsure (1)..(449): unsure at all n locations
agcttgtttaccccatgttgaattngcttacaatattagctgttcatagcaccactaattgttctccttttgaagttgtttatggttttaacccactaactcctcttgatcttttgcctatgcctaatgtttctgtttttaagcataaagaaggtcaagcaaaggcggactatgtgaagaagcttcatgagagagtcaaagatcaaattgagaggaaaaataaaagctatgctaaacaagccaacaaagggagaaagaaggttgtcttcgaacccggagattgggtttgggtgcacatgagaaaagaaaggtttccggaacaaaggaaatcaaagcttcaaccaaggggagatggaccatntcaagtgcttgaaagaatcaatgacaatgcttacatagttgagctgcccggtgagtataatgttagttccaccttcaatgtctctgat

SEQ ID NO: 84164 - DNA, 295 bp, Glycine max
  unsure (1)..(295): unsure at all n locations
agcttcntagtcctagatgaagccattatgtttattatctttatgcacncctctaatgactatagcatcatttctggtgctaaactgtcgggagtaggaaaccatcttctcaattaaatttttggcttcagaaagagtcatgcctctaagggctccaccactggcagcatttatcatacttctctccatattactgagacctctctgaaaatattggagaagaagctgcttccaaatctgatggtgagggcaactgccacatactttttaaatctctccatattcggaaagctct

SEQ ID NO: 84165 - DNA, 258 bp, Glycine max
agcttggatgaatatgaacactactgcttgtcttcttatgaagggattcaattggaacgaccccttgaattattaagccattgctatcactatgtctaatagaaccttcttttgtacttatgttagccattttctattcttaccctttgcatgaagacaattcgtaatcatcgggggcatgccttttcaatgagagatcaacttcatgactgtaaacactttacgaccgattatgatgacactcggtgcagatactta

SEQ ID NO: 84166 - DNA, 205 bp, Glycine max
  unsure (1)..(205): unsure at all n locations
acagtagacctgaaccggtggagtctaaacatgaggaagngccgaagggtgaaacttcttgcttcnacagcncaccacggagcgagacctggagatatgtcgcgggggtcacgagacctagaggacgtcttgtggggtgctatagcccaataccaagcttgatcaatcccgaccctaccctggcataggcggtccgagagaacct

SEQ ID NO: 84167 - DNA, 240 bp, Glycine max
agcttgtaattgaaccatagaagttctttttatctctaatgggcaccacggatcgcacggatgaccaattcacgcgcataagataactagacgctcgtaattgaaaaacggttgctcttgatgaatacatatggacaacacttcttaaatgaaagtcagggtgaggcgcgttaataaactgactcgccttgattatggaccaatgaagctcttgagatatacaaatggtcataacttgtc

SEQ ID NO: 84168 - DNA, 440 bp, Glycine max
  unsure (1)..(440): unsure at all n locations
agctttgagcaaattcaaacgactataatttttgactcggatgtccgattgtgtcctgtaatatatcgagacgctcgtaattggaaacagaagctctgagcaaattctaacgacaataactttttactcggatgtccgattgaatcccgtaatatatcgagacgctagtaattgaaaatagaagctctgagcaaattcaaacgacaataacttctaactcgggtgtccgatcgtgtcccgtaatatatcgagacgctcgaaattgaaaacagaagctctgagcaaattcaaatgacaataaccttttactcggatgtccgactgtgtcccgtaagatatgcatacgctcgtaattgaanacagaagctctgagcaaattcagatgacaataacttgttactcgaatgtccgattgagtcccacaacatatcgagacgctc

SEQ ID NO: 84169 - DNA, 400 bp, Glycine max
  unsure (1)..(400): unsure at all n locations
agcttcccgtgtccgaacccggtttgctagtttactggcttcctaaggcgacaccagtataattccgataatggctcccgatcgcactcagctgcagaatatgttcaagaaagagggcgaaatctttaaagaatacgcacagcggtggagagacctagcggcacaagtggctcctcccatggtngaaagagagatgatcaccatgatggtagacactctgccagtgttctactatgagaagctagtaggttacatgccgtccagcttcgcggacctagtgttcgccggggaaagaatcgaggtaggttgaaaagaggaaagttcgattacgtttcctccacgagtacaatgccaaaagattcgggacatgggggcaaaaaggaaggaagagatgccctgc

SEQ ID NO: 84170 - DNA, 288 bp, Glycine max
cgggaccttaaccgacctgagctgcagcttgtgaaatcaaggaatcttgattcctttgacacaagtcattcaattctattcttagaaatgtgacctaagcgtttgtgccataatgcttttgagtttgtattatcaattctacgcttagtaccacgcaattctgcattaaaggattcatcatatgaagctataggatcaagtaaatatagattatcattaaccaagagtgaaatagttccaacaatatctgaattaaaagacaacctaaacacattgttttctaatgaa

SEQ ID NO: 84171 - DNA, 314 bp, Glycine max
  unsure (1)..(314): unsure at all n locations
agcttncatcagaatttantttcatgtttcttatcgncgggaatgagcntcacgtcaaggacgcaactgtcatgagtgagcgacaaaacttatggcctagtggaggtatgtgagataaattgattcccaagaagttggacaattttcattataaaaaccacccactatcttttggagatgacacacgagttatattattcctaaaacaggtgaattctcttctactcatggtaattntcagcaatcacgcaacgctcgttatctcccttcataataaaaagatttgtttgatgtcaagtccttctttttctttt

SEQ ID NO: 84172 - DNA, 317 bp, Glycine max
aacggaagccaccgcacgcagcaagcagagcaacaactactttgaggacgtcacaggagactgagagaccggaaaaaacacaggccgcccaaggccaacaggcaagaagaggaacaccccacaaagcgacaacaccgaggacagaggaaccgcaccaccaagaaaccgcccggggcccgaaacaaacaaaacatacacaacgggaggacacgaacgacaaagagagagacaaaacagagggcgtgacacccagcgacacaaaccagcacaaaagtggaacgaccaaagaggccgacagcgcaacacaccacaaagcg

SEQ ID NO: 84173 - DNA, 230 bp, Glycine max
ctcttgacatgaagatgtgtataagggttgttttttttgtctttcattcggcgaccacacagtggcccctgaatatatgccgagatgtcagaaccttgggccctgggcgtgcttgccgctaccgacttaccaaccgaccatcccagcatcccagtctatgaaaacctgggaagcccctaatcaagctagctcctggaactcctcgcattcaacgaacaaatagcacaaag

SEQ ID NO: 84174 - DNA, 444 bp, Glycine max
agcttctatagaggttggatcattgagtcttattgaggtccttcaatggcgattttcaaccatggatatgtagtggaaaataaaggagaagaggtgagaggaggcgccatccacttgggaataagccatggaaggaggagcttcaccaccaagagagtgccttggataagaagcttaaagagaaaacttcaatggaggaaaagaatgagagagagagagagagggcagaaggcatgaagttgaaggagaaaaagagggagagaagttgaactttgaagtgtgtctcacaagtttcacattcatcaaagttatgacaagtgttacagatgcttctatttatagcctacgtcactaagtaaatgaaacttctatgagaagctaacagttagctacacacacccctctaataactaagctcacctctttgagaagctttcttcagaa

SEQ ID NO: 84175 - DNA, 444 bp, Glycine max
  unsure (1)..(444): unsure at all n locations
agctntatgaggtaacatcgtcgtcgttatgttctaaccaatacgatcacatttgcagacatatatgtttcgtggtcgtggtggcattctaacgtaaatatgtactcgtatacacgtacacatacctacgtacgtcaaccacaacaacaacaacaatatctactagtctagtctttagccataagcccttctcatgaaacataatgcactagtattcatcactcgcactttttggaattggacggtgcatcaagggtcccccacggtcctttctctgggtcccacaccgtgaactctgacagagacagatgtatcacggacggtcctatcatcttgcatagtgtaaagagaactctcccccacatatcatattcattcatctctctagaaattaccctatgctctcacaatattaagcgtccatcatcttagatcagtctttat

SEQ ID NO: 84176 - DNA, 77 bp, Glycine max
  unsure (1)..(77): unsure at all n locations
agcttcgagttatagncaaactttcacctgttcatcagnagaacgcgaacatattggagcactgtacattatttcag

SEQ ID NO: 84177 - DNA, 364 bp, Glycine max
  unsure (1)..(364): unsure at all n locations
agcttggaaacttttgcgctatgtgcgtttttctacttataaaagcctggaaatgcatggtttacacactttagagacgccgatcactgtgaaaagagtgatagaggcgctatcatcaaaggaggagcatagaagactgtgctcctactcgcaagagaacacgggatttgaatgtttgggacgaacccttgatgaatgccgtcaatattagaaggggctgacgccatttttncagaataaaagaaggagagaagtggaacttcgaacgtgtcccatacacttccttcatcaaagtacacctgtggttcacatgccttatttataactcggtgctccctgacaagctttcttgaaaaactttctg

SEQ ID NO: 84178 - DNA, 376 bp, Glycine max
ggatcataaccgccgcagcatgctcttatctaggcttgccttttacttaccccccgtgccacccaggaagatttaagccaagcccctgctttcgaggggcaactacgaccttatgaagactatctcgggcaagactatgaggaaggagatacccatcttagccccctgatccaccttaaatatccgctccccatgaactaccccaaccaaacatagaccgccatataccgacttcacccacacccgtaaaagaatctgttcccttcgtggaagataagggaaagattgaggtgcttgaacagaggttgaaagcaatcgagggcctctgcaattaccccatctcggattaacggatttatgactaatcccaagatag

SEQ ID NO: 84179 - DNA, 438 bp, Glycine max
agcttcccttgtaaggaagacatttttttggctattaatctagctgggtttatctatgtccattctagtaccttaagtttgttgagaaattttacaaacaagagggaattggtgagacatgctattactagatttgccacttcttatctaaccttggaaaggcttcacatagagagagccaatattagagagatgtttacttctgatgaatggaccttgaacaatctatctaaggagcctaatggaaaagaagctgcaaaggtagtgctcatgccttctttctggaatagtgtggtatacactcttaaagtcatggctccacttgtgaaagtgcttcttcttgtggatggtgaaagaataacagccatgggctatatttatgaagcaatggacaacgctaaagaaacaattatcaagtctttcacaacaatgaaagca

SEQ ID NO: 84180 - DNA, 341 bp, Glycine max
  unsure (1)..(341): unsure at all n locations
agcttcgagttatagacatactatcacttttttatcagnagaaagggtagatattggagcatgttacattatagcaggttctggtatccttggtctgccgcttcctagttgcttaaccgcactgctgtgtagaagattgtaccaacctttttacttggtaagattataacatacttttctggtacaattgagacttcattgtcaaattaaagccttttctgtagtgatattgataatgagggcatattaaagtaggaggggggttgtagcatgtgtgcccgngtnctcgtaataaaaatattgagttattttgtctttaatcaacatgtattaagcattcg

SEQ ID NO: 84181 - DNA, 316 bp, Glycine max
  unsure (1)..(316): unsure at all n locations
ggcttgganaattctgctctattttcattttaaatatttataacaagcccggaaatgcgtggtgtacctacctaagagatgtaaattcttgttttaaagaagttaatagagtatgctatacatcaaatgtggtagctaaataaactatgttcctagtgtacgagaagagggaattggattgattgctacaaaccaatgatgaatgtcgtctttatcagatggcctaccgcgcattgatgttccaaaaaaaaattgaatagattgtgtgccctacctagtaattattgaaacattatgagtcttcatctacatgact

SEQ ID NO: 84182 - DNA, 431 bp, Glycine max
  unsure (1)..(431): unsure at all n locations
agcttcntccctatttttctatttatttgggaagaagagaagaagaaaagggttcagccccttaggcacttctctctctctctcgaatttgctgaggaaaaatattttcgtgaagaatatccaagccgaggcgctctcgtaatgcttccgtaacgtttccgtgagtaattacgcgaagattctcgaccgttcttcaagattcatcgatcgttcttcgttttcttcagtcttccacgggtaagtacctcaaaccaagcttttcaattcattctatgtacccgtggcggtccacattttgatgcatgtatttttattcttgtttttgtctactttttatacccccgttagacgagcttaaaccgcctatttaagtcatttctcgcttaatctaaaaataaaataaatgttcaccgaaccattgaatcgtatca

SEQ ID NO: 84183 - DNA, 411 bp, Glycine max
agcttctttcttgaattcatagttgtgacatttattatgagtttattgtaaactcatcagcacaatatgctcttaatatatttcactgaagcacttaagcaaatatgctagtcatcacaatatttttcatcatccttacaaatatgctagtcatcacaatatttttcatcatccttacaatttgcattgttaatggtttgtcataattaaaaccttgggatgtggactcaacactaatacaacaacgtgtaacaagaaggtactaaggaaacaatctttccttcgaccaccacgtaatctcataatctcattcaagaaggcgtgatgaaacttgaagttgaataaggaaaccatctccttccaaaatttgcattccaaccacaagcttttgatcaactatgccaaccatgg

SEQ ID NO: 84184 - DNA, 405 bp, Glycine max
agcttagccccatagtcagcacatgtatttgctttgacccagggggtgctcattgctgacttgaatgttatgattcatgaatattcgtaacgatgaaggtcgttcacaacagaacagggttcttacaatcacattaaatccaagctcccaaacaaaatttataaccggagattaattctattcatatgatagataacatctttaaatcaaacaattaaatgtcgggaaatcttgattaaagatggttggagtatgtactgccattgatatacatacttaatgaactatattagcttataaatccaaaatcgatcaactaaatttagtagccatcatgaggagagtgggccttggcactcggcattcggcatccatgagaaaagggatgaagagcattaccaaaaa

SEQ ID NO: 84185 - DNA, 334 bp, Glycine max
atatgcatgtgaattaggaagcatcaacaagaatcaagccaaggttattgtgcaagcaatcaatggggcaaaacacaccaaaagattatgatgatggatggctcaaattctcacaaaggtaaacttatcactttcaaattgagctttcaaaactatcatgacatgtacaggaaaaacaaggatttcaaatcacaaaatgtcaagagacttttattttcaaaacaattacccatttcttgaacatatcctataattcaaagaaaaatatgcaaatttgtacatgcaaacagaattgacctaatatattaaactagaaacccaacaaaactaacaa

SEQ ID NO: 84186 - DNA, 373 bp, Glycine max
gaagatggcccaaatgtgaagacaaatcggcttgccaatcattggggaccgacggtaaatgcaataaaggtgtgcagactgcaaaaacccaagcaaatgaaggacgcggtaacctcaagaaggtttatctttgaagcattgcaagaggtggtcatggtttcctttaatggtcacaaagggggcccttgtttgatgcatttgggtgcaatacatgacatgaaaacatgttcaacggtggaggagttgttacagcaaatgatggactgaggctggtttgagatcagtgcagagaacaagggagaacaacacatgtgcatgcagtaggcgaacaaagaaagccctgctaaacccaagcctttggtaatacacttca

SEQ ID NO: 84187 - DNA, 395 bp, Glycine max
  unsure (1)..(395): unsure at all n locations
agcttgagagattaaaggcgctttttattcagtangcacagtattatctctgagttagagctcagagctaggatttatggacattaagtttatcttagtttactttggtttaacatttttgccatttcctatgttatttgaacattgaattcatttgttgatagttgttaataataaatcaattattcattgtttatggtgattaaaactacttgaaagcataataaaatgtttaggattcacttggaccttccatggtgttccaacagaaggcggtgcctaccatggtgttccaacagaaggcggtgccttctggcggaagcaaccctggcgagctgggcggcaaccacctccctctttttccctataaataggggaaaaagggcagagaatat

SEQ ID NO: 84188 - DNA, 406 bp, Glycine max
agcttgagataatgaaaggatgttttaccatcaacaccaacaattccttgaagaatgactttattggtctcctgagatttcacaagacacaagtgaggatgaaattcaaagaaaacagagttatctttagaaaattgactcacacttaacaaatttttcaaaattgaaggaacatgtaatagcttatgaagtttaaatgtaatgtgagaatcattgggggacacaaaagaaaaggaaccatcaccagagatactcaaaccttcaccattgcctatgaaaatttgatcaagtcgatcaaagtgagtgaactgcttgatattttgtgattcactagccacatgaaagttggctccagagtttggaatctatgtggagctagtaggaccattctcatgagaggaggaat

SEQ ID NO: 84189 - DNA, 393 bp, Glycine max
agctagtaaaggttgtataatagttactggtatcggatgcaacattttaattaatttagaagcgggtaaattgggcatctggatattaagattactaggatatagccattgttgctaatgatcttgtatgaggaaaatcaaattatgatgaaatggacaatttggttgttatgaatttaacccaataatgtagtagaacaactatggtaaagaaattgtttgcactttgtatgtagatatggcttacatgcatatcattcatttaacactattgtggaagggtatattatggcctttcattctgaaatttggtctttgttaatcgtggtacaatgtgttttttaaataggcagttttgtccttctatctaatatattgataaatgcattcttg

SEQ ID NO: 84190 - DNA, 144 bp, Glycine max
  unsure (1)..(144): unsure at all n locations
tgtgagctacattcaaattgcgaaatatctatcggttataatgacgaaaggaataactctatacaagatcctctattgttagtntcatatctactgcgtgtgtctatatgtattcgattgctagtaagaagctggctaaatata

SEQ ID NO: 84191 - DNA, 376 bp, Glycine max
tcttattctctccattgcgcttcattcttctccctcatttcaattttgatcttcctttttcttgcagaaattccgcggctcttccactagtgatgatcatggaaaactaaacactcaatcaatccaaggattcactccaagcaaggctaaatttgagtgctggtttagtatttcaattgtgtatgaatgttcatctttttcttcaatcttatttttaattttcatgattattaataggcttaagattgaaaatgaattaggtcatggattcatttcctaattttgaaatttaatcataggttgttcggatgatattccaactaatctgtgatctcaatgaacttaaggattaattccattgaactaactctaatga

SEQ ID NO: 84192 - DNA, 120 bp, Glycine max
aaaagttttttttccttaccttacctgactcagggataaaagccggtgtataatcctgacgctaaaatatttaccactagtgcaaggaaacatactgtttatcctaataaaaactttttt

SEQ ID NO: 84193 - DNA, 397 bp, Glycine max
agcttgaacgattaaacattatggttcttatctatgaaagcttgagttatccattttggtttatggcgtgaaagttctatatggtgtgaaagcttgccctgctgaaggattgcttgtaactagcatgcactggtgcatgcgcgcatcatatgctttggtctgtgaaatgaaattatggttgggccatgttggttctctgttttaggaagtgtcaaatgaaatttgctagcatttttctgctcaggtgttggagcttttatgcacgctttggagcaatttctgctagcaatttcctctgcatctatacaatttccatgatagtaaggaactattgatatggactaagaccactgttaaaccttacaacagcttgtagagtttgaaaaataatcacatg

SEQ ID NO: 84194 - DNA, 423 bp, Glycine max
  unsure (1)..(423): unsure at all n locations
gatttccagaatcagaatccatttgcagatccatctcaattntttcaccatcaaatgtacaataattacgaacaccccttgaacatgatgaagaatctgtctttagaacagagaacgagtgtgataagttaccctcaccacacagttccatgttgtcttcttcctggttgggttctgaacagcacactttttcctctactaaaacacctttactatgatgcttaccagcaatatgcagcaaatgattttcattttcaccagagataacatcaagattcatatccagagaaccagcctgatccactntatctnntgtgtctgtgatcaactttntatcattattattatcattatgactatctatactttcatatgctgcacttgaagtacagggtgagctcagactgactatctctgagaata

SEQ ID NO: 84195 - DNA, 385 bp, Glycine max
  unsure (1)..(385): unsure at all n locations
cagcttaacctatacctatcatttttttttcttgcaatcaaaatngggtgataattatcacacacactgcttcttttacatctcacttccaccccatttttctttctatctctcttttcattttcggccacatcatttgtcacatttatcagcttttctctttcggttaatctccccctagacttctatcttcctttcacttatacacacatctatcagtttatctctcttcactcactttccctgaataaaccatcaatttggtgtcagaagtataactctctctcctaattaatccttaaactaatgaaaacatataagtagtccctattgtattacaaatcatgccgcatagcccctcaagtattggagaattcttcaaatt

SEQ ID NO: 84196 - DNA, 393 bp, Glycine max
  unsure (1)..(393): unsure at all n locations
agctagagggctgctgntcttgatttttctttgagctcgggggnnncngaagcgaggtggaagagnttngggtgaagaaaacgttccccctccacccctttatattttcgtacaggggttgctcgcccaggcgagctaacctatactttttttttttttgggaaacattaaccatgcctcccccccttacgggttagcgttcgcctactccaatctacttaagttagaatcaggcgttcattactttatttaaaacaaataatagtaataaatactgtgaattcaaaggatactgggctgccatgcaacgacctttctctgcttgtctagcgcccggaaaggacaacgatcggtcacggtggtcaccctattccccactttcattccgccctt

SEQ ID NO: 84197 - DNA, 393 bp, Glycine max
agctttataagtacgggtctgggatacttatgtcatgtgttcgcgatatgtgaagatgatgttccaagtacttcggatttggtccgaccatgccctcctgatgtccagctgggaaattggcgagtggaggaacgccccgggctttacgccacaagcataatgtgaacctttacggttttaaaagctctatagttgggcctacgctttagagtttcctttttgttaaggctttgtgccttttgttgttgaatttataatacaaggatctttcttcatctgttcctggtctctacccattctcattcatttgcatgtttacttctttttttgaaacggcagattctatgacgagtcccccgaaggtactaatacctgggacccgtctatgaactt

SEQ ID NO: 84198 - DNA, 337 bp, Glycine max
aacaactagtctactgcaggtctatgtgaagatcttggacttctccaaaccgcaaacattttctttgcagatgagcaggcagaattcttcattaactggtcactggacgtgccttcactaatctgacagatgaacatctatctgctgatgtagaagccatacctaccacattttcctctacacatcatgttacatcagatcgaccatccaagatcaagaaatggcctctcttcattgcaccctactttatcttctttggtctgtcaatcatataatgggtcatccctgaatactgctacaagcacgatggacatatatgccttgactcataaacttt

SEQ ID NO: 84199 - DNA, 409 bp, Glycine max
agcttatttgtttctagccacaatttatattatgacatgaactgtcaaaataggtggacgacttactgtgcgcaaagaacatggttgacaaactaaacctgcaacatcatacaaagatgagttatgactaactagctatgtgcacaagctacaacaagagtacttaccaaagaactgtaactatatgttccctcggtgaccctcaaaactcatcgtttgttctatgttcaagaatccacaccactgctccaacaaagaggaaaaaaaatgcagtgacaccccacatatgtggagtaaatggtcgcaagaaagcccaagcatttgacttcaattttttttactgtagcaaccacaactagccccgactctatgtatggtcgagtaaaatccacaatctttgttcggacag

SEQ ID NO: 84200 - DNA, 488 bp, Glycine max
  unsure (1)..(488): unsure at all n locations
tatctcttagctgggaagacaccccatgtcacagcatttacgtcagtttgacccacaatagatgtccagctcccatctttattcacaggcatataagttaaagatggtcgatccttgcgtttatcaacaagtgcgtgcagcctttccttagagcagaagaactctacatatgccttctgatagacatacccaccatggtcaccccagcctaggtcaagattcaaacacanataaatgagttaatgtatctcatatttcaccaccaatatggacaagatatctataccctccgtcataaaatgcactggacattctcatcaggaacatcttaatggtctgatccctcttttgagatgtntcaatcttcttgtatggttacgagagagatagtaatataaagtggtcgagccgcatctactcatactgtccacaattctttaaagaagcctccgcatctgccccagagtcagtagtaagataaattttct

SEQ ID NO: 84201 - DNA, 403 bp, Glycine max
agcttgataagccacagtgaatattttatacatttcgtctacactctttgacttatgcctctttctttgcatggctaatggccttcatgagtggtggctcgccaactttaatttttgcttttaccaaagaaaagaagtgtaaacttacaccgtattttgggatgtattgggtatagaagaagaaaaaaaaaagataaatattaatttaacaaactattagtatcaatctacaatgtttatattaataattaattagaaaaaccttctaaaaaaattattaattagacaaaagaaatgttgcatcattaatagaggcaaaaatattaatagaggcctactcatcttttaattagtaattataaatttcatagtatatgtctgctgcatatataaaaaaaaaaac

SEQ ID NO: 84202 - DNA, 157 bp, Glycine max
agcacaaaacaaaaagcgaagaaacaacacacaaacaacaaccgccgagaaacaggcaagaagcaaaggacacaaccaagaacagagaagaaccaccaagaaaagagagaaacacgcaaaacagaaatcacaggataaagacacggaagagaagaca

SEQ ID NO: 84203 - DNA, 379 bp, Glycine max
agcttgctcaaacacaaacactattatcagctcccttcttctttctcctgcgtggatggtctacacgaacagcaacaaaagctttgtttcttcttttctgcgtttttttttcgcgtggatggtctacgggggagggggggatttaagcacctcaagcaactgaaatcgctgctggggatggcgatttatccacctcaaccaactcgccattgtgcctggcgactccctgctccctctacgcgttgctcagactgcaccctcaaaaacggcctctgctgcctgcaaccctggtaactcccctaccctcaactcgccagttaaactggcgagttcaacctacctgaaagcgctaacatcactggcgagactagtgccagct

SEQ ID NO: 84204 - DNA, 435 bp, Glycine max
  unsure (1)..(435): unsure at all n locations
ctctgacattggtgatcatcttaaattataaacctgcttatgcaatgggcttgaaattttcaatggtgtcttgccctggaaacataggaagaagaaccactaattttgagttcaaattatgcaaaagccaatcttgcatatnaaattgaagcactatatgatatacatcattacctataacctnccaanaatattggaaaagaatagcccctatacccattctggccaggagctcctgaaccattcatactaaagactacaaatattaccttcgtcttatgtcgggatattggtgagcaatgcaatttcttcactagcaaccaattgtgggattgattctcattagatcttangattgatgagttatcaatgcataaggttgggaaaaaatcactacttattctcatgtctctaaactctacagctatatgactc

SEQ ID NO: 84205 - DNA, 434 bp, Glycine max
gctcgcccgggatccttaagcaccgcggctgcagctttaaattaaattctttttctatacttttggtgatcgattacaagcttttaaattcaaattctaaaattccaaattgtttcagaaatcaatttagccactactaatcgattatatcttctggtaatcgattaccagagaggaactatcatatttttgaaaagataattgttcttaaaaaacttttgtaaaatatttcctttagccaaacttgtgcagcatcaattatggaattctttctaagatcttaactaagcacatcgttcttcttgcatttctgaattcttgacttgaatcgcattcatctttggcatcatcaaaacttcataacatatatgcttctataatctccccctttttgatgatgacaataatctgaaatcaagctaaatgatatacca

SEQ ID NO: 84206 - DNA, 345 bp, Glycine max
  unsure (1)..(345): unsure at all n locations
taactgagactgaatgagtgaatgtacatgtttaatagatttgagaaagacaaaatgaacatntcctacattttaaatactttctattagtatattgtaggacatgactcaagcaacctctacttaggacagcgaaggatcttcatggatttgagtggaagtntaagcgtgcatacacatacatatatgggtataatggttntgatatgagcagcanattatagttgcttgttcnattctgaatgaatgaatgaatattgtgatttgcatcaaatgaagaatgctagagacatagtactcatatcttgcttattactggcgaattttcttatccctttcattaat

SEQ ID NO: 84207 - DNA, 400 bp, Glycine max
  unsure (1)..(400): unsure at all n locations
agcttattgatgagtttggttgtgttttgtcctttggcacaactctaaggtccaacaagctctacatagcttctactgccatccagaatcaatcccgcaataacaattacaattagtaactattttttagtgacaatttacgaaaaaaaccaacaaaatctagtttgcattacctggtaagagtagtctccatctagtacataatctgtcagtggctacctaagttgtagctataatctgatagaaaataaacgtataaaaccttgtaaaaccaaggcaaatagtcataggtacaagcccaaggacccctatgtggcacaacatcgccaagaggaatgatatngtgttgccactccacccacgcttaatcacaaagctgatacataatacggggaggtgg

SEQ ID NO: 84208 - DNA, 403 bp, Glycine max
  unsure (1)..(403): unsure at all n locations
agctntaaaatttgaatttttacgttcaataactgctcgtaatcgattaccatatatgtgtaatcgattacacagtgcaaatttaaaattcaaattttaatagctgttgtaaatcatttttggccactggtaatcgattacatcctctggtaatcgattaccagagagtaaatctcttgaaaaagactttttaacttaaatttcttggccaaatcgtttgctacttcaaataggaattcccttcttatttaatatacccttcctaagactctacagactgtcttgatcatccatcttgaatatctttaatttctttgtcttgaataaagctttgagaaacatgtgatcctttggcatcatcaaaacattcagcttgatcctttgtctacaaaagcgataaata

SEQ ID NO: 84209 - DNA, 507 bp, Glycine max
  unsure (1)..(507): unsure at all n locations
atcgcttgaatctgtcatggtcctacgccttanactgtcttttttgctttatcgggtnanacgaaccatntaaaagtctaaattcaacactctgcataactntcttgctgttcaaagaactacatangtctgagttcctcgtcgcaatngaggatacgtaggagcaatagccccactcttgtcgaccctcaaaagaataaaagcgcaaaaagggaaaataaaacaaatntgaagtcatgattntgcacatttgatcaaagggtgtcgttctttgtgactgacacgtgaggtgctaataccttcctcgcacgtaaaaaactctcgaatcttttattcttaaaatatgtagaccccgtttttgtttntctaacattttcctcanatcaatgttgatggcgactccgtgctgtcataccctaatttcgtccgggggaccatatgtttgtaggatacaaccttcgcttgaccgcttcgaggtacttaacacacatcgttaggcaatctgtg

SEQ ID NO: 84210 - DNA, 413 bp, Glycine max
  unsure (1)..(413): unsure at all n locations
agctntgagccaaaagcccgtcgttcatataccacgacccagggtgagaatgtcaatccttgccctcggaacacaacatgaaagaatagagatcatgatgaattcccaatcaaagagtgggagaaagcaaaaaaggaaagaaaattcccgatcaaggatcggaagaaaacagaagaaacatccagaaaggtctttggaccagacaatatctgaaaagtacaaaattgtcaccaagtaaacaaaaaagagaggaaaccacgacccaaagaggccttctccctttgattgccaatcaaaatcttgtgcactagcgactatctcgccccgcactaaacaaaaacagaaaaggagaaggcaaaaacactcgaagccaaaattccccacctaaaaaccattcccaaaataagtgctat

SEQ ID NO: 84211 - DNA, 360 bp, Glycine max
  unsure (1)..(360): unsure at all n locations
atggatatgtatctcaatttgcgagatgttatagacatttatatgaaatttcatattatacacaacgttttgctttatgtggagcctatctatgtacccattagaaaaacaaaaaataaatgttcaaccggagtatgaattctgngcacattgtacaatagatcatactnntcagtgtacttttttgtttacaaaaaaaaaattgtacagtaaaatctcaatcttattggtgcagttttttctattaaaaaaatgaaagtatacatctggttgtcattgaaaacctaatngtatttccgtgtgcatgtcatatatagctttcttgcacaatagaatcttaatttattggtatattattcc

SEQ ID NO: 84212 - DNA, 407 bp, Glycine max
agcttgtggcatataaagctttgttggattcctgccatgtcaaatggttgtcaagcaaacaaatgtgcatttttgtgtagcacctctgctataagccaatgctgatggctggtgaggtccctactgagctacttacattgcctgggttcaagtcctagctacagcttaataagctcttcgatgggtcttaggcccttgtcacaagtgtcgatgcacggatctatatcgagttcatcgatcaaacttgcttggcagacagtcaaggctcatattggatacccttcatccacgctcatgactaaagtaccttcatccgttgtggggtaatgcttggcacgctccctcagggcaagctatttgcatagcattgacaggcttactttgatcttccttgacagttacaatat

SEQ ID NO: 84213 - DNA, 397 bp, Glycine max
agcttgtaatcgattacacacatattgttattgattaccagaggagattttcagaaaatattctcaacagtcacatcttttcatttggttcttgaatggccatcaaaggcctatatatatgtgacttgagacacgaatttgcgaagagttttcagaacaaaaaggtcttatcttcttaaaaagcaaaatcgttttatcctcttacaaattccttggccaaaacacttgtgattcaataaggaattatttgagtgctcaaattgttcaatctatctcattcaagagagatttcttcttctcttcttctttattctgaaaagggaattaagagaccgagggtctcttgttgtaaagaaatctgaacacaaaggaagggttgtccttgtgtggttcagtt

SEQ ID NO: 84214 - DNA, 409 bp, Glycine max
catgcaagcttagtacttggaactcggacttctatttactagtctatcgatgttgggcagaaggtatgcatctttggggcacgccctattcagaccagtataattgattcacatttgccatttttcattatcctttttgaccatgacgacattggcgagctacgtagaatatctggcttctctgatgaacttggcattgaggagctgtgccacctcttctctaaccgatgtagatcattgtggtcccatcttcctcttatattgtgataccacttctgcctgcggacaaatgatgagcttgtggcagataatgtaggggtggattccctacatgtaataatgctatcaagcgaacaagtgcgagatgctgtgtatgacatctactatgtgtctgtgcttatggttggcg

SEQ ID NO: 84215 - DNA, 432 bp, Glycine max
ttaagtcacctgcggcatgcaagcttagctacacacacccctctattatcttatctcaccttcttgagaagcttccttgagaagattcctaaagaagctacagcttagctacacaccccccctataatagataagctcacccccatgccaaaatacatgaaaatataaaaatagtccctactacaaagactactcaaaatgccctgaaatacaaggctaaaaccctatactactagaatggccaaaatacaaggcccaaaagaaggaaaaacctattctaatatttacaaagaagagaggacccaaccttggtccaggggttcatgagaaccccaaggccttctttagcagctctagcccaatcctcttggagtcttctatccaatacccttgggggggaggagtgcatcaattagtatgtatttggtcatg

SEQ ID NO: 84216 - DNA, 404 bp, Glycine max
  unsure (1)..(404): unsure at all n locations
gtgtcaagtctgtattgttgtttaatcaaacacggccgttagctattatgcttaaattttgccaattcacatccagtatattattgtgatcattatgtaagtaaaatttaagacgaatgggacattcatgaggattcaaactaatagtttttgtatttacctatattagaccttaattaaagcagttgtttaatcaactaaaacagagaaccaattaatttttaaattctcaaatattggaggcagagcagcaacttctcaaatatctggagagggagttatatttctgttgtatcataaagtgtttttgattttactgtgtatcaaattcacactgatactggtgcagagattgattgtctagctaaaaagttnttgtatgctgttttaaaaatagtgggatt

SEQ ID NO: 84217 - DNA, 403 bp, Glycine max
agctttgagcataatcaaacgatatttatcttttactcggatgtccgattgtgtcccgcactatatcgagaccctccaaattcagaatagaaggtctgagcaaaatcaatcgacaataacattttactcgggtgtccgattgtctcccgttgtatattgagacgcttgatattcaaaatagaagctctgagcaaaatctaacgacaataaccttttactcggatgtccgattgtgtcccgctgtatatcgagacgctcgaaactcataacagaagctctgggaaaaatcaatcgacaataactttttactcggatgtccgattgtgtcctgtagcatatcgagacgcttgaaattcagaatagaagctctgagcaaaatcaaacgagaattactttttgctcg

SEQ ID NO: 84218 - DNA, 466 bp, Glycine max
  unsure (1)..(466): unsure at all n locations
gcttatgctaacttgttgganaacttcatactggtgtcaagacatacaagtgatcttgttacanatcttctacacttggagtgatcacctgcagtcctcttgaacccttaccacccactctgtcatcatgccgacactcangaagcccaacagctntagccttctctaagtattctgaacaaaattcaatggcttcttatgcaatgtacctctcaacaatagatgcttctggatgatatagattctttgtataccctcttaagatcttcatgtatcgctcaaccgggtacatccaccgtagataaacaggaccacaacatttgatttctctgaccagatgcacaatcaagtgaatcatgatgtcaaagaaagcagggggaaaatacatctncaactggcacagtataattgcggccgtcatttcaactcataaacattactggatcaatactttgtacaatagcat

SEQ ID NO: 84219 - DNA, 406 bp, Glycine max
  unsure (1)..(406): unsure at all n locations
agcttacccattctgttntattgtttttatgatgatgcttgagatgtttatgtgctgaaattgcttatggaaaactgttagagatgaagggtagagttaacctagggttagaaggtgagagtatggtgttgtgagtggaaaaagagtgagactttgagagttggaaggtcaaatctggatttagtggtatttggaggttagagtgagttgatcctagcttgaaatgccatttatgacttatgagaaagtttgggctgtgctagagagaaaaataaatgaccaaagtgaacaagagccatttctagggtaaatttaggtgttgaggagtccaattttgatcccggcgaaatttaggtgtaaatccagtttgaacaagtttaaattgatgttatagactggtgtgagg

SEQ ID NO: 84220 - DNA, 383 bp, Glycine max
  unsure (1)..(383): unsure at all n locations
atacacttagcatatatatgatctatggatcatacgacctatcgctattgtaataaagctagtgggtcatcttgcacacacatcacacagtaaactagttatgataacaacaacctatgaaatatatatggatacagcatgctctattcatgatgggcaaaataaagccttggcaaccaacagcatacatttatttaaggatcctatgagagcaggttacctgtatttctctgacgagaagtctctctatgacattgaacgagtcctcaatctccatccagatagtctataaaaagatgtgtatgcncgtttattcttgctgtcacataatctatctgtcttgttcgcacagcacccttcttgaaccatggagaagttggtca

SEQ ID NO: 84221 - DNA, 406 bp, Glycine max
agcttgatcaaaacaattatctatttattccaatccactcaaatcatacaattgcttattcaaatcattctcaaacattcatttcatgcaaaacaatccactgcatatcattttcaatcaattcactattcaaacacgctttatgtacaagcaaacaactcaaagtgctgaaatttaaataactgaaattaaaataactgaaatatgacaacgaaatcagctggaaatataaggtgtttaaccttcaccaaaacatcttcaatgactccatatggccttgtgatggagcggtcaactaactggagggtcatgcgtgtgggcattatctctatctctccaagtcgctggcacatggaaagaggcattaaatcgatactagctcccaagtctatgagagctttgccta

SEQ ID NO: 84222 - DNA, 402 bp, Glycine max
  unsure (1)..(402): unsure at all n locations
agcttctatataagctgaacctttttatcataaacacaagntgagttttattcagaaaattagagtttatctcttttatcttacggagagcgattctcctaaattcttgagtgattcaagaacaccctggctgtatcaaaggactttcacaacctttgtgtgttgccctcgctggaaagagagattctttccttcctttcatcttcacccttgttctttcaaatcacaattccagaaaattcacccctgcccagaattatctcgtggccataactcccattttacgcactcaaattaagtgattcttgagcctaaattgaatttcaaaacgatacctttcacctcgttttggaatcacctcatttggagccctgtagcttcagntattgccatttctatatt

SEQ ID NO: 84223 - DNA, 404 bp, Glycine max
  unsure (1)..(404): unsure at all n locations
atatcagtcgtggctatataacgaccgatgtcaggtatttttgtttcaattcaatccctgaataatntttggatattgtacaatangaaatgttcgatcggcgtcattacgtgatgcttggctttntatttagacctgctggatcggtcatctttcctggccgacatcaactatcatatttttttatcactgtcggtgaataatgtatttggccgagtgggctgtgttttctaccgataatgaaacacgatgtcgcgaacacactcgtgactcgccgaaaacaagtcactacctgtagtttggtgcacaccaacacaaactcctctaccgaaaactatatcggctgcgttggaatgaattcacatgtcacgaaatatatcgggcagtacgacatgcgtgtgttt

SEQ ID NO: 84224 - DNA, 362 bp, Glycine max
gatatggggcccactcaaagtgagaacgcctaaccctctaatggtgaaggcgtgcagccctttgaagttcaagacgtgttcccttttgaaggcgagggagtgtagtcctatgatggcgaggatgtgcaatcctctaaaagtgagggcatgtccccctttgaaaatgggggacatgtagtcctctgatggcgaggacgtgtagtcctctaaaggcgaggacgttagtcctctgaaggtgaggacgtgtagtcctctgaaggtgaggacgtgtaatcctctgaaggcgagggcgtgcggccctctgaaggtgaggacgtgtagtcctctaaaggtgaggacgtgtagtcctctgaaggtgagga

SEQ ID NO: 84225 - DNA, 293 bp, Glycine max
  unsure (1)..(293): unsure at all n locations
aagagaaatctcaaagagaaacgtccgattgagtttttttggttattttactacaagatattctttgattattatattattattttacctctctttgggttccaacgtgggtacggcatgaccaaacgatcggatttcattntaacagaaattaacggatattagaaatcaaatgatcggtggaaatntattttatttnttgattacgtgagacaatgacttatgtaaatgactaaagcacgtcaaaagcgggtatggaaagtaaatgaaacgagaataanagtacgcgaaac

SEQ ID NO: 84226 - DNA, 401 bp, Glycine max
agctgtgatgcaacatttgtatatgttaatgaaacaacgagatgatgcactccatgagaggttggatcaaatggagaatagagatcataatgaacaagaaaggaggagaagagggaatgatggtgttcctagacaaaaccgaattgatggtattaaactcaacattcctccatttaaaggaaagaatgatccggaggcctacttggagtgggagacgaaaatagagcatgttttctcatgctacaactatgaggaggaccacaaggtgaagcttgccgccacggagttttccgactatgctcttgtgtggtggaacaagctaccaaaggagagagcaagaaatgaagagccaatggttgatacatggacagagatgaaaaagatcatgaggaagcggtatg

SEQ ID NO: 84227 - DNA, 273 bp, Glycine max
actatatctagacgctcgaaattgaacaacgaaagctctcgagaaattcatatggtcataactggtcacacggaagtccgatcatgcgcataatacatcgagacgctcgaaattgaacaatgaatgctctcgagaaattctaatggtcataactatcgacacacacaaatggttacagattgtcacgcggaagtacgatagatgcgcataatacattgacacgctcgatattgaacagccaatgctctcgaacattcatatggtcataactct

SEQ ID NO: 84228 - DNA, 408 bp, Glycine max
agcttcattaagaggcttctagctttctccagacatcttctcaaagatcccaacggtcagatcatggaaaagtgtcttgtgaagttgcagagcaaatttcgagaagatccaacggttaatgaaggctgggcagcgtttttaccgaggcagcttcatgtagctttctctagaagcttcattaagaggcttcctctagaagcttcctcgtgacttcttcgagaagctttctcaagaggcttctttgagaagctacatccttatctatccacccctctattaactaaattaacttccttaaaaattattacggatgaaaataacgcaacaaataatcaaacatcaaacataattactaataatatatatatatatatatatatatatatatatatatatatatatatatat

SEQ ID NO: 84229 - DNA, 400 bp, Glycine max
  unsure (1)..(400): unsure at all n locations
agcttgcttgtggagcttctatattgctggatctttgagcttcaatgaggtccttcaatggtgattattcaccatggagatgcaccggaagacaaaggagaagaggagaggggagacaccatccactagggaataagccaaggaagaatgagcttcaccaccaagaattgccttggatcacaagcttgaagaggatgctttaatggaggaaaagaaagagagaaggggggagcacgaaattgaaggaataaaagagggagagaagtggaactttgaagtgtatctcataagacattcattcatcaaagttacaacgagtgttacacatgcttctatttatagactaggcagctttcttgagacgctnttttgagaaaacgtccttgagaagctagagctt

SEQ ID NO: 84230 - DNA, 406 bp, Glycine max
agcttattctatgtttattctattatattattatcttacttttatatcatattttatcttattttaatcaccaaaagaatatgtttgatatgagaaaagtttttttatgtctgaaaattataaaaatagatatcaaaccagattttcaatgtaggattcctatgaaactaaagacttctctaccaagccaaacgcccctaaatatagttatatgcattaattataggacgtagttatatgcattaattatcagcagtcaagattatcaagagttttttctttgtaggttttttaagcaaatgccaaccacccgcttcattattagtaattggctccattttatatgggaaaattcattgaaagctaacataaaagtaacattgactccatgcattcgtgacattta

SEQ ID NO: 84231 - DNA, 406 bp, Glycine max
  unsure (1)..(406): unsure at all n locations
agcttgtattntcttaaatgatcaaatttctttcgcaggtcaacaacatgtgtctacctttgttctagacttagtgataatataatccacatacacttcaatctccttatgcataatgtcatgcaataaagttaccattgccctctaatatgtttccctaacattttccaatccgaaatacactactctatagcaaaaagttccccacaacgtgacgaatttggtcttttccatgccttcaggcactatcttaatttaattgtatatggagaacccatccatgaaggaaaataaggaatgatgggttgtgttatctaccaacatatctatgtgaggcaatgggaaatcatccatgaggctaactttattcagatcacaataatcaacacacattctgaccttttca

SEQ ID NO: 84232 - DNA, 409 bp, Glycine max
tgcaagcttggagacaaaatcatgaaatttgggttgtttcaatgctttggtgagaaaatctgccacttgatcacttgttgaaactggtagtagctttagagtgcccttcaaaagcttctctcgcacaagatggcaatcaatttccaagtgttttgtgcgttcgtgaaaaaccggatttgaggcaatgtggactgcgctttggttgtcacagtaaaaagttggagttctggtaagctgaactctcaaatctgcaaaaagatacaacagccattgcaactcacaagcagctgaaaacagagccctgtactctgcttctgaagatgatctggacacagttgcttgctttttagcacgccatgacactaaagatttgcctatgaagaaacaatatccagatatggattttcta

SEQ ID NO: 84233 - DNA, 262 bp, Glycine max
taaacttgcaacgtgttatttttaaaaataaccacatattttattgttgtacttcaattactaaatttataaattttacttgcttctgtttgataatatacttaaatgatgataatttgaactatttatgaactcttataaaaagcaatttgtcattaaaaaccaattaaacatctcaaaaatgaaactatttagtcgtcctacacaaaatataactatgttctatatgtcacctaagattagttacgtgtcattaacaaac

SEQ ID NO: 84234 - DNA, 408 bp, Glycine max
gctttcgattcattctatgtacccatggtggtccacattgggttttgaatatgtctattctcatttcatttactttcttatacccccttttgacgtgcttaagccattttacttaagtcatttctcgcttaacctaaaaataaaataaatttccaccgatcgtttgaattgtattatccgtaaacttcggttaaaatgaattccgaccgttcggtcgtgccgtaaccacgttggaaatcaaaaaaagaggtcaaaaataatataataataaaaaaaaaaacatcttttaggtaaaataaagcggaaaatcaatcggacgttttctctttgggatttctcgttcttaaccgaattgactaataactaaagtgaaactaaggttaaaatcaactcgcctagtcaagctcg

SEQ ID NO: 84235 - DNA, 227 bp, Glycine max
  unsure (1)..(227): unsure at all n locations
gtgatattcctttggattggactgatantctgcacacaatcaaacgcttaacatgatatgcagtctactagcaattatgtagagaagtgatccaatcatacctcagtattntgatccatccattgacttaccttctcatctaaatcaanggaagtgatgtagccataggagtatatgcttctttgcaatnttccatgccaagattctttatcagttctatgcaatat

SEQ ID NO: 84236 - DNA, 434 bp, Glycine max
  unsure (1)..(434): unsure at all n locations
tgcctctaacagcatctttgtcaatgattttcttcatgcctcttaagtgcagatgtccaaatctttgatgccatattctgacttcatcttctntggagaatagacatgtggaggagtagctggtttcttgatggtgtcatangtaacacgtgtcctttgatctcctgcccttcattaggacttcactcttctcatttgtcaccaagcattctgactttgtgaagtttacattgaatccttcatcacacaactgactgatgctgatcaggtttgcagtcagtcccttcaccagcagtacttttgtcagactaagaagtccatcatggactagcttnntccattccatgatctttcctttagagccatctccanatgtcacatagctagtggagccggctcaatgttaccacgaattctttactcctgtcatgtgt

SEQ ID NO: 84237 - DNA, 401 bp, Glycine max
agctttgaaataaagttccacaacttattattttgatttgtagcctcaaaacatgctataaattcagctttcatggtagatgcaacaacaattgatgcatacagaatcgcttccatttgttttcgttccatatcatttctaggacattgtgtgagactaaatttgtctcttttctaaattggaataggtgatgaatacctttccatcatgaatctctctagtactttattgatatgttttttgagataagcctaacaatccttatgatctattatggaatatttatatccatatcacatagcttgcctctctctttttcttttcctccattgaagcttcctctctaaacttcttatccaaggcaccctcttggtggtgaagctccttctttcatggcttat

SEQ ID NO: 84238 - DNA, 405 bp, Glycine max
agcttgcttctacactaagtctattcttattatagtaaaaatgcaagtaagtaagattgacagtagtaggtcaagatattgggtctttctaacaaaccagctgatgtatataaagatgtttctctaatcaatcatgtttttgtgttctatgttgtagcgtaaattactaaacctcgatccctagttagactgaatcaatccaagcttcgtcctcaaatccctcttgttggactatgcttaatttagacagccctcctaggtttagactaacttaaactaagcttcatcctcagatccctcttgttggactagacttagcttaaatagcttacgaaagtttagactaatttagcctaagctttgtcctcagatcccgcttgttggactagacttagaccaaacaac

SEQ ID NO: 84239 - DNA, 398 bp, Glycine max
agctagttacatatagtttcaactttgtgtcctttaagagacttggtaaaaatatctgccaattgatcattggaaccaacaaaatcagtcgtgatttcctcaaacaacaccttttctcttactaattgataatctatctttgtgtttagtctgttcatggaagaccatattagatgcaacttgaagagcaacttgattgtcacaaataagcttagtgtcctgagtgtcagcaaactgtatgcagctgctaccatggcacggtattcagctttggtgcagaatctagcaactatattttgcttcttgcttctccaggagatcgaattctctccaagcaaaacacaataaccagaggtagatctcctgtctgatggtgatcttaacaaccaattttggca

SEQ ID NO: 84240 - DNA, 184 bp, Glycine max
  unsure (1)..(184): unsure at all n locations
cttactacaccaaatccttgcaagttntttctctatctncctaatagcaagggtctcttacatcccacataaacctncaaaacaaacgaaacctaacaataaaaattaaaaaaaaaaaaaaaaaacaaactagcctccaaatccgtagagggttcttccttgtctcttgagagcataaaccaca

SEQ ID NO: 84241 - DNA, 398 bp, Glycine max
agcttcttatccaaggctcatctttgtggtgaagctccttcttccatggcttattccctagtggatggcgcctcctctcacctcttctcctttgtcttccgctgcatctccatggtggaaaatcaccattaaaggacctcattgaagctcaaagatccagcctccatagaagccccacaagcaagcttccatcaagtggtaatcagagcacaagagcttcaactaggtgctccgtaaacctccattaattttttttgctttaccttctcttccattgttgtttcttcatttttttctccatgtatctcctcacatgtcttgtgctaaatgtttttaacatgattctttaaagtttccaccgattaaacttgctatataagctagaattgattttctat

SEQ ID NO: 84242 - DNA, 401 bp, Glycine max
agcttctcgaggaaacctcttattttatcttctcaaggaagttgtccacaactgtctcggtaaaagtgctctcctgctttcgttaaccgttggatcttctcgacatttggtctagagattcatgggacagatttccatgatttgaccgttgcgatctacgatatgtcttctggtgtgtgtgaaacgcttcttttcctgagagcataatgcttcagcctttgtatttcgtgtagccttggaaaacagccattcttttctccttctttcttccaaaaccatttccaacgtcccaagcttcttctccatcacccacagccaccagtatccaccataaaccgccattgttctccgttgaaaccccacactgagaggaacccttcaaccgaagcggaatcttccaa

SEQ ID NO: 84243 - DNA, 221 bp, Glycine max
aggccatatctactgccaaccggagggctaaggggatttctttttgttaatgagtagagctagagctatgctccactttgacatatactgagtatgctctgtctttgacgatattgcaaataacctgctaaaaattcgtcctgtaattagaacttgtaagaatattattggagagtataatgaaaagtactaccccacatatgtgtaaaaaaaaaaatatg

SEQ ID NO: 84244 - DNA, 402 bp, Glycine max
  unsure (1)..(402): unsure at all n locations
agctttgatactttgtgaattgagtttctttagaattctcaggcgggtagtcctttgaacacttctgtataaggaaatgggaagaatcaaaagaattctcagactgtgtcattttgaattctttgacaagggagaagggagacacaaaaaaattcaggcggttagtccttcattcttttggaaaagggagaagagagacacaaaaagaattcacgcggttagtccttggcgaattctttttggcaaagggagaagagatgaaaaagaatgaatagcacaagttttcaaggtttaaaaaaccagaagactttggaaagcttntggcacaaaaaagaagaagaagttcacagagattcaacgctcgtgaaggattgtgtaagattgatcggaaaagtatattga

SEQ ID NO: 84245 - DNA, 214 bp, Glycine max
  unsure (1)..(214): unsure at all n locations
atatatactggtcttttctatgaactttcgaggctttgctctgaagagaagaacaaattcctcctgacattttcttcttctcatatgatgctgngttgaggacactttatagaaagactcgttacgtataataccctttaaacacctctataaagagtatttagaacttcattaccatactttagctatatatactaatatagcatctagcaca

SEQ ID NO: 84246 - DNA, 417 bp, Glycine max
ggatcataagcaccgctgctgcagcttggatagggacctagtatcttttgttacttagcaagttatctaagtgtctatggtggtaatattaaagagtctaccatcgaccacagccagtttggcactaacagcttctacatggtgtggaagttctgtgtttgaaaaagaaacgtggctgtttttgatagccgagataatggagtagagttacagggacaatactcaatgtaccgaacatctcttgtaagtttccggctgggttatgatgttattttgccagtgctcctgataatgaaactgtcacataatgaatgcttgtgatgggacatatgttactcttcacattatattttgacagagctgctgtgtgacttgtaaatgggaaccatgatctactcgtggacgttatttgcattt

SEQ ID NO: 84247 - DNA, 407 bp, Glycine max
  unsure (1)..(407): unsure at all n locations
agcttatataggcaagcaagccttttgtctttttatntgccaaagatgtctgcagacgtggaggattacacaacatattctgcctctgagttgatggagaggattgataacatagactttggttatttttcttggattgttcaaccctcttcttccctccttgttgttatgcaatttatttctgacatatatcttaaactgggctcagatgactcttcccctctgatctatatatttcagcctatggctcttcgaaggcttgtttacttgaataagcagattaaattgttcaagtatttaaaaaagagacattatttgcaaaagaagtcttatagatctcacatcaagacactgaaagaagaggcggctgaccttactaattttatattggagtatttatcatgtgt

SEQ ID NO: 84248 - DNA, 221 bp, Glycine max
taatataattatgtttgatatataatatctataccgcacacagactctatattgccttacaaaaaaacccgtatctctcgctcatgtatgctccaaacttggggggggaaagtaaataatcacgattcacaatgaaattatttaaaattaaagtcccagatatgagaaatcatacttcacagctagaattcctgttgctggagaacatctgttaaaaaagt

SEQ ID NO: 84249 - DNA, 404 bp, Glycine max
  unsure (1)..(404): unsure at all n locations
agctagcgatatttatactatattgtttgtgtcttcgnctatctctacctgtgtaaaaatgtgataattcactcctcatgtgttgtttatatttggatcatgtgatgatcttaaaccttgtgtttgtgagagcaaatgactaggtgaattactttaagaaaccttgtgatggaggactccgagacacaatattttgatagaatgtaacattggaacaagagtttttattttaattgcatgacgtatcaaacatgtcattttactttatttgataaacttgaacagtcttgttttaagtcataaatatttctaagacattttatttggtaatagtgaaccgaatgtgagcattacccacgtcgattgatntacgattntattgaataacattgatttaattagat

SEQ ID NO: 84250 - DNA, 174 bp, Glycine max
cgatgactcgtctatgctttatcttccattctatatgtagcaaagtcattgatccagtcatgtttgatgagttggaaaatgaagccgcaattatactgtgccagttggagatgattttccccctgctttcgttgacatcatgattcacttgattgtgcatctggtcagagaaat

SEQ ID NO: 84251 - DNA, 423 bp, Glycine max
  unsure (1)..(423): unsure at all n locations
gatcttaagcaccgcagctgcaagcttcattattctatgcactcttattggccacattgngtttcgtgcattttgattctcgttttgtatactttttataccccctgttgacgtgcttaagccattttacttaagtcatttctcgcttaacttaaaaataaaataaaattccaccaaacgtttgaattgcattatccattaacttcggtcaaaataaattccgaccgttcggtcatgccgtaaccacgttggaaatcaaaaaaagaggtaaaaataatataataatcaaaaaaacatcttttagtaaaataaagcgaaaaatcaatcggacgttttttctctttgggatttctcattcttaatcgaattgattaataactaaagtgaaactaaggctaaaatcaactcgcctagtcaagctcg

SEQ ID NO: 84252 - DNA, 250 bp, Glycine max
  unsure (1)..(250): unsure at all n locations
ttcatatcacaaatacacatgaacccaccatccccagtngcccaccttcaactgagctcacggactctcacgtatcccttatcctcgttcctctctgcaccgggtgcccatcaatcccttctagcgttcacactaatcaagcaattcaatattcaaacattatgaactatctcaaaccaagaatcagggcagaagcagaaactctgccaaaacacattccataccacatctttccttactcaaatacccc

SEQ ID NO: 84253 - DNA, 377 bp, Glycine max
aatgaacagcgcctggcaatgacattcatgggtctccgaataaaagtggagaatggagaattggcgtatagagctagggcatcacattcgcggggctccagactcgaaggtggaggacacatgaacagcgctatgcaatgaccttcatggggctccaaaaaaaagtggagaatggaggattgcactaaagggtccacacttaggcaatcatgaagcatagctcaaaacacgaaggtggaggacacatgaacagcgctaggcaatgacattcatggggctccgaataaaagtggagaatggagaattggcgaacaacgctaggcattgacattcttggggctccagactccaaggtggaggacacatgaacagcgcta

SEQ ID NO: 84254 - DNA, 407 bp, Glycine max
  unsure (1)..(407): unsure at all n locations
agcttctatataagctgaaccattttatcaatttagacgagtngagttttattcaaaaaattagagtttatctcttttatcttagtgagagtgattctcctaaattcttgagtgattcaagaacaccctggctgtatcaaaggactttcacaacctttgtgtgttgccctcgctggaaagagtgattctttccttcctttcatcatcacccttgttctttaaaccataattccagaaaatccacctctgcccagaattatctcgtggccataactcccattttacgcactcaaattaagtgattcttgagcctaaattgaatttcaaaatgagacctttcacctcgttttggaatcacctcatttggagccctgtagcttcagttattgtcatttctatatttctgt

SEQ ID NO: 84255 - DNA, 182 bp, Glycine max
atgttatctatgggttatatgctaaattactgcgatttattaaaaacacgtcttaataataacctccatgaaggagaacttaagggccaacctaaaacctatataactctcattcatggataattagaaacgcatcttgacaatttaaagtgtcttttatcgtttgttgtatataaagaaaa

SEQ ID NO: 84256 - DNA, 367 bp, Glycine max
  unsure (1)..(367): unsure at all n locations
agctagaataacagttccttatcttcattcaggnactagagtatgtgtacttttttgcctggatttggctacgtgcctcaacagtattcaattgcaatagtctatgtttgtctttcagcaaaaaattgcttcagttgagaaagagggatactgcggaaaanangtcaatccacgggttttcacttctgaaatccacaattttaagtgttggggggtgtagtttaaaatggtccaaatccattgagaagaactcaaagctagctcctgaggttagtttggtgtattatagtagtgtgcttttccatgaagtttccttttaagttaggcataatttatattaaggtataaaatagactctagctttgat

SEQ ID NO: 84257 - DNA, 363 bp, Glycine max
atatctcctctcccatgaggcctcttgactgcagatccttcactttgggcgatcttgaaaattatgctcttctaccaggtctatactgcttcatccgagctatcaaattgactgatttgctaagaagcaaccatagtcttttgaaatggaccggacggtccaattatatacctgtacactgcccatagacttttgaaaatgctacatttattttcgatcccttttctacaacatctcgatattcttgggaagagcctttgtctttaaatcaccctatcttcaagatgacagtcggacttgccacttcctgcacaagctatctgctctcatgcctaccttctttatacaatttcttcacataag

SEQ ID NO: 84258 - DNA, 407 bp, Glycine max
agcttatccagagacaaaattttttctgtgtttaacataccaaacatgcaagcaacctttcctttgaatcaaaaccaagaagcaacaaccacatccaagcaccaaaaactgttgaacatgaatattaatttgaaaatgcagaaaaacaaaattatgttacataccatgcaacaaagcagagagactcccctgagtgtagtaatcatataccatgagtttctcatctttggaatagtaataccccttcagctcaacaacattctcatgtttaagattcccaacaacctccatgagctgctcaaagtccttctttccaacagccacctccttcaacctcttcacaacaacagtggtagcatcctccagcgcagccttatacgcagcaccaaacgtgcccttccccaaaa

SEQ ID NO: 84259 - DNA, 298 bp, Glycine max
agataatattattaaaatactatatctttaagaaatatgtttatgtacgacaataatttagaccctggctaaatctttaaattaaattgattatactaaaatattatattatattatagagctcgtatgcaatatattaaaataatgtctgggaaaaataatattaacatattgaaatgagaagtactattttataatactggtataaatgacgataaactcgaaagcatctaacaaatggcgctactataaggaattttaatatctaaggaattaattattagagattttattaaat

SEQ ID NO: 84260 - DNA, 311 bp, Glycine max
gtatcggaaaaaaaaatacagagatgtaaaagtcttaaaattgaaaactaaaactttaaatatgggtgtcttgaatctatgagacattttgatatgtacaaaaaccacttagagttcacgtaaacatcttaattactttgagaaaacacattacctaagcggcccatataatagggtcgcctaaaacactttgaaatcatggttagcgctacgcatatatataagtcaaacccataaaatgtataatgtaaatgagaggcgttaattagaacaatcctccaataagctgcacttgcttatatttccttcta

SEQ ID NO: 84261 - DNA, 407 bp, Glycine max
agctatggaccttctttatttgatttcttctccacctattgcactatcatatctccattctgcaatcagccacacaaatttcatttgctaatccataaagaagaagaaaaccaatcaagtgaaagtactgatttcacagaaaaataacaatctttattcaataatcatgagaaagagcagaaaaggaatcgctttgggcaacatgcaaagggttggaagaaacacacagaacactctccacccatccaataacaaaatccactcaacatgatagagaatcataaaaacttttaggaaagaatagttacttgttttttttttttcaaagagtattatcctaaaaaagataagcgattttttttttcaatttagaaggggcagggtgcaaatacaagggtgtattatga

SEQ ID NO: 84262 - DNA, 307 bp, Glycine max
  unsure (1)..(307): unsure at all n locations
catgaaggatgagatttactgatcacctgattcggatgcaatcataggaatcactangangcatcttggaacagcacatctgcaaagatgctgaaaattataggaaaaaatgacctgtgtaatgcattcactctcngactaaacttccaacaccatcatactatacacatctgttttgttgttgattatacactagcgattatagggatacttatgatttccagtcatgaataatgaaagacaaccttgcatactgtcaagtctgcagatataaatctaacgacttctgcaatctaccaacctgctg

SEQ ID NO: 84263 - DNA, 395 bp, Glycine max
  unsure (1)..(395): unsure at all n locations
agcttgtatagntccccaatttatttttattttgtagnggatttttaaaataaatcttattttatggttaactctatctctagaacatttccattggatttaatgatgaaatttgtgcattttcaggtgaaaaagaggctaattttttaattgcaaaatgtagcaattgggctaagctcatatccaccgctaagcacaacttcagcacgcttagcacaaaggagaatctggcagagcatcagcatcaaagtcgcgcgctaagcgcgagatcagtgcgctaattgtagcaggtgccttcaaccatgctaagcttgagactggcgctaagcccaatttcacttacttgcgctaagcgcaatgtcccgatttaagagcctatttaaagtctatcttct

SEQ ID NO: 84264 - DNA, 408 bp, Glycine max
agcttcttatccaaggaactctcttggttgtgaatctccttcttccatggcttattccctagtggatggcgcctcctctcacctcttctcctttatcttccgctgcatctccatggtgtaaaatcaccattgaaggacctcattgaagctcaaagatctagcctccatagaagcttgacaatcaagcttacatcataattcttagagaaaaagattctaagctatatcttgagattgagacaaatgctagagaaaaagctactcttctcaagaactctcaggagtttgaaaaaaaactaaaagatcttcaaaataatttgaaggagctgaatgaacgtcatgattatcaaaaggaaaaaagatatgatctatggagagaatgtgcacaataacacacagattataaag

SEQ ID NO: 84265 - DNA, 313 bp, Glycine max
  unsure (1)..(313): unsure at all n locations
ttcattcataaactataatataatgtcagataatttagagagtcatccaagatnactaaattagaaagtaacataccctatagtgtttcaanacatagtcataagacatcanaacataaaacaaatcatttgtctaagtcactagcatctagaagtcctaattctcttctaatggtgtagaaagaatctttgtgtagtgggtntgtgaagatgtctacgaagttggttttggatctacaaattctagaacacnagtcacctttatgacatgatctctaagaaaatgatgcctaacttctatgtgcttagttct

SEQ ID NO: 84266 - DNA, 394 bp, Glycine max
  unsure (1)..(394): unsure at all n locations
agctngatatattatggnacttgtttatattatacttgctattagaggatctatcgtcatgactcatatattttgtttcttgttatgactaatgttgggttaaatgaaccaagtggaagaatgttggaattttcaattctttttgcacgttttgttttttttgtttttcagttgttatttctatgggaagtgggttcttgtatataacccattttttgtccacattctatccacattcacgaacaacccatgatcttttccatctcttcagataaaatacatcatcaagtttgagtgaatgaaagtatgaaaaactaaaattgtgaagactgaagaaggtcaatatcgatggctagagataagtacctcataaaactatttttcttctctactt

SEQ ID NO: 84267 - DNA, 134 bp, Glycine max
ctcatctgtaattgaagtgtatgttctgccttatgagctgtatacaggtttttgctataccgccttaaatgagttgtacaatctcctccttgcggtattttttaccagttttctgtttcatctaaattgtatga

SEQ ID NO: 84268 - DNA, 410 bp, Glycine max
  unsure (1)..(410): unsure at all n locations
agctntaagaacagaagttgtgtctccatgatttttcccagctcttctcttgcgcaagatttcctctcttatatctacaattttctccttataaccctgtatgataaaaattaaaaaagtaaaaagaggtcaatcatatgggaaaagatttgagaaggggaaatgaacaaccatcaacaattcaacatcccttacctgtttcagttcatgctttaattcttgtcttactcgctccatgagggacctctcgctctctgtaggaacaagagggccaaaccccatgccatctgccccatcgaaactactatcaaagagattggcatcactatctacttggtcatcttcatcatcagacattgttgcccctgtaccttctccaggtgaaactcctggttatcatgcagcatgtg

SEQ ID NO: 84269 - DNA, 405 bp, Glycine max
agcttgagatgaggaagtgttgaatggtgtaacttcctgcttttattgttgaccacagagtggtacctggagatatgtcgcgggggtcaagagaccttggggacgtcaggtggggtgctattgcccaaaaccaagcttgaccaatcccgacccaacccgggcataatcggtcagtgagaacctgtgatgtacctaagcaggcgagctcctggcagtcaacagataaaaggaaaacaagaccacaaagcaaggaggcttgtgatggctggccacctgtgaaacttgattgatatgtgagatatggtctctggtaatcgattactaagggtgggtaatcgattacaacgcttaaaattgaagacaggaggctaacatggtctctggtaatcgattaccacggggtgt

SEQ ID NO: 84270 - DNA, 404 bp, Glycine max
  unsure (1)..(404): unsure at all n locations
ctgaagcttactcctgagatgagaattatagcttanctacacaccccctataatagctaagctcacccccatgacaaaatacatgaaaatacaaaaaaaatccctactacaaagactactcaaaatgccttgaaatacaaggctaaaaccctatactactagaatggccaaaatacaaggcccaaacgaaggaaaaacctattcaaatatttacaatgataagcgggctcaaacttagcccatgggctcaaaatctaccctaagcctcatgagaaccctagggccttcccttggatctctggcccaatctacttggagtcttctatccaatgcccttgcggggtaggattgcatcacgtcctcacctttagagggctgcacgccttcgcctttagaggactaca

SEQ ID NO: 84271 - DNA, 268 bp, Glycine max
  unsure (1)..(268): unsure at all n locations
atctatctacctaataaactattacacaagcaatgcanatcncagcccattattaagtgcaaagtttgactccaccccaattgaccttgaatggagaattagccaccttattctgaaaaatgaagtattttttactttcagaatattactgcttatttgagtctgtaggctattgcctgacaatataagtagtaaaatcaaaataaaacactataataaccattattgctaaaacaactgattatggaaaatagagtcataaagcaat

SEQ ID NO: 84272 - DNA, 371 bp, Glycine max
accaagtgtcatgatttctatattaccaattttgctagctgttgatgttgcatcataattttgctatgtcatctacctttggtctcatctctttaccttacaattcaggcaattctatcattaccctttttcaatatatagaattggcaacatgcaaacatatctaatccaggaaattccaccactaatagtcagcctataatccataaccaatgaagtcccccatctccaatttattccatcttctaattttattgtagtttctgcagatttaaaataagcgtttggttcttcgctttaacataaatctattgtttagtttataattcacccaattctgcctttagtcattttcaacatgcagaactatc

SEQ ID NO: 84273 - DNA, 352 bp, Glycine max
  unsure (1)..(352): unsure at all n locations
cactataaattctttttgccttagcccatgttccatccagaacaatcaagttcttcacctcaaaacctatagcatccaggtcactaacatcaacagccatttcagagggaaatagtagtaccgatccaggacgaacctcaagctcaaattcttcacattcttgcaattcttcatccctattcagttgcttcctttgaaacttcttcaccaaaaacccttttgagagtgcttcacaagcttccgggtacgccaaaatattgtcaaagcttaactcgggggattgacattgtgcttgagtcatccaaatatgagacanagagctaatggcaccatatttgccaatggtaacagt

SEQ ID NO: 84274 - DNA, 281 bp, Glycine max
  unsure (1)..(281): unsure at all n locations
gacataaccacttnagtagctacctacttccacaagaaaggaagtgtcagtgggtcctcattntcaaccaatccatccagccccatctgcagcattccgttgtaatgaaggtnntggtgtgttgcatcanaaaccaatactagaccactgggcttatctttntccgtttctgagcatgaatactcattcacagcatcaaaatgcacagatcctgatggagatngcattggacaggtgatgctagatngcgccatactcaactctggactttgtgactgaag

SEQ ID NO: 84275 - DNA, 406 bp, Glycine max
agctagatcaaaacaaagtctatttattctagtccactcaattcatacaactctcattcgtttcaaacacaaccattcatttcaaacaaaacacaccactgaatatcaaattcaaccagttcactgttcccacaagctttttgtacaaacaatcaacactaaaataactgaaatttaaataactgaaacataaagcaaactaaataactaataactaaattgttcatgattttcagaaattaaaacaaatttcttttaacatcctgctcatcctgtggctgatcttcatttaaatccaacactggagcagcaggtacattctgaagaatgggctgctctagctccattgctggtactgatggcatagtgtcctcacatataagtgcaagggatggctctggcatgg

SEQ ID NO: 84276 - DNA, 366 bp, Glycine max
  unsure (1)..(366): unsure at all n locations
gcaatcaatgcggcanaacacaccaaatgattatgatgatggatggctcaaattctcacaaaggtaaactcatcactttcaaattgagctttcanaactatcatgacatgtagaggagaatcaaggatttcaagtcacaaaatggcaagaacttttatttcaaaacaattacgcacttcttgaacatatcctataattcatagaaaagacatgcaagtcgtacatgcacaccaaatngacccacaatattatacttaaaattcgactaacaacattaaccaagtaacacaactgacagataacaaaaccaacaaactagctaaacaaagaccactcccccatacttaacaacacattgtcctcatg

SEQ ID NO: 84277 - DNA, 405 bp, Glycine max
agcttgaagatgatgatttaatggttatatagaaagagtggggggaacacaaaattgaaggaataaaagaggaagagaagtggaactttgaagtgtgtctcataagattttcattcatgaaagttacaataagtgttacatatgcttcaatttataaactaggtagcttccttgagaagctttcttgagaaaacttccttgagaagctagagcttagctacacacacccctctaataactaagctcacgtccttgagaagattcctaaagaagctagagcctagctacacacacctctctaatagctaagctcacctccttgagatgaaaagctactcctatagtagctaagctcacccccattccaaaaatacatgaaaatacaaaaaaagtccatactacaaa

SEQ ID NO: 84278 - DNA, 175 bp, Glycine max
  unsure (1)..(175): unsure at all n locations
ttttatattttcggacctatattgnttcattcttatatctaagagatatgaagtacttataaccatttatatgtataaaagaaatgctttgtagtaattatttcttatgaaattttaatagataaatattttatttatgtaacaccgtccatgtatcttctgctgataacatttt

SEQ ID NO: 84279 - DNA, 395 bp, Glycine max
  unsure (1)..(395): unsure at all n locations
agcttgcatagaatagagattgtatactctgttaattcgnacatagattngtagttttatgtaaaaaatcaagttttacttttgaagtcaaaaagtaatttccaaacatgcaattcttcatctttctagtgttggatttacatttgtactgagttttattgtagttgaaaaatccactgccatttaatttatccttttgcataacaggctgagtttgtgaattccttggcttttgcaaaattaggagaagtcttatttgctggagtaagacaagtgaaaattttctcaaactgtgtcctgcttgtatgctttttttttttttgtatactatttactgaaatttcactggaaacattgccatggacagaaaagctatctgagcatttcaactttct

SEQ ID NO: 84280 - DNA, 297 bp, Glycine max
  unsure (1)..(297): unsure at all n locations
taacgagttctaattatgtgggccattaagtctatcatatgctgacaatagtcgagaagcccgtgaatctcttctggggcggagtangtggtctgcatcgctttggccttggctacaatcggggagttcttgactcccgtcatggtagagcnaccgatcatccatggtgctcttgtgtaagagtcgacaccttctctacctcttttccgcgatacttggcatatcgtccgcatctatgctggggcgcgctgactaactttttggactggcatgatagctgctgttgtctcgctccat

SEQ ID NO: 84281 - DNA, 400 bp, Glycine max
  unsure (1)..(400): unsure at all n locations
agcttggattntctcttatttggtatctatccttcctaagatggagccaagccaagtccccctcattaagaactagctcatttcttcctctattgcctttagttgcatacacctttgtttggttctctatttggttcctaaccctctcatgcaacttctgtacaaactctgacctagattccccttctttttgtataaaagaagtgtcaagtgggaggggaattaggtctaaaggtgttagaggattgaacccatagacaacctcaaaaggggattgcttggtggttctatgaacccccctattgtaggcaaattctacatgaggaagatactcatcccgagacttatggttgcctttcttaaaagcccttaaaagggtggatagagacctattcactac

SEQ ID NO: 84282 - DNA, 158 bp, Glycine max
gcaccatcttttacggaataagccatggaacaagaagcttcaccaccaaaaaaatgtcttggatgcgaagcttatagaggaagcttcttcggtgggaaaatatgctagagagagagagagacagtggtgtgggaatatccgaaccatcggggtggggg

SEQ ID NO: 84283 - DNA, 409 bp, Glycine max
agcttatggatcaacttgattcgtttgctttatatcaacatatggatcaacttgatccgtatcaaccttacggatcaacttgatccgtacgatttacggaccacccactcacgcacatccagcacaaatgcgtacctcatatgccatcgccgacgaaccaaccactgcaacaatgaacaccgaccccttcaccttcactgaagctcaccgatcgcaagaaaaaaacacaacctatagagaaaacgaagaaaatatggcaaaacactaagcaccctacaacctttttaaaataacaacttttaaaagaaaaagacaacgaagggataattttgacatttttaaaaaatgctgggtgcataggcaataatgccggatgcacctagcattagcctattttgatgaaggaaat

SEQ ID NO: 84284 - DNA, 406 bp, Glycine max
agcttcagagaactatagagtgttttttttcggtgactgcttccaatacagctagggaagcggaaccggtgctacagcccgcaataaacttgggccgagatagaaacacgatggtgttcggtcggaggtatagtcctcaagcttacccttatggcttgcctccggacatcactccccgtaccgttccagacgatttgagccaagcccctaccttcaaggggcaactcccaccttatgctgactatcccctgcaagaagacgatgaagaagatgcccatctaggccctctacttcccctcaaggatccggccccccatgaatttccctaaccaaacatagtccgccatgtcccgtctgcacccgcacccattaaagaatccgctccctttgcaaaatatgtggaagc

SEQ ID NO: 84285 - DNA, 337 bp, Glycine max
ttaacgtgctttaaccatttatttaagcgcgtttctcgtctaataaatggataaaatgaatttcaaccgatcatttgtgttgtaatctcgtttaatcactgttaaaacgaaatctaaccgatcgttcacgctataacctcggttaaaccaaaaaaagtaaaataataataaaataatcaaaatatcttgaaaaataataataaaataatcaaaatatctttgaataagataataaaaaaaaaatcaatcggacgtttttctttggaagtttccttgaatgaattgattaataatcaaagtgaaactaagactaaaatcaactcacaaatcaagtttt

SEQ ID NO: 84286 - DNA, 373 bp, Glycine max
caaatatgcatgtgaattaggaagcaccaacaagaatcaagccaaggctattgtgcaagcaatcaatggggcaaaacacaccaaatgattatgatgatgtatggctcaaattctcacaaaggtaaactcatcactttcaaattgagcttttaaaacgatcatgatatgtagaggagaatcaaagatttcaagtcacaaaatgtcaaaaacttttattttcaaaacaattacccatttcttgaacctatcctataattcaaagaaaaacatgcaaagtcgtacatgcgcacagaattgacccaaactattaaactaaaaatccgacgaaactaacaacattgacaaattaacacaactgacaaattaacaaaac

SEQ ID NO: 84287 - DNA, 370 bp, Glycine max
atccactgctcctgagtctaatcccaccttgggtggcatctgttgttttttctagatcatggacccttctacactcaagctaaaacactttctccaaagtccttttatatgctaaggggtttctagactgaaactgctggagtctagtatctcagctttactgcctaattctcaataacactcaaatactataacccttaactgatctaacctataggatggtcttatgaccaaagctataccttatcaaccaactgctaagcgttcatctacccttatctattgggtacacttagacatatgaaaattgccatcactaagccagaggggcatcttcagagtgtatgctcatctgccattcactctcttt

SEQ ID NO: 84288 - DNA, 350 bp, Glycine max
  unsure (1)..(350): unsure at all n locations
gctctaaaacaaatcaaaaaatttgtttttagggtggctcactgactaantcttaatcatctcataggcgaatatacaatctaagctcttagtcattttccccaaaatgatgtccaaggtgtgttgagagcatttcaactttacaaataatacacataaagctttagaaacaaaattcaaaatgatagtgcgtaggtttgtaacccattttcttcaaagcttttgatatttataggctttcttcttcaagtgtttgttgtctctaaatgaatagatttcttcacttgagttcacgtatgaagatatggtcattgggacattaaatgcaagtccttttcatgttgaaaaac

SEQ ID NO: 84289 - DNA, 345 bp, Glycine max
agtaccaacggtgaaactattaatcgaaaatcgatgttaatgtaaaattacaacattggttatttaaataaccgatgttatataataagaatataaaaaaagttatatatcttcatatcaacatcggtttttttaaaaaacctatgttgttagtgtatgttaacatcggtcttttaaaaaaccgattttgtttgttgaagtgttgtcagtgtacgttaacatcggtttttgaaaaaattgatgttgtgtttagattttttttaatatactgtctattttttcagtaaccccaaaattaacttgcaaattttaaaagcagatcacacaacatataactttcatttt

SEQ ID NO: 84290 - DNA, 401 bp, Glycine max
  unsure (1)..(401): unsure at all n locations
agctntgatttacacaaagggnttttgtgtcttatctttgatgcacatattgaatttcatccaaatttttgacaagtcattgttacttccatcaatattgatattgtatcattcttaattatatgcatttgcttattcttatcattgtgtgttgtgtgattatttcttccatgcaagtacacgattcctatttgatgtgagagtgaaatgatggccagcagcaccaactgaggtgaatgtatatttccttttttttgtcattatctttgaaaatgcgctatatagtcctttattttatatgttggagcttgacatgcgtaaaaaatagaaatagccttccctgccattgatacgagtttctggctccatttggataattcggcttcatatctttattatca

SEQ ID NO: 84291 - DNA, 403 bp, Glycine max
  unsure (1)..(403): unsure at all n locations
agctntgagccaaaatccttacctctataatccttaccctcggaagaaaacacaaagagaaggaaaattcccaatccaagaaagggagaagacacaaaaaaagaagagagaattcccaatccaagaaagggagaagacataaaacagaaagaaaattcccaatgaaaaagtgggagaaagcaaaaaaaaaaaaaaggaaaattctcgatcaaggatcggaagaaaacagaagaaatatgcagaaaggtcttcgaaccagacaatatctgaacaatagagaattgtcaccaagtaaataaaaaagaaaggaaaccacgacccanagtggccctctccctttgattgccaaccaaaatccagtgcgctagcaactttctcgccacgcactatacaaaaacagaaa

SEQ ID NO: 84292 - DNA, 403 bp, Glycine max
agcttcttgattgcctaagtgtgttttctctaaggcaatcctccattctccacttttttcggagccccatgaatgtcattggctagcgctgttcatgtgtcctccaccttctagtctggagccccgcgaatgtcatcgcctagcactgttcgccaattctccattccccactttcattcggagccccatgaatgtcattgcctagcgctgttcatgtttcctccaccttcaagtttggagctatgcttcatgaatgcctaagtgtggaccctcaagtgcaatcctccattctccacttttttcggagccccatgaatgtcattgcctagcgctattcatgtgtcctccaccttcgagtctggagccccacgaatgttattgcctagcgctgttcgccaattct

SEQ ID NO: 84293 - DNA, 281 bp, Glycine max
ctgcctgatcatctacaaagaaacttgtacttaaattggaaccttgaaataactggcagttgttttgaaatcttcatactccttggagtctttgattctctctgaactgaatctctttctgatctgaataactctctgatctgaatcactcctgatctcacagatttcttctgactgaatactgactgaaggccactgaatcttggttgctactgattaacatgacacgatttcgactgtctctgagctggaactgggaaagaaatgagggagaaaaccaa

SEQ ID NO: 84294 - DNA, 394 bp, Glycine max
agctttaattaaatatttttgtctatgttattaataattaatttaattatggttactacactactagaaattatacatttaacatcgctagattagcatcggttttggacaaaactgatgttaacacaaatgcggcgacatacttgtaaataagacgagtttattaacatcagttttgtcaaaaccgatgttaacatagcctcgttaacatcaattttttgaaaaaatgatgttaacatatcttgtttgcatcggttttgacaaaatcgattttacctaggtcatgttaacatcggtttttacaaaaaaaccgatgttaactaggataagttaacatcggtttttttagaaaatcgacgttgtgtttttattaaaattaaactagaatctcttt

SEQ ID NO: 84295 - DNA, 314 bp, Glycine max
atcaatgcaagtctggctagcgcttgaatccacttacacatacagaatgccttacgcgagctgccttacgaagacttttttttcagaaaattttctagtattttcctcttttcaacaaattgagaccttatgttaacatccaagaatgctgaatactctatgtcagactattagaaagtccaatgattaatgctgaaaaaaataagatacaaatttaaatggctgacgctttacctactgtggatcaatgacagtgcctgtgcctgtaatcttactatatcatttaccttggctttcaaccatgtcttcgatct

SEQ ID NO: 84296 - DNA, 400 bp, Glycine max
  unsure (1)..(400): unsure at all n locations
agcttgttgatgaatgttattatttttacattgaagaaagggggaggccaacgaaaatgttaagtacctttttgttgcttcttccattggcctgaaaatatgaatggactaagtctaaaacaagtgctaataaatgagtttcagcttatgtctatatcatctagatgatattcaaaccactatgctatcggccaagtaattttaatgtttctgaagtttgtattgtacgaaaaattaacgatattagaactcaataagtggcagataccatagccaagaaaatgtatttggaaaagacataaaaactatggtttcatgtgaagtatcacttttgtctatattntatggaaaatgataaatgactataatagagatcaataagtggctacataactcttat

SEQ ID NO: 84297 - DNA, 373 bp, Glycine max
  unsure (1)..(373): unsure at all n locations
tctcaatggcataactcttccaatggtgttcttgactagacatagagagtctataaagcaagacttgactgcatttaactactttccaattacatttgaaatcttcttcttctttgccaaagcttcaaagtttttatgttccaaccttgtctttcacaaaacaaaagtgtgtgattcatctnttcattctctcttctcctttgcaanagaattcgcaagactaacgctgaatcttttggtcttttctctttgcaaagaatcccacgcaaccgctaatctttggttcttctccttccaaaaacaagacaacgcgatctttggctcttttctttgcaaagatcgcaagctacgctgatctttggctttctcattc

SEQ ID NO: 84298 - DNA, 401 bp, Glycine max
  unsure (1)..(401): unsure at all n locations
agctntgagcaaaatctttctacttttacttttgactcggatgtccgaatgaatcccgtaatacatcaagacgcatctaattgataacggaagctttgaccaaattcaaacgacaataactttctactcggatgtctgaatgtgccccgtagatatcaagacgctattaattgaaaaccgatgctcgtagcaaattcaaagaacaataaatttttacttggatgtccgattgtgtcccgtagtatatcaagacgcttgaaatttagaacagaagctctgagcaaaatcaaacgacaataacttttaactcggatgtccgatggaatctcgtaatatatcgagactcacgaaattgaaaatagaagctttgagaaaattcaaacgacaataattttttactc

SEQ ID NO: 84299 - DNA, 293 bp, Glycine max
  unsure (1)..(293): unsure at all n locations
actctcaaagcctctctctttnttcactcataacaccacattctcactttctaaccctaggttaactctacccttcatctctagcagttgtgcataagcaatttcagcacataaacatcacaagcatcatcataaaaaccctacaacagactgtgtaagctngactcacaccacacatgacgaatntaacatgctttcatcanatctcttcacaaataactatcatatagcataaacctagtaaaactncccatcatatcttccanaatccaatacccacgagaatatatgtg

SEQ ID NO: 84300 - DNA, 403 bp, Glycine max
agcttctccatcagatcaatgttctttgtagcttctgagaaaggtcaactttgaactactgagacttgcttcttcatgatatctctagtcagatattttttttttgaattagaactatacactgagaagttagttacactaaatctaaccaaataaaaactaacttttttacagcaacatagaacatactgagaatgtcttttttatttaacaaaagaaaaaaaattgccctgtttgttgttcttgatttgggagttactgcatgtttgtttgaatttgttcccctgtttgttgttcctgatttgggagtctaaaccattttactcttgcttctgtgtcatttttcaatttggaagtgcttttcaagatggagaagatggagacgaggatgaaaatgcacaag

SEQ ID NO: 84301 - DNA, 295 bp, Glycine max
  unsure (1)..(295): unsure at all n locations
tcactatgaagaccagaccattgaggattctctcgtggtttgaactaatngaattggtaactatgactaccatctctaacgagttcttccttcccctattctttaatttcttctcttattgatgtcgncgtatcttgagtttgcatcctcaaattggggccaatatcctttctcatggcactgtcggcacatatataaacaagggcatgctaaaatttcatggtatttntaatgatgtgtatttaactcataatggttattttattttagttctaattcacacaaatacatcata

SEQ ID NO: 84302 - DNA, 405 bp, Glycine max
  unsure (1)..(405): unsure at all n locations
agcttgtaggcgctggatctncttcatctatggattcctttgcttctcgaggtctgattgcagcggaatggagaatgagaaagatgaatgaagacaccacttcaagtagaagatgagtctataagaaactcatcaccatatgaagccatggataagagcttgaaggtagaagaagatgaatgaaggaagaggaagagaagagaatgaaatttagtgcttgaagtctgaactttgaagtttaattctcaaatgatcaaagttgaaaaaaatgcacacacatgacctctatttatagcctaagtgtcacacaaaattgaagggaaatttgaatttcacttgaatttgaaattgaatttgtggagccaaattttcactaattatgattagagaatttccgtatggttc

SEQ ID NO: 84303 - DNA, 124 bp, Glycine max
attatgtttattgatgtcgaggtcaactatgcccactttagattttagtggtcttgataaatgtagtcttgttggcaccacaatttataagcgctgtccttcttgtatatatacatgtatctct

SEQ ID NO: 84304 - DNA, 406 bp, Glycine max
  unsure (1)..(406): unsure at all n locations
agcttgaagcccttagttnttggttatgtttgataattntgcaatgccaaacatgtttaataaatgtggcttttgtaattaatgtttttaaaccaagcatatgtgtgatatagtctaagtttctttcatgcttagtagtgatcaaatgtgaagtgattgaagtattctttttctctaagtttcctaagtaaaagcaataggatttacttctacttgaaatatcgctagaaccatcgaattaatcgattgcctagcttgctaatcaagtgccaaagtcagttttagaagaaggaaggatctacaacttaggataattgattggctttctagataattgattgaccctgtgtgcatagtatttgtgttatagaatccaaggaattaaaatgaaagaggttcttgattg

SEQ ID NO: 84305 - DNA, 282 bp, Glycine max
  unsure (1)..(282): unsure at all n locations
gagtaaaacgaatgaaacagatactatacggtttactgagctacaaatctttatatatattgtatcatcacatatagtattagntactattatattgttactagattaaacttaacgattacgcgtaccgtaaatataaatgcttcatgatatattttctgtgattatgcaatcattttttatctgaaataattttttgatgagttttataaattattcactaaaaatgtattgtgcaaaaagattatcgaatattcatatgagtaagttatatttatgata

SEQ ID NO: 84306 - DNA, 391 bp, Glycine max
ttttcactccatcataattatgctctcttttgctactataatgttgcttcctaaaaaatatgtcgaattatagggaaaattgcttttatatttggtgcaagacttgaacttccatattttatgtatgttcttatattacccaatccatgacaagagcattgggatgctgctcttcgcattgtgtgttgaaaaggaaccctggagaacagatatattgttgtgtgctgattgggtaaggttttcctcaactaggcgaactcatgctacttggtttgttcaacttgacaatttgaccatctcttgaaaaactaggatataccaacatatatggtgtctcgtaattcttttgacaaagcaaaatattgctccatggttatttgtagtgctgtga

SEQ ID NO: 84307 - DNA, 394 bp, Glycine max
  unsure (1)..(394): unsure at all n locations
agcttctcgatatattatgcgccctaatcagacgnccatgngaaaagttatgaccattttaatttctcgagagcattcgntgttcaatattgagcgtctcgatatattatccgcctgaatcggacttgcgtgtgataagttatgagcatctgaatttatcgagagccttcggagttcaattatcagcctcttgatatattatgcgcctgaatcagacggtcaggtgaaaagttatgaccgtttaaaattctccaaagctttcattgttcaatttcgagcgtctcagtatattatgcccttgaatcggactaccatgtgaccaaattgaccgttttatattctcgagagctgtctggggttaattttgagcgggtcgatatataatgccccttat

SEQ ID NO: 84308 - DNA, 97 bp, Glycine max
catgcttacttttattgctgaacaaaatgattggcttgaatgtttgaaaacatgtataaaatgataaactttggagaaattttaaaaattgtgaaaa

SEQ ID NO: 84309 - DNA, 355 bp, Glycine max
  unsure (1)..(355): unsure at all n locations
ctctgtcattcgtataagtctataagatatagtatttgatcaaatgtgaatttacaaacagaccccgctaatatggattccgtgggattccaatttggaatatgcgaagttttagaaaaaaagagtcatattataagaggtatcatataatttttctaattaaaattaaatatttgcctatactaaagtagaatatgagttttacagctttactactattgctggataaaaaaggaagcattccaatatttaccagctggaccacactttacagaactactgctgtaccaatgcaaatgtccccgcattaccatttgttaaanaatcaatagaaagaactagttactttatagga

SEQ ID NO: 84310 - DNA, 268 bp, Glycine max
atcatgtactaatacagactatgaatatggcttactggatagttttgcaactatgcactataacgtacatcatttcaaaatgagtacgtacatactggtaatagttgttgaaacatggactcattaaagtaaagcacttatttctcgtatttttctctgttgactcataactgcctttcttgagctataactgttcacgtgtgtctaacctacgacattcatgcctaagactctgctgcatgcttgtggttgataataccttgctgtg

SEQ ID NO: 84311 - DNA, 360 bp, Glycine max
  unsure (1)..(360): unsure at all n locations
cttggaagttagacttacataaaaaaatttggtgaatgagatattttttggatgtcttactaacccctacacatttagctatcatattgaagtatgcttcgagtggtgaactttttgagagaatgtgtaatgttggttaatttagtgaagatgaggttgtagaatctatagtatggtttatctatatattttttccatgcaaataaactatatacacgaataaggtattcatattgaaatttaccaagtgaatgaatntcctatattgtagttgcaggcaagatatatatttcttccaacaactaatattagggttagctacttcattcaatggtttgcactcctaattcattatcttcc

SEQ ID NO: 84312 - DNA, 429 bp, Glycine max
gctcgccccggaccttaagcaccgcagctgcagcttgagaatggctagaatgatacatgtcagggtttggtttggttcaaggataaaagggatgccccacattatttccatggcacaaatgcaaaaatgatgatttggaaactttatgcaaaactggtcatgcatgcacctatgcggacactcaagtgtcaaatttttatggtcatgtgatgctagggctcaagattcatttcctctattttaatcaacccaatgtttccaaaatatgttcttttatcaatttgggcattcatccgagaccatttcgggcgtgcggagaaatttcacagcattcacccttcacgtgtagacacatttttcaaaaattagttatgatcagtgaattttttcagagaaaagttggaaatcgtctcttttcaaaagcatgtc

SEQ ID NO: 84313 - DNA, 403 bp, Glycine max
agctagctaacccatggaagttcttaatatctcccacactttttggggtgggccattcttggatggccttgattttctcaaagtccacttggatcccatttctaccaactacaaaacctaagaaaactatattatctacacaaaaggtacacttctctatatttgcatagagggtgtttttcctaaggattgaaagaacttgcctgagatgtcctaagtgatcatctaggctcctactgtacactaaaatatcatcaaaataaacaactacaaatatacctatgaaatcccttaagacatgatgcataagcctcataaaggtgcttggtgcattagtgagcccaaaaggcatcactagccattcatacaaaccaaacttggtcttgaaagcggttctccactc

SEQ ID NO: 84314 - DNA, 398 bp, Glycine max
agcttgatagcatcaattatctgtcttgccatctaaatatcaataagctaactccaagcttatgagaaggatgacacactcgggttagcaccaaaatgatccaagacttaaaccctcaagtcaaggtatattttaaattctaatttctactcaatgtgtgatctacttcttcaacattgtcttgcatccactcactcacatgtggcttactctaacatttacagctttcatttgtcagaatattaattgccagactttacagatcagtgcacatatataacagtgaattagtagttcatcatggctattggagattctctaaagttaaacttttactttcagtcatgttaatggtgctgaattgtctggaacaataaaatccaagagaataaatctta

SEQ ID NO: 84315 - DNA, 72 bp, Glycine max
aggcctgatctagctgtttcttaaacacattttgcactggcgttctgttttttaaccaattttggtaaggtg

SEQ ID NO: 84316 - DNA, 404 bp, Glycine max
agcttaaaagacacaactgctacttatacctaaaccaatggttctgtgttaacttgtaatgtgtgtttgaattgtcatgtggaaatttctagtagaacattcttaattgatctgatttgttttcccatgagccaaattgatgttattcagggtatggactggttatcttccaaccatgtcttgttaaactgttttgataaaactgtggtgtttgatgattatggcgtgattaaggataagatgtttatctctgccaactaagttgtgacatctttaaaagaggatgctcaagtgcacatgatcttgtcaaacctagaagtagagacaaaggtttccatgggtgacctccctgtggtcagagaatttcctgatgtgttccttaaggatatatccgatttaccact

SEQ ID NO: 84317 - DNA, 402 bp, Glycine max
agcttagcaaccaactcctgaagatcatgcctcaggagtgcaaatctggaatatgcacaaagtgtttcctcctcttccattacaacaggggtcttcaaaaatgtgttaagggtatcctcattaaacttaattagatgacctctcaccctcacctgcttaggtgatttgtcctcggggtcatagaggtttgcatagaattattttacaatggcaacattaatattgtcgtccacaaagtcagtcaactcctcatcccaatggcacctctcaagttcctccttgaactcatcaaactctgtatagtaaaccaccacattcctctctggtaaaagcttacaaggaaccacaacgccagtgtatctctcccaagcctcttgggaagtgaatctggatctatcaaat

SEQ ID NO: 84318 - DNA, 327 bp, Glycine max
tctatttattaataaaatatttctggttggttttgaagccaataataaccaccatggaattggaagcttgtgtacttcaattaaatgatccactggtcattgcttagtacttttagtattttagatttcatttatttgaataaaatatttttacttatttttagctaagaatataatatgatctatgataatactttcctgtattcattatgctttgaaataatgtgaatataataaatgtaaaagaaattaatatgaccttatatgacggtttacttgaacatcacagtgctaactattcatttgtttgttcgcacccatgtgtca

SEQ ID NO: 84319 - DNA, 328 bp, Glycine max
agcttgaatataaacccgttcttttttttcgtcgcccaaacttggaatcgttctgtgggatatatgccatcaaccctttcatcatcaaaactacttgaatcaacttgattgatcataatgaagcttgtttcctcaaatgctagtggttacttgcttaccttccgatacttctacagaattactctagaggtactgtaaattatcgcgccagctgaaacattatagcccactttacttttctgggcactttctcataatccctcaaataaacacgggctcgtcaatgaattcttcccatatgccctataccaacgggccaccatgaatg

SEQ ID NO: 84320 - DNA, 346 bp, Glycine max
agcttgaatggagaacatccttttttacttgaggagcaagcggcagccagtttcttggatgatatctcgcagggtcatattgatcgttggacatcatactgctgggtttggaaaccagaacctaatggccagtcatgtacaaggagcgcatactatatgctactataaggagcagcatatcagactgtgggtgaagctttagaggacctatgacagcttaaaatccctttaaaaccaactacatttgcttggcgattgatcaaagatacaatcccaactaaagggaatttgtggagaagacagctggagaaaggcttcgcccaaccctacaactattgggctggta

SEQ ID NO: 84321 - DNA, 180 bp, Glycine max
ccctggggacgccaggcggggcgctattgcccaacaccaagcttgaccaatcccgacaccacacgggcatagccgggcagcgagaacctgcgacgaacccaagcaggcgagctcctggcagccaacagataaaaggagaacaagaacccacagcaaggtggcttgggggggctggccacc

SEQ ID NO: 84322 - DNA, 340 bp, Glycine max
agcttagatgatatcaagcttctattttctttcaataagcatgacgccttgatgattatttctaccatcacgtatgtcatatgctgctgaattgattcattaagtggatcaaaatgtctatccaaaatatttgtgaaataatacgtgcttagcagggaaactttggactaagctagagcacaaataaatcctttttatatagctttcagaatgatctagtggaaatttattattaacatttcttactatatcttctcccatcccatttagtctgaattcaccttgaattaaaacttcacaggagcatttattcattgtaactgaacttctgcaagcaaac

SEQ ID NO: 84323 - DNA, 343 bp, Glycine max
  unsure (1)..(343): unsure at all n locations
tggggtacacatgacatgtggatctatgtggtngtccgtcgatggtgcacaacaagctttccacatgcacaatgcgcgcataaactcaccatccactgttgcccagctaaaactgagctcacgtactaccacgtaacccatatgctcatgtctctctacaccgggtccacatggatcctctgaagattgcacagcattcaatcataacaacatttaaacagcgcgagctatcacaacctatcagaacagagcagaggcagaaaactctgctcaacacatcatccaaaatcagagnttttctcactcaaagacccgagagacgaatccttcgatccaattcatt

SEQ ID NO: 84324 - DNA, 356 bp, Glycine max
taagcaccgcggctgcagcctggaaaaaagccgtcttattgtgacttaccttgggggaggatgcatttcaaaacaatcaaagtcatcaataagagtcttgagaacatgataggacctaaagagaggtgcttcttaggtttgatatttggttgcaacttgtccctaaactaggtgtaagtcgctatagcacctgagctttcttgctcccacttcctttgtcagttttaggcctgctatgagtgcttcatattcagcctggttatttgatgctttaaaatcaaagggcctgctccaaggtaacattattgggtccttcgaggatgatgcctgcctctcttcctttcatattggatgcg

SEQ ID NO: 84325 - DNA, 441 bp, Glycine max
  unsure (1)..(441): unsure at all n locations
ctaaattagtccaaactcgtgagggatcgaggtttattattttaggctacaacatagaacacaaaagcatgattgattatagaaatatcttcatatgcatcagcttgtttgttagaaagacccaacacttttaccttctgctatcaactntaattacttgcaattttactattttaacatagactttaatttaaattttgtttttcatcatcaaccatcaatgtttgtttcaacaatgccttatttctgaatataactctgtctaatactggttccttgagtttgattttcacattaatccatgttaattttaaatacttgatgatccggtgcgctatccgatgaatcagattttccttgaacatatttgtataaagaataattggacaaaaagttactgcatgagatatccaacaataaacctaatcaatttaagatgtt

SEQ ID NO: 84326 - DNA, 346 bp, Glycine max
agcttcgataactttccttttttttatttcattttggcatacattttagtgggatttgtatatttatcttcttttttttttaaattatgattataatcctcttatttctttcaaattcatgattttggctttcttcaattgtaattgcactatttgatcccctagctttaaaaattaagtaattctaatcctcttaatagattattaacaaataattatgactagtttagttattaaattaattataaattaatcaaaatcatttattattaaatatactaatctcattaaagtataaatacattacacaagatttatcttataaattgacttgaacatcttttct

SEQ ID NO: 84327 - DNA, 293 bp, Glycine max
gaaggttttataaggcttaaaatccttaccaagaccttttttctttctcacattctttctgtggtaaaaacaatatcttcttttacatgcttcttggcttcttactttagctccgactttaacttaaaggaaattcctcaaagcctgaagtaatgaattttcaccgccctgagaatgtctttcccttctttctccaaactctccttttttcttcccataacctcttcagcctcaatgtgacatgttgccatcaaatgtattttccccaataactcttacccatgatgcaccaa

SEQ ID NO: 84328 - DNA, 418 bp, Glycine max
  unsure (1)..(418): unsure at all n locations
gttgataatactatgtgagattcccatatcatattttcttacaattgatgggcctngcaagagagaattaactaaaaatatttcacaaatagacttcttgataataaaatgaaagacacatgcaaaaatttaacaaatatggtgaacatacaacaataagtttcataccaaaaattatgaagagggttttgttggacaattacgactatcatgatatgcatattgcttacaagccttacaacgccttcttctcttttgttgttgctccatagccttctcttttcctcctttgatttggcttccacatcctttggtgtttgaagattgaggaggaaagatagcaatttccattggtacattagagccaataaaagactctaaatcgtgtaactggctcgaactaacatcccctttcatc

SEQ ID NO: 84329 - DNA, 346 bp, Glycine max
gccacatcggtacaacatcctacatgagtgatcatcatgccaactttgccattgatcacacatctagcgtggaaaatgttttctctttgactttcctccatagacttcaattgatggccgagtaaccgcctaatcatgaacaattctccctccggtgatggctccacttctcctcatcatcctgactctcttctcccttttcaacttcggactcactaatgtactctctatctctaacaatcatggctttctcgttaggcactcctatacatagatgaccgaaccttggcgcccaagcacttaccatactgactgttttttaggactgggctggaattcagaagat

SEQ ID NO: 84330 - DNA, 341 bp, Glycine max
agcttagcccaagatgggtttttccttttcaagtcttggagaggatcaataataatgcctataggttggacctcccaagaaagtatggagtcagcaccacttttaatatttctgatttaattccttttgcaggtggagctgatatagaggaggaggaaccaacagatttgaggtcaaatcctcttcaagggggaggggatgatgcaatcctccctaggaaaggaccagttaccagagccatgagcaagaggctccaagaggattgggctagagttgataaagaaggccttagggttctcatgaaccttagggtagatttttgagcccatgggccaaggttg

SEQ ID NO: 84331 - DNA, 437 bp, Glycine max
agcttctgggttaattacgagcgtctcgatattttgttttctaatcgtacatccaagtgaaatgttatgaccattcgaatttctcgagtgcttacgttgttcaattacgagcgtctacatgacttatgtcccccaatcggacatccgggtgaaaagttatgaccatatgaatttctcaagagcttctgttgctcaatttcgagagtctcaatatatgatgttccaaagttcgacattggtgcgagaagttatgaccattcaaatttcccgagagcttctattgttcaattacgagcgactcaatatgttattgtctccaattcgacatccgtgtaaaagtatgaccatttaatttctcaaagcatccgttggtgaattcgagctttcgataattatgtcacaaatcacctgtggggaaaaagtatacattcaattct

SEQ ID NO: 84332 - DNA, 340 bp, Glycine max
  unsure (1)..(340): unsure at all n locations
agcttgttagaatggtganctcgtttcaatcgaaattaagggtgctagttttgaatcagaaaattggtgcagacattatggagtaatgaactctaatatatttcttccttttatatgagatttagatatgttttttatataagataatatactcatttttttagtttattatctaaaatatatatatatatatatatatatatatatatattacaacattttcaattttttatttttactatttgccttttagttaaaaaatattaagacgtaatattctattagcatgttacaatattacttaacgaatgtgacattttattattttgttacatcattt

SEQ ID NO: 84333 - DNA, 322 bp, Glycine max
acgtacacgaccgtaattattattaacacttaccactgtctgtctcggctcggccacattcgaccttgcccatgacgacggtgctgctggcttcgtgatcggacagatatctgtgtctggatcctgagtggcaactctgggctgtgtatcacgacctattgcccgaggatctgatggctcactgccctgccacaacgcaaaagaaccatcccatgttatctctgacacactgccctggctcaacgcagttgtcacctgctgtcgccatatggttcgaatagtgcatccccctgcatgtatttcatcaaaagacacccatgaa

SEQ ID NO: 84334 - DNA, 345 bp, Glycine max
agcttgattgaatggatttcttcttgatctcaaaagatgttaacaactcattttaacctttgaaagctttaagaaatgaaaactaaagttgtgaatcataaaagcttgttctttttcactttttcaaatgcttaaaagtgagaacacaaggtgactatttatagagaaaacaattataaccatctataattaattaaattgccaatgtaatcaattatcttgaagaggtaatcgattagattttcatttcaaccgattaaagtattcttcccaaaacctgaaaagctttcaagaacaatgtaatagattagattcttgatttaatcgattaaagtattcttggtc

SEQ ID NO: 84335 - DNA, 433 bp, Glycine max
  unsure (1)..(433): unsure at all n locations
gggactattctacaagcttctttttcgtaagcattctcttccttaaaggcttnttgtatcacactctgaaaaggaagaaaatatacatattcttatcttcttatctcattcttatttgttaggaggtggtttgtccttttcaatctactatctttctatatacttgatattcgtaatcacacacccctttttaatttactctcttttacttttatctctaaattaactatagcatatttttaagaattatcaataattaaatcaatattatataaaaaatttaatttctcattataaataaaaaatataatttacatattacaaaatatcatttattatatatttcagttgaatccatacatctacaacactttatttattatggtcatataaaattaaatatttattctatatccacaataaatacctaatt

SEQ ID NO: 84336 - DNA, 338 bp, Glycine max
cagcttggcctttcttttttattataatgatggcccgcattatgttggggaacggatacaaacccggaatgggtttaagcaaaaacaaccgggggataactagcctgataaatgccaaaagaaaccgtgggaaatatgggttatgctataagcccactcaggcaaatataaagaggagcgttgccggaaggaagagcggaagtcaaggctcgcggttgagacaagaaggtgaaagaaacccaccctgccaaataagtaagagctttataagcgcgggtctgggggacgaatgtcaagtcgtcactatatatgaagatgatgttccgagtacgctggat

SEQ ID NO: 84337 - DNA, 372 bp, Glycine max
tactccgctttgatggggctcggtctcttgtgaaactgcatgttttgcatagtcatttgcctcacaagttcttcaagggaaggttgcggagaagcctcaactatttgttgtttctggggttgttgctgttgttgttgttgctgttgctgttgtgaatgatttgaccatctaaggttgggatgattcctccacccgggattgtacctatttctagagaggtcatagttgttcttttgtggctgattttgctgctgaggttgagggggtctattgtagatgtttgcagcataagcttcaggctgttcaattgcttcagattgttgcacaaaagggcaaaggtctgtgtggtggtcggcagaggagcataaacca

SEQ ID NO: 84338 - DNA, 336 bp, Glycine max
agcttcatgctgatctttttgatccacatgaaggaacttcatcgataatactcctgcggatcatataccttgtacttgatccgtatgttaaaccatgaatcttgcggatcaacttgatccacattcagcctcagagaaccctaccaactgtggattaagttgatccgtataaaacttgcggatcaacttgatccgccttaagcttccacaatcctaccaaatgcggatcacctaaaaactacgcggatcatctatatccctagcactactacggatcaactataacgcaaacgaggaacacctaaatgcatacgcagatcaactaccctaagcact

SEQ ID NO: 84339 - DNA, 432 bp, Glycine max
gacctataaaactcaacttattaaacatattgcctcatcatttcctttatgcatgtgaattaagaagcatcaacatgaatcaagccaaggctattgtgcaagcaatcaatggggcaaaacacaccaaatgattatgatgatggatggctcaaactctcacataagtaaactcatcactttcaaatagagctttcaaaactatcaatgtaggttgacgaaaaacaaggatttcaaatcacaaaatgtcaagaggcttgtctttataaaacaattacccatttcttgaacatatcctataattccaagaaagacatgcaaagcgtacatgcacacagaattgacccaaaatattaaactagaaacgcattgaaactaacaacatttacaaaataacacaactacaatataacaataaccgacaactaccaaaac

SEQ ID NO: 84340 - DNA, 342 bp, Glycine max
  unsure (1)..(342): unsure at all n locations
agcttaagctgtgggcgctgtttatttggttntatattatatcttttacatgcccactcgtgcaagagtccttttgataggaactgagagttaggggcagttatgacagttgtgtagaaaataactgctttagaaataagttctgttttaaaaactcatgtattacagttatgtgtatacagtaactactggtagttagttatgtattagaatctgtaggatggcagtttattaagagtatatatctgattgtaggttgtgtaattaggcagtgtgaagtcattcgtagtttgtggacaaataatacactctgtaggggacttttgtctctggaacagtaag

SEQ ID NO: 84341 - DNA, 343 bp, Glycine max
cagcttgtatagttcccccttttatagttattttggagtaaattcgattaatatatcttgttttatggttcatgttgtctctagaacatttccattgaatttaatgatgaaatctgtgcattttcaggtgaaaaagaggctaagttttgaattgcaaaatgtagcagttgggctaagctcaacagttgggctaagcacatattcaccactaagcatagctttagcgcgcttagcacaaaggagaatttggctgagcgtcagcatcaaagtcgcacgctaattgtagtaggtgccttcagccaagctaagcttgagactggtgctaagcccaatttcacttact

SEQ ID NO: 84342 - DNA, 442 bp, Glycine max
  unsure (1)..(442): unsure at all n locations
tataccatactcaaactccctatccaaggctcatcatggtggagaagctccatcttctatgtcttattccttaatggatggcgcctcctctcacctccttacctttgtcttccgctgcatctctatggtggaaaatcaccattaaaggaccccatngaagctcaaagatccaacctccatagaagctccacaagcaagcttccatcatagggagacgaaagaggtcttttccacatcttcgggcgccattattatttgggtataccctgagaaaccatccataaatgagaaaagggcgaacttagctgtattatctactaatatatcaatgcgtggcaagggaaaaaagtctttatgactggctcggtataaataccgaaagtcaaagcacatttgcactatgcccacttatttatggcacaggcacaatgtcggctaccca

SEQ ID NO: 84343 - DNA, 316 bp, Glycine max
ccattatactctgtaatgctttatggttttccccattgccaagccaataatccttctaatgaaatgggttggtgttccctaaaaaccaaattgttggtgcaaaattcatgcagtagtgttgctacttgttgtagttttaggcagaatcttaaattaagcttgtagaactataggagtaatgaggctcagttgaatttggtttcaataacaatagcaatgaacttacttgatagaacttacttctgctggtggcatgggttggcaacattagatgatataggatgtctatattcttcactgtataataaactattct

SEQ ID NO: 84344 - DNA, 282 bp, Glycine max
  unsure (1)..(282): unsure at all n locations
acgaacgatgaatcttgaaaaacggtcgaaaatcttcgcgtattactcatggaacgtacggaaacgtacggancgcctngtttggattttttaccgaactaatttcctaactatttcagaaagaaagaagtgcctaaggggctgaacccttttctacttcacttctccccctatttatagaaaattgggggaaaagcttgccacccatctcgcccatacgagctcagctcacccaggcgagcaaggttgcttcctccataagcaacagccttgtgtaggaat

SEQ ID NO: 84345 - DNA, 473 bp, Glycine max
acctatgaaactcagcttttagctaagtggctatcttcaatcaaaacatggccttcattatcttcaatttcacacattcattccatactcagagatccatgcaaaaaccattacttaacattagtcgttctctcacaattaaagatcacactctcaccgggttgtgagcaatgcgttccttcacaatcaacctgacaaaccaactaacatttccagtcatgatcctaattccatgttctttctcttctaatgactgcatgctcattcaaggcatatgatccacacatttcaattcactcacatcatacaattgatcaattcaaaccaatcacaaacactgaattccaaaatcaaatatcaaccactggataatataaatgcattgttcaatcaagctttgacaagctatcaaccaaatgaaaactataaactaaaattataaagctgaaacataaacataaatctaaattata

SEQ ID NO: 84346 - DNA, 341 bp, Glycine max
  unsure (1)..(341): unsure at all n locations
agcttccggnaaactttgtttttttgtttccaaanaccgnggggaagctccataattggagaccttggatataagaaacacatatgtgtttgagattccaaaggagattacgatgcttataaagctacgtcatcttctgagtaactatatgtcttcaactcagtggaaggatattggaggcatgacatccctagaagagatacctccagtgattatagatgatgatggagtggtcattagagaggtaggaaagctaaagcagttaagggaactgacggtggtattttttttgggaaaacacgagaagactctgtgttccttaataaatgagatgtcactct

SEQ ID NO: 84347 - DNA, 336 bp, Glycine max
  unsure (1)..(336): unsure at all n locations
agcttccatcaagtggtnatagtatccaagagcttcaagtaggtgctcattaaacctccattaatttttttgctttaccttctcttccattgttgtttcttcatttttttctccatgtatctcctcacatgtcttgtgctaaatgtttttaacatgattctttacatgattctttagagtttccaccgattaaacttgctatagaagctagatttgattttctatggttcaaatttcttgttcctgttcttgaaccatgaattgtgttgagcttaggttcctttgagttttgtcttgttattttttttggctgaaacctaaatcataaaattctta

SEQ ID NO: 84348 - DNA, 337 bp, Glycine max
agctttaagcagtctctctgttttaatttgagaacattaatagaggattcttatatatcccccacatgggtcttcttttttccttttttattttagaaagccaaacaaactggtacttgactctggtctccattccttttccgtggagggtcctacaatcattcctcttggttaccgtgcaagaatattatccttcactactgcaagtgtccttcatatagagatcgaagaccttatatactgtattgaattataatataatagtgtgcccttggaaaatattatttgttggtgcttttactcgggtctaacaaggaaattctcattccttatgact

SEQ ID NO: 84349 - DNA, 341 bp, Glycine max
  unsure (1)..(341): unsure at all n locations
gcttggaaattttgttanctatctggngagatattntgtgagagatttaaaaaaaagaaagttttttaaacagataaacatggacttatgattgctgaccgcatcgacgggtgcgaatgcaagtgcaagaaagatttaaaaaaaaaaaggaagaaggaaagatccgaaaatatcactagggaaagatatggtgtacgcggcatgcttgagtaattaattgaattactatattactatatgtaaaaaaagcagggggattttggagttaagttcggttcggtgttcgaagattggaaggcgagtggaccgaagaaaccataaacatcggagcggagccaaaa

SEQ ID NO: 84350 - DNA, 309 bp, Glycine max
tagatgtcttttctaccttctaagtgaaccttttcttatcatagcactcaaaaaaaaaaaagaattacctcacacggagctacatgcactgatatttttaggataccacatctcttggaatttaaagacgaccacttgtgtaattgagtacctccaaacaacatatacatcatgctttgatgtcgcccaaaccaagtctctcaactgcatatgacaaattagaggtgtaacattaattttcattaactcattgatcatggcatactctgaatttctagaaggcgttacccatgttataaactcagtcca

SEQ ID NO: 84351 - DNA, 335 bp, Glycine max
  unsure (1)..(335): unsure at all n locations
ggctgcagcttaannaggagtattgtttatannnnaaannataatcggatcataaaatttcaattttaatggtaagataatgtaaatagaaaaatatatgattatatcttatattttctctattatattaaattctttggattctcaatagtctactctgtcattattaaataagaagacttattgagtccaagtataaaatatttcatcatgtatcataaatttgttaatttttataataattacttaaaagtcatataaataataatttgtgattgaatgataaattttagatgaaaaatacatgattattacactctataatgttaaaaaaa

SEQ ID NO: 84352 - DNA, 360 bp, Glycine max
  unsure (1)..(360): unsure at all n locations
ctattaatactcagccttgtagacagtagaagctacacatctttttagaagttgcaaaaactgaattggctgcacagttcttggagtatgaaaaaaaacatagtccgtacccatgcatgttgtgaatattgaagagcttctcgatgtacatgatgtngtcaatggattgggtaaaaaacagaactgtaccacggtgttttgttcatttatacgctgagtgtacggaaggttaaagcttctagcatagccctgctataaaagagaaatgtggattcgaatcttgcttgccctttattttatttttcaaatgtnaaaaaccatatggcttgcgttcttgtccctatggatatatattaacag

SEQ ID NO: 84353 - DNA, 334 bp, Glycine max
  unsure (1)..(334): unsure at all n locations
agcttattattaatttatcatttataatgtanaataccaacagcacatattgacgaaaatataccctattaaattatgaattttgttaaataaccgtgcgcgaaaggatgctgacactacgccacggctgtttcttgaactgttactgggactatgcctacgtgaatcatcctacgaagcacaaaaaattgaacaagttatgtctttacatgaaaaattatttaatggttccaggaccatggtgtttctggtcaatcttcacatgacatataatcaacttttattaacttttttctggtaaattaaaaaaactcagctacatgaacttactcct

SEQ ID NO: 84354 - DNA, 450 bp, Glycine max
  unsure (1)..(450): unsure at all n locations
tagcttgtacacaacattaaatggctctgcataattccggacattncctattatgaagaaatgaaggttagaaatccttaattgactttataccaaaattaaaattaccccgatcagggtcatcaatattaccacaaactcgattgggttggactaagttacgttaggttcaatgcatgattaatttgatagacaactcatccaattagaccttttagtcttgattcaactggacaagttggtccagattntaaaatacagtcatcatcattccactcctactatcactatcatctttatttaatttcaatttataatatttaaaaaacactaaaaataataaaaatcaaaactcaaaactaaactgattgtaatttgtaaagaattcataaactaaaatcaaatatcactcccaacaaaaatgctaaaagactaatgttagaaaatcaa

SEQ ID NO: 84355 - DNA, 345 bp, Glycine max
  unsure (1)..(345): unsure at all n locations
agcttgatataaataanatatgtttatttatataatgatatttntcaattaactgcttgggcaaaacaaagttttggatctaaactttgacctgatccttttgggctggtccagagggcttgtttcttatttaagggctttgctaggtgcaccaggcataatgcttgtgcacccggcattaaaacaaaatttcaaaaatgtccttaagtgttttttatttttacagattacataattcgtatacctcatacgaattacgtgatccataagtatttttttttattttttttaaaaaatatgtttttatttattattaaattaattttttaatagtaaatatttttt

SEQ ID NO: 84356 - DNA, 316 bp, Glycine max
  unsure (1)..(316): unsure at all n locations
gaccacgtaacatctgccagcggcaaccgtctgcactatcaatgaaattatagcacanaacaaagaaacgctcattcgcaccacatacggaattaaattagcgaaattcattctctcacaagcacactggaggaaccatgttaattatatggtgagggggccaaagccctcgcatgaaatctaccatattcacacatgtgtgataaaaagaaacgcccataggatatataattataaaatgaaagtgaaaaatataaaataatagaaatcgtaccactaatcttgataacgtgttacactatggaccataaaaaat

SEQ ID NO: 84357 - DNA, 342 bp, Glycine max
  unsure (1)..(342): unsure at all n locations
agcttcttgaaccanntattataatttatgacgntcaatgattaatttaaaattaaattaaattttttgataattaattttatattaaattataaaacttagaaatgaagttacatatcattaagttgtacacatgacgtaattagtgtacttttatatacttaatgattaaatcagaatatttattctttcaagaaactaaattgtatgtcaccgatttatatttttaaggattaaaataattatttaacttttttatttttattgggcaatgaaaaaggttcataaatatatattaatatattattaacatttttattattaaattacaatcacgtaaaa

SEQ ID NO: 84358 - DNA, 342 bp, Glycine max
agcttcggctccttgaagttcatgtttgagttttttttcttctatgttcctatccttcttttcaatttttctagttcttgttcttcagtttgtgttcatcttcactactagaaaaaacgcatttaacatcggttgttttggacattcaacatcaatatgaatcgatgttgaaattaccaacgttaaaagtatcaacattaacatcgttatgaaaaaatcgatgttaaaatacataatacaacatcgacttttacgaaaaccgatgttgtatagtaagaaatatacaaaaaaaaatgcaaaaattgatgttgtttttacatttttttttaaatactttgtctg

SEQ ID NO: 84359 - DNA, 452 bp, Glycine max
tcatgatgaatcaagattgattcaaagagttttgatgatgacttagatgatgacacaaagctcaagagtcaagaacacttcatgataacaaagatgatgatctcaagaatcaaaggatgagttcaagattgaatcaagaacactttaaggttcagaaggatatgtgatttcaagaatcaagtctcaagattcaagaatcaagagaagactcattcaagataagtattaaaaataattttcaaaaactgagtagcacatgaatttttctcaaaaaccttttaccaaagagtatttactctctgttaatcgattaccagattattgttatcgattaccagtagcaaaatgattttcataaagctctcagctgaattcacaacgttccaattggattcaaatgttgaacttgatacactactttggtatctgttaccagcgtgttgaacttgaaa

SEQ ID NO: 84360 - DNA, 367 bp, Glycine max
agtccacctcgccgcatgcaagcttgctccagacccattatatttctttcgtcaagctagtgacggtaaagaatcgcttgctgggaagcaacccggttctttttctttattttcattaatcattacatatagctaggtttcaacttgtttgtgattgctagagtaagtcatcaacatgttttgtatgatacatgaggttgttaaagcttctttgaagttgtggatgaggaataacttagaaagtttttcagtcatccactcgcttagcgcgccttgtgtgctaagcgaatcatcatgcatgcgttaagcgagtaaccacccatgctaagcacaacaacccttaccaattggctgaaagggcctcatt

SEQ ID NO: 84361 - DNA, 327 bp, Glycine max
  unsure (1)..(327): unsure at all n locations
ccttcggatagngttgcaagactcaaaagtcaggggggagggaagtaaaagactctagccaaggggtcgtcggcccattatatattcattatgtggttctaaccggttcaaacaagggcctttcggcgctcagaaatcggagtcgtgttctgcacctcctcactataaggtggaggaggaagaggaggagtatcttcctgcttgctgggtggtttattagcagtatcttctgatacctctaaattcctcccgctagctgtggggaacaagttaccatttttgtttttggcagctcatcatttaaatacagtaaatttgcacaacaaa

SEQ ID NO: 84362 - DNA, 355 bp, Glycine max
  unsure (1)..(355): unsure at all n locations
atcttatcaaccaattctttattttttccctncggccgccatcattcagtccttagttttgcgggacttcaatacaagaaaaatattatgacgtggcgcgaaacatcaattttaatggcactgttccaccaaaattcctaaactaagtcctgatccaaaatataatctcaaaccaatcagtaattctaaaaccacactattatctaagcataaaacacttaaggtcaaatactaaaagataaattatgggcaaaaagagataactaacctaccatagcctaatggccacgcttaaaagatcactagagactaaactctaagaagatggcggtggtggtggaaggtccaatctctg

SEQ ID NO: 84363 - DNA, 338 bp, Glycine max
agcttgagtcatggatttgttttcctaagtcgtgacgataagcgagttaagttttaaaatgcttctaaatgagcctccaaatggaatccaaatgcaattaaccttacttcgagagcttttatgaaatgagcaaagtggattataagttaagatcatataatttatatttatatttatatgaatttttttgtttcatggtaagaattcataatgttaaatgtcttattatgcttgttcaactaatgtttgatgaatttataatatggtgagtacttgagatgttaaaattgacgatcattgaagtgaaacatttatattatgctaagataagttcattg

SEQ ID NO: 84364 - DNA, 409 bp, Glycine max
  unsure (1)..(409): unsure at all n locations
tacacgagttaattcgtgctcctatcgagtttgtgatttatnttcgagacgcggagatnttctttgtatatgcatatatcaggagaagacaaatgtgcatacctaatgaacaatattccaacacttacatgttcagagactgacaagagagcttgcaattgctcaaatatctagaaaggcagtatctgcgtcattaaagacggctcttcaaatagctgtacaacctacggcttacagaaaaggagaagaaaaaagccctttctatgctatgctcatatctttgctaattaacagagttgctaggagtatgcttgttgatggtatatccattgctgaagctgagattaatgacatggcaagaattattttccaacccattctttttacttcactttatgtttccttccaa

SEQ ID NO: 84365 - DNA, 341 bp, Glycine max
agcttgccaacccatggttgtttctaatatctcccacactttttggggtgggccattcttggatggccttgattttctcagggtccacttggaccccatttctaccaactacaaaccctaagaaaactatattatctacacaaaaagtacacttctctatatttgcatagagggtgtttttcctaaggactgaaagaacttgcctgagatgtcctaagtgatcatctaggctcctactgtacactaaaatatcatcaaaataaacaactacaaatctacctatgaaatcccttaagacatgatgcataagcctcataaaggtgcttggtgcattagtgagc

SEQ ID NO: 84366 - DNA, 425 bp, Glycine max
tgatgtactaagtcctccaattccacaacattccttatattactatttagcccatgtaggaaacaagccacaatagcctctcgatcctccataacattagctctaatcatggaaacctccatttccttggaatactcatcaacacttctactaccttgtgtgagcctttgtagctcgctttgaaggtctctcatataatgagaaggaacaaatcttgttatcatcaacctcttcatttcttcccaactatccaccaagggttcttcatatctcgccctctccctttgtaattaaatcccccagatgaaagcatagtcagtgaattccatggttgccaccctcatctatctagcccttatagagatagtggcatgcaaataactgctcaatttcatttccactccaaaaatgcttccgatcacttt

SEQ ID NO: 84367 - DNA, 345 bp, Glycine max
  unsure (1)..(345): unsure at all n locations
agcttgaaagatcctcacatacttgnnggnnnngntgaggtagactgtaagcccaaattttaagatagtaatagtggcagagcctatcctaaatccattgtcgagccatatgtattaccatgccctaggcctatagccccaagcataagggtgtgtgatggaaagcccctttaattgcggcctgacttaattgtgaccttatcagagttggttgccaatgtcttggaaagagatacatatgaagcggttgagaggagcatcgtatgcatagccaacaagatgtcgactcttggggagttgaaacctacaccaacttaagataagggccaagtagtgcttataaag

SEQ ID NO: 84368 - DNA, 336 bp, Glycine max
agcttagcaatcatttgtttatagtgcatgctaactttggctgcttctttaattccaatccccactcggacttccaaaatagcagattttgaatatgataaaaagaaagatccacaaattaatatttaagttttatagttattccaaccaactggggaaatttagattcatcataaatagattagtaggctaattttgcatatctgaccttgcagagtatataacagaatttgggccgatgtacttatacatgaaaaatgggtaggaagaaactaaagatatggaaagcaacatcacctgataaaggtatgtgattgactcaacggaagatcttct

SEQ ID NO: 84369 - DNA, 403 bp, Glycine max
ctattgtctctaaaagaacatattctctctcttaagttacgtctgaagaatatggccatcgagggattaaatgtgtgtattaaatgaatgtacttcttcatgtccagacaccgcttttgtcttggagtgttgaacactacagcaagaaaccactctcttttgcatcaaagcaggtctaatcaccagagcgctccttttaatggcgattgaggaatttcagagcttggattcatttattcttcataggattcgatagatcctaagataatgtctcttgaaaatagattgtagacatagagtattagactaagtcttaaatgccatctttaatggtctaatatatcatgattctatcttgctattatctaaacatcagacacagacttgcgaaacatgttctgat

SEQ ID NO: 84370 - DNA, 343 bp, Glycine max
agctttaatgatggtgtgctactcttatattttacattgagtgtcctcattgatatgttctatatttgattttgcatgaatttctaattgtcataacatataattcatggatatgatttaggcattatttctttctttacattttaagtttaagccactggccaaaaagctatcccgatgtatattgttttatcatttgcaagccctttgaaccaaacacttcatattttgttggaacactaaactaggataaaaatttcctaccttgccttaggttagtagagcaaaggtgttttgttaaggatttctatcatttggtggctaatatgatgtaaatattttg

SEQ ID NO: 84371 - DNA, 428 bp, Glycine max
  unsure (1)..(428): unsure at all n locations
ctcacgctctggaacttatgagtaaaggaggtggggaacgaagttttatctctaactctgcgctangaaagagaaactaataggatcatcacacttcaatggactttagttgttccttacttaactaaggcatttcgatacagaattctaactctaacccatcctattatggtattttaattaacttaaatcttagtatttcacaattcctaataaattataaattgtatttcttatgcaactcgctcgtgctttgcttctttcgacacacatgcacactctcgtggcaacgcacgctcacattctcagtctcttggcccatccttctccttctctctctctctctctctctttgactcaaaaaattctcggtctctctcttcaaagttcactctggatagcctttctccctctttcatcaatgaaat

SEQ ID NO: 84372 - DNA, 341 bp, Glycine max
  unsure (1)..(341): unsure at all n locations
agcttgtcatttatatacttcttactggagcttttttatctgtaatgcagtctgtgtgaattgaaaatgagaatctanaatctgtcactatctttgtttgtttgaattaatgaatcaacattgtcatgcagggcaagaagggtgtttggataaagttacctattcatttagtcaatctggttgaagctttagttaaggtaactaactttattgcttaccttaatgatgatggttgtgcttgaaatgtttggttaatgaaaattggaatgctgttaatgcagttaggtatcaattctattattaacttatttccatgacacttctatgcaggagggtttttg

SEQ ID NO: 84373 - DNA, 337 bp, Glycine max
  unsure (1)..(337): unsure at all n locations
agcttttggctacactataactcatttctgngcatgnnncaaatttccgcataacattcaaatgaactcatgaacaagataggaactaataaaacatatatagtttaatgcatacaattccaaaatccatatgcataactttcaccatcactgtcacagttattgaaacaaaaatgtataattcacaaagtgctgattaaaaggatagtttacttcatcacttcatgaatgcctagataatttacttcatcaattcattctaaatataacacaacccaacccatgtattctaagcatcctttagattaggtgaatgtcgttttaaatgaaaaactat

SEQ ID NO: 84374 - DNA, 363 bp, Glycine max
  unsure (1)..(363): unsure at all n locations
atccttaagtcacctgctgctgcagcttgatgatttggggtgctattttatgngntcatatattgtatgagttgtcccactaatccaagatcaagtccaaacagtactataaaaaagctattctaagatggtcaaaaataggatacaacgacagtcgttgaatcccatgttggggaaacttaaaactttcaacaacgggtcaaaaaacaccatcttaaaaagcgaggaactttcaaagatggtgcttacgtaagcaccgtctttgaaagttagcattttaagatggtatttacgtaagcaccgtcttagaaacgtaagcaccatctttgaaagttagcattttaagatggtgtttacgtaagc

SEQ ID NO: 84375 - DNA, 452 bp, Glycine max
ggggacacatgccaaagatcaaaatatgtttcagcggttctttattggtctctgcatccattaccaattccggagagggtttgggaagagattagtattgacttcatcaatggcttaccaagatctataggatttgaagcaatcttggtggtagtagatcgtttgacgaagaattgccattttgtgccccttaaacattcttatattgcaaaggctcttgctgaaattttaatgagggaggtagtgcaactccatggagttcctaattctattgtgagtgatcgagaccctttattcacgagtatgttttggaaagatgtttttacaccgcgagtgaccatactggaaatgagctcagcctcccacccgtatactgatggactgactgaaggaacaaataagtgccttgaaaatatttatgatgtttatccccccccccccccccccccccc

SEQ ID NO: 84376 - DNA, 301 bp, Glycine max
actcaaatatgagtatgacagatcttgtgagcgcgaaagatgacgtaaatctccgcgtgtcaacgggcttgtcggccgcgattgacgaagggcgcaggaaacgacgttagtctctgcgtgctatcaagcttttcgtcttacaaacatcaaaaaagaatgtttatacggataaccactcgggtatttccgatcgtcagcgtgactcaaatgtgagtatgacagatcttgtgagcgcgaaagatgacgtaaatctccgcatgtgaacgtgcttgtcggccgcgattgacgaagggcgcagaag

SEQ ID NO: 84377 - DNA, 316 bp, Glycine max
  unsure (1)..(316): unsure at all n locations
ctatccagactctatctaatactcatgcggcagggacggcttncttcactttcttgtgtacaacgcgagcttagaccactggtcttcctatccgcgatgctaattttcatatncgcctgagtgggcttataatctaaaccatacttcccacggcttccttgagtatttatcaggctagctatgccgtcgttgtctttgcctaaacccatcccgggttcataaccgttccccaacataactcgggccatcattaccgctgcatcgaacagacaatgctgcccaaagatggagctcaccggaagaaatgctgaccacc

SEQ ID NO: 84378 - DNA, 338 bp, Glycine max
tagcagctgatagtttcttttgttccgccctacagatagcaacgaaggtatggttatatataatcaaatagaggatatacatagaggcaaccgaactatgaattgatgaagccgtgacgatcaaaatttcaaaaactatatttgtacttataagtggttgagcacatataaaaacactactgaacaatgcaaaaaagaagggcctgttttacaaaaccacttaagactgcaagagacaataatttcgttattttacacaaacgaacagaaactgtgtttcttaaaaatttaaagacaatttaaaataataatgtctggcgtccaaattttcccagctg

SEQ ID NO: 84379 - DNA, 358 bp, Glycine max
ggatcttaagcgaccgcggctgcaagcttgtaagatttatatttactctactcgataaccagacatgtttttcataaattattctcaacagtcacatctttttacttgattcttgaatggctgtctaaggcctatatatgtgtgactcgggacatgaatttgcttagagtttttcacaacataaaggtcttatcctcttaaaaagcaaattgtattatactctaacaaaatccttggccaaattacttatgattcactaaggaattatttgagtgctcaaattgttaaatctatctctttaaagagagatatcttcttttcttcttcttcactctgaaaagggattaacagactgagg

SEQ ID NO: 84380 - DNA, 385 bp, Glycine max
  unsure (1)..(385): unsure at all n locations
ggattatttcacttctgctgctctcatctaccagtcgaagtatcgtgtgaaagaatatgtcatgtgttacatccaccatgcgacatgcccttctatcatgcaaacgttcatgagagatagaggtagttgtgttcttgtactctcgacaccgaaagtcactctctttcgtcatagcaaggtctgcaacaataaagtgcgcctttggatgaggactatcatctttcaaactatagactctatttattctncataggactttgagaaatcctaataaaatagttttttgtatgaaagagtcctcatacacggagtacatcatgaatgtcttaaatgcactacttgaaatgtcactgtaaatcatctcatgaatgcatcgcctaaaaat

SEQ ID NO: 84381 - DNA, 341 bp, Glycine max
agcttatatgagatgtgttttctgagatatgcccaaacagtggacaaatcatttagcaatggaagaattatggtataataccaagtttcatacagccacccaaatgacacctttcgaggccttatatgggtatgtccttacaagtcctaatttgaggcagtagattacactgtgaagacaagagagcatattggaagaatgctgcaagaaaatctcagtaaagctcaagagagaatgaagatgtatgcatacaagaaaaggatagacagagagtttaattttggagatcttgtgtacttgaagattcaaccatacaagcaacactccttggaaaatacata

SEQ ID NO: 84382 - DNA, 267 bp, Glycine max
cgttagacacaagatagaatagacatatcttgtctctttagggacggcacacaccataaattggagcaacgtaagtgcactatatgccctgcacaagacacagatgtcaagttaacacaaaacaccgaacatgagccacaactatcaagagagctccatcatgtgccaaagaccaaaacagagcaaagggggaaaatcggagtcaaagagaggtcacatgatctaacaagaatagaacaaacgaaaccacaaatgcgcaatcaaaca

SEQ ID NO: 84383 - DNA, 339 bp, Glycine max
agcttgcactagtcatattattttacaaaacaacgaaagctaaaattgaatcgattattgcacatacaaaaatacttaaacaaacctgccaattaggagttttgcggctttttgcaaattccgcccatgtttctggatcaaggccatacttgactgtaagatcagatatttgctgaccttcattgtcagcaaagacaaattttgaagtcaatgaagacttaaattgcctccatcttgctgcaattgttgacatcacctttttttttgcattttcaccttcagggatatcaaatttgcgctgcacaacaaaaggagttatgtaacagtatgtaaatgaat

SEQ ID NO: 84384 - DNA, 280 bp, Glycine max
gacactatgaaactcagcttcaacgccggcgctaacaaacgatgagccctactcttattcgttgtcccgcccaataaggattcaatcagtgcgggggcattgtccgcaaggttcttaccaccactattgcggcactttagaccactcggcttaccctatataagtagcaataccaattttaatgtgggggttcatttgttgtggacaaagatctgcgctctacgtggttttaaaccttgcaagaattacacgctgaacaaacattccattcgtgcccgtg

SEQ ID NO: 84385 - DNA, 345 bp, Glycine max
  unsure (1)..(345): unsure at all n locations
agctttaattnttttggtttcttttttaaaaccaaaaatagtctcatattgtaaaaattgttcaaatcgtgtctcaatagaattaattgattgatctaatatgtataaaaaatactcaatatgaaaagattcttcaggtgaatgtgtgatctcattactaatattttttttatcaaaatgaggttttctatgaattttacgtttttcatgaaattttggctctatatccatttcgatagtcattttttctgtggattctaaagccaatgcaaacccgttttccctataatgttttaaataagtgataagaccttttaaatgatctatagcaacatctatatgcat

SEQ ID NO: 84386 - DNA, 337 bp, Glycine max
ggctccgcttgctgatatatatcatgcagacttatctgatgattaccgaggaacaattacggatcaacttgaaacttatgtgcttcaagcgagaataaatgcttttttttccacttgtgaagatgttcaaagtctggctatgaaaaccggtcaaactgagaaacatttgtgatttccattggtctataaacttattgagctacctttgatattgccggtgtcgacagcatccgctgaaagatctctttcatcatgacgattatcacgtcctaattgcgcaatagaacaacgatgtgtggttcaatgacttgatggtacgttacaccgaccggagata

SEQ ID NO: 84387 - DNA, 329 bp, Glycine max
agctttaagttcttatatattaaataaataatttatgtatgtacaatttagttccgatataactcttcattttaattagtatttaatcctataacctttgtaatttgatcaccttgaacctactactagcaaaaacgtacaagttttagatccctacaaatataatttacttgcaaaatatggcaatacaaatatatttgttctttgtttttaggccatccaattgtccttgtaagatgataatttttctttgcattacgaggtccaaaacaagtgacgatgatgagcattacttttatatatatatatatatatatatatagggaata

SEQ ID NO: 84388 - DNA, 436 bp, Glycine max
atgaatctccgctagttggaggttaattaaataacccttgtttttatttgatccaccgtcaatgattattaaataatctcccatcatttattgccacatattgcaatagtttgattatgagaaccatttaaaactccttcttttaataatatgctaatttctgaatggatgaaagtgtatatacctttacactcatgacatattggtaccacaattcctgccattggtggctgcaattgcggatttcaattaccatatataatcattcctaacagcagattaaaatcaaactcttatgtgggcgcccaatctagcacagaccaagaattctgttcttggactatacccagaaaagaactgggattgtggttgatagaagaacttttcgacatcttttatccgatgtaaaattcacaccaccactatgattttcctt

SEQ ID NO: 84389 - DNA, 339 bp, Glycine max
agctttaaattttattatttaagggtttaaaaacaatgacaacattgtttttaatagttaagaacttgcgttgaactctactaaaatatattatactattcttaaattttatgtaatgataagaaacttggataaatttgttcaaaagtatttttaggagaaataaataaatataatttttttattaattaaaattaatttatacataagttatcaatcatcttttagaacttatacaaattagtctatgcataactaattttaacttattgaaaaagaaattatttattttgaaaaaaatatatttgaaatgcagaaattgcattatatatatatata

SEQ ID NO: 84390 - DNA, 312 bp, Glycine max
tattactataagtttctcgcacgacaaaaaaaagtgatagttgggcagataaaaaagtctaataaatgactaataatggcataacacatttgcaccaattctatcgcatgggtgaaactaaaatctaatagaacgccgtatgtcaaaaattgacctgcacataatgtcaaggcatatgtgctatgcaaaagcgcacgtctgcaagaacaaatcagtcgtagaactataaataaatggaatgaaacgcatgcggttcctctatgacaaggagagaacacaaatcctctaagaatctcatgatgaatggagata

SEQ ID NO: 84391 - DNA, 312 bp, Glycine max
atccaccaagcacagccttggattactttggggagtatcgtcaagtcctttcaaaacattgttgactacaaacatggatgcttattgtacaattaaaatattgatgatctcgactaatgctaatgcaaatgtattaaaaaataacattgacttgttaattattcatttgaggtagttgtctggcctattatgcaacgaacaaaaccagatgacaacattttccttaagcaaaatgacgatcatttgccaatgtgcactgcagtagagaccaatataggttattatactattatatattatttaaattcattt

SEQ ID NO: 84392 - DNA, 335 bp, Glycine max
gcttgcgaaaattctttattttgtgaaaactgtaattttttattatcaaacattaacatgagtatatatatgagattatagcgaagtctaagattccctttccttccctttttgtttttgatttgttaactcaaataaatactatgaattaagtgaaaaaatataaccatcttaaattctgtcttctctcttagtttggaagtatatttttgtgcaataaaatgtatttaattaaggagcgtctcttgttagatctcgggcaaaatagtaatagttctcaacttcgcatagctttacttcaacttggcgttttgtgcagattcctccaacaatga

SEQ ID NO: 84393 - DNA, 343 bp, Glycine max
  unsure (1)..(343): unsure at all n locations
agcttcatgatgattttcttttcaattntgaggatgccaaaagcccaaatgattgattcaagatttcaagatcaagcatcaagaattcaatccaagattcaagattcaagagaagaaatcaagaagcaacaagtcgagacttcatataggataagtattaaaagattttttcaaaaaccaaatagcacaattttgttttacaaaagaagtttctcaaattttctgagttaccagagtgattactctctggtaatcgattaccagttggcaataatcgattaccagtgaccagattggttttcaaaatgttttcaaatgatttgtaacgttccaaaatgaattt

SEQ ID NO: 84394 - DNA, 403 bp, Glycine max
ctatagaagataatgcgtccgcggtctgcttctatacagctagggaagcggaaccagtgctacagccctcaataaacttgggccgagacagaaacacgacagtgcttgatcggagggatagaccccaagcctacccatatggttagccttcggacctcactccccgtaccgctccggatgatttgagccaagtccctaccttagaagggcaacgccctgcttatgccgactaatcccctgcaagaagatgatgaaggagatgctcatctaagccttgttcttgccctcaaagacacggcccccatagattgccccagccaacataatctgccatgtcccaggccaccccacccgtgaagaatacatcccctcggaaagaaaaggaaaaacggttacttaacaa

SEQ ID NO: 84395 - DNA, 339 bp, Glycine max
agctttattctaaattcttatttaagatgagatagttgcacaaaagaggaagcttcctgatcagggagctaacaaaaattttcaggcaggttgtcataccctaatttcgtctggggaccatctgtttggtgggatgtgacgttcgcttgaccacttcgagatacttgatacccatcgttaggaaatccatgaaattctgcgacatgtcgggagtcgaaaggaagcgttaatgcgcaatccgtaaagtttcgtaacatttcagatgccaaagaggggacggttgcgtaatccgtaaggttttgtgacattacggaaagaaaacaagtatcgttacctaat

SEQ ID NO: 84396 - DNA, 204 bp, Glycine max
acatggtgaaacttggaagactcaacaaacatgagccaataagccactgggcccatatgctcgcggacctgcagagatccatagaaacgcttggacagactagtataagcacgcacgactgcaagccggtgacgagggcccgcactaatgtagacccacccattgacgaacaaacgaacaacccagggcgaggcgtccaccaaa

SEQ ID NO: 84397 - DNA, 341 bp, Glycine max
agcttgtattcacttcattgttatctggagtgggtgttacgctatctaagatagcatactagttggcatggaggcattgcttatgcaattcagtttggtgacgatggttcctaaccatcagaagacaaatggctttctcatgcctggttggttcttcattaatacaaaataaagtccatttgtttccctacctgagaggaagggaattctatttttttttctatgtaactatattgattgttcagtatatcgatatagaagaaaaaaatatactcatttttttcagaagctgtgagaaccacacaacagacaggaaactcagctgttaactgttaatgacc

SEQ ID NO: 84398 - DNA, 313 bp, Glycine max
aattcttacaagcttgaaccactctattcctacaattcatatagtcggagctgcctatgttcaccagttgtatcatgagatgaaattcgtaaatattaaagcctcaaaagctctatgttgcaactcaataggtaagtgacatgattttccatagaacaactggaagagagtaagttctgtggaggctttatatgtcgctttgtatacgcgctaagagttatttagctgtagggaccaattcttccttgattgagcaacttcttattttagaaatttcttaacatccttgttagaaacttgaacttgatcaatg

SEQ ID NO: 84399 - DNA, 345 bp, Glycine max
agctttaaaagattggcttttattttgttaaaacataagcacttagacaatgaaggaaagctggagttgctgcacatgatgtccaacgttatgtcaaagaataagatcgggctacacaatgcacaaggcaagatgaaatgtcaaatgaagaattgaagttgcaggattcacgatgtcggatacaatgtccaggacatcctgcccgaaaatactggagttgctgaaagcattgaagttgcaggatccacgatgtcggatacaatgtccaggacatcttgcccgaaaatactggacatataaatctgttatatctttaacagattattgtgcagttagcaagagata

SEQ ID NO: 84400 - DNA, 326 bp, Glycine max
  unsure (1)..(326): unsure at all n locations
agcttaacttttttattttcaaaaantgaagccgagccgggaattctctcccgactcaagtgaaaggaccacccgcagcagatagagcgccggcccaacgcacagctccaaccgctccccggcctattaataatacagcacctggcgcaagctatatatatgcacagcacccgcccccgaaagataacttctcccctattcccatggcatactccgagttatggccttcattattggagaatcatttggtggtggccatacccgggaaggtcttctaaccaccataccccaagtggtacgacccgggtgccaagtgtgtgtaccat

SEQ ID NO: 84401 - DNA, 337 bp, Glycine max
agcttaatagcgactagttttcactaaagagctatttttcaataattcaagatgtatagattgcataaaactcagtaaaaaggttgctagggacttcagataatagaggcttccatttctaatagatgatgggttgttcgtacggtcacctgttgccacttggttgttgttagagtggtgtttgctgagcagtttcttacttagtcattgcaacatagggttgttataacactggtgtttgccgagcttattctagcttaaataattttaatttgtaaacttttaatttgcgaattgaattcaattattgagcattttgaaaccattcacaatgtaa

SEQ ID NO: 84402 - DNA, 378 bp, Glycine max
agggtgcgcatcttaaatgcgagcgtgatcaatattattgttgatatagtgagcctttcgctacccatgtgtgaagatactaagaagacagatttcaagattgtcttatatgaagaaatgccctcaacgcagatgaaagttgaagtactgaactattcaaggaactatagttccttatttattgggaaaaagcttgctcatgctctataaacatatgatgccaaaacctttatgaaattagattgtatgggttgacaccttaacagcttcatcatctaattatgtttagaaacatatgcctgtggtgtgttcaccaaagatgtagaacactacttggcattaaccacttgttaagtttcctactcttcacatgaactt

SEQ ID NO: 84403 - DNA, 299 bp, Glycine max
ttctaagatctaaaaaaggcatagcttgagcatatgatcggatcacatcatttgttacctgcataaataaaaataacaacaacatcaatatttttaaatcataacataattaacattcaattaaatagaatgtattacatacttttacagatctacgaaggtgttgtttccaaaaagaggagtagttgtagattccatggtttaggctttggtactaacgttaagaagaagttaaagagggatatatgagaacgagagaaagtgagtctttgagtgagtgtatatgatgacaatacatg

SEQ ID NO: 84404 - DNA, 470 bp, Glycine max
tctgtttcggaccttaaatctcagctttgaaacttttaatgcagatatagatagaaatgtctttgtttggcaagtcatccactgaagtgaacacaagttttattaaagataggattgatcgttgagtgacttaataaaagagagagtccttaaaacaatttttcagataaatacttggttataaggaagtgacaaagagttctaatagaacacttaataaattgttactagatcactcaacctgagctacgtccagttctcctttactcaatattaaagggtccactaatcaaaacttgattacaaagaaagtattttgatctgccactcctagctttacaagtattcttaataccacttctggcactttcttagactctctctgaatataagaaacctaagttatgcttaacactataccactctttgctttacaaatagtagtttgaatgaatcatgtattaataaca

SEQ ID NO: 84405 - DNA, 344 bp, Glycine max
  unsure (1)..(344): unsure at all n locations
agcttgcttcacaatgtcttgtttttttntttcaggagcttccattcccatttattaaaggcccgagatggttttccctttgctggtgtaagatctttgactcttcgatctatagtggtcaatattcttgccttttgctgaaattaaacattgcaattttcagtttatagaattaagctttttttaattgttgtcaagtcaactcaattgagaaaattagaaccacaaatcttttggtgtgttcaaaaatttctaagagcaagatccattgaaatgatttttatggttgaagagatattgttatatttggcatgatgtggattatttgttttaactttgcagct

SEQ ID NO: 84406 - DNA, 273 bp, Glycine max
ttccggcttccttttccctaagtattggctcttcactcctgaaccccttcagttgaacttcatgagtaacaaaactactcgcaaaagggtgcgcacgcccttgtttttcaaatttataccatatgaagttcacatttttgtcaataattttgaactcaattcgggtcatgagttgtgtgttgtcctataagtttgatgcatggtttgctcttgtggcttgattttcttaccagatactacttcatgaaaggaacccgcacaattcgaaggatg

SEQ ID NO: 84407 - DNA, 145 bp, Glycine max
accacgacgtggagcccgaaaggccggagacacgcccgggagacgcaaagagccgacatggccaagcagacaaaccccgctcaaaaaaagatgcccccaaagccgggacagagcaacgccgggacaccgaacgaacacaaggcgc

SEQ ID NO: 84408 - DNA, 338 bp, Glycine max
  unsure (1)..(338): unsure at all n locations
agcttatggtaaaattctttatttagccatggnagaagtctccacagaggccaatgcctccctcgcccagtattatgatcagccgatgaggtgcttcacctttggggacttgcagctatcacctatgtgtcataccctaatttcgtccgtggattattacttgatgacatgcaacctttggttagccgctttgagatacttggcgtcctttgttgcacaatccgtgaaattccgtaatgtggcggaaatcgaaaagaggtgtttttgcgcaatccatgagtttccgtaacttcttcgaaagctaaaaaagagtaaatacataatccataaagattcgt

SEQ ID NO: 84409 - DNA, 439 bp, Glycine max
tctaaacgcttctaaaccactccgattctctcttcctttgtgaacatcaaaaagccagagtacgtggggaacaacacaagagcatgcatataatccaatataactaaagtgcatagaatcatttataagtcaaaaccaagtataaaccaaccaaatagaatccaatcataaaatactaagtgccaaataccgaaagatatctatccttgtgtaattgattacacgtaatggtaatcaattaccagaacaatatctaggttgtctcatcaaaaaatatatatttctatgctaagaacatctatctatatcagatatgaagactaatactcatttatgttaatcaaaccagtattaaccacacagtgaacacaccaatcagacataatcaatatcttagaataagagatcaatcaatcatgaaacattaatatttcaatca

SEQ ID NO: 84410 - DNA, 340 bp, Glycine max
agcttgcttctacatcaatcatgcctccttctgttgtatgacaagtgccgagctctttcaagatgaatttcatgtggctttggatcttcgttcctaatgcaatatgcagcagaaaccattatggctaattcattgatgagaccatgcatgatagccaaaaggattatgtagcaaccagacctaaaaggagaagcattgtacctgcgtacttgaaggattacatataacaaactctactgacgtggcacctctgtctgatccctgtctgccattagtcccaccactacacctttatttcatatttccattacaccttattagcacaaaattacaaatttag

SEQ ID NO: 84411 - DNA, 433 bp, Glycine max
cgctttgctatcattaaacaatagttccaatatatttgatgctttaaggtcacactaactggttttcttgctgcaatctttgctaacccgcggctagttaaatgcttgtccacaacctattcttgaaagtcatgggtgtaatcatgaatacttttaaatataataaaagtagtcgcaaattaagttactcttggatgtacaattacctttcaaccttctatattcctcaaccacagataagaatatgatgtggttatatacaaacacagttatcttggaagcctttgaggacaaatctaaaacatgaagcaaggtagcattgtccttcaaaggacattaatcaatgagtaacataaagagacacacaaagggatccatattttgtgaatacatttaccacaggcacataataagtttcattatctagcactat

SEQ ID NO: 84412 - DNA, 343 bp, Glycine max
  unsure (1)..(343): unsure at all n locations
agcttcttngaataaagntttccatcctcactgggataacaaattgaatagtgttctaggtattcaaccaaatattgaaaatgattctaatgccagatatcacattagaaaagaaggtaatgaagcaacaattcaaggatagaggagttagaactattacaccatttcaaccttgcaacaaagtccttgaatttattatctaactacctttgtcttccctcagaaaccaattgtgccataatactataaatagatgacaacaagacttatttctacaattgaaagggggaggggtagattgaagaaaaagaagacagggaagcttgaaggttccaacaataaa

SEQ ID NO: 84413 - DNA, 341 bp, Glycine max
  unsure (1)..(341): unsure at all n locations
agctttaacancaagacccctaatctaaaaagnagctatgcgcacgttcatcaaaataaacgctatggatagtaatttttcaatttgtccaatttacatgctatgttggaatgaaattaattgaaaagaagcattgggctgtaaacaaggttgcatctcagtttgcagtatatttgtttgtacacacccatgatgttatgattgctctttcatcttgcttagcagtgaacgatacataatatagcatgacttaaaaagaaaggcacaaataatgagatttgatgtctgctcgcacaatgcacattgatttatgcttgaaggctgacaccttgcagattgat

SEQ ID NO: 84414 - DNA, 346 bp, Glycine max
agcttcctgaagattatttcttgtgaagctagagcttagctacacacacctctctaatagctaagctgacctccgtgagatgagaagctagagcttagctacacaccccctataatagctaagctcacccctatgacaaaatacatgaaaatacaaaaaaatttcctactacaaagacaactcaaaatgcctcgaaatacaaggctaaaaccctatactactagaatgaccaaaatacaaggcccaaacgcaggaaaaacctattctaatatttacaaagataagcgagctcatacttagcccatgggctcgaaatctaccctaaggctcatgagaaccctagggc

SEQ ID NO: 84415 - DNA, 414 bp, Glycine max
gttgactggttcagaataaacaggtgatttagtgacttgaatggaataagatcggagttgtcaaatgcttgaaagcattcaaaattctcatttgagaagaactccatatctatgaattttgggtctataatggaacgagaggaaaagaggtttgtgtaccgtatacgctattccttgtagacaaagaatcaagccgcgccaatgttttgatgatgccaaaagatcacatgcgtctcatagatttattcaagacaaagcaatgaaagttatacaagataaatgatcaagacagtctatagagtcttagaaaagggtatattatatacgaagggaattccaattgacgtagcacaaggtttggccaagaattataagttaataagtctgtttctacaacattactctctggtaatc

SEQ ID NO: 84416 - DNA, 285 bp, Glycine max
aaaaggtagacctcctgcacagagtaaaaaatcggggttcgtagaaccctatgctacgaagagagtttcggcagattagcttatgcatacatgaattatcacgaattggagaaactaacgggcacacttgtatagactactaaagaacaagctatctaaaaaaaatgctcgttacataatccaatgaaatgggccccttgtgagagcccagtactacttattttaagtcaacacagcttatacacacatctcaataccaccgactgcgtatataattacaaaaag

SEQ ID NO: 84417 - DNA, 339 bp, Glycine max
  unsure (1)..(339): unsure at all n locations
agcttgggataatttatgttttcgctgngcaaagctaaatctgatgttgcgaaagtcgtacacccgtgtaacaaaagcacacccatgtgcgaggacttgtgagaattaaaagttgtgaaattgaatcctgtagaatgatgattgaccaaacaattgaattatggaattattccctatgcgcttatgcttcctcataatttatttcttaactgaccaaattagaactaaattaagagaaagattgttggaagtgtctagccaaaaccttttaacaaccttaagagaagtcggtaattgataaacattgagagttcaattaacatagaattgagggaattc

SEQ ID NO: 84418 - DNA, 346 bp, Glycine max
  unsure (1)..(346): unsure at all n locations
agctttggaaagctctaatatcttctttacctttgnatctagacaggttagtcactagctaaaattagcttatgcacaagttaaaaatcaggttttggagaagctaataatatgaagagagtttctacagattagcttatgcataagttaaaaatcaggatttggagaagctaatgggccagtttgtataaactttaaaaaaaaaagtaatttaaaaaaaatgcttttttaataagcagataaaatttgcttcttaaaaaagcaaaaaactaattattttaagtaaacacagtttagacaaacatcagaaaaccacaaactgcatattttattttaaaaagcacgg

SEQ ID NO: 84419 - DNA, 328 bp, Glycine max
  unsure (1)..(328): unsure at all n locations
cctatacaanactcaagcttataccaagccacgaatgatcagatggatattgtcgcttcatatatttattaatcataatggacacgataggctctgataatgaggcatcacaccacctatccatattggagaaagaagatgcctcattaaaggaggctgaaataaaagataaatcttcctgacgaatctttgttctttattgtagggagaccctgcgttgctaatatggctaattacaatgcagccggtgtcatacccaaagacctcaattggccgccgagaaagaaatccttctacgatgccccaacttatgtcgtgggatgaacca

SEQ ID NO: 84420 - DNA, 342 bp, Glycine max
  unsure (1)..(342): unsure at all n locations
agcttgtgtgaaatngngttgccttttgctctggnttctaactttcttgaaaataatattcagttttatgattttgcttaaaaggatggtaaaaggtcatatgattgttttcttgctctctctctctctcactctcattctcattctcattgatctatatctatgctgctatgtgtttatcttgctagtgagaataaaggaagtataatgtaagtatttactttctgtcttaggttccatggaactcagatagcagagatgccatttatcggaactcgccatatgtataggcgtcaggggatgtgccgccggcttttttctgccattgaatcggtaaacatt

SEQ ID NO: 84421 - DNA, 345 bp, Glycine max
agcttgtccttagatggttttcttattctgaatgctttagattgtgctttagacccttttatgctatactaattctgaatgcttttagcttgtgcctctgaaatagtgaaatgtgtgcatgaattcaaaaaatggtgtaaacccatcagtcattttaatttactggctaagaatctttgaccgtgtgctaaatatgaaagaaatgaagaaggtgaacggaagctgcaaatggtgaagtgaatggagaaggagatgaaggctaactatgaaggagaggttgcatgaaggaagagaatatggatttctaaaaccccaaattccattactggggaaatatatgtttct

SEQ ID NO: 84422 - DNA, 317 bp, Glycine max
tcgattaccagagcagattttcagaaaatattctcaacaatcacatctttttatgtggttcttgaatggctatcaaaggcctatatatatgtgacttgagacacgaatttgcgaagagtttttcagaacaaaaaagtcttatcctcttaaaaagcaaaatcgttttattctcttacaaattccttggccaaaacacttgtgattcaataaggaattatttgagtgctcaaattgttcaatctatctctttcaagagagatttcttcttttcttcttcttcattctgaaaagggattaagagaccgagggtctcttgt

SEQ ID NO: 84423 - DNA, 303 bp, Glycine max
  unsure (1)..(303): unsure at all n locations
ntgaagtctagtcaaaacactcctcacacacatactattacttatgcatctttcacattcaagaacggagacttagattcctaggccccagtcatccctccggcactataatctagctacaacaaaccacccacacactgacaatgagcacacatcatatcacaagctaagtccccnccaatcatgcacaaacgccattgaggcagttcaccgaacacttgaggggcgcacgttcaacccataaaaacaagggaatggcggcaatgaggcatgcctcactatcttagaatgcaccctaggcct

SEQ ID NO: 84424 - DNA, 348 bp, Glycine max
agcttaacaaaaggcatgctattttgtggaattcctagagcaattcccttatgttatcaaacataaaaagggaaaaggtaatattgtagccgatgctctttctcggcttcatgcattactttctatgcttgaaacaaaattgattggtcttgaatgtttgaaaagcatgtatgaaaatgatgaaacttttagagaaatttttaaaaattgtgaaaaattttcagaaaatggtttctttagacatgaaggctttcttttcaaagaaaacaaattgtgtgtgcctaaatgttctactagaaattttcttgtttgtgaagcacatgaaggaggtttaatggggcattttgg

SEQ ID NO: 84425 - DNA, 392 bp, Glycine max
actaagcttgaagcaactgatgcattggtaacttggaacttattgtgccttgaatcagaaatttgtacctatcgcaagagtttgtggtttatgctcctctgctgaccaccatatagacctctgcccttccatgcagcaacctgaagcaattgagcagtctgaagcttatgctgcaaacatttaaaatagacctcctcaacctcagcagcaaaatcaaccacagcacaacaattatgacctctccagcaacagatacaaccctagatggaggaatcaccctaatctcagatggtttagctctcaacaacaacaacaacagcctactccttcctttcaaaatgctgctggcccaagcagaccatacattcctccaccaatccaacaatagcagc

SEQ ID NO: 84426 - DNA, 341 bp, Glycine max
  unsure (1)..(341): unsure at all n locations
atcttgagatgaggttttctctttttggngaaacatccaggcttgattgttgaccactgagtggcacctgtacacatgtcgcgggggtgacgagaccttggcgacttatagggggatgctattgtcacaaaccattcttgatcaatcccgacccaacccgggcataatctgtcggtgagaacctgttaagcacctaaacaggctatctcctggcagtcatcctattaaaggaaaacaagaccacttacctcggaggctagcggtggctggccaactgtgaattatctctcatatgaggaacgtggcctcagcgcatctacaccaagggtgggtaaaccacg

SEQ ID NO: 84427 - DNA, 343 bp, Glycine max
agctttaaaattaataatttattcttaaagaaagggggagaaagacatgagtgaacgatagaacaaaacttgtatgtattctcttgattacaggattgtcatcatcaaaaagggagagattgtggaagcaatgctttccaagtttattttgatgatgccaaagactcaagtcaagaataaagaatcaaagcaagtttcaagaatcaaagagttgttcaatcaaaacaagtttcaagaatcaaagagtcgttcaatcaaagcaagtttcaagaatcaagattaaagtgaaaattcaagagaagactcaattaagataagtattaaaagagtttttcaaaatatt

SEQ ID NO: 84428 - DNA, 344 bp, Glycine max
agctttcctacaagttcttatttacattttaaactaggatcaactcactttagactccaatttccactaaccccaaatttggctttctaaccctcaaaatctcacatttttctacctacaacattaccattctcacatttaaccctaagttaactctccccatcatctctaccagttttctatcaacaatttcagcatacaaatatcacaaagcatcatcataaaaccctaaaacagaatgggtagctttactcacatcaaacacgtcaagtttagcatgatttcaacaaattccttcacaaataactaccctaaggcaataacctagtagaactacccatcat

SEQ ID NO: 84429 - DNA, 448 bp, Glycine max
gacctataaaactcagcttgtacaatctcataactcctcaacattgccttattgttcttcacattctgcattgatgcttcaccaaagaaaatggtatgatctgcatatcacatgatactaattgccactgagcttcttcccaccaagaggcctttaaactgatcttttttagagcttctctcattagacccgttaatccctcatccacaatattgaacaggagtggggctaacagatccccttatctaagtcccttttgagggaaaaatcatactaaagactcttattgatcaatatggagacaaaagctgatctaagacatactttgacccatgtaatccacttatggtagaatcccatcctcctaagcatatctaccacaaaatcctcactaactggatcatgtgccctcttatattcgactctgacaccaagcagctcatatcac

SEQ ID NO: 84430 - DNA, 342 bp, Glycine max
  unsure (1)..(342): unsure at all n locations
agcttgaagagcttgaactatttatagaaattnctacgacaacaccaaaagaatttcctacagaatggagaactctgaaagacctctccttggataacataattcgagaaatctcaaagggtgtctctagtcgttctagactcatggttttatgtaacaacatggcttttgtttctcaggttgaacctggaaacattgatgaagctttgtgtgatgaacaccgattgatggcaatacattatgagctaaatcagtttaagagaaatgaagtgtgggacttagctcctaaaccaacctctcacaagtcaatcaaaatcaagtgggtgtttcgaaataaacttg

SEQ ID NO: 84431 - DNA, 398 bp, Glycine max
  unsure (1)..(398): unsure at all n locations
gtcttgagaagactcncttgtgaagcttctttgtgattatcttttttgagaagctagagcttatctgcacacacccctctgataactaagctcacctccttgagaagcttccttaagaagattcctaaagaagctagagcttagctacacatacctctctaatagctaagctcacctccttgagatgagaagctagaacttatctacacaccccctataatagctaagctcacccccatgacaaaaaacatgagaatacggaaaaaagtccttactacaaagactactctaaatgccccgaaatacaaggctgaaaccctatactactagatggccaaaatacaaggcccatacgaaggacaaacctattctaatatttacaaagataagccggctta

SEQ ID NO: 84432 - DNA, 290 bp, Glycine max
cggaaaagaaaccccaagaaaaagaaacggcaagagcccccgggctaaagcataaagaaaactaaacctaagggctgcgaaaactgcggagatgaaagacacagagaatttctaatcctatggtcccacgcatgcaagataacttcacgttgggttagatctgaacatattgggcatccagcacgagcaaccataaaccataatattccctagatctccagtctcttgtcccaaaccaagaaccaaaatcaagaagtccactccactcgaaaaaatttctgtccccctag

SEQ ID NO: 84433 - DNA, 337 bp, Glycine max
agctttcgaaaaattcatattggtcataactttcacacggaggttatattcaggcgaataatatattgagacgctcgaaattgaacaatggaagctctcgagaaattcaaatggtcataacttttcactcggatttccgattcaggcgcataatatatcgagacgttcgaaattgaacaatggaagctctttagcaaatcaaatgatcataacgtttcactatgatgtccgattcaggcgcataatatatcgagacgctcgaaattgaacaacggaagctctcgagaaattcaaatggtcctaacttttaactcggatgtccgattcacgcgcataa

SEQ ID NO: 84434 - DNA, 338 bp, Glycine max
  unsure (1)..(338): unsure at all n locations
agctnnnnaaaaatttattatttnccnnacncnntataatggattaaaaagtatcaatcaaattctctgattcgtttggtatagatataggggataaaaagtagttaaaaatgatgaattattttttaataaaatttgattaataaagttaatttgcatatgtataaccctcgatcatttaatttttgactccatactaaatataataaccaataactttttgacatcttgtgcagtaacgaagtttgtcaattaatagcgtgttgattttacgtttgtgatgcaatttttgatatctcaaatgattcattccgtatcaatgagtttcaaacatacta

SEQ ID NO: 84435 - DNA, 336 bp, Glycine max
  unsure (1)..(336): unsure at all n locations
tnctttgggcgcaagagttacactcctccaataaatattcttaaccctatgggccaatacatgaaggaagaaagcttccttgagaagcttccttggggagcaagtgttacacccctccaatagttaagctcaccctcatctgaacacatacccctctaatagctaagctcaccctccccccaaaaaaaatacatgaaaataccaaaaacaaggttttactcacaaagactacttcaaatgccctgccatataacgctaaaaccctatactactagggtaccctcaacttgtatgggaggatgcccttaatttgtaaggtacctggtccaacctacc

SEQ ID NO: 84436 - DNA, 348 bp, Glycine max
acctgagctgcaacttataacgtagattttttttttcacgaatttcaggagtgctatctatcatcccaccttcgttacttaatgggcactacgcataattccatgcaagtaaccaccagtcattatgagggacacaagtgacacaacacctgctggaaagacctttcctgatttcttgaaacgagaacccatcaccccaagaagtgcatcagatatgcctgtatgtggggagtaaagcataccaaatcagatgagcagaagatagtgcataaactgaactaataagctcaacactgaaaactcataaatgtatatctatttcaaaaacgaactcgggtacccaaactt

SEQ ID NO: 84437 - DNA, 342 bp, Glycine max
agcttatgcacattggggatactatttatatcttgaagtctcaggactccatacgatcccacattgaaactactatctctccctgaagctatgacttctaattgagtattcagaaaaggatcaaacttctggcccactttgatttctcctaacaactcactagtaatcctcaaagcacctagtctcacactattaggggtaacctcacatgcaaggctaaggtctctaaactcttcttgaagatctagttctctaaccttcagggcagatatatgtagggatttcctactcaaggcgtcagccactacattggctttgtctgtataatagctaagctcaaaa

SEQ ID NO: 84438 - DNA, 300 bp, Glycine max
gatatgcgaagatgaatgttccagtaccttggatttggtacgaacgtgccctcctgatttccagctgggaaattggcgagtggaagaacgctccggcatttacgcgacgagcataatgtaaacctttacggttttaaaagctctatagttgggcctaggctttagattttttccttttgttaaggctttgtgtcttttgtttttgaatttataatacaaggatctttcttcatctgttcctggtctctacccattctcattcatttgcatgtttacttctttttctgaaacggcagatcc

SEQ ID NO: 84439 - DNA, 362 bp, Glycine max
aaccggcaggcttccaaccttctattccaaggttttttttgtggggaaacctccttccttatggcttattccctaatgggatgcgccttcttttaacctttttttctttgtcttccgctgcattctcctggtggaaaatcaccataaaagaccccattgaaactcaaagatccagcctccataaaagccccacaagcaagcttccatcaaaactcttccaccatgggtgataactggaagtccccaaaggtgaagcacctcaacggccggtcataatattgggcaagggaggcaatggcctctgtggagacctctgccatggctaggtcctaaatcttactataagctttgcgaaaggcttg

SEQ ID NO: 84440 - DNA, 386 bp, Glycine max
aaaactcagctcgggtgacgtgaagatgatgctgtcttatccaacattcttttatatgaggaggctcaatcctcaccgtgtgacatgaatggtgagggtgttcccgggaccgatggttgctacggatattcttccagcactactaggatgcagtcggagatactgtctatcacttagtgctgcaattgttcaagtctatgtggattctaccaaattgatatactaacacggcggggctcgctcgtataaacttagatgcagattctatcgacaactataggcccattgcttagcttgatctcgattcatgtggtcttaatttaatactaactatatctaggtgcgctcaagttatgtcaatccatgatgttaatctcatatctatg

SEQ ID NO: 84441 - DNA, 335 bp, Glycine max
  unsure (1)..(335): unsure at all n locations
agcttgtgcttgttttattttaatacctangatcatgagcaactaggtgtgtcctgctatgacttgagaaacaaaagtgatcaaataacaagcagagatttaaaacggactaggttgcctcctagtagcgcttctttaacgtcttgagctggacgcgtgatggcttgtcggtcattgacctagtactttgcttacctttggctttggacttggtcgcctattggtcggccatgggtcgtaagcaacgctctaacctttttctggatgagctgaggtgaactctagaggtgatggcggtgcgtctgttgcccgctgccggccatccctaggctgct

SEQ ID NO: 84442 - DNA, 340 bp, Glycine max
  unsure (1)..(340): unsure at all n locations
agctngttcaagcattattttgtgggtatttttttttgtgtgatgtctagtattttcatgtcaaatatatcaataggttttggttattggatgcaatttttatatttagtaaaacacattgattatgtggttgattatttattttggtatttgcatttcaaatttagtgaaacactttactttaaaaaaagtcttatatttttttaactctatcaaagattcatttccttctaaaccttcacatgtttcaattttcctctccaaaccttccgcacccatctcctcttttcttttcatcccaaacaagtagttgggaccataagaaccattttagcaaata

SEQ ID NO: 84443 - DNA, 431 bp, Glycine max
tgcttctacatttcgctacattatcatcaaagtctagtctaactgttccaaatgcttcaaaataagcatactagctatctaaaaacaaaaatagcagtgtatataaacattaaccaaaataacaaaaaacaatgtactgaaactataatcattataataataatccaaagagcatcatcatgaatttggaattcctgtgactggtcctaagtatcctgtgtctgaccaccctcctcgtctgtcagatgaagtactggagtagctggaggaaaagtgttcacattcacgattggtgtcgtcgggtcctttggtatctcgagtataggagtggaggggtctgctgcatgctaatgtaaggataggtccaccactggggttggtggatctgatgtgatctctcgtgacctcttaagagtagcagcagcttcctg

SEQ ID NO: 84444 - DNA, 335 bp, Glycine max
agcttgatccttccatctttatgaagatgaaatggcaacaaagcatctaagtataacgtgtccaatgttttcaagcaacatttttccttgtttccgacaattagagcaatcacacggaacacatattttcactgacaagataacttcaatccatggttttcgtaattacagtacagtagagatggggacaactgctaagcacaactaaaactcgctaaaccaaaattgtgaccgaataattatccaaaaattgaataatggtctaaaatgaactgttacagatgatgagaatgcatggctaaatcttcctggagaggcgaaaattggcactcttc

SEQ ID NO: 84445 - DNA, 440 bp, Glycine max
  unsure (1)..(440): unsure at all n locations
ngcctgaactatggaccttcctcccgtgagaggatatcttcaactcaggacgctcctgaatggaagtataaaggaacgcaaaattcgttaaaatcatcatttaaaggaaaactaatttcagtcataaagtataatttacaagtaactaaaaataaatattataaatacctctcccgtccatacgctgcaagcaacgtgttccccatactgggtcaacacggatgggtcgctcggaccacccggaaatccctcatgctcatcctcagtagcctccgcgcctgtgtccataggaatgtttgccacaatatcctcagaatcaactggtgccatcggctcatcctgaaatacatcagcctcaacatctggcgcagggaccactggctcatcgtgcgtcgcagtcacaatgacttgcctgctccgtgcggatgccgtaggtcatc

SEQ ID NO: 84446 - DNA, 342 bp, Glycine max
agcttatccccactttattttttaacagctggcgagtctgcattgattatatgaggctgaatcaggtcactagaaaagatcattttcccctgcctttcattgatcaaatgcttgagcgcttggcaagtaagtctcattactattttcttgatggtttttctggttatttacaaattcatattgctcttgaggatcaagaaaagaccacattcacctgtccctttggcagttttgcctataggaggatgccctttggcctatgcaatgcccttggtaccttccagcggtgtatgcttagcattttcagtgattttttagagacttgcatagaggtgtttatgg

SEQ ID NO: 84447 - DNA, 436 bp, Glycine max
gtcccacaatatgtctatatagtgcactacttatttttatctcttcaggatctttgtgcaacttcggacccctctcaactggagtatttacagaattgcaatcatgcatttgaaatatgtccaaaatatctctcacatatttcttttgagaaagaaaaattccaacatctgattgcgctatttctatacccagaaagtaatgcatcatggcatgatcaatcattccgaactcattcattctatacttcttgaattcatcatacatgagagtacaatttctagtaaatataagatcatcaacatataagcatactatgagcatttcttctttttcatcagaattaataaacaatgaatgctcatacgggcattgtgtacacctagcttttatgaaataagactcaatgcgactataccaagcttgaggggcttgttt

SEQ ID NO: 84448 - DNA, 342 bp, Glycine max
agcttcgaatttttttgtttcttctgggatagaagtcattttggatatgataaagctctcataacaatttcagattgcaatatgatcgaaatgcatgacttgatgtagcaaataggtcaggaaattgtttgtgaaaagacccgggcaaattaggtataaaatataattgtgtaactttatatagtcttgcacaatagttcttaaaattgcatatttccttgtgaaagagattgaaagccttaatgttcattcagaatttttcgatttactgtacctcaagggtggttcatctctcaagcaattgccactgacaacaaaagaaatggagagcttgaacttatc

SEQ ID NO: 84449 - DNA, 452 bp, Glycine max
gtgatcatgagtaccacatcttcacgcactcggtgtatcacgttcaaatctatttgcgacactgcgttattgtcatctttagcgaagtaatgtctttaaagaataactttccccacttcgactagtaacattgtgttcgcatcgtatgtaatctgaaatggcgtttcttgagttgtatacttaagggtgcattatgaatcctataagatctgcactagctattcgacccacctttccttatctccacctagatgcttcttcaatacactcaaaatcaccttgtgtgaggcctcggctcgtccattgatttgagggttctttacagacatcaccctgcgcttgatgtcatgatcaccccaaaattcattgaattgttggtctatgaactgtgagcatcatccgtcaccaatatatctagaattccgaagcgcatgatgatgtttttcaaaaaa

SEQ ID NO: 84450 - DNA, 321 bp, Glycine max
  unsure (1)..(321): unsure at all n locations
agcttgtatatgcttttcttatcgacgctcttncggacgctggttatcagtcgacgctgtcctaattgcatcacccacacgcgatattgcgacatggacatcgctctgaatcggacttattcaatccaaagattggcgaatataatacctttttgtataaagatgagcttcggaacgcggatccagaatgtctaaacggccatcatagcctgtgcgcttaataaccatgtcgttcttaacgcaccatgagtcgggacgttgttatatattagaatgaccaacaatccgacgaagataacggtatcgatgccaccacgccgg

SEQ ID NO: 84451 - DNA, 336 bp, Glycine max
agcttgtgaagaaatatgttctcgctgagcaatgctaaatctgatggtgcgaaagtcgtacacccgtgtaacaaaagcacacccatgtgcgaggacttgtgagaattaaaagttgtgaaattgaatcctgtagaatgatgattgaccaaacaattgaattatggaattattccctatgcgctgatgcttcctcataatttatttcttagctgaccaaattagaactaaattaatagaaagattgttggaagtgtctagccaaaaccttttaacaaccttaagagaagtcggtaattgataaacattgagagttcaattaacatagaattgagggaa

SEQ ID NO: 84452 - DNA, 436 bp, Glycine max
tgtggtgactgggacgcacgtcattctgttcgtttccttatcagatccttcgcccagtatgtgcatgtgtctatatttgtattatattccttgttccgggcggtgcttgtattttgcttgtgcacaacaataaaaagatgacgctgacatgatattcgtcttcgtcaaacaggcatgaccgaccacatcatggtcctatcttcgctttcctcttatctcctaagagaggtaagtagagaggggcaactgtcttaccctaatatcgtccggcgattattacttgatgacatgcaatcttatggtaccctctttgagatacttggcgaactttgttgcccactatatgaaatcccctatacgttcagaaatctaacgtgagcttgcttgccgatccgagaaatccctaatgtggcggactccgaaaagatgatttgcc

SEQ ID NO: 84453 - DNA, 338 bp, Glycine max
  unsure (1)..(338): unsure at all n locations
agcttgntaaagaactttttaaaatcaagaacaagcttgttcgcacatcgttcgcgtgtatgacatccactccacaaggtttgaagtaaaagagaccttcaatcctattacgcaacgtggcggacaaaagtgggcagttaacttgaacggtcattattgtcaatgcggaaggtattctgcgcttcactatccatgttcacatattattgcagcttgtggttacgtgagcctgaactactaccaatatatagatgttgtttatacaaatgagcacatcttaaaagcttactccgcacaatggtggcctcttgggaatgaagcggctattcctcctttta

SEQ ID NO: 84454 - DNA, 439 bp, Glycine max
  unsure (1)..(439): unsure at all n locations
gggttcgaggcacttacccgctgaagatcttagaacgttgaagaacgaatgaagaacgaatgaagaacgtctatgaacgggtcaaacctttgcgagattcctcacggaaaacgttacggaaacgtttcggaagcgcctcggcttagattttcttcacggaaacaatttttccaagcaaattcgaaagagagagaagtgcctaagggggctggaccctttccttcttcatttcctcccctatttatagcaaaataggggaggtggttgcctgccagctcgcccaggcgagctcagctcgcccaggcgagcagggntgcttcctccagaagcaaccgccttctggaggaatcttctggagggcccaaatgggcctgggtgctatntgcaccctcattcttactaagtacacacccctctgctgttttttgggattcttttt

SEQ ID NO: 84455 - DNA, 208 bp, Glycine max
  unsure (1)..(208): unsure at all n locations
agcttggtttaattgataatattcaatttcatagtatattatagtaattgagaaaantttaacctttcacttttttcttgttattacatcgtatctagtagttttcaagtacattaatttatacttgtgatgtttcttttgctcatgaacagtatggcttgcagaagacaatgttgctaaaagatcatatgttataaaccaggtaagt

SEQ ID NO: 84456 - DNA, 262 bp, Glycine max
  unsure (1)..(262): unsure at all n locations
tgaggcatgcaagcttgatcaatgtaaaaataagcggcagctatacagctattacttgcattgacaatcaaaaatattgtgagcttagctgggtgcttcttcaagggaggggaaaacttagtatgagaatngcataanaacggacaatgatataatactagttagagtagagaagcacataagacctgtttgaatacaagtcacaagtcaaaagtacttttgagaacttctctacacatttttttcttgatatttctcattg

SEQ ID NO: 84457 - DNA, 212 bp, Glycine max
  unsure (1)..(212): unsure at all n locations
tagttgatggtggagtagaatgttggaataaaactggaaagaacccaagtgcaagtagaagaagagtctcataagtcaaactcattaataaataaagcatcatcatttgatggcctatatattgtgataactcaagctcatctaaagcactntcagttnttgagagcttacattacatacatacgtgactgcatcacgacaccacccataat

SEQ ID NO: 84458 - DNA, 311 bp, Glycine max
  unsure (1)..(311): unsure at all n locations
agcttgtanggttaaagtctcacgaatgtctcttgctcatgcaacaattgttagcccgggctatacgaaacatccttccaacaaagtcaaggtagccgatactcgcccgcgccttttntttcctggctattttaaccaaagtcattgatccagaccatgttggttgagtcgggaaaatgacggcacaatttatactgtgccatttgagatgtatttccccctgttttcttgacatcatgattcactgatgtgcatctggtcagagaaatacatgttgtggtcctgtttattacagtggatgacccggttga

SEQ ID NO: 84459 - DNA, 294 bp, Glycine max
agcttgcatcgtttaaaaatgattttgaatgttttgttatctattacacataatatgtaatcgattaccagtggctctgaacgttggaaaattcaattttaaatgaagagtcacaacttttcaagaaagataactgtgtgatcgattacaccaagatttgtatcgattaccagtgataaagtttgagaaaatctgccagcagtcacatcttttcacttgattttcaaatagccatcaaaggcctataaataagtgacttgcgcacgaattttctttagagttttccctgttcac

SEQ ID NO: 84460 - DNA, 346 bp, Glycine max
  unsure (1)..(346): unsure at all n locations
agctntgagccanaatcctgactaccatatttcttacctcaggtgttaatgtcaatccttaccctcggaagcaaaaaagaatagaagggaaatttccaatcaaagaaaaagagaaggaaaatttccaatgaaagcaaataaaagaaaagaaggaaaattccccaatcaaagagtgggagaaagcaaaaagaaaagaaaggaaattcccaatcaaagaatgggagaaagtaaaaaaggaagaagaagaaggaaagaaagctcctgatcagggatcgaacgaaaaacagaagaaatgtgcagaaaggtctttggaccggacaatatctgaacaatacagatttgtcac

SEQ ID NO: 84461 - DNA, 342 bp, Glycine max
  unsure (1)..(342): unsure at all n locations
accttcacactcaagctggtagaaacgtggcattgtgcgcatacacaatgcccgatcacacaactaatggtgtatcatatangcgtaacagaactttgatggatatgggtaggagtatgttaatcaattatactttacctgtatcattgtggatgtatgccttgaaaactaccatgtatttgttgaacagggttcctagtaaggcagttccaaagacaacctttgtactgtggacanataagatacctactataaggcacctgcatgtttggggttgtcacgcagaaataatgatttataatccgcaagaaagaaaaatggatgcaagaacaatcagtggat

SEQ ID NO: 84462 - DNA, 314 bp, Glycine max
  unsure (1)..(314): unsure at all n locations
tgttcaagagaacgagaacagattggatcctcttgactgcctccatgcgagggacatgtctctcactatgaacattgtttataacagcccaacggtggtgatgtgcgcaagngagatccaaacttggtgttctaatttgacgatgatcccaacagttaaccgacgtctgangtgctttatttttcactcgtgacacagtgtgggttgtttgtgtcaaaaaaagaactctgtgcaagatgccatttcttttaccctatacattattttgcagatttcagcaatcaaggtgtgagaaaataagtttctaattttat

SEQ ID NO: 84463 - DNA, 252 bp, Glycine max
  unsure (1)..(252): unsure at all n locations
gatccttaagcacctgcagctgcagctgaagtacgacccaccatttttatagtataacactagtaatgtgtctactattattgtgatcatctccttctccatcattggaggtggcacttgagctgccaagtctctccatatttgggcgtattctttcanagattcgtgcccttttttacccatgctctgtagttgcatcctatccggagccatatcagaattgtactgatactgcctaatgaaggcaacatt

SEQ ID NO: 84464 - DNA, 274 bp, Glycine max
cacttttgaagaactacgaggtctgatttctcatccaatgagaatcgtggagcaaaccccgctttgtcaccaccccagagatcgtaatggccaacgcttaacgttctctctttcaaaaccaaagatcgtatggccacaccttacgttttctctttaaataaagacttatggcaccttaatgacttttagcaaatttgcaaaataacactacccgtacttaaacacagcgttcttactggatctacagaacctgcaccaagtaaaaattttttta

SEQ ID NO: 84465 - DNA, 411 bp, Glycine max
  unsure (1)..(411): unsure at all n locations
agctntgctgatntagncntcttcgacgaattgatcgaagngggtctgaaaagaggcaaatttaaccatcgcttggacgaatgagaaaactggggcaaatgaagagggtgagaatgaaagagaaacccatgttgtgactgtctttcctacatgggaaattccccaccagctcaacaacatcattactcagccaatatcagcctttctccttacccaccagccagttatccacagaggccatccctaaatcaaccacanagcctgtctactgcacttttcaatatgaacaccacctttagcacannactaaacactaaccaagaaatgaatttgcagcgaaaagcctggatattcaccccaatttagtgcttatgtgactgctccatattacttgatatcaatgtagcatat

SEQ ID NO: 84466 - DNA, 473 bp, Glycine max
  unsure (1)..(473): unsure at all n locations
gacccactatccataatgagagatctattnnntttttaaaccttgcatctcgtatgaaatatgttctctctttanggttgggttaggtcagcggaattactcccaaggagccttctcaccattagaagatcaccttcttcatagggtaaacctcttcaatatgctcatcacccatggcttcaccttcatttccacttgaggaaggagaagaagtagcctcctcttggctactatagatgtcttgacccctcataatcatggttttctttgtgggggtattgagaagcaatgtggcctttcccaatacatttaaagcacttaatgttactagttctatcttatgaactagcctttggagtgatttcctctatgcatttacccttatcatcctttggcttagaaaggggtactcttgtctcttacttcccatattanactactangaacctacatgcttgttttcctcctcctag

SEQ ID NO: 84467 - DNA, 499 bp, Glycine max
  unsure (1)..(499): unsure at all n locations
tctttgggaccttgaacaagcaatcaactcctctntcataaccatgctatgtgctcgcgactggtccctntcttcccttcgcaacttgagttcactattgctaccccatagagctccgcgaaatttgttccggccatactcttccttgcgagccctcttggtctctcgttcaagggcccttgcggtaattgcattctcttcccgtaacccggcacactccttccgaacgtgtgtagcagccaacttgaacttctccttggcgagttntgcctttcctaactcgcttttgagagcttnggacttctcgtcctcttccggtgcttcanaattctcttcgctgacgacttttaacttggcgagccaatctaaacctcgtatgcgaactntcagccattctgggtacccaccaatgatgccattacgaatgcctctaagctctcgatcttttcttaacggnngttcccatgccttatggattctctgtatagtctnggaattt

SEQ ID NO: 84468 - DNA, 350 bp, Glycine max
  unsure (1)..(350): unsure at all n locations
agctttganaagtgttggttttctctttctctctaagccaatctgctggctgagcgagcgtccgctaatcgcaagggagactctggaagaagatgagctatacaggttcgctaagcacaccggttcatttcatcctctaagtgagaaaggcgcgctaagccaaaaatcactaatgtgtgctaagcggtccataagtgcgctaagcgcacgagcacgaacaaggccacgctattaagcctgaaatcagattttatagggagagtttggactgggaatcaaagctctgcatgtctagggtttctagagagagacaggtccaagttccacagagttttgagagattttgtatg

SEQ ID NO: 84469 - DNA, 386 bp, Glycine max
  unsure (1)..(386): unsure at all n locations
ctaatggatntcggtataggccaatgaaggactgcatctactcttttttggatccatagagactccctctctcganatcagatgccctanataatcgatggtggtcctgcccaaactgcatttcttgctgcttgcaaagaaattatgatgaaagagagtgtgtaagacctcactcaagtgctgtagatggctctcccaatcgctgctatataataagatgtcatcaaagaagaccaacacanatttctgtagaaagggctgcaacatagaattcatagctcattgganagtggcaggggcgttggtgaggccaaaaggcatcacaagggactcataatgaccttgatgagtctgaaaggctggtntgggaacgtcttcttcactca

SEQ ID NO: 84470 - DNA, 268 bp, Glycine max
gctttcgaatatatgcgcctgaatcggtcttccgggggacaagttatgaccatttgaatttctcgacaccatacgttgttcaatttcgagcgtctcgatatattatgcgcctgaatcggatgttcgtgtgacaagttatgaccatctgagtttctcgagagccttcgttgttcaatttccagcttctcgatatattatgcgcctgaatcggactttcgtgtgaaaagttatgaccattggaattctcgagagcttccgatgttctatt

SEQ ID NO: 84471 - DNA, 346 bp, Glycine max
  unsure (1)..(346): unsure at all n locations
ctaatggctgagcgtaactgaaattgnggcaaccataagtcacccccaacagccaacaagtcatgcaccatttgagctcccacaaagctgatgcctangctgccaattgtgcccttattacaacttgaactaaacctaactaaagctctattatttgattaaccccaaacatatttttggtcagccaactttacaacgatngtgccattatttagaccaactaaacactctaaaattgaaacacagtggtgacatntagtcctcctccatatgggccatgatacaactcacaaccgtggactcttctccttgaactcgggcttgattcaaacagtatggacacact

SEQ ID NO: 84472 - DNA, 331 bp, Glycine max
atccttaagcaccgcggctgcactgataatattttgctcctgagggaaaaaattgatgatagaaaaccaagtataggaatactggtagaatatatttttatgtaaccatctacttaataaagatcatttgtgtgatacatacaacaccaataccaaaaatcccatttttaatagtactatagcaaaatatgcattgttttgcagttactttgtttttggaatagactatgtggatttaggaaactttgggcctgcccaaaggatttgtgattaatttctatgttttggatggccaaagaggctaaaattttgtgacactgttatgtctttt

SEQ ID NO: 84473 - DNA, 376 bp, Glycine max
  unsure (1)..(376): unsure at all n locations
cacttcttccttcttcccctctacagcctccaatgattgttactgtgtatacaatgaatgtcactttgcacacagtgaacgttactgtgtgcacattaactgtcaaaaaaatgaaggaaaatgcatgcacaataacaataaaaaaattgcacacaataattgtgtgaaagacgtttgttagaagctttgcaaaactataaatntgntcaatacacacanaaattgtacacccaattttcattctcatttctcattnttcaaattcaatctcagttaatttttttttcaaaatggatctcaaatcaattgattggcanagttatatattttttttacaaaattacaacataccttcttcaacccaaaattcaaaaaa

SEQ ID NO: 84474 - DNA, 264 bp, Glycine max
  unsure (1)..(264): unsure at all n locations
agcttatatgaagcttactgctaatggcaaactgccgggatgtcaattatgaacctggccgttgggtcctcttgaagctacgaccgtaccgncaacatttcggcaaaggcacacaggcaggttccgggcaagcttgcaaacgcttctacggtcccttttcaaatcactgacccacgtggcaaagtcacatatcgcttgaaagctccagaaggtgcgcgtattcatccttgtgtcctttgttccctcttaaaaccctttcacagc

SEQ ID NO: 84475 - DNA, 219 bp, Glycine max
  unsure (1)..(219): unsure at all n locations
tataaaaaaacacaatttgcaaatattatctatatattataaatataaactgatcaatgagatatcaatgcctgtagcaattactattcgtttactcttagccatattgctactggatttatgatgatgacattanaacctgaccnattggaagattcaaactgcctgagagtcatgctgatacagaagtgagaataaatcgcagatgatgattgattg

SEQ ID NO: 84476 - DNA, 334 bp, Glycine max
  unsure (1)..(334): unsure at all n locations
agcttagccaaattcaaatcgaatggaagtttgcttagctttacattggccagctaagcggaacaaatcagcctcagatgcaagggttgggcgctaagcgctngagactcacaacttagcgcattaacagagttgcgcttagcgcgaggcttgtgcttaaggaaaggactatttttcagaaaaaaagtttctgagttatttttcagttccttttcccaaaaaattgaaacccttatgttaaacattcaaagaatggntgatatactcctatgtacagattatatagcaagttccaaatgattaatgcctganaaccaagacacagaaattaaac

SEQ ID NO: 84477 - DNA, 432 bp, Glycine max
  unsure (1)..(432): unsure at all n locations
agcttgtgatgtatgcatctgatccaacacactctgctttactaaaagcctggcagggaccttcaatgacacataaaaatgaaaataacattatcatatatactccatgacatggattttcctaatgcaccctttcactggtcaatatactcttgaaccatggtaaactttggtgacacctgttcatgctttctggactattttaaaactgaacattnttgaaaacttttcttcattattctncgagtgagggtgagtgttgagatcccatattgattagagatatgaccaatatagtccctataaagctngagtagtcctcttcttacaagtcagttnttgtagtccaaattctaagagggaactntacttttaantttctattatcttgatctgactattaatatttatccaggaaggactgttatattt

SEQ ID NO: 84478 - DNA, 457 bp, Glycine max
  unsure (1)..(457): unsure at all n locations
ctaccttttgttatatttggtctgggagggcaacttgaatggacataatggaccccaggggaagagggactgacacttaccactgcacatcttagggggatgtnnttgtccttctcgtgttctatcatatatggtgacaccatttaagaacanaacgaanacaagaaaacccagtcgaggtctcaagtangaagcttagacagaaagtcagaaactcaaataatggaatcaatttttatgtaagtcactacacctaccatacataatggctccaataaaagcattcccagcaccagttgtatcaatcagctcagaatctggtatcttctcagctgtccaatatagaatctccacannatgtccctattcattgctctgantntgtcaccgctgataactcacccgtaagatagagggagactatatatctaatatagtcctatattacttgcatgga

SEQ ID NO: 84479 - DNA, 344 bp, Glycine max
  unsure (1)..(344): unsure at all n locations
agcttcttatccaaggctcatcttnggggtgtatctccttcttccatggcttattccctagnggatgacacctcctctcacctcttctcctttgtcttccgctgcatctccatggtggaaaatcaccattaaaggacctaatttgagctcaaagatccaatctccataaaagccacacaagcaagcttccatcannaatagacctacgtagttctttcataaaaacagaacgttggttaagttgttttgatatttttccgcaagatcgattgtaaccgaacaaaagtcgtttaaggtgttgggcccttatacgatctttttgatttttgaaggaggggagcact

SEQ ID NO: 84480 - DNA, 315 bp, Glycine max
  unsure (1)..(315): unsure at all n locations
tgaggcatgcaagcttgcagcanatgctaacgacaataacatttcactcggttgtccgattgagncccgnaatatatcgagacactcaaaatttaaaaccgaagctcgtagaaaattcgaacgacaataacatttcactcggaattccgattgagtcccgtaatatatcgagacgctcgaaattaaaaccgaagctcgtagcaaattctaacgacaataacttttcactcggaagtccgagtgagtcccgtaatatatcgagacgctcgaattttaaaaccaaagctcgcagcaaatgctaacgacaataacatt

SEQ ID NO: 84481 - DNA, 390 bp, Glycine max
  unsure (1)..(390): unsure at all n locations
agctntaatacgctngncanatttaacanatgtatctangnagcanataagcggatatnaaaaatgttgaaatttatgacttacgaagttgttttttaaaaactgtctacgactgcgaattcaactgtaacgccagtgttnttagtgtttgcataactntatcacaatcttgtcacatttgtttgtaaatttctgcaatatcaatcatgaaaatgaaaactgcaagtaacgtggtacttgtatacatgcacangagatanaagcaacttgatttgtacacatataatattatgattatgaaaaatgacacaaactgtgagcttctagctattagtnggtcttcaaaacctgatttgatacatataatcatatgatatgtatttcagacgt

SEQ ID NO: 84482 - DNA, 410 bp, Glycine max
  unsure (1)..(410): unsure at all n locations
aaatcgaagnacactaatctcanaacaaatagtagcaattggtagtacccanagagcagaccaaccatacanaggcagaacttttcatgtntaaaaccatagattaaaattcanaggccatataaactgaaagacccgtgaagcacctttatcattgtccacagcantaacctgaccaattcctctacttcacgagcatatctaagagaccttagaccagaagcagacaaggcctgggtgcangcaatagagcaattataacatacgcattatacttgctctgttcaaacttcagagaanatattanaatntaaatcaatattgaatggacaatntcacaatgatgatgatgatgatgacgatgacgtcnagatgacatgaaatagctgtatanatgaaatctaacaact

SEQ ID NO: 84483 - DNA, 262 bp, Glycine max
  unsure (1)..(262): unsure at all n locations
agcttattaaaaagaagggttttataggatatatattttataagaacgggtatagtattgtcgcctcttttatatataatattatataactaacaaacatgaattgaaaaaatgagtgttgaaatttcttgtgcccaatccangtctcattataaagaaaaaatagcttttgatataatttagattataatgatggtatatgagaatgaaaaatttgattgattttggaatacttggatggtgatgccgttgacatattttg

SEQ ID NO: 84484 - DNA, 342 bp, Glycine max
  unsure (1)..(342): unsure at all n locations
atatgacagccatcgntntaggagcgctgagcaccagcagcgcttcgaggccatcaaaggatggtcattccttcgggagagatgtgtccagctcanggacgatgagtatactgacttccaggaagagatagttcgccggcggtgggcatcgctggttacccctatggccaagttcgacccagacgtagtcctcaagttttatgccaatgctnggcctacaaaggagggtgtgcgagatatgcgatcttgngtgagtggtcagtggatccctttcgatgcgaatgccctcagccagttcttgggataccctntagtgctggaggagggccaggagtgcgagta

SEQ ID NO: 84485 - DNA, 414 bp, Glycine max
agcttctaagttctaaccatattattatcgttccatattcatccctcaaaaggcaggacagctcaaaattcatagagtaatacacccctataagcaagcgcttcaaaaatatcaacttactcaaaactcattccaaacaagaaaaaaccctcacgacacgcataaggcaccagactcccctttatcaagcaaggaccaaataaaaaataaaaagattcacataataataattataataataataataaatattaatgtcaattaataataaatcctttcataattagaaaggaatcagcagcatagcgtgtgtgctactcacacgttccaacaaagagggaatgaaatattattatccaggataatctcagaaaggaaaattgggaattgcaaatcaagaggtgattacgatat

SEQ ID NO: 84486 - DNA, 396 bp, Glycine max
  unsure (1)..(396): unsure at all n locations
atgcaattcttgcaaaattcttcccagttggcaaagttatgcagctgatcaaaggaatttgaacatttacccaatatgagcaagagtccttatctgaagcttgtgaatggtttaaaggcttgccaatgaattggtcgcaccatggctactcatcacanaggctagtccacattttctatgganggctatcacaacataacaagacctgcctcgatgttgctgcanaggaaaacctcatgcatannataaccaatgcaacagtagaaattattganggccatggttcaaatgcctataacggtattggagatacgaggattctcaagaggccaactggagtgcacttggtggaagccagttcatctagcatagctattcatcaaaagttggatgtct

SEQ ID NO: 84487 - DNA, 387 bp, Glycine max
  unsure (1)..(387): unsure at all n locations
agcttgtcgtcgttgggagatcttaattnactttggnttttatttttaaanatgcatgacagcagttaataaatcacatcattattagatgaatatgagaggactattgatttactagttcaagaaaacacgcaactttatagctaacgcgtaaaaattacatcacttgtggtatgtttacaacagataataaatcacaatcattagatgaatatgggggagaagagaaaacactgaataagaaaatatgaatattgagtatttttctttatgtaggcaagaagaaagtaaaacaaaaatgatttctaaaacacatttttttcttctcaataattattctatcgtccaaacatcctgatgctcacacggcgangcatgacatgggtg

SEQ ID NO: 84488 - DNA, 537 bp, Glycine max
  unsure (1)..(537): unsure at all n locations
ctaagcttccccaaacacgaatatgcacattccaaggaagattgaatactactatagtatataggactggggtgtaactataaatgtctgttgctgtaaatgttctgatagctgtagccaccatgtgatctgttagctggtcgtgggtactggctgtctattcttggtaactacatcngttagatgtatttgatcgatgccctatacagagcttacaatntatgtaaatttctcacttcctaaatagtttgagtctcagcttctatctgatatcttctctgtttcttatggtatctctcattcaaactcatggttttgtgtaaaaaggccatagtctaagtttagccataatgaaagaaaatgccatttagtanaggatntattatgangtntcaatgggaacttgcnacttccattataatgtgaagagagaaagaatggaccatgcagcatttttgtgaatattaaacactgggtgtggttatatgcacagacagtatatatatctggaaaagatattgtatcatatcaaatata

SEQ ID NO: 84489 - DNA, 347 bp, Glycine max
  unsure (1)..(347): unsure at all n locations
agcttccaaagctggttngaagattatcaatattnttttacgatcaggggtatccaacccagaatgttctctctacttcatcccacagctttgattaaatatcacggaatattgtttccgttgttcaacgagccttggaggttcagagctccccttctttggctgagtctgcagatttagaatgccaagggttccctttgactntagatattttcgtggacacgctggaagaaatagatgaaggaaggcttgcactaatagaagaggagtccatacagcatgaggtcgcaatgattccagtcttcaatgaagccatacactccctgcaagtgttcacagaatcactc

SEQ ID NO: 84490 - DNA, 430 bp, Glycine max
  unsure (1)..(430): unsure at all n locations
tctagctcacacctatctatgcanatgcaataacaactttctttattgtgttcatagatagacatctctgcttatttgatatgtgcttgtatacatganaaacagagctcgtaatatccctttcactaaataattatgtatgcttaaagaagggctatatcccacatgggaagatgaatctttaacattttccagcccttcgttcccatcttgaatctaacactgtgatggaaagttcattaactgagcacangttgtgatctgcttcaaatgcaacnatcgtttcagtgtanaagccaacaacctttggtttttggcgacatttatcaccattcaacattaaaccctgtnttcatttcagtacaacagaatactcatagctaagacatcacttcatgagagtgaccacgctaaatattaggaacatgta

SEQ ID NO: 84491 - DNA, 403 bp, Glycine max
  unsure (1)..(403): unsure at all n locations
tcgatcggtacttagtttaaaatcgacccttattatgtcaatttgatccttctatatatagagagaaagaggcattattaattaatattagccattaaaatcgtatacttatattacggatgatattctttntggagaatacaaaattaaaaaatctaataggtgaatcatttgatattatcattttgatcatctatggtacatttcacataaatcagatattntttttagtggtttatctagtaaatagatcgatacttacatatacttttataatatattatacgtgaaagtaaaatagtgtgataaaataattaatatttaataaatnttaattaattttaattacttgaaaaattttaaactagtttaatatatattactgggcacgtacacatatacc

SEQ ID NO: 84492 - DNA, 240 bp, Glycine max
  unsure (1)..(240): unsure at all n locations
ttttaagttaaaaaggctctttccctctttcttatatttattataaactatgccacatgtctncatttgagtggagcaaaaaaggctcactttctcttttgatgtgacccatccaagccacagaaagtgagaaaaatatgacccttgtgaaatgctaaaatccttccttcgttngcgtgtcgtttctcaggtcccagtcccccgcgtttctctgcgcccgtcgaggccagttttcgaaag

SEQ ID NO: 84493 - DNA, 243 bp, Glycine max
  unsure (1)..(243): unsure at all n locations
ggagatgttgattgtaaaaaagaaaattagagacgagatctaatgaggctgctcatcatggaccaatgccagcgtcagctaatgcaccattttcaggagtggatccatctctacctcagcacgcagtagactcttccattcatgtcttagagatacatgagggccagactataccagttntgcctttngacacttctcctncagctactccaatatggcatataacagatgagaagaatgttc

SEQ ID NO: 84494 - DNA, 340 bp, Glycine max
  unsure (1)..(340): unsure at all n locations
ctgcagctcactacctactacccaacatattaacatctctaccaaaaacccgtataccacttaaaagcaaaaaccccactatacaatcaactcccctccaaaaatctcgtcgggggtgggaatccctnncaaacacgagacaagaaccaccccaacacttgcccaaaccatcaaagaacatgcttatcccaactatctcaagggacttgacacgaaaaataaaaactagttaacttacatatcttttggtaagtaactccttatatttttttccctacctcaccttatatatatggaaacgtgatatacgtcacatgcactattatattatatatatata

SEQ ID NO: 84495 - DNA, 180 bp, Glycine max
  unsure (1)..(180): unsure at all n locations
ggtttgtagctacctcatgcactcctctaatgactatggcatcatttctggcgctaaactgttgagaagtggaggccatcttctcaattaaaattctggcttcagcaggagtcatgtctncaangggctcaccactggcagcatctatcatactttctctcatattactgagtccttcat

SEQ ID NO: 84496 - DNA, 337 bp, Glycine max
  unsure (1)..(337): unsure at all n locations
agctntgcttccacatatcctacacaacatgctacaataaagtgaagcttttgtcactccacctatatctggccttgacattaaccagacttaacaccactaacaactatgggagccatgccttccaaggttattttgatgatgccaaagaatcaagagtcaagcaaattcccaagattcaagaatgaagttttcaagaatcaagattcaagaaaaatcaagatcaagattcaagaatcaagataagtactaaaaagtttttcaaaacattgaatatcacatgaagttttcacaaaatcttttacccgagaagtttacttntctggtaatcgattac

SEQ ID NO: 84497 - DNA, 395 bp, Glycine max
  unsure (1)..(395): unsure at all n locations
agcttctctcttttcttgattattatattttgtttttaagccttgtatttggctatattattatgatatttgaacatttagtatttctttttctatttgcttagtatgattgaacaattaggaattatgttatatgaccatgtggtttttatatatttgaactattcatgtttcttgcttcatgattggnttggatttttcaatgaatgtcttgtgtatgattagtcattngtgtatgttttatatttggtacgcactttggcttttttgtgatgccaaagggggagagaaaantatgattaaattaagaaactcacataatataataacttaatttcaagtaaagcttaaactcaaaaaccaagggggagaatattgagaataagtgagtgatc

SEQ ID NO: 84498 - DNA, 270 bp, Glycine max
  unsure (1)..(270): unsure at all n locations
agcttcattgcctaacaagcctttctttaattgcatgcncgcaagagactcagcataaggatgcacagaccagagttgcgtatgtgaaagaattgtatgaccaaggtgaaggtgcatattgcaaagaagaatgatagctatgccaagcaagccccaaagaataggaaggaagtggtacttgaacccggtgatgatcttggacattngaggacaaatgttctccaagacggagggaatgatgagaatcatgaaacacgccatatacagtct

SEQ ID NO: 84499 - DNA, 341 bp, Glycine max
  unsure (1)..(341): unsure at all n locations
tgtggatcatgtgtaccgacatgaccccttttacacagatataaatgatgttgctacttagcaacattcttgccagcgaccgcaataccgatctccccctgcggaagtatcagttggtctgtgccatcccgacatangtaggtatgcattatttccaactaatttctaatgccgtctactatttgcagggatcgcgcccgcaagacacccagtggacccggagacgtccaatagggccctgnggtttccagctctggttacaggcctctatanatcnacagggcgcccgtcctccatcaagtcatgccatcgtgacctangtaagacgcacctctcccaac

SEQ ID NO: 84500 - DNA, 391 bp, Glycine max
  unsure (1)..(391): unsure at all n locations
agcttatccatccncatntgtcttactgattgaaaaacttcaagttggtcctatctcctctattcattggatgggatngccttactattgtattcgtgaacaaccaacagtgcttcataatantttatgtcctatcacctccatgtcgcggccaaacggtcaaatggngtcatttttatttatttatcatatggaaatatattttaaagtgtaataaatgttatgagtactagatcgaaagtctcaatatttggtatgattttaatttttttaattaaaattgtaaaatattttatgagtttaacttattttttatttaaaataataactttaaagttgtaagatttttttttgttttgttttaaaactttaaagtctaagttttattttt

SEQ ID NO: 84501 - DNA, 107 bp, Glycine max
aaagaaagacacaatagtgtctcacatactatgaaagaaaaacaaccagttgaaaagagtaaaattttccattttgcttctccttccatatatagatattattttta

SEQ ID NO: 84502 - DNA, 227 bp, Glycine max
  unsure (1)..(227): unsure at all n locations
ctggctagaggcgccacattaattgattgtacaataccacatggatagtatggatctaattttaatttgcaaattcgaccaactattgttggcccatattatgtcgctccgttatctcctaccatgcagctgagtgcaattggttttaatatccngcagaccaaaagaataatttcaggctctttctcttttccagttctttgatggaagacttctacttaatgatg

SEQ ID NO: 84503 - DNA, 335 bp, Glycine max
aatgaggacgcatctacaagatataagcctatgctcttgtgcaagcaaataaaggggcagaacacaccaaatgattattatgatgaatggcttaaaatctcacaaaggtgatagcatctctttcaaattgagctttcataactatcctgacatgttgagaagaatcaacgatctcatgtcacaaaatgtcaagaactttaattatcaaaaccaatacccatttcttgaacaagtccttaatttaaagaaaaacatgcaaatgtccacgtcccacaaaataggccacaaaattatactgaataaccgacgaagcgtactaccttgcaaattaaccc

SEQ ID NO: 84504 - DNA, 421 bp, Glycine max
  unsure (1)..(421): unsure at all n locations
gaaaagacatcgagaagaatcgagattcaagagaagatgagttcaagattcaagagaagaaaccaaaaagcaacaagtcaagacttcacaagggaagtattgaaaaagatttttaaaaaccaaacatagcacacatctgtcttacaaggaaaggttttccacatatgtcgtagttaccatagtatgtactctctggtaatcgattaccagtggtaaagattgatatcaaaagcctttaactgaatntgcaatgttccaaatgattttaaatggtgtattgatacaaatattggtatcgataccagtgatctgaatgtgtattcaattcaatgtgaaagtacatctnttataaatgcttgtgtatcgatcatggtatgggatcgatactatgacagtctgataaaagcagagagtactctcc

SEQ ID NO: 84505 - DNA, 320 bp, Glycine max
  unsure (1)..(320): unsure at all n locations
agcttcncaattcattttggagcgtctcgatatattacaggactctattgggcatccgagtaaaaagttattggccgttgaatatgatacgagcatccattttcaatttggagcgtctcgacatattacgggactcattcggacatcccaggtgaaaggtaatgtccgttgaatttgaaacgagcttccaatatccatttgggagcgtctcgatatattacgggactctattggacattacaaaataaaagtgattgtcgtttgaatctgatacgagctttccttttcaatatggagcgtctcgaaatattacgggactc

SEQ ID NO: 84506 - DNA, 412 bp, Glycine max
  unsure (1)..(412): unsure at all n locations
cgacaataagttntttctcggatgtccaatatagtcccgtaatatatcgagacgctccacatngaaattggaagctcgtatcanattcanacgacattaacttttgacttggatgntccgatgactcccgtaatatatcgtgacgctccaaattgaaaacagaagctctaagacaattcaaacgacaataactttttattcggatgttcgattgagtcccgtaatatatcgagactgctccatatgaaaacggaagctcgtatcanaagcaaaccacaataactntttactcggatgtccgatggagtcccataatatatcgagacgctcganatngaaaacggatgctcgtagcanatngaaaccgcaataacttttaactcggatgtctngatgagtcccgtaatatatc

SEQ ID NO: 84507 - DNA, 397 bp, Glycine max
  unsure (1)..(397): unsure at all n locations
agcttctcccncaattntctataaataggggtttgaagtgaagtgaaaaagggttcagccccttaggcacttctctctctttcgaatttgcttggaaaaaatggtttcgtgaagaaaatccaagccgaggcgctttcganacattttcgtgaggaaattcgcgaaaggttcgaccgttcttcgttcgttcttcattcgttcttcatcgttcttcgatcttcaacgggtaagtacctcgaaccaagcttttcgattcattctatgtacccgtggtggtccacattgtgtttcgtgtatttttattctcgtttcatttactttttatacccccttttgaccgtgcttaagccatttatttaagtcatttctcgcttaacctaaaaataaaataaatttc

SEQ ID NO: 84508 - DNA, 252 bp, Glycine max
catactcatccatatctttaatacaatttcatttggtaattattcccaaatctacatcatggaacactgatttatctacatcctgaaatctactgattttgatgctacacttaaacccatcaaccttactaaattttccaacaacctacctttaatagacttatcattagaaaacaattattttggttgtgataatcactaaaatgccataaaattatcatatgaaactctatttaaacataatcctctcta

SEQ ID NO: 84509 - DNA, 346 bp, Glycine max
  unsure (1)..(346): unsure at all n locations
agcttgtaagtttgggatctgctgtttatggttagctctggtgccagaagcacacactatacccaaaaggtatgccagtangatcttttctgggtttatattttattagaatatctatttcttggaacttacttgtccagtttttggtatacttttgaagggatcaagactcgagttaanttctttagcattcttgatccaacaagaatctgtacctatatttctgaagtcattgatgctggttntcttggacctcttttcaggtatcattcctaaccttgttctgtttaggtttgaaaggaaacaatattgacagtcactgtttcttgaaatactggaatcatgt

SEQ ID NO: 84510 - DNA, 237 bp, Glycine max
  unsure (1)..(237): unsure at all n locations
ctacaaatctacattgcatggatggcctccaactacatgtgaaagtgangtctctggcctcaacgctcaacaaatgacgacatgaagtgattatcataaaggaaaaaaaaggattatgcaatgacatgaaaaccaactttgctcaatagaaaagggattatgcaatggcaagaaaatcagctttgctcaataaatcctagatttaactagaacgaatgatgttcaaaatgtccacat

SEQ ID NO: 84511 - DNA, 445 bp, Glycine max
  unsure (1)..(445): unsure at all n locations
agcttcaagaaaaagatggcctcagcaaatttcttatttccagaagggaattctatcaatagacctccaatctttaatggagagggttaccactactggaaaacccgaatgccaatttttaatcgagcaatagatctaaatatctgggaagccattggaatagggccttatatacccaccacagtagaaagagtntcaatagatggtagttcatcaagtgaaagcataaccatagaaaaacctagagatagatggtctgaagaggatagaaaacgagtacaatacaacctataagccaaaaacataataacatctgccctaggaatggatgaatatttcagaaagttcaaattgcagagtgctaaggaaaatgtggacactcttcgattaacacatgaaagaactacagatngtaaaagatctagggataatgcactaactcatg

SEQ ID NO: 84512 - DNA, 436 bp, Glycine max
  unsure (1)..(436): unsure at all n locations
agcttctagccaaatggacttaccttgaatttattcctttgatagcccttttgagccgtggttccctttcctttgtttgaagctcactacaagccctaaatgaaaaaccatgatatcaccatatcccttaggaaatnntgtagncttggaaattgtttgngaataagtgtgggggttttgtttcattggataatatgtttgttggctatgcttcatgatgtatttttgggccatacttgatgtacattgtatattgggtaaatgttggacatgctgaatgaaatgctngttctcaaatgtttcttgtttcanaaaagaaaagaaaagaanattcgaanaagaaaaagaaaagaaataangttgagtgaataagatcttanatggaannaatatgatgagactctnggntctactctttatgnttaaatttatcttt

SEQ ID NO: 84513 - DNA, 444 bp, Glycine max
  unsure (1)..(444): unsure at all n locations
ttaacaccatcactcanactcaagtcacaatactttatttcataacattcacaaccgacaattgtacatttaggaatatatcatcaacatgaaaaagttcacaaacttagtcatattccactaaattctcaacctgatcagcatcacaagctttaaatctcaaaacanagtgtctacccaaacttactcatatntcactaaatacatatttgaaggctaaatacaaaatttaataccaaatttgaacacccataanatcttctttcactaacataccaattcaacaattcctcaattacaatctgcatattacanagaaaccaaanaatcaccatgactnntcttctaactannatacaaatgtcaacatggtatttggagccgaatactaccattntgacagactcaacanacanaccacccanncaccataacattccccta

SEQ ID NO: 84514 - DNA, 246 bp, Glycine max
  unsure (1)..(246): unsure at all n locations
aatgtaatccttacccttggagcaaaaaagaaaagagggaaatttcccaatcaagagaaagccaaaagaagagaaaggaaattcccaatccaagagtgggagaaagccaaaagaaaagaaaggaaattcccaatcaaagaatgggagaaagtnaaaaaaagaagaagaagaaggaaagaaagctcctgatcaaggatcgaaagaaaacagaaaaaatgtgcaaaaaggtctttggactggacaata

SEQ ID NO: 84515 - DNA, 135 bp, Glycine max
acacgatatatgacttcagcacatatcatcagtggagatattaacaaatgacagctccaaacatactgtctcttcaaagtgtgtaacacctagtctctcatcatacacacgcacgtcccaaaccagcctagtctc

SEQ ID NO: 84516 - DNA, 350 bp, Glycine max
agctgtaagttgctcatagactttctattgcttcaaagaaggacacacattagcatggtgatctgcaaaagaacatataccacagactctagctacaggtgcagattatttattatggcaagctgagtttctaggttgaccaatgcatcaagatttccctcaagcttttattttcgcaatgaagatgaatcagtggccacatcatggactcctctaaggacaatagcatcatttcttgcactaaattgttgggagatggaagccatcttctgcatcagattcctagcctcagcaggagtcatatcaccaagaagctcaccatgggcagcatcgatcatactcgctctcat

SEQ ID NO: 84517 - DNA, 238 bp, Glycine max
  unsure (1)..(238): unsure at all n locations
gtctactcttctgattttctaaaccttgactaaatggatgccttgagtgggggggactgaatgtgcaggtgggcacctattgcttatttagtgaanaaattcatggtngccaccctcaactaccccacctatgataaagagctttatgccttaataagagccctccaaactntagaacattacattgnttccaagtaattngtcattcatagtggtcatgaatcagntaagtacattc

SEQ ID NO: 84518 - DNA, 339 bp, Glycine max
agcttcggcctgatcgctaagctttatcttctccttggtttagcacgacttattgtcgccaagctaaattccttacggccataactgaggtccatgaagctaagcgccagtcatggcagctaagctaaattccttacgacaatgtgaacgctaagcgagcccctatctgctaagtgcatgctcctctgtatttaagatgcatcattttagctaagccagccagagcctgtcttagcgagaattacagctttttggatctgcaaacctcgctaagcggtcttatccttgcgctaaaccaaacctgcgtgtaaaaaaaaaactgattttgatttgaaacgt

SEQ ID NO: 84519 - DNA, 418 bp, Glycine max
  unsure (1)..(418): unsure at all n locations
agcttaacacaacaaaaatccttatcatgattttggatatgacagaaaatgatgcacaacagaacaaaaatccagatctcagttaacacacaacaaacattggttcataccgaaaacgcttcaaatattcagatttgattcatacactttttaaaaatttaaatgcgggagaaggtatacggtgcgataaatgtaccatagtgattgtgaatatgattaatctaaggactaaaataatttgtgtaccatacacaaattctcatacccaactactgtagcctgttccccgaaaggtttaaggcattgtgctaaaaagtttatatcgtctcaaactcataaattaagtttataacatttatggtgtgtggtaatcttntattaagtttggtattctaatganatcgttactaatttgaat

SEQ ID NO: 84520 - DNA, 547 bp, Glycine max
  unsure (1)..(547): unsure at all n locations
ctcagctcgtagtgaagtctgcaagttcatcttctggagaatgtctctgcatacttgngctgntgngcangcttacctttctcttaactgggtgtttcattgaaataaagcagntgacttcattcttttgtgtctatattggtggaaatggaatcagatngtatcttttatctgtacttaanatttattaatctaagctgacatttggaagtagctggctttcctatgattctactttgtntatgaaaaatngcacgcctgttgtgtcanatgtaattatcagagtgataagtattttggttntcataacattaataagcatcanaggaggaatttatttatagaatataaaacttaaggaatatatagtggaaaattacaaagtggacctttttaaaacanaatttactggtatattnnttgggtgtgctatatggnnggtannttcgtggaaaacctggctctanggactaatcactctaatatgttaccatcaatacacactcactagtctgacaacataataccactctatctggtccttact

SEQ ID NO: 84521 - DNA, 347 bp, Glycine max
  unsure (1)..(347): unsure at all n locations
agcttatgctgcanacatntataatagaccctctcatcatctaaaccaacaatagcagaataattatgatatttcaagcaacagatacaatccaggttggaggaatcatccaaatctgagatgggcaagtcctccacaagaacaacagcctatccctcatttccagaacactactggtccaagtaggccatatgttcctcctccaatgcagcagcagcagcaacaacaaccaagacaacaagaaactgaggccccttctcaacctttcttagaggagttagtggggcaaatgaccatccagaatatgcaattcagcaagaaacaagagcctccattcagagtctgac

SEQ ID NO: 84522 - DNA, 255 bp, Glycine max
  unsure (1)..(255): unsure at all n locations
gatcaagttaatttccaggttcatgagaagaaatccagaagattcaagaatccagaagaagttgatttcaagattcaagagaagatgaattcaagattcaatagaagaaatcaagaagacttccaagggaagtattgaaagattttcaaaaaataaacatagcacaantttggttttcaaaagagtttttctcanaattttccaagttaccagagttttactctctggtatcgataccagttcctgtaatgatac

SEQ ID NO: 84523 - DNA, 316 bp, Glycine max
  unsure (1)..(316): unsure at all n locations
agcttgaagtgagaaagtgtggaagagtcagtcttccttcttttattcgntgaccatagagtggtacctggagatatgtcgcgggggtcaggagaccttggggacgtcaggtggggtgctattgcccaaaaccaagcttgaccaatcccgacccaacccaggcatattcaatcagtgagaacctgtgatgtacctaaacaggcgagctcctggcagtcaaccgataaaagaacaaagaccacaaagcaaggaggcttgtgtggtggctggccagctatgaatcttgagtggtagttggaatatggcctctggtaat

SEQ ID NO: 84524 - DNA, 402 bp, Glycine max
  unsure (1)..(402): unsure at all n locations
ntatgaagtgcggcgctccattgtattgtatctgcacataagcatgttaatgtgtagcctattacttatgataagctaaggggacctcaatgtagttctgcaatgttacatttcttttcacaattgtaagttggatcatttagtaagaatggataaaattgctctggtggtttcagaanatggttgacatagctaccctatcaacatggaatactacctgaaaggagtatacgactgtgcatggcgacanactgggaggggactgaaatacaaaagttggcctaattagtaactgccccaaatggtgtgtttcanacgatcgaaggacttacgcgactggacgcggtggagccgtcagtcctcatgatatngtaagggtggcgtctgggtatgggcaacact

SEQ ID NO: 84525 - DNA, 276 bp, Glycine max
  unsure (1)..(276): unsure at all n locations
agctnggaggggttgatggtgacccggtgcttatatgaacgaggataanggctacatangagtgcgtgagctcaattgaaaggtgggcaactgnggatgagtgtgttatgtttgacttgtggaagtgggagagttgatttgcgccatcgcccgatcgccacctagtatcacatatgacgggtaccccataatccactaagcttgatgtgagaaagcgtggaagagtcagtcttcctacttttgtttgttgaccacagagtggtacctggagatatg

SEQ ID NO: 84526 - DNA, 517 bp, Glycine max
  unsure (1)..(517): unsure at all n locations
tttatgtganaggatgcgactctntcacattngaattgtatntcaatgttcataggcactggtaatcgattacagctttttgaaatcaattggaacgttgtaaattcagttgaaaactttttcaaatcttgtggacaagtggcctcagatatcttaagaagggggggttgaattaagatattacaacttattttcccaattaanaattctatttaactntctattcaagttataaattcccttaataatgaatatcttanatattgattcanatagaaccaattgaatatgaatataaagcaataatagataaaggagtttaagggaagagaaaatgcaaactcagatttatactggttcggccacacccttgtgcctacgtccagtccccaagcaatccacttgagagttccactatcttgtanattcctttttacangttctaacacacanagacccacccttctttgtgnttagagttcttcacaacaagagaccctcgatctcttaatccctt

SEQ ID NO: 84527 - DNA, 363 bp, Glycine max
actagctgtcgaacatataatgcccgtgtgtacctttgggcagcgactcacgggcacgcggcgcctttcgtaatatcgacaactttgagcacttacattcacaccgaaagactgggagtgcgatgagactatcatcgataccagcgaccttcacacacgatacactactcgatctgatgacgcgtcgctagattacctgctttgatcaatatacatcgttgttcagagctgaacatgtgtgaacacagaatatgccatgtataacgataggaatgtcacagcgtggcttcatcttataaccaagacgcgactacagacgctaataacaagtgtgggacgcaacatgtacgtgtgatgctcgca

SEQ ID NO: 84528 - DNA, 375 bp, Glycine max
  unsure (1)..(375): unsure at all n locations
agcttctcgatatattatgtggctgaatctgtactttcgttggaaagttatgaccatntgaatntctctagagctttggttgttcaatttcgagcgtctcgatatgttatgcacctgaatcggacttccgtgtgacaagntatgaccatttgaatttctcgagagcattcgttgttcaatttcgagcatcttgatatattatgcgcctgaatgggactttcgtgtgacaagttatgaccactttgaattcttgagagcttccggttttcaattcagagtatctcgatacctgatgcgctagaatcggggttccttggaaaagttatgaccattggaatttgtcgagagcttccgatgttcaatgtcgagcgtctt

SEQ ID NO: 84529 - DNA, 302 bp, Glycine max
  unsure (1)..(302): unsure at all n locations
ttttatgagatcttgttcatgcgctaagcaagtccgaatcgtaaacccaattattattctgctttgttattttgggaatgtggctaccgagcagactcgctataccaatttagttccagtaccgtatttaggttaaccgcctgctgacgctaaccttatttagtgtgtcacgcttagcaagtcagcctccctaaacgcatgtacactctcttagagaataangtttatcgagccatgctctgttacgcactggctgtttattctaaccgatttgtctcgcttgccaaagcctttgtattgtg

SEQ ID NO: 84530 - DNA, 165 bp, Glycine max
gctgcgctgatcataccaaacggattatccttgcattttttaaaatccaccgccaccttttgggtcctgaggcttcaagccatttttggcttgaacccatttgctaagttttaaacaaaaggctatctctaaaaaaaacgtttatctctccaatcttggccaacc

SEQ ID NO: 84531 - DNA, 193 bp, Glycine max
tgacatccgacacccggcatatggcaggagacctggagcctaacagcgagctctgcattcacgatataggacaagaccacaagcatgatgttgtggtgctgccagctgtgaatttgtggatatgtggagtatggctctggaatcgataccacggtgggtatcgatacaacgcttaaatgaaacaggggctaat

SEQ ID NO: 84532 - DNA, 400 bp, Glycine max
  unsure (1)..(400): unsure at all n locations
taagcgactgagctgcagcttgcttaccagctatnagacactggctcgttattctccaacaaaaactgaaaagacttctagagtcttgactaaacaaacctacttcgctagcacgacctggccacttagtgaggtcatacaaacctcacattaaaaccggaaatttaaatactcgcttagccccaatgcaatggctaagcgagttcatgcagacatgttgaaattcaataggaatgatgaactcgcttagcgggatanggctggcttagcgagttcatctggaaatctagatattcaaccaaaaactgatgaactcgcttaatgcaagggtgcgcttatcgagatcatcgagattttcagaaagaattggggcttttcagcccctcaacatagaccttta

SEQ ID NO: 84533 - DNA, 381 bp, Glycine max
  unsure (1)..(381): unsure at all n locations
catgcaagctttaatgaacccccanatttataancattattcaggttttggaaattcatcatgaaannntaatggtggggatatccaacacctgaattgaggtgctgctgcgcaatagacgtgtgtactgccaactgctcgcaacaaaatcttctgtacagtgcggaccctanggctaactttgactatgcattttttacttgtaaaatatatgataaatgtattatatatagcatataaagttatcagcggacatgcaattatgaagtccgatattgagaagacatacataaatattgcgtggttcgtccatgtatctcacccttaaattggacagatcctgttactttatggcttgaatttaattattttaaagcaaaa

SEQ ID NO: 84534 - DNA, 491 bp, Glycine max
  unsure (1)..(491): unsure at all n locations
ctcagcttcaggctagtcttatgttgctcccctatctctaattatgattgntgtnntaagtaccttttatagaaatgatgttattttgtgaccttcgctgaacctcgatcatattggtgttatcggaaattcacaatgatgtctctctgtggtagaaattgaaacaccacttagcccttttttgttttgacaggggtaatngaccctaaatgttattataaactnntgttttgaaatctatactaaattcccttcaatttgtatatcgaacctatgtgttggaccgacgaacgtgaataagagaggcctctgagtgacgcanaaaggagctaatgaagagctcaccatacgtgagggggagtttattttggtctactggctttgacaccatagtggagtcanggaacccaactatagttatgcatgtctgtccctgttgcatgcggtttcaagaaaactatgtcttgactaatatgatgcgattaaatgta

SEQ ID NO: 84535 - DNA, 405 bp, Glycine max
  unsure (1)..(405): unsure at all n locations
atatcaaaaccgacaaggaactatagaaatgctacatcgacacgcacctgactcataaaatcaaggtttagtgtgtcttcgaccttctctacgaaacanagaacatgcaacataagttaaagcanagcagcatcatanagctttgaaagagcatcaatacaaacacactcgtacttataaaaatctaagctttagtgtgttcttcgagcttctctgcgaatctcanaacatgatagaaaaantaagcataaaanaaccgcaacaaatcgaaataatagaaaacgcagaagatggngaggctaaacatagcgcatcaactgtggagcaacaaagaanacacacccatactcataaaaatcacagctttagtgtgttcttncaccttctctgganacaaagaacacg

SEQ ID NO: 84536 - DNA, 320 bp, Glycine max
  unsure (1)..(320): unsure at all n locations
agcttgtagataacaagacatctatctaatgttaccatngccattaccagaggacacatgaataaaactgcagagttgaagacttatggaacatacctaacccaattgtaatactagccacactctacacagtaactgagaggagctaatagtgaaataatgagtcagtgatctatatagcctgaacacataacagncttgtctaaataacataaaagctgttatgttttctcgtttggctcaaagacatatttgatgagtgattccttgatggaaagcaattctgggaattccgtcttcaatttggatgcattcatctc

SEQ ID NO: 84537 - DNA, 552 bp, Glycine max
  unsure (1)..(552): unsure at all n locations
gctctgtatgctntcgtaaattcctataaccctanatattcatatttcacttatatatggtgagatggaagagaaaaaagaagaaagtaaagtcctatatgcttccgtanagcttccgtaactttttcgtaaaaatacgaaaaaaggggggtgaacttatcanaagggatgcaaatagcaattttcatattntcgaatctggacccttccaaaatattntcgaaacanggttgcttcctccctgagctcgcctgggcgagctangcggcaacctcctccccctntntcctataaataggtgaaagggggttgttccaaatatccataatccctctggctatgcattttcagttgttttggtgaanaaaaatgtttccgtgaagaaaatcccagtcgaggtgctttcgtaacgcttccgagacatttccgtgagtgaatccgtgaagggtntccgtcgttcttcaccgttcttcatctgttcttncgtcttcaacgggaaagtttcgaatttaaactnntcattcattttngttttaagcttcatctcattcg

SEQ ID NO: 84538 - DNA, 386 bp, Glycine max
  unsure (1)..(386): unsure at all n locations
agcttcctggtgccatttcctgcgaagcatacttttgaaaagtagttntaccaagaaatgctactcttaaaacaaaaatggcatacaacctcctccaataaacacaaacatcaatgttaaattagagcaaactcatgcacatactttcttatgaacattcactcgcacaagatattcttctacctaaaaaaatgcacctatgcgcaatcaaggcacctttgttacctagaattatttatgtgtacttccaggtgtatttgctacctacatcacatgcacttcctttgctaaaattacatacatgcatactcaaagcatcttggctacccaaaaatgcacacgtgcacattctgttatttctaatacctatgcatataccaaacttt

SEQ ID NO: 84539 - DNA, 273 bp, Glycine max
tactaacaagaatgtagttacttaaagcttcagataccccagcctcgaaatacttcaaatggtacaagagtacctcaataatcatgtataatgaaataggacaaactaataccactgaaagatcaggcgaaaatataatcataatcaacctgagaacctcaatatatatacgtcactgcctgacttataaaaagaggaacatttaagttatgaacacttatgatgactaatccaacgagtactatatcctcacttactgacttgtacaactca

SEQ ID NO: 84540 - DNA, 410 bp, Glycine max
  unsure (1)..(410): unsure at all n locations
agcttctatagaaggatcgnttctaatttctctacaattgcatcacatctcaatgagctagtgaagaagaatgcggcatttacctgcggtgaaaaacaagagcaagccttcgctttgctcaaagaaaagcttactaaggcacctgttctagctcttcctgactnttctaaaacttttgagctagaatatgatgcctctggagttggagctgtattggtacaagatgggtaccctattgcttattttagtgaaaaacttcaatgccaccctcaactaccccacctatgataaagagccttatgccttaataagagccctccaaacttgagaacattaccttcgttccaagaatttgtcactcatagtgatcatcaatcacttaagtacatttagagggcaaacaagtaaac

SEQ ID NO: 84541 - DNA, 413 bp, Glycine max
  unsure (1)..(413): unsure at all n locations
agctagatccttatctatccacacttcctctattaactaaannaacncccttaanaataattatggatgaaaataacgtaacanataatcaaacatcaaacataattactaataatatatagatatatatatcagggtgttacaactctcccacccttttagaaatttcgtcctcgaaatttaccttactcaaacaaggatgggtgagcttctcgcatctgactntctaattcccatgtggcatcttctcgtgatggcacctcccatatcaccttgaccaacggaatctctttccctctttggtttntattcgcttatcctcgatcctcanagacaatngttcatatgtcaaattcttcttcactttgacatcatccaattcaatcacatgggatggatcacggatatactta

SEQ ID NO: 84542 - DNA, 437 bp, Glycine max
  unsure (1)..(437): unsure at all n locations
agcttntanaatttttattatatgaactattattattaacgaatctattcatgctgctgattatgagactaaccctataaggtcaagataggaaatacttgatgatatttcagattctttacaagatatgcacatttataatgaacggcacaaaaggcaaggaaatggaaataatgaagaaaatgataaaactaaaacatgtacagatacagaatttccaaaagagtggagaacttcaagatatcatcctctcgataatattatcggtgacatatcaaaaggggtaacaactagacactctctccaacatgcatgcaataatatgaattttgttccttaatggaacccagaaacttaagtgaagccataattgatgaacattggatcattgtatgcaaaatgagtcatatctatttgaagaacatcagtctgggaat

SEQ ID NO: 84543 - DNA, 300 bp, Glycine max
  unsure (1)..(300): unsure at all n locations
ctcagctaatagaactgaacctnntactctatcatggccaccactgncgattccggacaacacttgtccatgcctgggggctcgatcaactcgtcaccttcctaattgtcaaggctactaccccagacaccagatgaactccccgacctgggataatctccttcgacacttcaaaccttctttcacccgcaagatggctcanagcttggggggcttatatattngttatggtccacaaagtacatgtgtcatgatacgtgacacttcattacacacatcaaccgacaaattgaccaaagc

SEQ ID NO: 84544 - DNA, 384 bp, Glycine max
  unsure (1)..(384): unsure at all n locations
agcttctaaactttgtacaagaatgaagctcttataccaactggtaaacaagngggctcagatatcctaagaagggggtttgattaagatatcacaaacctattccctaatttaaaaattctaaatttgaatttaaccccaatccctaagattcctttaaaatgaatttcctaaataattattccaaattaaacttacttgtatagaagcaatangcaataataaataaaagagtttaagggaagagaaagtgcaaactcagttttatactagttcggccacacccttgtgcatacgtccagtccccatgcaacccgcttggagttccactcaatcgcanaaaccctttacaagttctgaaccacacaaggacaaccctttctt

SEQ ID NO: 84545 - DNA, 468 bp, Glycine max
  unsure (1)..(468): unsure at all n locations
atgttttcaaagcccatactaaggcatacaactccttatcataagttgaatagttaagggtaggaccacttaacttttcactaaaataagcaattggatgaccttcttgcaacaacacagccccaatcccaacattngaagcatcacactcaatttcaaaagaaattttgaaagttggcaacgcaagtatggnggcattagttagcttttgcttaagaatattgaaagcttcttcttggttctctccccatttgaaaccaacattnttcttgagcacttcattgagaggtgctgccaatgtgctaaaatccttcacaaatcatctataaaaacttgctaagccatgaaaactcctcacctcggtcacggacttangtgtangccattctggaatagccctaaccttcntctcatcaacttgcacttcttttgaaactacacannatcangaaacacacatggtactac

SEQ ID NO: 84546 - DNA, 424 bp, Glycine max
  unsure (1)..(424): unsure at all n locations
gatcttaagcacctgcggctgcagctatgctgcaacattataatagaccttcttagcagcaaaaccaatagcagcagaataattatgacctttcaagaaacagatacaatccaggttggaggaatcatccaaatccgagatggacaagtcctccacaacaacaacagcctatccctcctttccagaatgttgctggtccaagcaagccatatgttcctnctccaatgcagcaacagcaacaacaacaaagacaacaagcaactgaggcccctcctcaaccttccttagaagagttagtgaggcaaatgaccatccagaatatgcaattttagcaagagacaaaagcctncattcagagtctaacaaatcagatggggctgatggctactcagttgaaccaagctcagtcccaaaatctgacaaa

SEQ ID NO: 84547 - DNA, 279 bp, Glycine max
agcttgtgagttgtgggtaagctttcaaccatttctctgttatgaataaccggctccataggagccactgatagtgcatagcacccagaagtagcattagcccttattgtaatatccaatacacgtaatggcacattctttttttcttattattaaactgcagttagacaggttctgacatcccaactatgttggcacgccataacccggtaactaatgttgcatttaactacgacacgtaatttgcttaattatgtctggctcacccaatcggtgatg

SEQ ID NO: 84548 - DNA, 84 bp, Glycine max
  unsure (1)..(84): unsure at all n locations
agcttcatacaactaaaacatgggagaaanatagtctacagtaggcatcgctggtttccgacacccaaaatagcaaggtcaccc

SEQ ID NO: 84549 - DNA, 405 bp, Glycine max
  unsure (1)..(405): unsure at all n locations
agctatggtanctaactagcatgcagnggtgcgtgtgcgcatcatatgccttaatccgaaatgaaattatgggcgaaccatggtgggtctttgctttaagaaagggtcaatgaaaattgctagtagttttctgctcaggggtggaacttttaatgcagactttggaggaattcgtgctagccattttcttctgcatttttacaaatttccataatagtaaggaactattcatatggactaggaccactgttaaaccttaagcagctggtagtgttgaaaaaaatcacatgattaatgcctattctttcttctcttgaattacacattgtttggagctggatttgactttgaataagagacanggatgaccatactaaagcaaaaaatatggcagcaaagatcgtg

SEQ ID NO: 84550 - DNA, 398 bp, Glycine max
  unsure (1)..(398): unsure at all n locations
ggctgcgcagcagctctgaatncgttagtatttatataagatgacgcatttgtaatcgattacaggtattgggaatcgattacaggtccaataagccttctgggtaatcgattacaggatgttgtaatcgattacaggctgcctgttcatgtgtaatcgattacactggatggtaatcgattaccagagcctatcctangctagtttctaagagaatatctatatttatgctcaaatacatcctatatgacntaatttcactactaatacactaaattcaatcattcaattactatatacacaagaaatcataaattctatcataaagataagaattcnnaccagatcaaccaaataatctacccatcaaagataaaaagtaaatcaaccaatcaatc

SEQ ID NO: 84551 - DNA, 428 bp, Glycine max
  unsure (1)..(428): unsure at all n locations
attaattatatcattagcacatgaattaagggtgacctattatccttcacttaaatgaccaaacccattcctccactttttggntaatggtttcctcacctctaaatagattaaaacctgaattaactacccatgtgttttgactactagttgacacctcttactaattgatggaggattcatatatttttttcaaaaaatggttgagtgcattttgatcctatcatttaaaatgctttaaatatattttcatactggctataccctttggttactaccaattgcttttactatattatnttatgcctaaatttgaaaattatttggacttgcgtagtcaggctataaggatacacatagaagtgccgtcttatgccatatatgagtatatctctatatttctgcatagggacatatgtgagtgcatt

SEQ ID NO: 84552 - DNA, 332 bp, Glycine max
  unsure (1)..(332): unsure at all n locations
agcttgttggccgcgaatgacttttgtgcttattacgacgntcgnctccgcatgctatcatgcgttgagtcttacagatagcaaaagaatgtttatacggataaccacttatgtatttccgcctgccccctaacttcacgagttagtctcgacagagggtgtctgcgcggaagacgacgtaaatctccgcgtgtgaacgagcttgttggccgggattgacaaagggtgcaaaagacgaacgtagtctctgcatgctatcatgcgttgacttttaaagatagcaaaagaatgtttatactaataaccacttgggtatttctgccggcccccta

SEQ ID NO: 84553 - DNA, 424 bp, Glycine max
  unsure (1)..(424): unsure at all n locations
agaatcaagccaaggctatngtgcaagcagtcaatggggcaaaacacaccannatgatatgatgatggatgatggctcanattctcacanaggtaaactcatcactttcaaattgagctttcaaaactatcatgacatgtagagaagaatcaaggatntcaagtcacanaatgtcaagaacttttatttcaaaacaattacccatttcttgaacatatcctataattcanagaaaaacatgcaaagtcgtacatgcacacaaaattgacccanaatattaaactaaaaatctgacgaaactaacaacattaacanaataacacaaccaacanaactagcanaaccaaagaacactcnnccccatacttaaacaacacattgtcctcaatgtagcacaattaaaagaataaaaaccaataaatca

SEQ ID NO: 84554 - DNA, 387 bp, Glycine max
  unsure (1)..(387): unsure at all n locations
agcttataatatatggatatgttcgaaattaaacattgttagctctcgagaaattcaaatggtcataacttttacacggatgtccgattcgggcaaatcacatatcgagacgctcataactaaacaacggaagctatagagaaattctaatgggtcaaaactttcacacggatgtccgaatcaggcgaattacatatcgagacgctcanaattgaacaacagaagctctcgagaaattcanatggtcataacnattaactcgaatgtccaattaggcgcatcacatatagtgacactcgaanatgacaacggaagctctcgtgaaattcaaatggtcataacttttcacactgaggtccgattcaggcttataatatatcgatatgc

SEQ ID NO: 84555 - DNA, 337 bp, Glycine max
  unsure (1)..(337): unsure at all n locations
ttctcattatctttctgtgtcaatttcgagcttctcgacatattatgcacccgaatcggatatccttgtgaaaagttatgacntattgaattntccgagaagttccgatgtttaatttcgagcgtatcgatatattataagcttgaatcggacatccgtgtganannattatgaccattgaatntctcaagagcttccgttggtcaatttcgagcttctcgatatgtgaattgcctgaatcggacatccgtgtgaaaagttataccagttgaatttctcaagagcttnncgtgntcagttntgagcgtctcgatatgtngattgcctgaatcggaca

SEQ ID NO: 84556 - DNA, 439 bp, Glycine max
  unsure (1)..(439): unsure at all n locations
agctntaaaatttaaattcaaatttctattgtttgttataaaacgtttaaaacttttggtaatcgattacaagccttgtataattgattacaagctntaaattcaaaatttgcaaatttgtttcataaatgaatttggctactggtaatcgattacgtcctctggtaatcgattaccagagagaaattccatatatttgaaatcacaaaatgcttttgtaaaatatcctttggccaaacctgtgcaacattaattaaggaattctttctaagatcctangaactaagtacatcgctcttcttgaaattctggattcttgacttgaatcacgcttatttttggcatcatcaaaacttcacatcatatatgcttctacacaattgagcttataaatgtcattaatgaaatgtngtaatcaacctgattgtactacatgttg

SEQ ID NO: 84557 - DNA, 462 bp, Glycine max
  unsure (1)..(462): unsure at all n locations
ttttctcacaacatccgngagggctagtttggtttctntatcgttgacttcgaaactntataaaggaagagatggngatngcaaagaatcaatttatgttaggaagggttacaatgtaagtcatttatctttaatgaggttttgatggaaaggtacctaattaaaaaagagacttacacaagtgtcaagagaagttntgtgaaagactntggggtaaaaaaagtgtctaaatggttgaatgtaacattgactatntacatgtcaatataatcataattcatactanttggataatcaatatatgtatatataatcataattcatgctaatcaatcaatactatntatctatctatatgtcaacatgtcattanttacaaccaaattgtgactaaggtcaaaacanantgtaacaacaatctaataagaatgatccannatacagccaatatttactattcta

SEQ ID NO: 84558 - DNA, 363 bp, Glycine max
  unsure (1)..(363): unsure at all n locations
agcttaaatgaccagtcacttgacctcctgttcaattccttctccaatgctgactgcatctcattcttttctttttctagtctctgagtccgaaactccagttctgtctttacacggctaagttcatccctggcagagactctgtcggcaatttgagaccttagatgggttgaaactttcagagccaagcttattttttcctctagtagatgtctgattgcccgatcagtgctgacacttcataccatcatcaggaaaaagctatctcgttccagttctttgagagaagataacncctctctcagcctcctttgatcttctaaatagtctgcatccgcatcctcttcaggttcatcacagctt

SEQ ID NO: 84559 - DNA, 548 bp, Glycine max
  unsure (1)..(548): unsure at all n locations
ctcagcttanatgagtaactcatgtagttaaagtgtataagttaacattgagtagtctatatgacagntgaacttaatggcacaacttatgaattagtcctataccanacatacacatacactaagaatgttaagttggttagtattttttggttcaaagttcacttagtctcgttcatattaagaatgagccagatatccttattatcatggcatgatggatttcttttcaccattcttgctggtaacatattacccaagaattcaccttgaccaggatcctacttccataatccatattctacagattcattggtaggctgctcgcccttgtattcgagaataagggaatctccnngtagcanagaaagcaagaaagagagaatactgaatatatntttgcctacaaaggggaatatntatagccaatgattgactacatgatactactactatcactacatgatactactctatcactacatactactctagatgatactaccctatacaggttcatgaagacatctcttctacatcttagccat

SEQ ID NO: 84560 - DNA, 421 bp, Glycine max
  unsure (1)..(421): unsure at all n locations
nnagcttgccttgtttggatttgctggagtgcacgaatgagatgaagaaggagtggtagaataaacgtcgaccattcaagtgaagagaaggaggtgataaagagcacaccgattgaaaattttgaaaattcaaaatggttcccttgggataatacacaatgggtaagataaaacgggaaaaaaaaactgacatcacatgtaagaagcagtttgcatggcaaagaaagcttaattggcacaaaaaagcccataaaggggcccattctacaactatggtcgataaatgtgacgaagctagtattgaagtatgatctagagtgagccaagacagtctatataatgccacgggtaagttgggaacgggcttgctcttactcttgacccaataaagtattagtgcaaacttacaaggcctggttga

SEQ ID NO: 84561 - DNA, 387 bp, Glycine max
  unsure (1)..(387): unsure at all n locations
ctcaagacattaaagaagcgctcctatgaggcagtctaatatctcctaattttgctctttangattcttgnttttatttatttgaatcatatttgaatttacctaagattattcacaactataggattntagaaaatacatgcctaagaatccaaatttttttgcaagaggtgtacaaaaaaaaaattagctcacttgngcgagcatgtcagatgagattnttaaatangggggtgaagccattcttcaccccatttctttcccaaaacttaaaccaccaacaaagcttacgagaatcatcaagtccagcagccccaagccaccattttttgcattttgctttcattnttttgcatttcattcatcccctacaagtaagtaccactt

SEQ ID NO: 84562 - DNA, 373 bp, Glycine max
  unsure (1)..(373): unsure at all n locations
agcttatgtcaagaaccagaatttacatntattaaccatcattgcttatgattaatgccaaaaaaatattgtntaacacaactgtaataaagtacctgtttaacaccatcactcaagctcaagtcacaataatttatttaataacactcacaaccgataattgtacattcatgaatatatcatcaacatgaaaagcttcacaaatttagtcatattccactaaattctcaacctgataagcatcacaagcttaaattctcaaaatagagtgcctacacaaacttactcatatttcactaaatacatatttgagggctaatacaaaaataataccaaatttgaaacacccataaatcttcttcactaacatacc

SEQ ID NO: 84563 - DNA, 120 bp, Glycine max
agcacctgggctgcagctttaagaagctctgagctgcttgtaaattcttccagactttgtaacccgtgggatcttcttgaaattgggttttcaggttaccaaaacatttttcatgacctg

SEQ ID NO: 84564 - DNA, 378 bp, Glycine max
  unsure (1)..(378): unsure at all n locations
agctngataaggtgatattgatgaaacaacctgagagggtttgaagtcagaggaaacaagattatgtttgcaaattaaaccaatccctgtattggttaaagcaatccccccagccatgggataagaaaattgatgaatttatggcttcacataaggttcataaaagtcactattgatattggggttacttcaaatttcccttctaaactgaggttgtgatattgctattatatgttgatgatnatttgataacaagtaatagcaagggtgagggtgaanaattgnaaattgagttgagtagggaatttgaaatgaagggatttggagtagccaagaggatgttggganntagaatcanatgagatagaaaaaaaaatg

SEQ ID NO: 84565 - DNA, 158 bp, Glycine max
aataatggcgttttcttggatctatcttatgatgctatactagtgaataagtaatcctcctgcactcgcataaaagttgattatattactttctagaaaggccttcagcccgctaatgaacttagaaaagatctgtaaaacacagctgtctgccatgg

SEQ ID NO: 84566 - DNA, 385 bp, Glycine max
  unsure (1)..(385): unsure at all n locations
agctgtgcgttatgcagctacatattaagtgttcaatgatattccaatgcatanggaaggctcctagccatatcgtgtttatgtcaaggatttcttaataatcaattaaagaaatggatgctatatattgaccggcacagctggtagaaaataagcgccagtttctattaattggatccagaaatttttacaataataacccatcattgtaagagtgcaaggtaccaaagaactagntgttattttattcttctcatgaaaggtaccttctctaatatgaatatatataatcatgatgacattactgtaattagtgcgaatccaatctaatttcagattttttataaaggcctcaggttaaaatttgagtttgaaaatataatta

SEQ ID NO: 84567 - DNA, 139 bp, Glycine max
tcctataccacattgctaatttgttacgaagacactacagtttgacatgtatcacataattgaactcactgacctgcattcaattctataagataagttatacttcttcatatggatacacttaaatgtaagtatattt

SEQ ID NO: 84568 - DNA, 273 bp, Glycine max
  unsure (1)..(273): unsure at all n locations
ttcttccttaattntncggggaggggagagcttgagttgaatggtcttgcccatccccaatgcataaaacctaggggcacactggcatttgagaatggagaagttgatctagtcgcaacgcaggtttgtgtgaacctttattttgaaactcttatgaacagtaatcacagnttcttctcggctatgtttgttttggatgtccctactctaagaagccattgttaggttgataaattcacttaaatgcangtgaagtaaaacgggagcatttaa

SEQ ID NO: 84569 - DNA, 379 bp, Glycine max
  unsure (1)..(379): unsure at all n locations
agcttgcttctacaatcagcctatgccatcttactcccagcgggatcaatagactcgtggcatcactctatgaccttaaatcaagaaaagttcacttggtcatataccaaagtgcaacgatccattgncatccttcaatggtgcatgcgattggtcccacgccctatatttctcttgtgtgcagagtaatgatgtttaaacaaaagggggggggggggggaccctagaccctatttcanttgaatgataagtgcaaccggtcactcccttatctaaaatgccagtgaatgatcaaacaaatatcactctatgaacccctaaaagttgcataaatagatgggtgctgattatatattttcagacaatacccatcctgttt

SEQ ID NO: 84570 - DNA, 343 bp, Glycine max
  unsure (1)..(343): unsure at all n locations
tttcatgattacattctccccctttttgatgatgacgacaaccacctgtaggttaggagcaacaacaaagaanatatctattggcatatagtttacttccccttgggtttacaatgattacttatatgagacaatggaagatttcatatttttcatatataaaaaggtgtctcataaaacaatagataanttttcttactaattttatctttatctttctctccccctttgtcaacattaaaaacaaatcatgaatagagaagagaaagatgttaccacttggtgcaatgtatgagaatcaagtgataccaaaaggcattaaaacaatcattcaatattaatc

SEQ ID NO: 84571 - DNA, 364 bp, Glycine max
  unsure (1)..(364): unsure at all n locations
ctcgaccggatcttaagcaccgcggctgcagcttgtcttntcattatgaagtgataacacagggctattatagaaaaacaatataactgcttgtatgattaatcgctactaatcatcatctcgagaggaatgatagatctcatttaatcgataaaatgttcttctcaaaacctgtaaagctttcaagaacaatataatcaattagattcttgatttaatcgattaaagtgttcttgtcacttctaggaacactntcaagaatgatgtaatcgattactataccctcgtaaatgattaaagcagagaccctaagaaaacatacatggtctcaaaagaatagagtaatcaattacagatacatgat

SEQ ID NO: 84572 - DNA, 294 bp, Glycine max
  unsure (1)..(294): unsure at all n locations
ctgaagaaactnttctaacttacaaaaatttcttttcacttactcatgatgatgcatgatgcataanagatatgatatggactataatgccacatacaatataacaaccaatacaaattccatttaagagaagtgtgcatgtaaaagacanagcatcttcaagcttttctccaagcttcaagctttagtcctcatggtngttatgtngctcccnctatctctaacanagataacattagccacaacatcattcttagccaaatcanatcccgaggagaagctggtcatatacct

SEQ ID NO: 84573 - DNA, 348 bp, Glycine max
  unsure (1)..(348): unsure at all n locations
ccctcaagtcacccgcngcatgcaagcttgacttactcatgttctttcaatctgattgtctttatgatcaacncagccataggggagagcacgtttactcgacgaatgcaaatcatcggaaagcatatcacactgaatcttgttttctttttttattcatatgccactaattgtataaagaatcgtcactttttgctctgtcaacgtatgggtaaaatcttcaaaaaatgataatggcatgtacttttatttcgtcaacttaatcgtgactatcgggaaattatataattcctttaataacccaacagtttaattatttatgacacgcagaggatacaatttttcttg

SEQ ID NO: 84574 - DNA, 355 bp, Glycine max
  unsure (1)..(355): unsure at all n locations
ncaagcttgcttccacactatactttattcatatttttgngcatatnctattncaagggagaattaaaatttgattaggggaaatttttaaacttaattcacacccctcttaagttattgaggccacttgttcaacaagtggtgtcagagcttaattcttgtacaagaggtttagaaacttcaagaatatggcctcatcaaactttttatttcccgaagggaactctataaatatgcctcatattttcaatggtgtgggttatcattatcggaaaactagcatgcanattttcatagaggctatatgattatatatctgggaagccatagaaaatggaccttacatcctactatg

SEQ ID NO: 84575 - DNA, 364 bp, Glycine max
  unsure (1)..(364): unsure at all n locations
tcacactcaattaaggcagtgcatacaggcatcacaagttcacaatctgctcagtggtgtcatcaccatcatcagaggtacctcaacactaccattattacattggcaggtactttgttnacctctcaacaccaccatcctatgtatgctagaggtggcattccattntttcccctttgcattaacctaaagaaaagagattanttacccagagttccaaatgaactttgnataataaatannattaatcgtttttgttggttcatcttttccctaaccttanaagatcataaagcatcaacattgacacttncatcataattttgatagctgatacagtgaaagaacagaantccctcatact

SEQ ID NO: 84576 - DNA, 375 bp, Glycine max
  unsure (1)..(375): unsure at all n locations
agcttgcacttcttcgttntcctcatggacttcggcttggttcctacttaggccttttaagcttgggagccaagttatcccttgcatcctagacttcaaccacttttgataaccgccgatgatgccattgctacttcccctaagctccttatctttcctttccactgtactccacgctttacggactctntgaagtatttttgcattggcttcaatgaaacctcgcgcgacgaaaggcacgatgatctcctccgatgacgcacctctcatagggtagcctagttgtcttatggctagcataggattatanataatacacacccttattcccatcaaggggacatttgngaatncttcacacgagcataacacttc

SEQ ID NO: 84577 - DNA, 348 bp, Glycine max
  unsure (1)..(348): unsure at all n locations
gcttcttatgtcataccttatgatgctctnngactgagaagaagcatngccacctttgactagacagatcaccaagtttaatcttatacaaatttcattgtctcttagtagagtccttgttctggatgatacacatatcctagttaanagtgacattgtatccattgtcacataattgacttatgctcagcagattatgcttcaatcctttaacaagtaaaacattatctataggagggtatggaggaatgcatgctttacctactctaattattagacctttatgattccctccgaaagtgatcaccccgggcttangaattggaacatagacttttcatctatcat

SEQ ID NO: 84578 - DNA, 373 bp, Glycine max
  unsure (1)..(373): unsure at all n locations
agctngatacatgttaatacagatagatatttttctttgagaatangcacttaattttcttggtcaaaagttggttcggtatagaaattgggggaagggaagcaactctgacatctaacccatgatttcctatttctaaaaaattataatgggcatggtacgcatggacgcatggcacctctataaatagagagaacatggtaaagtgatagatgggtacctaaataattacatatcatcgtgagaaacgataaccaaaatttttcacttcttcaaagtgattaatactgccaaatgacaaccaactatattaaggtggaggtagtttttaaagaatgggaaatgtttacagacaaagtctaagttggaaaaa

SEQ ID NO: 84579 - DNA, 476 bp, Glycine max
  unsure (1)..(476): unsure at all n locations
tactaagcttattaataaatatgganacggggagaatangtacactgctttaattgtgatatcaaggcttactgaatggaatagcattcaatatataagattacgcaaatattaattagtatttttagaactttagttaaaaaattaaacaattnttttatcaagatacgtaaaaatggacttctcngaattttttatggtctcttatgtttttacaataaatatatttttaatttcttaaccaatatcctaaagtaataattaacaaaattataatgataataatggtgaaattaaactaccatcaattcattaaggaaagttcctagttttccttagatcggatccgtgggctctgaccatttaanaagaaggtagtactacannacagttgatacacggacatatactgtccatttgtaccctanaataatattattttgaccaaaataatacaataattttatttacgtgag

SEQ ID NO: 84580 - DNA, 301 bp, Glycine max
  unsure (1)..(301): unsure at all n locations
agctngagacttaattgcnttgttcttcccataagcagtagtcagcagtgcactctcacccatctccattacaagcctttcttcttcctgaacacacatggtcattaattcattgatagaccatttatctttatgtgtgttgtaggaaatcttaaatggcccatattcatgcggaagggtgttcaaaatgaaatgcactaggaaggactcagacatatcaacctctagtttcttaagttgagctgaaatatctcgcattttcatgatgtactcacgcacacctttcacacttgtgagccga

SEQ ID NO: 84581 - DNA, 348 bp, Glycine max
  unsure (1)..(348): unsure at all n locations
tagagttactaccacccatatactaactaccctgacaaaaaactganatcaaaaaatctactcaagacactcaaatgcctgactacaggctaaacctatctataaatgccaaatcanggccaaagagaaacaactatctatattacaagaaagggacccacctggccagggtaaaattacctaggtatgaaacctaggcttcttataattagcaatctttggagcttgtatgcttgtacggccttctagagatgataatatgcaaaatgtaaattacatatatgcataaagaaaatgtcaatatatattagcttcatgatatatatgatgttcatcatatctgagata

SEQ ID NO: 84582 - DNA, 280 bp, Glycine max
  unsure (1)..(280): unsure at all n locations
agctngcccactgatgtaagctccattggatcttgtangcctagaatcttcttcatcaacggattccttttgttcttggaagatgaatgacagtggaatggggaagggaaaaaaagaggaaatgccactttcaggagaaaatgagtctaaaagaaagtcaccaccatatgaggccatggataagagcttggaggaagaaggaaatgaatgaagggaaagggagagaagagcacgaaattttgtgctccaaatgagctttganatctgaagtttaatattc

SEQ ID NO: 84583 - DNA, 400 bp, Glycine max
  unsure (1)..(400): unsure at all n locations
gctctttctaagatactgggtttgtttttacttattggnntctggaacctcacaccttntctccagatttgtgctcttaacttagttgctggcatagtccaaatggacatccttattagtcatcggcctaatgagctaatatgggagaaatatgattctagaagcctcacactcaagaatgctttcaacttcctgtgtgggaatgacatcctattaaaaagaggttgcacgatagtctcccaatgcaaccttttgtgctccacattgaaaccaccaagcacctctttntttagtgccatttgcagtttctctctagagctggctntcaagtgagtgtaattgctctatcaatntatcatccttgctttctaatttatcttgctgcgaatattnttctagt

SEQ ID NO: 84584 - DNA, 435 bp, Glycine max
  unsure (1)..(435): unsure at all n locations
agcttcatacaattaatatagaacctatattctaatgtcacatcctatcggagcgtngngntcccgtgtcttctagcatgagattcttcatagtcatccacctattcatctgctcccccgaacacaagttcaagatcatcacaggatccanacacaacaacacacagggagtgagttatcacattcctagctaattgagaaacaagacaattaaatatacatattatataaatgagataccacttgcttaaacatagctcacgtaacttcaccacttcatcattcanaattcacttttcaattatcaatcacattacacaagaatctcacacttcgatcaagatataataacacatcaattagcaagcatatgcaatagttatgctaagactcaatcctatatgncatgtggtaccatgtcagtgaaaaaccacc

SEQ ID NO: 84585 - DNA, 223 bp, Glycine max
acacccagctttttgtcagaagtaatcctgtgctaaaattctttatctgaagctttgaggcatactgacggcaatttaccggggagaaaaacacactgttagcaatgggggtgaacacggaatatctacggaaatttcgataccacgcaaaattcacaatcattgatcgttgtacctgaccgtctacactgtggcatatgtcccactgatagcgcttgtatat

SEQ ID NO: 84586 - DNA, 190 bp, Glycine max
agcttggaatcgattaccatgagctgtaatctattacaactcgctcctgcctataaattctgctctttctctctccttgcgcagaactctttcttcttgacggcgccctccatgcccaaatcttcgaatcctcatatctttctcatttcttatccaaattacttcaaacaaagggcaaatttcatctttt

SEQ ID NO: 84587 - DNA, 421 bp, Glycine max
  unsure (1)..(421): unsure at all n locations
agcttggctgcgcagcagctctgtattcgtgagtatntatagaagaagacgcattgtaatcgattacaggtattggtaatcgattacaggtccaataagccttcttggtaatcgattacaggatgttgaatcgatacaggctgcctgttcatgtgtaatcgattacactggatggtaatcgattaccagagcctatcctangctaagttctaagagaatatctatatttatgctcanatacatcctatatgactaatnttcactactaatacactaaattcaatcattcaattactatatacacaagaaatcatanattctatcataaagataagatttcaaacaagatcaaacanaataatctaccatcaaaagataaaagtaaatcaaccaatcaatcaaccaatcaatcaaccaatca

SEQ ID NO: 84588 - DNA, 230 bp, Glycine max
aactgaatactacccatgtgttgactactagtgacaccctactaatgaggagattatatatttttcaaaaatgtgaggctttgatctatattaaaagcttaaatattttatcatggcataccttggttacactaatgctttcatattatttagccaaattgaaatatttgactgcgtagaggcataggaaccataaaggccgcataggccacaatgagacactatattat

SEQ ID NO: 84589 - DNA, 437 bp, Glycine max
  unsure (1)..(437): unsure at all n locations
agcttgtcaagctacagcttatatccaatcttgagcaatctatgcaactcagtagggacctcaccaaccataagcacagacacatagttgatgtcctacacaagaacacggacctgtttgcttgatagccttctgacatgtagggaatccaccccaacattatctgccacaagctcatcatctgtccccaggccaaactggtatcacaatataagaggaagatgggagaagaatgatacanatcgggtagagaagaggtgacaagctcctcaatgccaacttcattagagaggccagatattctacctagctcgccaatgtcgtcatggtcaaaaaggctaatgnaaaatgcaaatgtgaatcaatatactggtctgaatagggcgtgccccaagatgcataccttctgccaacatcgatagactagtcaatggagt

SEQ ID NO: 84590 - DNA, 345 bp, Glycine max
  unsure (1)..(345): unsure at all n locations
acaatagcatcanttctcgcactgaatngatgngaagtggaagccatcttctcaatcaaattcctagcctcagcaggggtcatatcaccaagagctccaccactggcagcatcaatcatactcctctctatgttgctaagtccctcatagaaatatcgaagaaggaagtgctcacaaatctggtggtgaggacagctngcacacaatttctttgaatctttccagtactcatacaagctctcttcactaagttgcctgatgcctgaaatgtcttttctgatggcagtgatcctagatgcanggaagaaattctncaagaacaccctcttaatgtcatcccaactg

SEQ ID NO: 84591 - DNA, 327 bp, Glycine max
  unsure (1)..(327): unsure at all n locations
agcttgttgtgccttcaaactatacgcttctttactttcttgnntttcgataaagaagaaacgctaactaacagtaacagccacgctgaatcacttgttcaggtataaaaaaaggaattaatgaacaatgttacatcgtatgggtagcactacattctagaacatactnaaatgaagactattcattcactttttttttggcttggacatanntagtttggtgatgctcccatgccatcgacctcttaattagnttggtattcacaagaatatgcgatcttaagnctggattagaaagttcgaatgctagttaaatgaaaatggatc

SEQ ID NO: 84592 - DNA, 575 bp, Glycine max
  unsure (1)..(575): unsure at all n locations
tcttggtgatgccttctgtccttttacattanatgttatgcctagtataccttccactaccctattgnggtaatatggtaattagtaataactacttcacatttccctttcaatactttgttatttgtagctaaactggcatgttattggtccaatatcaagaaagtgaaacaaaaaaaaaaaagatgattttacagacttgttagtaaaaaagaaaagaaatataacatttttcttttgtttttgtaatgtgaggagaaagaaaaaaatgagtataaaatgacatanataatttanataaaaaatactgggtgggtgcattaataattctctatatatagatatatagtcacgtaaattacacanaggactganaagtaatttttgaaacatttacgaacttgtatatngtgntctcaaccttacttaccaagtctctgcattcagctgatcgactcgtgaggatggaaatagattcctgtattaatgcatttcatgagtagaatcattacattngacanntatactatngtctagaagattaatgcattcatgaagtagaatcattacatgga

SEQ ID NO: 84593 - DNA, 353 bp, Glycine max
  unsure (1)..(353): unsure at all n locations
agcttctcaaggaagntttcttaagaaagcttctcagtttatctacctagnctataaatagaagcatgtgtaacacttgttgtaactttgatgaatgagagtgttgtgagacacaactcaaagttcaacttctctcccttnttcttccttcaatttcgtgttcccccttctctctatctctccctctttcttttcctccattgaagcatcctctccaagcttcttatccaaggctcatcttggtggtgaagctccttcnttcatggcttattccctagtggatggcgcctcctctcacctcttctcctttgtcttcactgcatctcatgggggaaaatcacattaaaggacct

SEQ ID NO: 84594 - DNA, 445 bp, Glycine max
  unsure (1)..(445): unsure at all n locations
catgattttaagtttaatgtgctaagcntgtctcaatttcaaagactatttttcagcctagacgccttagatgtgcaatgcaagccacacanaaaagtaaatgcttgtattaatttttttcaaatagaaaatccatataaaatattatgcatgaatctatatggagaatgtgttaactattntttaatttttcaaatccttcatgctaaataaaactgagagaatcgctcaagctctatgangtattggaaaaagccaaatatactttgataaaaatcctaagggtataaacatagcttcgcttgatgtgaagaatgaatttttgacaataaataaaatggaataatgacatcatatagacctctcatgtggtacatcntcatgtcattgtgtcanattggtcatttgctagaatgcatgttatcatctanngatttgcatagac

SEQ ID NO: 84595 - DNA, 337 bp, Glycine max
  unsure (1)..(337): unsure at all n locations
agctttatgactatgtctgcacacggcaggatcattttatatatttntcacaatcaattttacctttcattntcttttatatcatgcaattggagtagttatcattatgtatgtttatccaccaagctttgtcatgggatcgttcttcaaattctcatttagttgtggagaaagccttataaacaaaaggaaaaataggagactgaaaaaaacataggaggtgataaagttaggacaaaaaatagtggttggatcctctacagaattgtgaaatgtggtggtttataatgaatagtaaataattgggcacttatatctatctatatctatattatat

SEQ ID NO: 84596 - DNA, 264 bp, Glycine max
  unsure (1)..(264): unsure at all n locations
agcncgncacacgctactttgatttgtgaagtcncttgaggacacccaccactgataactgcctcacaatagatctggcggcctgacaaatcaaagagtatggcattcactaggaaaacttcagcatgcactgcagcattctatagaataatttcgtccaaacgtaagtattcaagttatatatctcacattgagcattccttgactatatgaatgtccaaagagaataacataggccaaagggggtatatcattttactcact

SEQ ID NO: 84597 - DNA, 288 bp, Glycine max
cttcatggagcttgcatcattttttttcccttgaagaagatttggacctcaaaactgagagttcctcctcctcaatatcagctccacctgcaaaaggagttaaatcagaaatgttaaaagtggtgctgactccatactcttctgggaggtccaacctataggcattgttattgatcctctccaaaacctgaaaaggtccatcccctctagggctaaacttggatttccttttagtagggaatctatccttcctaaaatggagccaaacccagtcaccctcattaagaa

SEQ ID NO: 84598 - DNA, 303 bp, Glycine max
  unsure (1)..(303): unsure at all n locations
aactacgcatactcaagctnttataaaagtcaaatacttatcttttaatattagtgatatataacaaactcatacttaagatataaccaatatgaaacaagtgaaattaaacttagataagacttgatccaatccaaccaatttgcacccctaaccacaattgccacccccactcccatcatggtcacaaccctcattccatagctatcattatttcatagtgaaatatgataagataaaataagttattcattttatctatttttaatttaaaatatttttaaaaaaattacaaaaatattg

SEQ ID NO: 84599 - DNA, 282 bp, Glycine max
tgtaggattatggggtacccattacatgtggtactaagtggcggtcgggcgatggtgcacaacaagttttccacatccacaatgcgcgcataaacccaccatcccctgttgcccacctccaactgagctcacgtactcccacgtagcccatatcctcgtttctctcaacaccgggtccccatcaatcctctcaagcttccacaacatccaagcaaaacaatattcaaacagcacaagctatcacagccaagcaaaacagagcaaaggcaaaaaactctgctc

SEQ ID NO: 84600 - DNA, 277 bp, Glycine max
tagtcaaaggtaaggctatcttttttaaccctctatgaatctacgatagtatcctgctaaaccaaggaaactcctaatctcaaacactgacttaggactctcccaactcatcaccgcctctacgttggaaggatctactgctatccctcccctagatataacgtgtcctaggaagctcacctcctttatccaaaattcacacttggacaacttagcatacagtctgttgtttgtgagggtttgcaacataatcctcagatgctcctcaagttcctct

SEQ ID NO: 84601 - DNA, 285 bp, Glycine max
  unsure (1)..(285): unsure at all n locations
tggaagaagagtggttattgtgtctcctttcgncttgaccagttgatgaagaagaggaagaatgagcgtgaatggtgagttttagagtttaaatgaacttatagaagaagcttagagcatggtctattggattatggagttgatctatcctaatcactcaattttgactcatgaatgacccttgctcagccatggaaaacatgtacatcactatcgaatgtggtgtgcttcacttttgaaacttttacttaaaaaaagctaaagtagacttttgccaaaaatggg

SEQ ID NO: 84602 - DNA, 296 bp, Glycine max
atactcaagcttaagaatatggagttgattaattttaacaaaaatggtagcatgtagcaagcttcatgtgcttaatgattctcagacaatggtatgatttgtaacacaaaatgtcatatcaatggggaatttaaaccggggaaataacttaaaagaaaaggggaaataacttttctctaaaacttttttaaatcacctttatattacactttgtttttgttaaaaaaattcaacaacacctagaccatactatcctgtcatgtgcatgaaccatatcaataaagctattttttact

SEQ ID NO: 84603 - DNA, 304 bp, Glycine max
  unsure (1)..(304): unsure at all n locations
gagaaactacacaatactcaagcttgtttgttatcatccttctttttcattctccgatgtgtattttacatatcttgacatgcattatccatacataagtcccantaatgtcatcaaagtatgtagtcctaatccgcttatgcattatgatttccatttgttgttccaaaagcttgcaacgtacaagggttggtgcaacgtatggatgaaattgtcaatgcttttctcatttagaaacaaatttccaaagattgtagtattttgttctgtaatgcctagtagtcacacactattggtttacatg

SEQ ID NO: 84604 - DNA, 287 bp, Glycine max
tactcaagctttttctcttcttggagcattttggcttcatcaaattcgacactaccccaccttcttcccatgcggatgaagagtatatggaggaggagtattgcaagatttgcttcaaagaaggcgcccccagtcggttttcattttgaattttgaatttcaaatttcgatttgactacataattgttgggtctgttattttgttttatgtagtttgaaatttttgtttttggtttctgaattatgagttctggtttcagatctgcaatacctgggcttgtgagttt

SEQ ID NO: 84605 - DNA, 287 bp, Glycine max
atactcaagcttgtgtattgctgcatttcttttttatatggagttgtccaatgctttgtctgagaataacaattgcttgaccacaacaatgctggaggcggtaagggacaatggtctttcaaataaacctgttgtacatgaacaaagattatatcatgcggtgaccgtgtcaaatgaaccatcgaagtcattgcataattgttatactaactatattcaatgtacctgaacaaaatgatttccaaacacgtcaccgacacatatcatgcggtgcctaaaataatcat

SEQ ID NO: 84606 - DNA, 283 bp, Glycine max
tatcgagctcatcattgtttttcggtgacgtcattattgcttgcggtggtcgccatttctaaccaagcacctgcttctgttgccatgggagggatttgctttgcgaaacaatgatagggtttgtgttggcttgaagaatgtaagggggcgccagtgagtgagagagacatgctttttcaagtagtgagatgcagaaactgagagtgaataggcaatttagtccctgagattgtaaccagtttgcatattagtccctgacttaaattttaattcaaaatagtcc

SEQ ID NO: 84607 - DNA, 275 bp, Glycine max
tatatataaagataattgtttagattaaattacattggtgtgccattaataattattatattattttttataatttaatatagcatgtgatttttatttatttaatcattaaattatatttacatattattaaaattatttttgtcaaattttatcaaaattaaacaacaataagaagacaatcaaattatttatattttagtatattttaaaatgtttatatatatatatataatttgtgaaagatccataatatacaatatgttattactttt

SEQ ID NO: 84608 - DNA, 287 bp, Glycine max
tatcccgccagctccaatggcttgactgcccacgtaggcatgtcccgccagtaccaatggcggtaccctcgctcacccctgtcccgctgctgccaatagcggcaccccctgcggttcccgcttctgttagtggcggcacgcctatgccgctaattccgctggcggcaccaccccaagaagagacccccttcgtaaaatgttaaagaagggacccctttacgtaaatagtttgtaaaggggaccccctacagtaaatttgccggtcttaaacaatctttctcatacct

SEQ ID NO: 84609 - DNA, 287 bp, Glycine max
gctggctaaagacataaacatttttttgctcttcatggcctcgcttgtgttttgtatcccgaactggaaatccccccttaattgaggggcaacctatttcctacctaacacgtaaataccttaagtccttaagggctctttatttctagttcgtttgacccgcattaatgtcaccctattgatgccactacgtctcttatacattatgtggcctagcgaaaatgaaaccctattaccactccactacgcctaccagtctacaacaagacttatgtgcaatctatact

SEQ ID NO: 84610 - DNA, 286 bp, Glycine max
  unsure (1)..(286): unsure at all n locations
cctcaagcttaattattgagaacnttacttctttgaacagcaatcgatgattttgtacttttgaccttggttcccattatcattgatgtaaaaagtgactttttacatcgattaaaatcacaaccaatgtataaagtcacttttctatattgattatatctacaatcgatgtataaaaatatataaaagtgactttttacattgtttggttaccaacgtgatggttaaattcacaaaagtcaaaaacttggatggtaaaatttgtgaaatgttaaaagttggatgg

SEQ ID NO: 84611 - DNA, 289 bp, Glycine max
aaaactcaacttactgttgaattgcgagttttttttttttacagccccgaattgggatgacttttcctgctactaatcttcacgtatgcatgtgccgaacagaatgtggtattttccaattagattgaaagggatgtggtatttacctccttcatcggccgccctgtgattgcgtgttttggatgaccctaatgcttaaccccctattatagtcatgctttgtgtgtccaatagggtccctttcgttaggtatgcttgcaagaatggatttcggaagataagagaccct

SEQ ID NO: 84612 - DNA, 298 bp, Glycine max
aatactcaagcttgtaatggttagaaaagatttacacacacagtcatctaataagcaacaagtattaaaaaaacaaaaaaaaaaaacaaaactgtaagtataaaataaaagtgcgtgtgctgctaattaagaaaaagaaaagctaagtgtggaaaagcaagtaatagagctggaataaaaagaaaaaggttgatctaaggatgaatgctcttttagaacctaagcatttgcatcctagaaaaaccatgaattgtttgcagcccagcctcgttacaagcctagaaaagtccttcggatt

SEQ ID NO: 84613 - DNA, 299 bp, Glycine max
gaaactacaccatactcatgcttgttagttacagcgacttttttgggctggagataaagatgatcggaaaagtaccagtgaatttgtgcttttcatggggaacacaacctttacttagatgtaaaaaaagtagctgatagtcactttttcgacttgtgaggcataatacgtagcaactactttatgtgtctagcatgcagtccggttcaggaagttgttaaaagagttgggcatgacacaaaaagaaccgaccaagatctttgtggataataagtcaaccattgctctagcaaagaatc

SEQ ID NO: 84614 - DNA, 285 bp, Glycine max
ctcaagcttctttttcggaggcactactactattttgcaatatagagaactcagttgcaacaatcatgaaccttaaaaacacaattaaagaactcacctttgtacttcaaatgctccttagctcttcttccttcccttactctgtgtgctctcatatgactagtatcttgttggttctcttccgtgattcttgttgcccaattgcaccctatcttcttggtccaatggtcaatttatgtgtgttgagcaattctgtaaaaatgcaatgacgtgtgtctgtttata

SEQ ID NO: 84615 - DNA, 180 bp, Glycine max
ctccaccctgcaatgctaggccctttaagagaaagtgagctactcccccctatatactactaccctgacaaaatactgaaaaacaaaaagtcatactacaagactactcaaaatgccctgaaacaaggctaacccatctactagaaggccaatacagcccaagaagaaactatcaatata

SEQ ID NO: 84616 - DNA, 217 bp, Glycine max
ttattgtcgtttgaatttgctcagagcttcaacattcaattttgagcgtctcgatatatgacgggactcaatcagacatccgagtaaaaagttattgtcgcttggattggctcagagcttcaacattcaatttcgagcgtctcgatatatgacgggactcaatcagacatccgagtaaaaagttattgtcgtttgaattggctcagagcttcaacat

SEQ ID NO: 84617 - DNA, 273 bp, Glycine max
  unsure (1)..(273): unsure at all n locations
tgtacgcaaagntcttcttcgcgcctcgncggcgtcgcaatccagcgactcgcgagtcaactcggcgattctccgaatcagcactttgaattcgaaaccaatccctagcttctccgcgtgtctccccagcaacaatcccacgctgttcagcctctcgtcggcgccgttctccgccaccgcgacgatcttcacggcggatggagctcccttccgccgcgccgaaagctcgtggagaaggctcacgtattggttcccgtcgccgatatcgaaatc

SEQ ID NO: 84618 - DNA, 287 bp, Glycine max
tcctcggggccattcctgcgaatgcaaacatttggaaagttagttcacaagaaatataacaatcattacaaacaagggccaaacaacacttctcatggcacgagtgtcaacatgcactttataaaataatcatattggggtcatgctattttatgacacatacgtatttgcacacataaaaattttgtatgaagcattttacgacacctatccatgtacatattttttttgacaaaccttttcatgctacatcctatatatatacacacattttttggaaggcttct

SEQ ID NO: 84619 - DNA, 285 bp, Glycine max
tggagcgctatccgcagacttttcataagtcagttgggaaagaaatcagactatgtgcacgaatcttatacccaaagggttattgataggaccaagagctttggcctaccctaccgcttacctagatacctatcgtccaccatcccaccatcatccttgcctatccccttcgacaccaaggaagagtttcatgaacaattaaccaaagaaaggcaagaaaaagaaacttggaagaggagatgccaggagctcgagcaagagaatgagactttgaaagggaagata

SEQ ID NO: 84620 - DNA, 292 bp, Glycine max
ttgagcgaaatcaaacgatttttttttttttacttcgttatggtccgaattggtgttccccgtaggatatccgaagacgccttcgaatatttctgaaacagaaggctttttagaaaaatcaatcgacaataactttttactcggatggccgattgtttcccgtagtatattgagatgcttgaaattcagaatagaagctgtgagcaaaatgaaacgataataactttttgctcggatgttcgattgtgtcccgtagtatatcgagatgcttgaaattcagaagagaagcttt

SEQ ID NO: 84621 - DNA, 286 bp, Glycine max
atcagcttacccttatggctcgccttcttttttcactccccgtgtcgctccggaagatttgaaccaagcccctacattcgatgggcaactccctccttatgccgactatcccctgcaagaagatgatgaaggagatgcccatctaggccctctgcttcccctaaaagatccggccccccatgaattaccccaaccaaatatagtccgccatggcccgtcttcacccgcacccgtaaaagaatccggtcccttcgcggaagataagggaaagattggttcacttgaa

SEQ ID NO: 84622 - DNA, 283 bp, Glycine max
tattagtcattaccaacattattacctttgatcatcatcaaactatggctacattcagcaacatttctcaaatgttcctatgtttcatgattagttccacattgatggtcaaaatcgggctttcacaagatgctccggaaccatcaaatgcaccagggccattgtcatcgaatgagaagtatttaaccaattgtggatcgcatttgtatccaaattgtggtgatgaggtattctcagcaatatttttcggtaacaaaacagttagtgagtattgttgtgacaa

SEQ ID NO: 84623 - DNA, 283 bp, Glycine max
ttgaaaggcctgagcctattcttttatgaatttttgaggcctgggcctggcttatagcctatcaaagacttttattttagctcggcctgacctttttaaaagcctaacctggtctgataacctttttaaaagtcttcttcacattaaatatttaatattcctttgctttggaacaggaacgtaacaggaaaattaaaggaaaaggaaagccaataaaaataatgaggaatataaaggggcacatgactcacacctaaattataattaaagtcttacttaatga

SEQ ID NO: 84624 - DNA, 278 bp, Glycine max
tgtccaaattgagctatgtttattcctcttgttgatgcacctttcgatccccaacaaattcaattcaacatcctttgaatctcatcctttagagttgttggaagcaaatagatactcatgttgtatgaagggattaattgagcacaagatttaattagaacttccttaccagctttggaaagatacttccccaattagtgattgatgcatttccaaattcgatcatctacataattggaaattgttttctttgttctgccaatgatagatgagaggcg

SEQ ID NO: 84625 - DNA, 285 bp, Glycine max
atactctgctttgtggcggctggtcattttttatcttgggtggtaactgaaatttagcctctggtaatccattaccaagggtgtgtaatcgattacaaggcttaaaaatggagacaggatgttaaatggcctctggtaatcgattaccaagggtgtgtaatcgattacagggcttaaaaatgcacacaaaatgttaaatggcctctggtaatcgattaccaatggtgtgtaatcgattacacaaggtgatagggaactagtaatcgattaccatttaggtgtaat

SEQ ID NO: 84626 - DNA, 281 bp, Glycine max
agctttggtaagagaattttttttttttgctaggcgcataaagcgactaacatatcttcagtaatatcccgccaaacccagaaaactcctaatctcaaacacagacttaagactctcccacttaagtacaacttctatcttagaaggatctatatctatactgccttaggatatcacatgtcctagaaaactaactttatctaaccagaactcacacttggacaacttagcataaagttgtcggttcctaagggtttgcaacacaatcctcaagtgctctt

SEQ ID NO: 84627 - DNA, 257 bp, Glycine max
  unsure (1)..(257): unsure at all n locations
cagaanacccaagagaaccgggcagcgaacacttgcaactaccccaaggagcaagcgggtgaggaaagaaagaagcaacagaacgagaaaaacgaaaaccgcctagaaacccacaagaatgccaagagccacaaagaaaagaccaagaagcaccacgagagcaagagagtcaaaaaggaccgcaaggaagggcaaaaagggaaacagaataaagcaaggccgggactcacgagagggaagaagaggcccaaacggat

SEQ ID NO: 84628 - DNA, 283 bp, Glycine max
  unsure (1)..(283): unsure at all n locations
tgagatgaggaagtgntgaagggtttaacttcctgcttttattggtgaccacaaagtggtacctggagaattgtcgcgggggtcaggagaccttggggacgtcaggtggggtgctattgcccaaaaccaagcttgaccaatcccgacccaacccgggcatattcggtcagtgagaacctgtgatgtacctaagcaggcgagctcctggcagtcaacagattaaaggaaaacaagaccacaaagcaaggaggcttgtggtggctggccagctgtgaattttgtg

SEQ ID NO: 84629 - DNA, 286 bp, Glycine max
tttcaattagaaaaaaaaatatttattaactaaaatgtcttaccaaatttaattaatataataataaaggagatgataattttttttactaaagtgtcaaagaaaaaaatataaactcattattagctattttaaatggtacattaaaaactatatattaataaaataaacattacaccaaacacctaattctaatcaaataatcttataaactaattaaattaattaattaaaataacttatcaagtatcatctcaggtcggtaaattaacttcagggggttctt

SEQ ID NO: 84630 - DNA, 298 bp, Glycine max
acactatgcaatactcacatcttgcttgggatgctcctattttgcttgatctttgaactataatgaggtcctttactggctgtattccaccatccttatgctgcggaagacatactacactatgggagaggatgcgccatccacttcggaataagccatggaacatgagcttcaccaccaagatgatccttggataacaagcttggacagatgcttcaatggaggaaaagaatgagggagataaagagagaggggggagtaccaaatttacggaataaatgaggtacagaagtggaac

SEQ ID NO: 84631 - DNA, 279 bp, Glycine max
tcttgagctgtatgggctgatttatgttttgacaaagtaatagggatagaggttttacatgaattgataatttggtgtgtaattgaaggctcttgagttctgtaactcctgtcgtgagaggtattgggagcacaggaaatatgtatataaaggcaagttgtgtgggcctaccgtaagtatgattttttgtcgggatagaaattggaaggggatacatttgtaggtttgggttattcttgtttatgcatcacttgcacaaacacctattacctgacactt

SEQ ID NO: 84632 - DNA, 278 bp, Glycine max
ttggttttaaatttcgagcgtctcgatatattacgggactcaatcggacttccgagtgaaaagttattgtcgttagaattagctgcgagcttcggttttaaatttcgagcgtctcgatatattacgggactcaatcggacttccgagtgaaatgttattgtcgttcgaatttgctacgagcttcggttttaaatttcgagcgtctcgatatgttacgggactcagtcggacttccgagtgaaatgttattgttgttcgaatttgctacgagcttcggt

SEQ ID NO: 84633 - DNA, 280 bp, Glycine max
tgtcaacttctgctatttttttagccttactcagacctgaactaggacttgtgggaggggattttgcagggctagaaaccctcctaagtggacccttcctagaaagcaacattgatggacttctaaagtccttatttgggaaatttggagctttatgaatgcctggttttggtgtttgattgttgggatcttgagatgatgaatttgttccagggaaactttcttcagcatcatcctcatcaattctataatggacttgttctgggaaaacaatggcaat

SEQ ID NO: 84634 - DNA, 284 bp, Glycine max
taatatatcaaaaataaatttttgaagaagtcctggtctcacgataaagttttttagctcacgtgggttgtactgaattttcatcatcgaagtcacttccaaagaagagatgttatgtcacgtgttttttagaatattgatttttgtgttttttaaagtactttttggaagttaaaaaacaaatttgttttaggaaaagtttactccataatattattgtattccaaaaagtattttccagaatgttaaaaaacatccaaaaaaattcaaggagaacactaagg

SEQ ID NO: 84635 - DNA, 290 bp, Glycine max
aactataaaactcagcttgagatgaggaaggtttttggtgaaacttcctgcttttattgttgaccacagagtggtacctggagatatgtcgcgggggtcaggagaccttggggacgtcaggtggggtgctattgcccaaaaccaagcttgaccaatcccgacccaacccgggcatagtcggtcagtgagaacctgtgatgtacctaagcaggcgagctcctggcagtcaacagataaaaggaaaacaagaccacaaagcaaggaggcttgtggtggctggccagctgtga

SEQ ID NO: 84636 - DNA, 277 bp, Glycine max
tcatgtgggctctgtttttgtttagaaattggaagcagagaacgaagtcaaagcatcgagatccagcatactgtccttctcaaaagtagcacaaaaactgacaaacgagattgaggaagccagtgaagaaaaattggtggttcaattggacaaaatggatgctttgaatgaacttagagacattgaaaaacttcaaaacacaaggaacaaattgaaagaggccattgaagcgatagatgaggcaaaagagctcgaaatgaaattggccacaacattg

SEQ ID NO: 84637 - DNA, 282 bp, Glycine max
tactcaagcttgcacaacaagtaactcttttttttttgtacaaaatgaagtagctgactaaatttcactaatatatacagtgactactcagaaggaaatgatgagcctagattaggcccatctaatctacctaattaaactaattacacaaggcaaagcccaaatttgtagcccaattgttcaagtacaaaggttctaactgccaagcttatttctgacaaaattgaagctctttttcttagatttctaaggacttctcatatgctccatttggtgttctgt

SEQ ID NO: 84638 - DNA, 284 bp, Glycine max
tgcttatcagatggacctttttttgttctcactctcatcatatctaccgtaatactcatcacctctatcatatttaataattttcacatttatgtctatttgtccttttacttcattggagtaaatttctaaggaatccattgcctaagaaatctcgggcagtaagttgacataaccgtaacgcatataatcatcaataatggtgataaagtatcattcctttccgaaagaactaacatcaaaaggtcaacaaatatcagtatgcacaatttcaagaagctgag

SEQ ID NO: 84639 - DNA, 275 bp, Glycine max
tatgctgcaaatatttactttatacctcctcaacctcagcagcaaaatcaaccacagcagaacaattatgacctctccagcaacagatataaccctggatggaggaatcaccctaacctcagatggtccagccctcagcaacaacaacagcagcctgctccttccttccaaaatgctgctggcccaagcagaccatacattcctccaccaatccaacaacagcaacaaccccagaaacaaccaacagttgaggcccctccacaaccttccctcga

SEQ ID NO: 84640 - DNA, 284 bp, Glycine max
tagctacacatacctctctttttttaagctcacctccttgagatgagaagctagagcttagctacacaccccctataatagctaagctcacccccatgagaaaaaacatgaaaataacaaaaaaagtccttattacaaagacaactcaaaatgccccgaaatacaaggctaaaaccctatactactagaatggccaaaatacaaggcctagacgaaggaaaaacctattctaatatttacaaagataagcaggctcatacttagcccatgggctcgaaatctac

SEQ ID NO: 84641 - DNA, 291 bp, Glycine max
ctcaagcttgtaattgattgttttccttattttattaaaaaaaagaattataaagaaaggaggaaaaatacaactaagacaagttatcctccaatggtggcggcttgtgttttgccattctgtttatgtggaacatgtttctgctttctagttcttgggctaccatttttgatgtggttaacgtagattattaccatcttttatacccagaaaatacatgctgctatgttgaaatttttttttttaggaagaaacctatagtacctgacgtgctatcccaccaacacatca

SEQ ID NO: 84642 - DNA, 287 bp, Glycine max
ctcaagcttggagccatagtctccatgtcttatttaaagatgaaattccctacattgacaggggagattgtaaccatcaaggttgaccaaaagcaagcccgccagtgctatgccgaaagcctgaaggtagcatcgtatcctcccatcaggaagcatgccatgtctcaccctatagcggttgaaggcactcaagtcatgatagtggacaaagggcctcaagttcgagccctgaccatttaccaacaagccagggcaatgaatttgacatagatccgcgatgacacctt

SEQ ID NO: 84643 - DNA, 277 bp, Glycine max
tagctacacatacctcttttatatctaagctcacctccttgagatgagaagctagagcttagctacacaccccctataatagctaagctcacccccatgagaaaaaacatgaaaataacaaaaaaagtccttattacaaagacaactcaaaatgccccgaaatacaaggctaaaaccctatactactagaatggccaaaatacaaggcctagacgaaggaaaaacctattctaatatttacaaagataagcaggctcatacttagcccatgggctcg

SEQ ID NO: 84644 - DNA, 279 bp, Glycine max
ttttgagatttcaaaaatttgtttttttctctctggtaatcgattaccagtggcaaaattgatttccaaaactgttttacaagtttcgaatttgatttcaaaaggctgtaatcgttatgcacagtatgtaatcgattaccagaagtttaaattgtttgtaacagcttttagaaatttgaatttaaatttcaaaagcttgtaatcaattaaatcatttgtgtaatcgattaccagacataaaaattcaaatttcaagtctgaagagtcacaactctttag

SEQ ID NO: 84645 - DNA, 259 bp, Glycine max
agaacatgctcccggaacgaatcgattggccaaataatcactacatgggctaaaagattttgggcccattgggaatggagtacaagaatatctatgcaagccctaataattgcatattgtatacaaacgagtatgcacaacgacagcaatgtttcacatgtgggggatcacgatacaaagcgcaacagtgatgaattaactgaagatgcaataaccaaaaaattgcggcctgccaaagtgcgatggtatctaccaaata

SEQ ID NO: 84646 - DNA, 283 bp, Glycine max
  unsure (1)..(283): unsure at all n locations
tgatgcctctttgnataattttttttacttttgggatctttccaatatcttctagcatcaagccaagacaatgtgcagcacatggagtccaaaatatttttggtcctgtgacttgtaaaattttacctaaaagaccaaaatcaataaacttgtatgagtagtgtaacaattaaaagttataactataaaataaaaaaacttcattaagcatgattgaattctcaccatcaacacataattacttccattgtccgtcaccacttgaataacattcttttctcca

SEQ ID NO: 84647 - DNA, 283 bp, Glycine max
tactcagcttcttctccgatccttattttcttctaccagtcctcaacccatggatccttcttctccgtccacttcttctcatgattctgactcaaactggcccaaagtcatcaggaaaggtactcgctctactcttaatcctcatcctatttataatgccttaagttatcaccgtttgtctccttcatatgctacctttgatttctcattatcttcccttactattccttccaatgtccatgacacacttgatcatcctgtctgacgacagactataattgat

SEQ ID NO: 84648 - DNA, 286 bp, Glycine max
  unsure (1)..(286): unsure at all n locations
actcangcttgaactaccctcacatttttttttctaagaaatggaataagagaaaaacaaaacatagaacaaaatacaacgtctaaatgtaaggaaatggagaaactacgataaaaaaggagtgaggaaggagaaacaaactcaatgtttggaggcacagttagtagtgaatggattcacagagtttatgatcaatttaaaggagaaaataatgagagaagtgaataaaaaaaagtgacaaggagagtgaatttaactaaaatattaaataagaataacacttttt

SEQ ID NO: 84649 - DNA, 276 bp, Glycine max
tttggtcctttatatttatttttaagatgtgaaactcatcacgttgtctaaaaaaagccttgatgtggatccaagtgctctgatcattcattaccatattcatgtttatgtggcatactcaccactgcttgtttctttagggaactcaccatagctaaaaaagcgcaaaggcacccctataacacccgatccataagtaagatggataaccaatagggagtgcaagaacagatgaaggctgacctatcggccttaaaagatcagatgacttctatc

SEQ ID NO: 84650 - DNA, 278 bp, Glycine max
tatttgacttcttggttattttcatcttttagatgtgttgccaaattgacataactagaattttgctttgagtcttgtttttaatttgtcaatttaatctagtgtcattctaggacttcctttgtgttccaccttggcctgtggtgttgtccttttactttatttttccttgaatctcattgaattaatgtcattttaaatttccttttggtttagctttcatttcatctttttggtttcttgcttgtcttcttttctttgtgttcaagtgcagccta

SEQ ID NO: 84651 - DNA, 295 bp, Glycine max
  unsure (1)..(295): unsure at all n locations
aaactacacaataancaagcttgctcacccagcctgttcatgttacctaagaagcttcccctagaacgcactgccttctggaggaacttcctggaaggcccaagtgggcctggttgctatttgcaccccctgtttactaaatacaccccctgcctttttttgctgattctttttccgtaacgttatggaactttacgaatttcataacgatacttgttttctttccgtaatgtcacgaaaccttacagattacgtaatcatcccttttttggcttccgggatgttacgaaacttc

SEQ ID NO: 84652 - DNA, 298 bp, Glycine max
actcaagcctgggtcgaggtacttacccttttatgattgaagaacgatgatgaacgtcgattaacgggtgaaactctttgccaaattctttacggaaaacctttacaggaaaccgtttctgaagcggcctcggcttaaattttcttcacggaaacgattttttcaagcaaatttcgaaagagaaagaagtgcctaaggggctgaaccccttccttcttgccttcctcccctatttatagcaaaatatgggaggaggttgccgcccagctcgcccagtcgagctcagctcgcccaggct

SEQ ID NO: 84653 - DNA, 283 bp, Glycine max
  unsure (1)..(283): unsure at all n locations
tcaagcttgatgcacctccatcancttattttttccggaaaaaccatcctcacctcatacaataattggctaatacactcatcaaaattctgacccctcccttgtgtttcacttgtacaaaacaaagcttaaaagtataaggcttcatttttcagcgttttagtctccgtacaccactcaccatcaggtatatctaacccgtggatctttttccttttctacaaaccattgcttgtgcatggaataatgatgtattcctactacttaaacaaatccacttttt

SEQ ID NO: 84654 - DNA, 253 bp, Glycine max
  unsure (1)..(253): unsure at all n locations
tttgtttngtagaatggnatgatgattggnttgaatattttnaatttggtntgttgatttttttggggtgttgaattttatatttttggttatagaaggatataaaagttggttggtttatggtnttagnctatttataaanatatttaattgaattggnttggaaaatcnatgagtgggagttttttttaaaaagtgtttaaaactttataatgctttanttagagatttattaggaaaatttttaacaact

SEQ ID NO: 84655 - DNA, 280 bp, Glycine max
tagcacaaacctacaagttattttgttttagtactagtttagaaagaagagtacggtgatgagcacagtacggtattgttctgtaagtcggaatgcaacatattcaaatgttatttgttaaatttcttttctttatatatgattcaattttgcaactttgaagctttagaaactattttaaatagccgctagctattcaaatggaaacaacgtgcttttgtcttgatgtgtgatagagacataaagcaggaagcaagaagcaattctttgcggccattac

SEQ ID NO: 84656 - DNA, 280 bp, Glycine max
tctcaaccatgtcactttttatgattcctccatagtgcttaatcaactccactttgagctgctcccatgttaatttgacattctcatctagcaacgatttaaaaaatgcaacgtgtggccctccatacacaactgtgcaagaacatcaagactggtttcttgcacttagaagtacacctctgctcatgttatccatcccgcagggtcatcgctattgaccaacagtaattccaccttcttgaccaattggtggaactcatccaggggctctccttgaagt

SEQ ID NO: 84657 - DNA, 281 bp, Glycine max
tcgattttaaatttcgagtctttcgatatattacgcgactcaatcggacttccgagtgaaaagttattttcgttagaatttgctacgatcttcgattttaaatatcgagcgtctcgatatattacgggactcaatcggacttccgagtgaaatgttattgtcgttcaaatttgctacgagcttcggttttaaatttctagcgtctggatatattacgggactcaatcggacttccgagtgaaatgttattgtcgttcgaattggctatgagcttcaatttt

SEQ ID NO: 84658 - DNA, 285 bp, Glycine max
actcaagcttaataagatcttgtttattctaaacacaaaaatgcaacctagtcaagctttataccaaaaaaggaacaatatacaaaaattgaaactaaaacattaaaccaaaaaagatcttgattctattagaaacattttgtcaaacatctcataagcaaaagcaagactaattttaggtaaaaataaatttcatgtttgaaacaaaccggtgtgaagtttgaaagaaactattgtgaagaagcttctcgggtccttcaagcttaataagatcatgttcaaacc

SEQ ID NO: 84659 - DNA, 284 bp, Glycine max
tactcaagcttgcttctacagttcttgtattataccaatttccattgttgaatgatcctaaaaacacatgcatctacatgatcaaggcagaaagcatggtagaatgaagttctgatagcacagtgaacacacaaaacatcattaaatagataaaaagatatttacatcaagaacttacaaggaagatccaacagaggttttagctttccataactgggaagcttcctttacaacaaagagaagagaattgaaagattatagaaatacaagtagtggggatgtct

SEQ ID NO: 84660 - DNA, 292 bp, Glycine max
aatactcaagcttttggcagcaggatattgttattttacagaagcctcccatttcaaatgtctttacagtgggcacagctgggcatagaaaaatgtcaacaagactggccataatctgaaaaaatatcaagcctcaagtcatacctgaacagcatccacataaaatcttcgtgctgtgtcaaaacctgatgttttcatcgttacttcggcccaagatgcaccatgcggcacttctatgtatctcctttctatatggcctattgaatcaacaaataaaaagaaaataactgat

SEQ ID NO: 84661 - DNA, 284 bp, Glycine max
tcagagcccgtcattccaacatctttttttttatgatgggagtttcgaactcccttggcaaaacgattacaatttcgttctttactattcaccacaatcaagcgttacacgtgaagcttactgggccactcaaactaacagctatgatgaatctctgctcgtcttcaatgagtctggacacatgtacataaaaagaagtaacacgggtaaagtgatccgtgaagtcttatatggtggatcagaagagttcttgtacatggctagaattgatcctgatgggcttt

SEQ ID NO: 84662 - DNA, 280 bp, Glycine max
ttttattttcaggagatgaatttgaatccgtggccacctcatggactcctctaagaacaatagcatcatttcttgcactaaattgttgggagttggaagccatcttctcaatcaaattcctagcctcagcaggggtcatatcaccaagagctccaccactggcagcatcaatcatactcctctccatgttgctaagtccctcatagaaatattaaagaagaagttgctcagaaatctggtggtgagggcagcatgcacacaatttcttgaatctttccca

SEQ ID NO: 84663 - DNA, 278 bp, Glycine max
tagatggagaagaagacatattgatttgtataagacaacgcaaaggatacgaaacatacctaggtatggtggcgaaggagaagaagcacagacttatgacaatgctcgaatgcgacgaacacgatgctcgagcttagacaaaacgatggtcagatggagaacagacatcttcaaggtacatggagaacaaagagagcaggaaagcttagatgtagaagaagacaacgagaaggagaaaacagcgcgaaggagacgaaacatacctaggtatggtggcg

SEQ ID NO: 84664 - DNA, 277 bp, Glycine max
tttccacacagactttgcttattttttatttattattgaataaaatctattgagaaacatgcaattatttggattactttcatgaactttcactttgaaagaaattgttctccaattattggttatcattttgaaagaaaattggcctcagataattggttaagtctttaattattggttaggagataccttcatgaaaaaaaagtaacttatattttaaatgagtaaaatcagtatttacatctaataaaaaaaatatttatatgctctaaattga

SEQ ID NO: 84665 - DNA, 282 bp, Glycine max
tcagcttcgcgctgagaacagcgtgtatatgaggccctaaccaatgctacatgccccaactgtggaggcccacctgctcttggcgaaatgtccttcgacgagcaacacttgaggattgagaatgctcggttaaaagaagaggtaccacaaaagaaactcgttaattaatacgcctccttgttccttttttttcttaatcaaataaccaagttagttacttttacttcagatcgataggatttcaggaattgctgccaaatatgttggaaagccagtgacttc

SEQ ID NO: 84666 - DNA, 281 bp, Glycine max
tctatggaggctggatcttttttcttcaataaggtccttcaatggtgattttagccatggagttgcagcggaagataaaagagaagaggttagaggaggcaccatccattagagaataagccatggaaggagaagcttcaccaccaagagagtgccttggataagaagcttagagaggaagcttcaatggaggaagagaatgagagagagagagagagccgggggaggcatgcatattgaaggaaattagggagagaagttgaccattgaagtgtgtctca

SEQ ID NO: 84667 - DNA, 283 bp, Glycine max
taactcatccaaacatggtttttttcaacgagctttcaacaagagtcttcacaaataactatcatgaagcagaaaactaacaaaactacccatcatatctcccaaaaccccatacccacgaaaatcaaaggagaaagaagtccaccaaaacctgaaatttcgaagtcccactcgtagacacgcacttcacgaccccgaaaatgccctcctttcgcaatttggagcagaaatgatggccaaaggttggagctttgttgggcaacaatggtggaggaagaagaga

SEQ ID NO: 84668 - DNA, 276 bp, Glycine max
tactaccatttggcattttttatttttgaaaaaagcttaccaaagacatgtagtagattatgcctttcctatcaatttttattctttttaacaaaaactttcgtactataaaagacgagcaattttatttccactggtggtcaaaacgagatttgataaatgcatacttttagtttacttcttttgttgtttacctaattattttaatttaaatattatattaatttttcactttctttcatatttatcaaataacctcactttttctctctcttt

SEQ ID NO: 84669 - DNA, 279 bp, Glycine max
tcaagcttaatgctgccttgcttggtaattggggctggaacttggcgaataattagcatgagctttgggccacaatcttggtgtccaaatatggagggtggcaatccttactctatggtataaacagtgcccacatctctccttggtggagggatttaaaatctgttttccagcagcaatatcattctattctaaccacaaacttgaggtggaatgtgggtaatggggctaaggttcagttctggtgggacaattggaggggggaagaccttaccctca

SEQ ID NO: 84670 - DNA, 274 bp, Glycine max
tgagtctacatgccctttttcaaccacacttgcattttcatattacttgcccccacacttgcatcatattgaattgcaaattttaaatattaagagtacaatcatgtgttaaatcaccaagaaatggaacatgctctgggaaccctttttgaggggatgcattttcaaaacaaagataaagtttgacttgctttggacttgtatagtgtgaaaaaaagagttcatttcacaactgagaattctaccccaaccatattggttggtaaatgtgttg

SEQ ID NO: 84671 - DNA, 282 bp, Glycine max
  unsure (1)..(282): unsure at all n locations
atactcagcttttccccagaccttttatttcagaaacnggcaaatgatggtgctgctctgtattttcaacgtttcctccattgctttccatactctccaccattacttcagaaggcatgttgatgatttgggtagtactaactagctcaaattaaaataactttacacggtatttaatgagcttgcacgaatgcacgttctctccttcaatctttaaattatatatcgtctctcaaattacaagtcacatacatgtacaaatgacaagatcaaatatagtga

SEQ ID NO: 84672 - DNA, 251 bp, Glycine max
ttgagaagccaaaagcccaagtgattgagttcaagtctgtaagtacatgcattgagaatccaatccaagattcatgattcaagagaagaagtccagaagcaacaagtcaatgttggatcacgttggcctggggaatattaagaagggggggttgatttacttattactttgcgttgactgcataaatacacttatccttcgtgagttactttattgtactgaaaattttagagaagttgacgagaccatga

SEQ ID NO: 84673 - DNA, 282 bp, Glycine max
tctgcatgtctagagagttttttttgagagaaaggtccaagttctagagagtttgagagatttttttgtgtaaagacctacagagaccagagcttgagatgagtttgtgagtgattatgagatactagaggtggaggagacatccccactacttgtatttctacaatctttcatctttctattctctttgttgtaaaggaagcttcccagttatggaaagctaaatcctctgttggatcttccttgtaggtacttgatgtaaatatctttttatctatttaa

SEQ ID NO: 84674 - DNA, 277 bp, Glycine max
tgagatgaggaagtgtagataggtgttacttcctgcttttattcgttgaccacaaagtggtacctggagatatgtcgcgggggtcaggagaccttggggacgtcaggtggggtgctattgcccaaaaccaagcttgaccaatcccaacccaacccgggcatagtcagtcagtgagaacctgtgatgtacctaagtaggcgagctcctggcagtcaacagataaaaggaacaaagaccacaaagcaaggaggcttgtgtggtggctggccagctatga

SEQ ID NO: 84675 - DNA, 277 bp, Glycine max
tgaatcggacatccgtgtgattagttatgagcataaggatatgtcaagagctatcgctggagaatttccatcgtctaaacatattatgcacccgaatcggacatccgtgtgaaaagatatgagcataaggatttctccagaggtttcgatgtagaatttccagcgtatagatataagattaccctgattcggacctccgtatgaaaagttatgaccatatggatttgaccagagctttcgttgtagaatttccaatgtcaacttatgtgatgcgcct

SEQ ID NO: 84676 - DNA, 275 bp, Glycine max
tcgaactgccatttttttttttcgaaattggtcatttgtgaatagcggcaaccttcgaggctacaggttccacacctcttcttgaaaccaggtgcccgagatactccacctgaggctgcgcaaaataacacttagacagttttaaagcaaattgattgtcaagcaagacctgaaaagttgtttccagatgggtcaggtgagcctcgaatgaagtactgtatataagaatatcgttgaagaagacgatgatgaagtgccgaagatatggccgaaaa

SEQ ID NO: 84677 - DNA, 279 bp, Glycine max
ttgagcaaattgaaatgattataactttatacacggatgtccggttgagtcatgtaatatatcgagacgctgcaaattgaaaacgtaagctcgtaggaaattcaaacgacaataactttttactcggatgtccgattgaattgggaaatatatcgagacgctcaaaattgagactagaagctttgagcaaattgaaatgacaataactttatacacggatgtccggttgagtcatgtaatatatcgagacgctgcaaattgaaaacgtaagctcgtagg

SEQ ID NO: 84678 - DNA, 279 bp, Glycine max
tagagccaattcaaacgattttgtacttcttactcggatgtctgattgagtcccgtcatatatcgagacgctcgaaatttaatgttgaagctcttagccaattcaaacgacaataactttttactcgaatgtctgattgagtcctgtaatataacgagtcgctcgaaattgaatgttgaagctctgagccaattcaaacgacaataactttttacacggatgtctgattgagtcccgtcatatatcgagacgctcgaaattgaatgttgaatctctgag

SEQ ID NO: 84679 - DNA, 273 bp, Glycine max
tcttggtgatgccttttgtccttttacattaaatgttatgcctagaataccttccactaccctattgtggtaatatggtaattagtaataactacttcacatttccctttcaatacttgtttattgttagctaaactggcatgttattggtccaatatcaagaaagtgaaacaaataaaaaaaagatgattttacagactgtttagttaaaaagaaaagaaatataacattcttcttttgttttgttaatgtgaggagaaataaaaaaatgat

SEQ ID NO: 84680 - DNA, 275 bp, Glycine max
ttaaaagtatgattttgcttgttcttgcaccatagctagttggtatttgtatgttttgatacacatcaaaactccatggagaagagtttaagaaatacctagatccatggatttctatcaaacaaacacagttgttttccttcacaactttgcatgaaaggttttttatgtgagacccacaccgtttttaaagatttctttggtatttcaatccgatcagattatggaagtttaatataacttaagttcccatttctctttctttctctgcattt

SEQ ID NO: 84681 - DNA, 280 bp, Glycine max
attctcatgctttttaatccaaggctcttctatttggtgaagctccttcttccatggcttataccctagtggatggcgctacctctcacctctactcctttatcttccgctgcatctccatggtggaaaatcaccattaaaggacctcattgaacctcaaagatccagcctccatagatgatgcaatcctacctcccatactcattgtaaaaaaaaatctcataatgattcgtccattgccgctataaaaggactaatgcttcaaaaaaaccccatgaac

SEQ ID NO: 84682 - DNA, 277 bp, Glycine max
taagcgtgcataggatttttttcattaaatgttccaaatgtacaagatataaactttctaagttggtcacaactaagcaaataaaaagaaaagccaagagtcaagtcttgaccctaagcccaacaaggatcctaacaatgaatcacaactcctatagaaagtcccacattatccaagagaatcatgctcctcaaaagcattttttcatttgctcccatgttaaacaatacaatcatcgcaaccaaacaaaaatgcaagggtaaagacatttaaataa

SEQ ID NO: 84683 - DNA, 285 bp, Glycine max
aaacacgaatctcagctggttagcactcttcttttttcaagaaccaccgggttgagtcttctctgtggctgtcttactggtttagctccatcctctaaatttattcgatgcatacatgtggatgggctaataccaggaatgtccgccagggtccagcctatagccttcttatgcttcttgagaactgacaacaacttctcctcttgatcatcagcaagggaggcagatataatcactggaaatctcttgctatcatccaagtaagcgtattttaaatttgatggt

SEQ ID NO: 84684 - DNA, 405 bp, Glycine max
  unsure (1)..(405): unsure at all n locations
agcttccatcacttgatgataaataaaatattattttattgctaatatttatatctcaccatgaggggagtagatgctcaaatggatgggcacagatgaaatacccttgttgcgacatgaaagatccaatgttatatatattaaaaaggtgataaacaataaacattatcacgctcatctttttgcaacacagggtacaaagatgatatgaaacatgccatgaagaaggaaagattttccaaatttccattatgaagtcctgagcaatttcacgaagcgcacgctgaaacataagctttcggattagaagctctgtgctctttntagtacttactgatctccctcagggccacgattcttgacctgaacttgtgtggcttcttcactccgtcagtcaatggagca

SEQ ID NO: 84685 - DNA, 396 bp, Glycine max
agcttaaagaggcgaccatggcatctcctctattgtttattcctaactataaaatcccatttatcatcaagaccgacgcgttcgggtcaggtatatgagtcttgcttacacaagaaggccatcctatcgtcttcttctataagcattttcgccgaatcaggaaaggttcacacatatgcatacaaaatgatttataaacgcaaaagttaatatgggcgattacctgtgggtacaatttatatattgaacccacatatgagcttgctatctcataaacaatgcgtgctacacgccacaacacggtcctatcacattataggttccactttcaattatatatgggtgatagccaaatattggatatcttgtcaaaatcatgagactacctgatcactt

SEQ ID NO: 84686 - DNA, 389 bp, Glycine max
  unsure (1)..(389): unsure at all n locations
agcttttaaaaatatatcgtaggctactattctttgtttctaccatcatctcaaacgcacgcgcataacctaggttgtattgtgcttcatcccttcatcatagtccaatgtttaagtgtgctccctcaaaaccccgatactnttntcttgtnctgagtttaattttcctcaccctcatggattttgtgcttactttgtagttaaagtgaccctcgaaggaatgctttgactgggccatgtgtctcttcaatgataggatcctctcatattgatcataagctattgtttttctaaaccacattccccgctcaagctcttttatgcaccgtaccatccacgagatggagaagacgctcgtcgagttctgtcttttccatgattaccagctt

SEQ ID NO: 84687 - DNA, 413 bp, Glycine max
  unsure (1)..(413): unsure at all n locations
agcttcaagcaaggcttcatggtgaatgttgattttttgtgttcttgatgataacacgtgatgacacactaatgatgatgacaacggggatgatctaatatgctcaatatatcatagaacaactcaagtgattcaaagaacatgcttngttgntcaggaacaggcatgagttccggacgtcaccgatgaaacgctatatattagaatcaagattcaagatctcaagaatcaagatcaagattcaagactcaagattgaagaatgaagaaaagactcactcaagataagtattatattcttttttcaaaactttgaatagcacatgagtttttgacaaaacctttaccaaagagattttactctctagtaatcgattaccatattgatgttactcattaccagtagctaaatga

SEQ ID NO: 84688 - DNA, 395 bp, Glycine max
tgattgaccagtatctttctaccaacagttattagaagaaacaactcaaaactatgacatacatctccttttctgctctcatctaatcgactacagaattgtattacataacatgtcctggagaatgactgcccctcctagccttccccacatgtataatgaaatgattacacacaaacaccaacatatgttatacattgaaagtatacaccatcaactcatgcaaatcaattaattggttaaacaagagataaaacttatgttaccccatatagactttcacgtctagttctcaccctagtgggacccagactcctgctaatggttctgacaaaataacgtaatgtaatatttagactgtagctaaaagatatttcttataaagaatattacta

SEQ ID NO: 84689 - DNA, 388 bp, Glycine max
  unsure (1)..(388): unsure at all n locations
catgcaagcttatgccataattcccttttatcgtttatttgcacacgacatcctattaactaagaaaaatgcacccacatacaatcaagggagcatccttacctataatatgtacatgtacttacaaatggtattgttatntacatcgtcacgcccatatgacaaaatacacacacctttctgcaacagcatttcaggtacaaaaaatgacatgcgctatcttggattttaatattatacttatcaaacttatgatgaatctaaatatctctcaaaataaggctttcagatatgccttttttcaagttttgtacctaagccgcatcaaattcagcatattatctttctaagaaaatttttcaaatatatatattatttttggaaatgt

SEQ ID NO: 84690 - DNA, 369 bp, Glycine max
  unsure (1)..(369): unsure at all n locations
agcttgtgtatattaatctctctatattttctttaaaggggagncgaatgtgtagggtttgacaaagttgcaaacagcggacttgccaatttatatatttgttgggggacttgggttgattctccctgccatttggatanttggtgacttcaatgtttcacacacccacttgaatggggaattgatggcttctttgatcaatgcttgaagttcagcacttgtatttagcaccaaccatttgaatgggaccctatggactggatattccatgctgagagagttttcaatctcagagaattttctcacaggggtggttcctttcaaggctcttctcatccattgtagcctttgaaaactcgacctttttgt

SEQ ID NO: 84691 - DNA, 348 bp, Glycine max
  unsure (1)..(348): unsure at all n locations
aacctgagctcattgttgctgtcccacttatcttcacagaacaagacacagccatgcttcttcctgctagccctcttggttcctcactcaaaggctcttgcggtatctgtatatttctctcgtaactcaacatcactttccggaccttgcagaggncccacctcgcattgctatttggcaagtcatgcttttactanntttgtttttagagctccaacttcttcatcctctttcggagcttctaagttctactcgatgataattttcaacttggagagccaatctaaccctcgtgtacgaactatctaccatttatgataaccacccagatgccattatggatcccct

SEQ ID NO: 84692 - DNA, 417 bp, Glycine max
  unsure (1)..(417): unsure at all n locations
ggaacttaagcactcagctcaactcaaacatacctcttatatgaggtcactccagggaaaaaccaccaaactatacactttatatgaccctactcaaaaatctatcttgaaacttataaatgttttaatttngtaaaaacctcgatctcaaccactatccatacngccctaagtagnttttttggtggttaaaaattcatagaagaagaagaatttccctaaggtcaacatgatacatacagctttacatagaatttcaaaagacttaacaaaagcacaactattgggtggagacgggacacagccacatctaattttcctaaaaccccctttccaaatgttgtcagagacagcctattccccaacttaacaaagatgggttcatacaaatatctaaaacactctctcaccccctga

SEQ ID NO: 84693 - DNA, 416 bp, Glycine max
  unsure (1)..(416): unsure at all n locations
tctgagatactagtctanaatactaccagatcgaatttatanaaccatctttcttagataattgaggttcataatcattagttttcttttacatgatatatgaacagtgcagncttttttgtcttggttataattgcattgatccataccacttggttacgagcttgcttagaaatttcaataattatgagctactcatccatccgcaactttttcgaaactgattgcgaggacactgtcagcaactcancatatattcttcttcttttttcattaactatcagcatatattctatatttccaacatttagtggacgatatataatagcttgatattctgattcatacgcttctatgtgtcagtgtatttattatacatgcgccggcctttcttagctcgnggacaagttctacgt

SEQ ID NO: 84694 - DNA, 390 bp, Glycine max
  unsure (1)..(390): unsure at all n locations
agctagaagtgagaaagagcggtttagtttctcttcctactttgatangggtgaccacaaagtggtacctggatatatgtcgcgggggtcatgagaccttggggacgtcaggtggggtgctattgcccagaaccaagctngantnaggcggaccaacccgggcattacccacgtccgcgagaacttgtgatgttntttaataagngagctcctagcagtcaaccaataaagaaacaaagaccacatgtggatgccgatcctagtgatagaggtgtcatcatctgaagaagaccctgaggaggacccacaggagttacctcccgagcctgttgtggatgctcttgactttccagagggtgatgacgacccactccctgatgtggattcttc

SEQ ID NO: 84695 - DNA, 390 bp, Glycine max
  unsure (1)..(390): unsure at all n locations
attcttcgagaaaggatttgacatgtatttattgttaggntctgggtcggctcaatgatagagaaggatgcccccacactattgtccatgacacataatgccaataatgaaggaatntgaaattttatgcaaatactggtcatgcaggcacttagtgggacactccacgccgctcacaatatttagtggttgatgtgatgctaggggctcaggattcattttctctattttagtcaacccaacgtctccaaaatatgttctttaatcaattggtgcattcatccgagtccattttgggcgtgcggggaaaacatcacagcattcacccttcaagtgtatacacatttttttcaaaactagtatgatcattgattttttcaaaaaagttgg

SEQ ID NO: 84696 - DNA, 178 bp, Glycine max
tgaagctcactacaagcctttaatgaaaaaccatgatatcaccatatccttaaagaatattggagctttggaaatgtcttgggaataagagtgtgggtctacgtttcattggataacactgtttaacgctcatctcactgacgctattttgagccatactatgatgtaacattgtata

SEQ ID NO: 84697 - DNA, 422 bp, Glycine max
  unsure (1)..(422): unsure at all n locations
agcttgagcaaattcaaacgacaataactctntactcggatgtctgattgagtcctgtaatatatcgagacgctcgaaatggaataccgaagctctgagcaaatttaaacgacaataacctttttactcggatgtctgattgagtcccnaatatatcagatgctagaacattgaatgttgaagtctgatcaaattaaacgacaataacttttactcggatgtccgattgagtctcgaatatatcgagacgctcgaaatggaatatcgaagctctgagcaaattcaaacaataataactttttactcggatgtccgattgagtcccgtaatatatcggaacgcttgaaatagaatgttgaagctctgagcaaattcaacgacaatacaattttactcggatgtctgattgaggcccgtaatat

SEQ ID NO: 84698 - DNA, 354 bp, Glycine max
  unsure (1)..(354): unsure at all n locations
ttcagcttcattattcggactaattttctctactaaagatttgagctgattgccaagcttagattccattagacggcaatatatacggaataatcgaagctagtaaaagaattgtgttgaatggccaagctttgattcattaagcgtctgtcttacggacccacccacaccgactaaattattgagtgaattgttnggctctgattcatttcacagtcattatacggataataacaccgatgaaattttgcgcttaatgctatagctatattcattcagcttctaaaatacgacttatctacatcgataaatattgcgttgattgtcaaactcatatcattctacgttgattta

SEQ ID NO: 84699 - DNA, 310 bp, Glycine max
  unsure (1)..(310): unsure at all n locations
agcatttatattaatggagatatacaactatctatattatatgcatggccaccatgagtaaatatttctaaaaaagggtctatacctaagcgttgaaaaaaatgggtgggtggtaagagaatatacgataagaaagggataccnnnnnnaaccgcnacacaacaaantacacacgcccgaacacctgagctctgataataaattcatgagaaaaataaagaggaaataatagaaacgcgacagttgtgaggtaggctatattatcatgaatcgaaaaaaagtatcttatagagagacgctaatgatttgc

SEQ ID NO: 84700 - DNA, 320 bp, Glycine max
tgattttatattgaatggatgtgctgatatgattttttttgtatcatctatagatagtagtgtatctaactatggatgcacatatctgagtatatagcatcagagtaacataacttcaagcttctgcgagaaatatttgcacttataatttgtatggccagatgaagtaaattttatgctgtgcgagcgcggcgcgcgccgcgagcgagttgttttgattattatgattgaaatattggcgtgattatttactacataagacgataggttcagatcttatgtcaatctgttaattgttgtgcctaaatagatattataac

SEQ ID NO: 84701 - DNA, 381 bp, Glycine max
  unsure (1)..(381): unsure at all n locations
cgagctgcagctggagatcctcatggaagtatactgaacgttcagcgctagattggcgaaagatagaggggatcacccgatctttttcactagtctcacgcgactatgattcattaaagttacaactagtgttnnnntnnctctatttatgacttggttcccccctcgccaatattcttgagaaaanttccttgataagcttctttgtgtatacttctctgagaaactacagcttatctacacacacccctcttcataactaacttaccctgcttgagacctcccttttctgaacatatctaaccactccctatattggctggctcacccctcttgacaaaaacatgataatacaaaaagaggttcttactacaaaaacta

SEQ ID NO: 84702 - DNA, 404 bp, Glycine max
  unsure (1)..(404): unsure at all n locations
agcttcatggtgaatcanaggtgattcaaaggtgttttgatgataacaatgatgataacaaaagattatgacaaaaagctcaaagatcaatcaaagaacaactcaggtgatcaagatagaatctaaacaattcagagttaagatgaatcaaagaattcagactcaagagtcaattaagagtcttgaatcaagattcaaggttcaaaatctcaagaatcaagatcaagattcaagacttaagaatctggagaaggcttaatcaagataagtatgaaaaggttttctcaaaaattgagtagcacatgattttttctcacaacatgtttaccaaagagtttttactctctggtaatcgattaccagattgttgtaatcgattacgagtatcaaaattgttttgaaaa

SEQ ID NO: 84703 - DNA, 393 bp, Glycine max
actcaagcttagatgatgctcaagattgaagccattatagttactacatgttttatacttgatttagagatcaagagataggattcatgatagtccattatatgttaaaagaatatcttaaaagattgcacaggtttgacctcaaatgcgctaattttcaaaatctcttataaaaagtattaagtgtctttacaccttctaaaatagtatatttatctattgaatcgactaccagaagctgctatcgattaccataagccaaaattattttgcaaagtttttagaaagtttgaattcaaattttaaaggctgttattgtggaagcaattgacttcaagattattttgatgatgccaaagaatcaagagttaagccagtcccaaagaatcacga

SEQ ID NO: 84704 - DNA, 202 bp, Glycine max
aaatcatcccttcccttcctgatgcagagcattttaccccatatatggtatagtatgatagtacatagtggataaccactattatgaaatttatagatatgaaattagtgatttatattacattatatgctaaaaaattattaaagttacaccattagtagttgaactagtgaagtgatattcacttatgctcaaactatat

SEQ ID NO: 84705 - DNA, 406 bp, Glycine max
gaccgcagctcaactggtaccaatagggctgcttctacacatgacacgcaaatagcctatgttccaaacctgtatagccctatgtctggtggggtggccacttttgaaaggaatcggaaaggtctgataattggtataggttaaagatgcatccttcctatctcctattacacactcgcccccaccgcgtacaagggttgaaacatattatgctgagcataagacaattgtgagactgtggatacaatgtcacctttaacaaggatatatgtgtcgtccaaaacaaggacaactcttcactcttctctgataagagaaacgaaatttgatatgataaactcgggatcatttatcaaaagggtcgggctactcttatccagaacatcattgggatggcataaaagct

SEQ ID NO: 84706 - DNA, 285 bp, Glycine max
  unsure (1)..(285): unsure at all n locations
actattcgaaatgcgcgttcaatgacatgcacatctcttgttaagagttatagatcaatcttagacatccatatatctaccgcttcgattttgaagccgtgatatacgagtgtcctaccggcccctcacctccccatgcctgantatttaaatacagatttgatcattgtcaattcattatatctacttatgcattcaaaataaagctctcatgaatgtgggtgggcttagtaccccatcaattacgaattcaatggaacttcacgaaacatcacatgctaacct

SEQ ID NO: 84707 - DNA, 331 bp, Glycine max
  unsure (1)..(331): unsure at all n locations
agcttctcccccaattttctatatataggtggagaagtgaagagaaaaagggttcatccccggaagcacttctctctctttcgaatatgattgaagaaaattgtttccgtgaagaaaatctaatcggatgcnttccgaaacgttccgtaaggaagtctcgccgaaggttctgaccgtttttcggcgatatttattctgttttcatcattcttatatctataacgggtgtgtacctctaaccaagcttttcgattcattctatgtacccgtggtggtccacatagtgttcagagtattgttaatctcgatgtatttaacttttattaccctt

SEQ ID NO: 84708 - DNA, 417 bp, Glycine max
  unsure (1)..(417): unsure at all n locations
agcttccatntcctcccatgacaccaaattatggatttcaatctcatcaaattgcagatcaatccactcatcctcctcaacagttgaggaacatgtataacgttcacaatgctccctatcagccctatccaccattatctgttactgctgcaatcctgtcaagtgnttccgcacgccctcatatccaagatactgctgccaacatgcagcagcagcaaggtgctgttttatcaacacacatgcctaatttcatgatgcctactcaaagaggacaggtagctgtatccccccatgccattcaacattaccaagttgaggtctcccccatcaatcacaaaggctctggagtggtgcaaggaacagatgcctctgctttatacaattctcangctttccagcaacctaataacaattctc

SEQ ID NO: 84709 - DNA, 418 bp, Glycine max
  unsure (1)..(418): unsure at all n locations
gggcatacctcactcaagctgcattctacacaacgatgtcacagatgtgcacaaattggctgnccacatcctacctgtccatattcaagccgtgatgtactgttttcttctaatatgtaagaaatgaatacctatatctagttctcantactacctcgcccgctcaaccaacataagtagactnttttagtaaagatgtgaatacattgttgttcgaataagatcccaattatgcacggaaataaaccaactgaaactatagtctctgatgatacccagcccaccttacatgaaccattaaattctatctacactattgcattaaactgactctgaacaaacatacaattttcaagaatattctgacataagacaaccgaaataatattgaggataaaccgttaaataaatgaaaaat

SEQ ID NO: 84710 - DNA, 424 bp, Glycine max
  unsure (1)..(424): unsure at all n locations
agcttccacaacatccaagcaaaacaacgttcaaacagcactttctatcacagccaagcaaaacagagcaaaagcagaaaactctgctcaacacatcaaccaatatcacagcttttctcacgtaaagaccacaggaacaatttcttttatcgaattcgtaccggtggaacgcactcccaaattttactggaagtctataatgtataagcctgcattttgaccgttgggatatactagcaaacatccagaactcattctgcactagactgtccacagccaaccacacacaagcatttttctgcacttgtgcaaaaatctgctgcacaatttcacagcaaaaactctgcataagtgcagatntcgaaaatcaccctttctctcattcaatcttgcccacatcaaattcttacaggtccaaatcatg

SEQ ID NO: 84711 - DNA, 184 bp, Glycine max
actttacaactcatagactttagtttctggctcttggagattcttatcacagtttctctgatagatatgcgactattgagttgcaaacacattcgacatatagagaggaccattcattcaattctttttgtctggcatttgaatgtacaggttgtattcctccttgactatgtgtcataaggtt

SEQ ID NO: 84712 - DNA, 422 bp, Glycine max
  unsure (1)..(422): unsure at all n locations
agcttgtgggatnttgtgatagtgattttgccgaagatgttgatgatagaaaaagtactaccggatttgtattttttatgggtgattgtgtttttacatggagttctaagaagcaaggcattgtgacactttctacttgtaaatcaagtattagctgcaaccttcttgcacatgtcagccatttggctaagaagattgttggaggaactttagttgttgcaaaaggaaagcacaaagatctatgttgataatagatctgcacaagagcttgccaagaatccggtgttccatgaacgaagtaagcatatagatacaaggtatcatttcattagagagtgcattaccaagaaagaagtagaattgactcatgtgaaaactcaagatcaagttgcggatattttcaccaagcctctcaaatttga

SEQ ID NO: 84713 - DNA, 381 bp, Glycine max
  unsure (1)..(381): unsure at all n locations
agcttgacttggtcatctttttcaacgtttatttgaaacacaagactgagttcaccaatctggattgttttgccatgaagatgtttattgactgaaggaatggctgcttagttaaaanctatgagaaccacttgcagatgctgttaccatgaagttggcaatactatataccctgaaccttcttgtttcactcagaacatcattcacatggtatgacatggacaaagagtctatgtgtgtttgttgcaccttcttctagagtactgccctctcagatcttcttacacacctgtggatttatattgagagttgatatgatgttcttatattattataataaagtaatttacatctatatctttcaattcttttttatgtatt

SEQ ID NO: 84714 - DNA, 413 bp, Glycine max
  unsure (1)..(413): unsure at all n locations
aagctgagattggtatactctttatactctattatgtggccgaaacactcttcaattgtcattcatgtggttgggtaagaccaccaatacctaggatgcttggtggaattgttgggccatgtaatgtatcgagtgtgacagtntcctactacaaaacgtgttntccacaacggctctacaatatttttaacaaagtttttcagctattgttaaaggtctatgtcttttaatgttgatttaaaacaattgttgaatgtcaactttcaaagacaattttcaaaaccatcttcaaatagttatcttaaatgtctttgaggtttgttttcaaaaatgatttctagaaaaaccttcattaaatatgtgtttttaaagatgtgttttgatgcaatccttaccccccaaggcattggata

SEQ ID NO: 84715 - DNA, 343 bp, Glycine max
  unsure (1)..(343): unsure at all n locations
aaaagttattggtcgtttgaatttatcccagcctttagtatgtcctattgtgccgtcttgacctcttctagcacttccatcgaactctaagaagccaggagttgagcacaaacgccatttaaccgnnccttttctttttaatttnntcggctttnatatattacgggactcaatcagacatccgagtaaaaaagtatcgtcggtctgaattgctccgggcttcaccttcaatttttagcgctttgtatattacggattcatccgaatctgagtaaaagtttttgcgtttgattgctcgagctcggcattcactccagcctctctttctacggactcatcaacc

SEQ ID NO: 84716 - DNA, 263 bp, Glycine max
  unsure (1)..(263): unsure at all n locations
actctgatgtgtgattgtagtccgtaatatatcgagacgctcaaactggaataccgaagctctgagataatacaaacgacaataactctttactcggatggtgatgagcccgaatattcaaacctcatatgatgtgaaatttgacactttaactacatcccccccccacgcccgcccaggcccgctnttnnttgaacgctctgatattgaatgtngaagccttgagcaaattcatacgacaataactttttactcggatgtct

SEQ ID NO: 84717 - DNA, 419 bp, Glycine max
  unsure (1)..(419): unsure at all n locations
agctngcttctacaatctccctcttttttatgatgacaaacctgaaatcaagaaacacatacaaactccatcttctaatcgatcactcacttaattctccccctttgtttttgagtttaagcttcacttgaagttaagttattaataatatagttcttgatctaatcccaactttcttccccctttgacacaacaaaaagccaagtgcgtataagacataaaatcatacattcctcntaatcatccaagcattttaatccatacaacaagcaagcaggacaataattcatacataaactaagcaaggaagataataattcatccataaactataatgaaatgtcagataaataaaaagtcatccatgataacgaaattacaacaactaatgtagaaaggaatatactaataagtgtatc

SEQ ID NO: 84718 - DNA, 347 bp, Glycine max
cttgatctcgctcagggagaaagacatccagcacttctggtttgagagagtactgtgctcagtcaacgttatgcaacaaaccactgttgctcgcgcagtccagagactaattacccagcccagctaaggtggacagtgccatgtcacgatggctcggaagggacgctcttcataagagacatgggtgaccgtttttactgacggacaaacttccttttaccagcaacatgcgacctctcgccgagaatccgctttggtttgcgattattatatggccgtataactgtgaatgatgcgtaattgcttatctctgaaagactatcagattttcaacggcataatctcgt

SEQ ID NO: 84719 - DNA, 377 bp, Glycine max
  unsure (1)..(377): unsure at all n locations
agcctttcacaatttatcagaagtaattgtaccgaacaagtcactattgttaaatacctgtccactgatatacaaaacttgntgttttaaataggaggaaaaagactggaaaaggatattatgaattgaaatttaccatgaaacattacaatgaaaggaacctacttctattaaggttggtgtcaaaccctaatntgtttgaggactatcgattgctgatattttgatattgctaatcgaattatggtttttacaccaattataacgcgaagcgaggaatcattcagtgttttgatcatgnaacaaaaagataccaaggaagggggcaaagggtctttttatggattttctagaacctagctagcccaagctagcat

SEQ ID NO: 84720 - DNA, 339 bp, Glycine max
  unsure (1)..(339): unsure at all n locations
ctgtcccttctacaaatgatatgcggtctgatcttcaaaggccacaaagatgagtccacatcattaagagactgcttcctaaatcaaatatccgtcatgcatactcgatggatgatcttagacccaacatctggcggccnagacaccggccgcctccgcggatacatatgagagagataatgctggcctggtcccaatgacaggctcggtggaaaatacatagaagggatactttagtagaaggaatatccctgatatgaaccaagtcctatgatcattacaaatgagtcaggtattaacatttaacaacccttctagattctctgtgggctgctataa

SEQ ID NO: 84721 - DNA, 388 bp, Glycine max
  unsure (1)..(388): unsure at all n locations
agctntccacaagaatacaganaaccaccgcataatttgttctcataattataggaccttatgatattaatcaatgactatttaatatatttttttcctccctctgatgtctctgactataataaaaaattagtactatacttaattcttaatgtctaagagatcttccaccaaccctggaaaacaagatagtgttccacaatctacacactacattaaagactatccacaactggaatccatatgaggttcaaagagatttaaacttacattagtgcacctgactgcaggcatcatatctggattctattaccagtcgaatatatattatcggggaaggaaggcacagttatgcacttcaaacatgcatacctctactcaggggtct

SEQ ID NO: 84722 - DNA, 473 bp, Glycine max
  unsure (1)..(473): unsure at all n locations
atagaatccaatatttntaatatgggactcacatctcatagcttgctattggatctctaacttgacctatatttcaaatgaagtctacttccctttaatatttcggtattatttagtaattgatagtctttctagatatcctaattatatacaagtctttnntaacgtttaaccactcacactctacggtatacattgtnattgtaaatatatattgtcgtctacgtacacttgtgtacctaaacacatgtaagcataaaattgtaatttataatcacttctcataaatttgtctattagaaatatacttgttggctcatctgaagtgttgtgctatagctataaatggtgtgatgtaccaactgattctgaatacatactatatggacaaagtaaattgttataagatgcattgtcgagcaaanaccaagtgaaacctctctctattcaagcttataaatgatcattgatac

SEQ ID NO: 84723 - DNA, 436 bp, Glycine max
  unsure (1)..(436): unsure at all n locations
agcttatgcgcatacttctttacgagcgttcacttgtacaagacattcttataactaagaaaaatgcacccatatacaatcaaggcaccttcgttacctagattatttatatgtacttccaaggtgtatttgttacctacatcacacgctttcctttctaaatttaccatacatgcatactcaagcactttggctatcaaaaattgcatacgtgcacattctggtatttctaatacctatacatacacaaacttcatgatgaatcttgactatctacacaataaggtgctacatttcatgcttttntcaagtgttttttactacctaaagccgcatgcaaattcaagtatattttcttttgccgactaaaattgtattcaaattaaaaggtatctttgtaaggtattttctatacataacatgcaacanatatatt

SEQ ID NO: 84724 - DNA, 420 bp, Glycine max
  unsure (1)..(420): unsure at all n locations
tcttcttaaggaagcttctcaaggatgttatcttagttatgagaggggtatgtgtagctaagctctagcttctcaaggaagttntctcaaagaagattctcaaggaagttttctcaagaaagcttctcaaggaagctacctagtctataaatagaagcatgtgtaacacttattgtaactntgatgaatgggagtnttgtggacatacttaaagatccacttctctacctcttttattccttcaatttcgtactcccccctctctctttctctcagatgtgccatcattttcttctattttctaaacccctctctgcaccatttaattactgagtggtcttaattgtcaattaaccaggcacgcttgttattgggctcatttagctaatttgatgttttaatctaatttcaagaataatg

SEQ ID NO: 84725 - DNA, 417 bp, Glycine max
  unsure (1)..(417): unsure at all n locations
agcttgctaaacatagagaaagacagatttttcatttcgtataaccggagccatgatgcttgcttgtgctctgtatagtcgtataggatatcaaaagtctacgaggatataagctagattttgttttgccggaaggaatgnnggaagtttaaagactaatttgtcgcacgccacccctaaagcagggatggaaaaaatgaatgtttggaaaaattgagtagaaagtggttctatagctggttagctactacctgttgctttatgcgggtaaaaatagttaatgctgggattatttcacaataaaccctatttgcagatgtatatcttattgtcttcgtagtcctcaacttccaaagtaatgagtttggatccatttacatcaatcataagaacctatcattcttcccataaaagaaa

SEQ ID NO: 84726 - DNA, 429 bp, Glycine max
agcttgcctaactaacctgaaattgaaattaaatgattattaaacacacaaaatgaaaatactaagtatttattacctatacttaacaaaaaatacttataacattacaaaataatcataaattgggagagtttgatacaatttataaagttttaacacaaaagttcgtcattttcaccgctaacaactcccccaaatttatagttttccttgtcctcaagcaaaaagagaacaactcacttgtcctcaagtgacaatgacatgcagtgacaatgtacaaaggtgtatgctacaaagttactgattgcatgataagagaatggagtaaaatgccctcatcacttgtctttcacaaagtatgcagttatccaaagagaagaataaaatgtaacctgaacaaatagatgaagtttggcataagacagatat

SEQ ID NO: 84727 - DNA, 462 bp, Glycine max
  unsure (1)..(462): unsure at all n locations
attcttgaatggctttcaccttttcttgatcaacctctactacctgtgagctaacaacaaaaccaaggaaaactacatggttcaaacagaacacacatttatccatattatcatacaagctctcacacctaagggcctctaagactctcctcaattgcacaagatgttcatcatggaatttgtatccctccgacatcatcaaaataaagcacaacaaaatttcctagaaattcccttaacacatggttcattaatctcatgaaagtgctatgagcattggtcaaccaaagggcataaccagccattcatacagtccatatatagttntgaaaagtgtttccattcatccccttctctaatcctaatttgatgatacccactnttcagatcaaatttagaataacacaagcttcatgcaantcatccaatatatcatctaacctaagaatgggatgcctatac

SEQ ID NO: 84728 - DNA, 152 bp, Glycine max
  unsure (1)..(152): unsure at all n locations
agctattccgaagggcaaggctataacctttttcctgaannaatcgtacagagaggaggtgtaatatctctatgtnacctcccacctagataacctcaaatttatatattatcttaccatcgtcaacaaccttatcacctctactcttggtt

SEQ ID NO: 84729 - DNA, 428 bp, Glycine max
  unsure (1)..(428): unsure at all n locations
agctnttaatatntattatcaataaagttgtgatcaaaataaagccaattacacaaagcttatataatgaaaaacatacaacatatgaaagaaaagcaagaacatagattgtactctgaatatgtgttcttcctctcaaattttgaaatgatatcgaaggcaccgcacattgattgcatcgtttttttgtttttcatctactgcatatcacatcaatagttaatatattaaagttagcaataacacttcttataaattacatgtgataaaattagagttatacctctgcttcttaataatccccaacaacaatgtgcattttggcaaggttaatatcaatagggtagcatttgccaagcctcacgagtatctgaaaattatagattggagatgacaatgatacaacgacaaagtatctgagttatcaa

SEQ ID NO: 84730 - DNA, 389 bp, Glycine max
agcttgtatgattagaagaatattgtgtttttttgaaagtgcagggactgctagttaatccttctggtcttgttaggattggcaatcacaggattaaagctttcttaatgggaagagtttgtgagaattgttttgaaaaactaagatgaaatgcactgcacgcacatctgtacttttattcgaaatttaaccaagtctgataaaagttgtggaaataaagtattatgatgtacacacatacaacgtgaagggtgacttatttatattgggatgcaaacagaaagatttctaatatgcacaatgatgatgttcatttgaaagttctgtgtgaaggttgttagtgttgcttgtgttctaactagttggcatataatatataaccttttcaa

SEQ ID NO: 84731 - DNA, 460 bp, Glycine max
  unsure (1)..(460): unsure at all n locations
tcatacacngctggattctgctcaggttgaaaagcaggggttatctgattattanaagcgccaagagaccagagacaatcatgtgtcacacctctttctctcacgaatatggaagagatcccatatcaaacacattctccagccatgatcaatgaaatgccttactatccagtgcaagcatcaaactttcatttgccatttgtcctcgagctcctctgctcccctttctctttaacagagaattgaactatacacgatgtgataactctattcttacaatctcattatgtatcattccttttcatatccttacaatgcgaatagtgaacaattttactattagaccttggctatcgagaaagaaattcatggaaatgaaattgttgctctttgcgcagatcatgtcctcatcttatggaaaacacatgataatattcgcgacacgaactctatattgtat

SEQ ID NO: 84732 - DNA, 327 bp, Glycine max
  unsure (1)..(327): unsure at all n locations
agctntgactngagtcatcattagattattaattgtgaccatggcatgaatttgaagaacaataatcaagaatctatctatcaatcttctctcaacatcattgatcgaggccctacccgaatcaaataaacattaaaaagcagtatcacgaagtgatcctacgtcgtctcccacgagcaatggtcaaccaaacattcataacatatagtagaaaacaataacgaatggggggggggggggtgttcatctcatgtctaacaatatacaattgttattctaaaatacactttggttatctcatattgtacataattctcttattctttc

SEQ ID NO: 84733 - DNA, 338 bp, Glycine max
  unsure (1)..(338): unsure at all n locations
anctatcatcaagatgctatgtttcttattccttattggaaaaccatatgggcttaactaggaaccaaacttcttttctctacacttgttatccacaatctaatgggcaaacagatgtaatgaataggccctttatctccttttaaggctcttctgaaacgcccccctaactttgggatgagtatcttctttatgtgaatttgcctacaacagggggagttcataaaaccaccatacaatccctttttgaggatgcttatgggttcaattccctaacactcttaaacctcattcgcctcccacttgacacttgttttatacatacagaaggggaatct

SEQ ID NO: 84734 - DNA, 415 bp, Glycine max
  unsure (1)..(415): unsure at all n locations
agtcttggcccaaccaaagtcatctttctctgaagatagntctgtgacttcaacggggtcgaaccctcccaaccataggtaccagaattgccgcgacagtgacgatgaggaggaagagattgattatggagacagngatcttctgatggtgtgaggatgatcatgatgccatcaaaaagaatgcaatgaagtgagtgaggactttggggaagatggcatagtggcaactactgtttctgatgatcatgtgtttgttgaagaagaggttagtgtgaagtccattgggtccaaccctaatgtgagagacagaagtgcttatgttcatcctgtgctgaatccagtggagaatctcactcagtggaaagttcttaatgctaagagaacaccaataacgcctcataaagagaatgatttt

SEQ ID NO: 84735 - DNA, 457 bp, Glycine max
  unsure (1)..(457): unsure at all n locations
tctagatcccaganatgcggagaagagaaacatgcgtagagatttacacacaccgatatgtatatatatgcagaagaagaagaacaggaagtataacaaagcgagaaaaagagagagagagagaggaaaatggtggatgatgatgaaagaatttattgaaacagtgagtgaatgagtttttgatggagtaatatatattgttttggaacggatgagtgcctgaaataaaatgggtttccaaaacgacaaaatcagaagcagnttcatgcagtcattcgtaaccgctatatatatcttcttctgttcttctttcattggcgcaattccctagaggaaactggcaactgatcccatgtgaacgcggaatcaaatcaaatttatcaaatcaaagatgttttctttatcatggtattatcacacttcatcatttattattgagaatgtcatttatctatta

SEQ ID NO: 84736 - DNA, 423 bp, Glycine max
  unsure (1)..(423): unsure at all n locations
agctttgggagcaaggaggctccattctgttacagtgcagtaacaaccactccaaccattgttaactactctgattcaggtacagtcaatgtcttataagctggctggagcctcaaccaaaaaccatagtctccaattgcaataacatagccaaggcctnccatatccctctagttcagttatttctacttctacataataaagatattcaaactctaaattcaataatttggttaagatgagcaaaattaaattagaaacatcttaacaattgccaccaatcattagggacttgaactatacctttagacaaaataacatttcagtcttcatgtagtgagatcttatgatatatcaagacttggaatgatttttggaagcagtctgtcaggtggccttgaacatgacttaccatcactattt

SEQ ID NO: 84737 - DNA, 472 bp, Glycine max
  unsure (1)..(472): unsure at all n locations
ctcggagactctctatcttactatcgagtcaatgtgtcagcaagntaaaaaaattagaccaaaatgaaagtcatttgggttgtttttatctgtttagtgttcaacataccttcattatgtatatgagntagggttggccttcccgacttcattttgggataaggcacacagttgctaattgcatgcnntgtancagctcaaagctgctcgaaatttgtccgcaatcacacagncatttattcaatttgacatgtcatacctttatctttcttagaatggtgagttttggcctaactcaaccccaaaagctagctcaaggtgtgaggggttcccctcacttatatattctaattngtctctatctctagccaatgtgggacttgggtgggtccaacacaccctctcacgcncaacactttttgatcttaatgtgtgaacaacaatagtgtgtgaccctttgaatggactaaga

SEQ ID NO: 84738 - DNA, 411 bp, Glycine max
  unsure (1)..(411): unsure at all n locations
agctttttggagtagaaacatgggacctactcantttattacaaaaagaaagtcgtatctagtcaaggtctgagagaccatacaagtttcctaacgatttctaattatgtgggccattaagtctatcatatgctgcaatanccggaagcccatgacatctcttccggggccgagtatgtgtctgccatcgccttggccttggctaacaagcggtgaagttcttgactcccgttcaaggtatagagcaataccgatccatccacatggttgcctcttggtgtaaagagtcnatcacccttcctctagcctccttttccgcgtatacttgagcatactcatccgtgattctatgctcgtgggccgtggcaagacctaactcttcttgtacttggcgatgatagctaacatgtt

SEQ ID NO: 84739 - DNA, 375 bp, Glycine max
  unsure (1)..(375): unsure at all n locations
agcttattatatatagtaatatttgacttattggatttttaataaatatattcaaattcaatcctgttaataatactatagtattcatttctctgtctgcttcggtggctagtcgctttgcaggaatagtccattccgttgtgaccaaacatggnaaattgaccttctagctaccagttacatgcaatcatgcatgtttaagaggtaagggaaagttaattactaattaatatccgcgagcttgttcatgaatccatatataattaacaccccttcctgctcacatgcaaaagtgagaaaaagtaaaattaacctataataggcttggcaagcttgagttccattgttttcgtaataacgtgtccttctgcatgc

SEQ ID NO: 84740 - DNA, 379 bp, Glycine max
  unsure (1)..(379): unsure at all n locations
tctgcgtcaaaggaactgcctagacgtctaactactatatatcttggtctttanactgtgtaacttaaaaaacagaatagtcgcacctcctttgttaatcaataattcctggatttatagatcttatcttactatgtcaaggctcgttgaaaacattttaatgagagcatctttctgagtttttataatatattgtgtattacgttttgttttgagctccttcgcactctattgtaattagaacaaaaacctctacttaaaaatgaaacactcgtttaaagagtgtgtttttcctagtgatactaaaataatatattctacaaagaaccattgatgagatatactatnacactttctcttataaattggtgtgaatcac

SEQ ID NO: 84741 - DNA, 355 bp, Glycine max
  unsure (1)..(355): unsure at all n locations
agcttgcataggaatatactattcgcttgttgaagttaagtactcaactgcttaagtgttcattacaatcaccagctgctatttatgctaaaaaattattttgaataaataattattttgggttctaagagtaaaccaatgataatnagaacttgaggtattttcgcctcctagtccatgatatataaaaaatgtaacaattaagtcttggtgttaagggtttacgggaccaatttttcattaaattataatgtccaaacaccaatttatcagacaatgagctcacaagagacatccctaatgagttctcatgcgtgccttcatgagctcacactcttgaacatggtcatcaata

SEQ ID NO: 84742 - DNA, 389 bp, Glycine max
  unsure (1)..(389): unsure at all n locations
aacttggactcaaagagaaacttataattttctatattagagtaaaaaaactaaagagaagactcaacggacctctagctctggcacttgtttacacactaattttcagtggaaacttcgaaactaaaataagtataaaatntgcccaattatacatcaattttcagccacaaccacaagcacactttcctttacctttttttttttctggaactgattttctgacatctaggggaatctattattttatcatttaccaaatcactggtctttattataacttttttcagatgtcagaaattcagtaaaaaattcactaaaatccagtgacaattctagaagtttacaagtcgatgccaactgcacctacgattaaactcattttttta

SEQ ID NO: 84743 - DNA, 409 bp, Glycine max
  unsure (1)..(409): unsure at all n locations
agcttcttagtttcagatgatgcagattgttttgtagctacctcatgcactcctctaatgactatggcatcatttctggcactaaactgctgggaattggaggccatcttctcaattaaatttttggcttcagcangaaatttgtctncaaggctgcatcccctcgccagcatctatatacttctctccatattactgagtccttcataaaaatattggagaagaagctgttctgaaatctgatggtgggggcaactggcacatagtttcttaaatctctcccagtactcatacaggctctctccactgagttgtctaatacctgagatatccttcctgatggctgtggtcctggaagcagggaaatttttttctaagaatactctcttaaggtcatccccactcgtga

SEQ ID NO: 84744 - DNA, 237 bp, Glycine max
gacagcaaacgaaaggatgtagagggcaggaaacacaacaagtttttttcgtttcgaagcgtcgacgccccccgcgcgaccacgttttaagataaggaaagaaaccaagaaaagaaacaagcaaggccaaaaacaaaacgggagccgtcagaaaggagaaaaggcgggaaagaagaagaaaaaagaagaagggcaaaaaggagggagaaacgaaggaagccgcgaccaagtaaaaga

SEQ ID NO: 84745 - DNA, 310 bp, Glycine max
  unsure (1)..(310): unsure at all n locations
aacttggcctttacacgctgaatattatgttttatatcaacccaagacgttaagggcttttttactaaaaccccgaaaaagattttattggagaccagtctcttacagagctaatggacatctgctacnacggaacagggcgtagactgcgccaccccaccatgccttagaatcccttttcttgacatcgaacatccatgtcataactggcgattattttcttgacactccatttgttgagagaatatgcgattgtagttttgctcacgcttcatcccacaaaatcttcaacggcgagagtgactctcga

SEQ ID NO: 84746 - DNA, 205 bp, Glycine max
  unsure (1)..(205): unsure at all n locations
cctnnctcagtcatacttcatgcattgatgcattcttatcctcatcttgtctcagagtttagactggtttctgcagagtgctccattcctatgagggaagggaatatcagtattctgataacttgctcatcatatcatcataatgagtgcaaatcatcatgggactatcttctatcagcaatcttctgcacaattccttatttcc

SEQ ID NO: 84747 - DNA, 404 bp, Glycine max
  unsure (1)..(404): unsure at all n locations
agcttatgctgcaaacatctacttcagatctcctcaacctcagcagcgaaaatcagccacaacgaaacaattatgacctctccagcaacaagttctatctcgggtggaggaatcatcctaaccttagatggtcnaatcttcacaaagctgcaacaccaacaacagccttatttcagaatgctgctggtccaaacaaaccatacgttcctccaccaatccaacagcaacaacagcaacagccccagaaacaacaaacagttgaggctcctccgcaaccttcccttgaagaacttgtgagacaaatgactatgcaaaacatgcagtttcaacaagagactagagcctccattcagagcttaactactcagatgggacaattggctacacagttaaataaacacagt

SEQ ID NO: 84748 - DNA, 425 bp, Glycine max
  unsure (1)..(425): unsure at all n locations
agcttggaacaacgagattctatacattttttttcttcttgttttttgacttgagattcaagaccaggttacgtaaacaaactgatgtttcttaattgatttttttatgactgattgtcgcaaccagggtcgagagaggacatnnaaaccgatcaaaaattgaacgagtcatcaccactagttattacaaggaaaattatgaaaaaaatctttttgaaaaaaaaaatttgaaatcaaatttgagttcaccattactacttctcaagtcggttatctctaattaattaagcaaatcaatttttttattattgttgaaaaagagaattaattgttattatttttgtatgattattaaatataggatttttaaattgtcaccattcatacgtcgcgagatataaaattgacatgggtatacacccaag

SEQ ID NO: 84749 - DNA, 426 bp, Glycine max
  unsure (1)..(426): unsure at all n locations
agcttggactcaaagagaaacttaaaatgtctctatagtagagtaaaaaaactaaaaaaaagactcaacaaacctctagctttggcacttgtttacacactaattttcagttgaaattttgaaactaaaataggtataaaataggcacaattataaataaattttgagccaaaacaacaagacacttcccttttaccttttcttttttttctggatactgatttttctgacatcttgtgtgagttttattattttttcattttatccaaatcacttggttcttttattataactttttttcagatgtctagaagattcagtaaaaaattcagctcanaattcgcagtgaccaattctcagtgaagtttacaagttcgtatgtccaagctgccagcactagcgatttaaacttcaatatttttttag

SEQ ID NO: 84750 - DNA, 379 bp, Glycine max
  unsure (1)..(379): unsure at all n locations
gtgttgaagggtganactntctgctnttattgttgaccacatagtggtaccttgagatatgtcgcggtggtcaggagaccttggtgacgtcatgtggggtgctattgtccaaaaccaaacttgaccaatcccgacccaacccgggcatagtcggtcagtgaatacctgtgatgtacctaagcaggcgagcttctgacnatctccgactaccgaacacagaccactcagcttggatgcttgtgctggctggccagctgtgaatattgtgtgatatatgggttgtggcctctggtaatcgattaccaacggtgggtaatcgaatacaatgcttatatatgaagacaggacgctaagatggtctctggtaatcgattaccat

SEQ ID NO: 84751 - DNA, 425 bp, Glycine max
  unsure (1)..(425): unsure at all n locations
tcaacttggactcaaagataaacttaaactgtgtctatagtatatgtaaaaaacttaaagaaagactcaacatacctctagctttggcacttgtaacacactaattttcagttgaaattttgaaactaaaatatgttaaaatngcccaatataataaatttttggccaaaacaacaagcacactttccttttaccttttcttttatttctggatactgatttttctgacatcttgtgtgatttttattattttttcattttatccaaatcacttggttcttttattataactttttttcagatgtctagaaaattcatgaaaaaattcagctcaaaattcgcagtgaccaattcttagtaagttttacaaagtcgtatgttcaagctgacagcactagcgattttagacttcaatttttatttta

SEQ ID NO: 84752 - DNA, 397 bp, Glycine max
  unsure (1)..(397): unsure at all n locations
agcttcaccggatgatgccgatcgaacatttcctattcgacatcatccaattgttatgcagggattgaatagaataaacaatggccggtgtcggtcgatatatggccccgactgatatctttcagccgacattgcgcaatttntttacaaaccctgcgataatgctctttcttttgcttttacggtaaaggaagttttttgttttggtgttgcctataaaatttacaatgtaggtcggctatgtttttccgtgcgagctcaaccgagggttcgttcctaccgacactgacatgtaattcttcttatttacgaggccaagacaacgttggcccatcccggcaaaaacaaaaataaaaacattatttacgggaattgatcgataaaaatgatatctgac

SEQ ID NO: 84753 - DNA, 380 bp, Glycine max
tagctgctcaattacatgatgtcgataatgggcgaggtttatgccatctttgctctaagagtaacgtcccactggtaaaactaactttccaaatgtttgccttcgcaagaatggccccgaggaagctcgcctcaaagagggccacgaaagacaatgcggccgtaagaactagttccgccccggagtacgacagtcaccgctttatgacgtccacacagccgcagtttcaagacattaagggatggtcgttttccgggagcgacgcgtccagctcatggacgacgagtatactgatttccacgaggaaatatggcgccggcggtgggcaccactggttactcccatggccaagttggatccagaaatatgccttgagttta

SEQ ID NO: 84754 - DNA, 408 bp, Glycine max
  unsure (1)..(408): unsure at all n locations
agcttgagtcttagcataactgttgcattctcttgctaattgtttattatgaaattgatgtgttattatgtcttgatcggagtgtgtgattcctgtgtattgtgattgatgattgaaaggtgtgattgatggatnaaaatgtgattgagaaaggcnccgctgatgaaataatgtagatatgctaagtaaattgtatttgctactatatgttgtgttgttctctctagtagttagaaatgtgataacttactcccggtttgctatttgtgtttggatcctgtgatgatattgaactttgtgctcggaggagcagatgaatatgtggatgactatgaataacctcatgctagaggacacgaaaacaccacgctttgataggatgtgacattaggatatangctctatatt

SEQ ID NO: 84755 - DNA, 370 bp, Glycine max
  unsure (1)..(370): unsure at all n locations
ntgtatatagaataacaacactatatacaacggtcgtgcaccaacatcgaataatggactcacacggtctctgtgtatctataccagcagcacaaatacagtttaaccatgatacccaaccatcatctgctgtggacccttcgtgcgtatatatctaagtgtaaagcatataaacaagctatacaaaaaagccaacccataccaacgtcntaacacgcacgcaagccctgtatcaatatattaatcaatctccttttcttacaaagagatcgaaacaatcataacgttaaacaattcaaacaagccctgtgatcatcttccattcacaataaaagaatattctatctttccctttcgcactaatcaatgc

SEQ ID NO: 84756 - DNA, 381 bp, Glycine max
  unsure (1)..(381): unsure at all n locations
taactctctgcttttataggcgaccacagagtggtacctggagatatgtcccggcggtcaagatatctttttgacgtcacgtggagtgctattgcccacaaccatttttgnccatccataccgaacccgtcctatccggtccggcagacctgtgatgtacctaagcaggcgagctcctgtcagtcaacagataatatgaaaacattacccccaaacaaggaggcttgtggtggctggccagctgtgaattctgtgtaatatgtgagatatggcctctggtcatcgattaccaagggtgggtaatctcttccaaggcttacaaatgaacacacgatgcttactatttctctggtaattcattaccagtggatgtattcatta

SEQ ID NO: 84757 - DNA, 374 bp, Glycine max
agcttgcttctacaaaaagaatacacactcttgacctctatttatagcctaagtgtctcagaaaattggtgggaaatctgaattttctatttcctgtgcattgtgattaaagattgaattgatggagccctatttcagaccgaaatttactaatgtatgcctcgccgaattttagctatggttcaacccactattccaagatcaagtccaagattctccactaagtgtgcttaggtgtcataagacatgtaaagcatgaagtatatgcacaaagtgtgactatatgatgtggcaatggagtgtagcaaacacatgctcacctcctcgtctaaaatttaattagaattggccttttcaaattcaatataatttat

SEQ ID NO: 84758 - DNA, 343 bp, Glycine max
  unsure (1)..(343): unsure at all n locations
agcttctgttttcaattatgagcatctctatatatcacgggattcattcggacatccgagtaaaaagttattgtcgtttgaattaggtcatatcttctgttatcaaattcgagcggttctaatttttgngggantatttgtncaccgagtttaccccctctcgcgaattcgatttgctatganncttttttttaaatatcgagcatcttgatatattacgggacttaatcggaaatccgagttaaaagttattgtggtatgcatttgctacgggcttctgttttcaattacgagcatcttgatattttatgggactcattcgaacattcgagtacaagttatt

SEQ ID NO: 84759 - DNA, 333 bp, Glycine max
  unsure (1)..(333): unsure at all n locations
tgtgctaaaatccttcacacatcgtctataacaacctgctaatccattgacactcctcacctgcgtcacagacttaggtgtaggccattcgtgatagcactaaccttctactgaatcaaacttgtttttgtcgcactcccactccatnccatgaaacacaataatggttagtacaatagatgcatgtttcaagattggcatacaatcgttcttctctaagcacaggcgagacagatgttaaatgagcaatatgcaaatcaagtgaagtgctatagataataatatcatccaatgtcaccacaacaaactgtcctatgaactctctcaagatat

SEQ ID NO: 84760 - DNA, 430 bp, Glycine max
gatccttaagtcacctgctgcatgcaagcttatgatgcaaacatttataatagattttctcatcatcataaccaacaacagctgaataattatgaccttccaagcaatagatacaatccaggttggaggaatcatccaaatctgaaatggacaagtcctccacaacaacaacatctatccccctttccagaatgctgctggtccaagcaagccatatgttcctcctccaatacagcagcaacaacaacaacagtcacaacaaagacaacaagcaactgaggctcctcctcaaccttccttaaaagagttagtgaggcaaatgaccatctagaatatgcaattttagtaagagacaagagccttcattcagagtctgacaaattagatggggcagatggctactcagttgaaccaagcctaatcccaaaat

SEQ ID NO: 84761 - DNA, 376 bp, Glycine max
  unsure (1)..(376): unsure at all n locations
agataaagatatgaacgcttataccatgcgagtctcttatattcgagggaataacaatactaccgaaatgcggcgcagggctcataaaataaaatttctgaatacactgcgcactaaatgtctgatttcattttngntgttgttttcggcgtggggaaccaccaccgccgcttacccgtataaaaataaatataataataaaaagattgtttctttagctcacattattattcttggcgggggggttattcagcttacactcaagcagctatcaaggaagaactcaatctatctcttgctgaggttaatatattttgtgtgtgatttctggtagggaccaaaccaaattccactcaaaaacaaaagaaaaataaaa

SEQ ID NO: 84762 - DNA, 424 bp, Glycine max
  unsure (1)..(424): unsure at all n locations
agctggactcaaagagaaacttaaaatggctctatattagagtaaaaaaactaaaaanaagactcaacaaacctctagctttggcacttgtttacacactaattttcagttgaaattttgaaactaaaataggtataaaatangcccaattataaataaattttgagccaaaacaacaagacactttccttttaccttttcttttttttctggatactgatttttctgacatcttgtgtgatttttattattttttcattttatccaaatcacttggttcttttattataactttttttcagatgtctagaaaattcagtaaaaaattcagctcaaaattcgcagtgaccaattctcagtaagttttacaagttcgtatgtccaagctgtcagcactagcgattntagactttcaatttttttt

SEQ ID NO: 84763 - DNA, 396 bp, Glycine max
  unsure (1)..(396): unsure at all n locations
gtgtgaatggtgaaacttcctcgctttattgttgaccacttattggtaccttgagatatgtcgcggcggtcatgagaccttgtngacgtcatgtggtgtgctattgtccacaaccaagcttgaccaatcccgacccaacccgggcatattcggtcaaagaatacctgtgattgacctaaacaagcgagctcctgantttatccatacagggaccatagaccacatagcaaggaggcttgtgctggctggccagctgtgaatnttgtgtgatatatgggttgtggcctctggtaatcgattaccaaaggtgggtaatctaatacaatgcttaacaatgaagacaggacgctaagatggtctctggtaatcgattaccatggggtgtcattcattacc

SEQ ID NO: 84764 - DNA, 66 bp, Glycine max
ggatccttaagtcacctgcagctgcaacttgtggcttttgagatttctttgtttgcaactataaac

SEQ ID NO: 84765 - DNA, 223 bp, Glycine max
aaacattgaacacatatgataaaattaaaacgtatgcattgatagagtctataagatatattcctaatagttcaagtaatgcgaccgtgtgatttcaagactgaaccacctttcctatgaagagaccatctctaaactgtgaagccagatctctcacaaagcctgggccgtgtggaacaaaaaagaaatggacgtgaggaacacccacccctcaacgtggaaa

SEQ ID NO: 84766 - DNA, 434 bp, Glycine max
ttttcgatgaacgaacgagaacaacgctcaaactttcattgtttccgattcggtgctatccacttgtacaatattggttattaataatcttcgtccatgagcgaagataatgcaatatactatatatgattattatttcgttagcgtgctctaatgcccacctccctctgccaaattttattcattgatttaatgatagaagtaataaaagagttagtatgaatcatattaatttctaagttatatataattcacgagaaccgttagattaattgaaaattgcaatttcttatttacaatactattcaaattttattacagaaccactgactgcgcattttttttctttgcttctccttattacagtgaaccctcccggatacctactacatatttatggcaacctctaaatatcactcaagacccatgccact

SEQ ID NO: 84767 - DNA, 332 bp, Glycine max
aatgtttatgaaggacctggatcacgaataacatattcaaaggtgatcctcaaattttaaccatatattgcagatcagtgttttctagatttaatcgttttttcttgagcgcttttcccgccccccccctgggaatatggaggatattcatggagaataatatgaagaaccagaaattgtagagagttccccgacctaaaagatagaggaaacaaatgaacatcacctatatgaagatgctcttgataccacatgatgtaagcttcattgtcagcttgagcgcctatgatcttctctatcatgggatcccttgctttctggagatgattgga

SEQ ID NO: 84768 - DNA, 319 bp, Glycine max
  unsure (1)..(319): unsure at all n locations
tgcatatgctacagtagcgaagccactaactgatctgttaataaaatatgccttctatgtgattgatgcctcagagctcgccatctactaacttaaacaggccatnacattagccccgtattgacactacccgactttactcaatctttagtgttgaattagatgacattgagattgtattacgggttgtgttgngattatgcctcaaccgcctacaaaataaaaaattgtttacaccatcgaattgcctcatattataataacattggctaaatacaggcattttcttgtgggccagacattgccttataaacatatt

SEQ ID NO: 84769 - DNA, 387 bp, Glycine max
agcttcaacctagaggagacggaccattctaagtgttggagaagatcaacgacaatgcgtacaagattgacttgcctagtgagtataatgtaagtgccactttcaatgtgtctgatctatctctttttgatgcaaatggaggagccttggatttgggacaaatctcttttcaagaaggagggagtgatgaggacataaccaagggcaaggaccatgaaccacttgaaggtcccatgaccagaggcagacttaaacaagcccaacacgtcatagagacaaggctggtcatttgtatagctgtcattgatgatgattgaaagcccaagtggagaaagatgaaggtccttatcctacgtccatccatacttctattgttgcggaagccca

SEQ ID NO: 84770 - DNA, 416 bp, Glycine max
  unsure (1)..(416): unsure at all n locations
catgcatatttggttcatggattgaatngaaaactcaatagccgacatcggtcgtganatagctccgactgatttttttcagccgacattgagcacatttttttgaataactctcgccggcagataattgttcttttacgctagaggaagcttcttggttggtgtgcntataattacaatcacgtcggtatgcttttttgtgcgagctcaccgagttttgtacggcgaactggatgtcccattattccgcaggaaaaatttgccatctcggcaaaaaatattttcccgatttgatcaaaaaatgaagtcgacatcggcaggaacatgactgacgatgctacaaagaacttccaagagatgccgacaactttctaatgaatatgcaattcgtctgattgatgaaactcaaccacttg

SEQ ID NO: 84771 - DNA, 422 bp, Glycine max
agcttgaagacaagactatacgaggtatcttccttgtgtatagcaatatctctaagggctaccgtgtctacaacttgcaaactaagaaactcatcatcaattgagatgttgaagttgatgagtatgcttcttggaattgggatgagaaaaagtgagaagaacgttcttatacccgctcactacctcaagaagaagctgaggaagaagacccaagtgaaccaccttcacctccaccacaacaacaagatcaagaactatcatcaccagagtctactccaggatgagtaagatctttggttgacatatatgaaacctataacttggccatacttgaacctggaagctttgaagaagcatcaaagcatgaagtatgggtgaaggcaatggaagaagagatacagatgatcgagaaaaacaacaca

SEQ ID NO: 84772 - DNA, 285 bp, Glycine max
  unsure (1)..(285): unsure at all n locations
gtatgtttcagcagtgtagactacttcagcctagaatgtgtagggagtcccttctccttgagcattaatctagccatttctgtaactgtgcgattctttctctcagacacttcatttttgtgagaagaatatgctgcagtaagttggcgctcaatgccttnnttctaagactcttcaaactcgcgagaggtgactcttttgcgcatcacttcttagacttttatccgtttccactttgatttcagcaaggccttgaacttttgatactccaagattctgattttc

SEQ ID NO: 84773 - DNA, 270 bp, Glycine max
agcttataatatatcgatactctggaaatgtaactttttatactctcgggaaacatgcagagtgagaacttttctcacggatgtacgggtcacgtgctttatatagtcagaggctctgattttatcaacacgagctcttgaaaaataatactgattactttggacaccgcacacctctctgtgaattgatttagtgataacatttgacactgtcgatgcattaatgtttttaatttatccattcgctctaaactgtacagcgggtacttt

SEQ ID NO: 84774 - DNA, 128 bp, Glycine max
  unsure (1)..(128): unsure at all n locations
agcttctanactttatacaagaatgaagttctgtaaccacttgaaggacaagtggccttctatatcttaagaaaggggcgggaaattatatattactaactatctccccactcaaaattctatttcac

SEQ ID NO: 84775 - DNA, 414 bp, Glycine max
  unsure (1)..(414): unsure at all n locations
agcttcactatcgaataggtttcttctttctatgaaatccattcccacccttcctccttgtggcttcccatgaggctgatagtttgctattggtggttacaaacttgatacagcgtatgaaatttgtccattaaagntattccctcctaccatttgtcctcccacaatctgggctgtttccataacgcaccttncactctattagatcttttatttctattgactcctctatttgattgagctgccttaggtccttccagcaatgggagtgtaagctgttatttctttcctcatctaaatttctccaccccctatattttgagttcaatattctagtccacaactgtccattctggtggaatagcttccatctccactttgcaagcaatgctatattgaatttccgcagttttt

SEQ ID NO: 84776 - DNA, 432 bp, Glycine max
tgtgcatatcaaaccactcctaccatacatctctatcaagcattttctttctttacccactactcacgtgtggatctttatggaaaaacaccacaactaaacgcgcacgaagggatccctatcgcaccagatccacatctagaacgatgggtgatctagaggagacccaggaacagatgacagccgacatgtctgctctgaaagacacaccgctccaccacggatgccatgttaagtatgaatcaactcatagagaagatcgcggccaccgacgacgctgccagttctgctgtccgaacagacccgactcttttggtactacgcaccatcctctctcaacatagatgaccgggaagtacacactgtgcacaatggcagcctcacctggatacaaccaactgttatcctaatgatgccgccacaattaccacc

SEQ ID NO: 84777 - DNA, 408 bp, Glycine max
  unsure (1)..(408): unsure at all n locations
agcttaagagatgaaatatgttcgtttttattcaacgaatacttgattgaagaaggactatgtatactagaagctttgaagatatgtatcttttttgttgataagctccaattgcatcatangaattacataaaaaaagagttttttgatacttatacctattattttgaatctttcatttttaagatttataaatttctaacattagatggtaacaagtctcaaatgtatgtaactagaataaaattccaacattagatgtagtgttcattcctccaaaataaaactagttacactcctaattcttcaatcattggatgtagtattcattcctccaagtaggtcgtaagggcatttcccatcatatcacttgcgttatcacttgtataaaccaaaaaccacaatttt

SEQ ID NO: 84778 - DNA, 407 bp, Glycine max
  unsure (1)..(407): unsure at all n locations
nngcttgaggtcattggtacctttatctatttcttaagataaaaaaaaagacactgatctggatatgataataatatacgtattaggatatttattatataacgtggatctaaaacaaattgagctgggccttatgctaaatggaaattntnnnatattgccggggcataaaatagcttcagaacgctattcttcgttatgcatttaccgtgtaatttttcaagaggtcattcgtaggaatgtagaatgactcatcagatacgaatctagaactttatgttatccgtaacgaacaagctattgaaacataaacatactataaaaccnntttataacgttagcgttaaagcctgtatggtgtcacttaaacacagtgaaaactgaaagggtaacatgatactgataca

SEQ ID NO: 84779 - DNA, 363 bp, Glycine max
  unsure (1)..(363): unsure at all n locations
taacttgnacataaatataatagataatataatttcgccttttcgtgagatctgataaaattatgcctgcagataacaattctaaatatagtccctgaaaatataatatacaatgtaaaaaatcatctcttaccattattaaaaaaacctcgcgacacatttatgatgaatttgtcaacgttntacntttcacgcacgactatacatatttattccaaatataagtcaatctttatcttcttttctttttaatccttgtgagtggtacaatcaacacttataaaatataagaacaagataggagaacatacttatattataacaatatttataatatatgaatgaatgttcaaacaaattaat

SEQ ID NO: 84780 - DNA, 422 bp, Glycine max
  unsure (1)..(422): unsure at all n locations
agcttcaagaaaaattcgtcgcttcatgatttcaactactactcttgtttgccgcaagcaaaattggttgctaagtctgtcgcaaaatactattcatggcaaaacacccaaaactgaaacaagggaagcgcttaatagaaaactaaacataacatacgacctaccacaaaataacaagacactaaacaacactaacacaagcactaacacaacattaacaattaaacataaaacacaaaataattaaacactaacacaacactagctattatgaacctttggacattgctccccggcaacggcgccaaatttgatcgaggttgtacccgaatcaaataaacatgaaaatgcagtaactangaagtgatcctaggtcgtttcccacgagcaaagataaaccaaatattcataatatacttgca

SEQ ID NO: 84781 - DNA, 335 bp, Glycine max
actatgatactcagctgtgtgaagagaaatctattatacaagcatgatgatcttttcttagagaccatttgagttatagcagttcgttgagaagtggcctggcaggagcccaccttctttgtgggagaaatgaagtttacagacatgcacctcacagcatgagccagaccagaaacgatactcattgaccccctcctggagctggatccataggctgtcatatggacaatgccacgtaactgatcaccatttcaaagtggaccatcttactcacacgtacaactcttcatcctgcttagatactgaggccaacatacattttcttggaactttct

SEQ ID NO: 84782 - DNA, 240 bp, Glycine max
gagctcaacaaaaatcattaacaagcacagagaacaagccgaacaatgaaaaccaacaacacgacaaatgcatgtacttaccccgagaggcaagtaagccaaagaatgtacagaacagaacctctattgggaaaaacattcagcgaagacaaccatgatcaagctccgacaatgggcgccaaaaatgctacctggacaagaacgagcaaacccccgcccacgggatgcatatggcggaat

SEQ ID NO: 84783 - DNA, 374 bp, Glycine max
  unsure (1)..(374): unsure at all n locations
ctccaactcctgatcatcgggaaagagatcggaagagtcgccaactacgtaaatcttatttcttttctctttcaaaagtaaaacgcaccagaaaaaagtctcactataaaaaaagatacatattggttatctattatttgtgagaatcacatatttcaagaacttactaatgttctatcattggtaatcttcaaacacccttataacccttcaagacatgtataagacgtgagtctctgcccacatgaatcctgtatatctatgcccacatcaatctacatttaaatatttcaatatcatgcatgccaaacagcaatattccctaacaaacacgtctgatccacagataangaaactagggtggcctaatctta

SEQ ID NO: 84784 - DNA, 343 bp, Glycine max
acttataaagatgcttgtatactatatatattacagcttttatatggaaaatgcaatggactttcctagacgacttcttttcttaataccttcgcacttttgctctcatgattttattcaagtgcgctttaatttcccgtaaattaacaacctttctatccctatacttgctgttccaataatctatcaaattccaaggcaggggatgaagcttctctcatggtcttttttaaataaaagtataacctctctttcttttggtaaattccaattttgcatcttttaatttaaatatgtactttaactcttttatttctaacataatactttaaccttttcatgg

SEQ ID NO: 84785 - DNA, 375 bp, Glycine max
  unsure (1)..(375): unsure at all n locations
taccagctctattacttgcctttccgcacttaacttttctttttcttgaatagcaacatacacacttttattctatacttacaatttttttaaatacttgttgtttattagatgattgtgtgtgttgctcttttcttaccattacaagctttcaccccataattccccaaaatttgggaaaatttgctttgaaccaaaatctctttttatgaatgatgctctcctacaacctaagacaaggtagaaggagataaactgtacaggctcaaggttcaatcaaacaatcatactttcagctcanaatgggtgcaagggataaatcaatcatgcataaggtaagccttatagctaagtggctatcttcaatcaaaacat

SEQ ID NO: 84786 - DNA, 487 bp, Glycine max
  unsure (1)..(487): unsure at all n locations
tggctctagagtagagntaaatttctattattagactcaacaaacctctagctgtggcacttgtttacacactaatnttcagctggaaatttgaaactaaaataggtataaaatacgcaccaattatagaataaattttgagccaaaacaacaagcacacttccctttcacctattcttttntttctggatactggattttctgacatcttgtgtgatttttaattatttttcattntatccaaatcacnttggtcttttattataaactnttttcagatgtctagaaaattcagtaaaaaaatcagctcataattcgcagtgaccaattctcagtaagtttacaagttcgtatgccaagctgccagcactagcgattntagacttcaattnnntttttagcatggaatatntgatgccttggcttactttcaccttcctatgatgtgaactactaggtcgttacacagtttacgagtcatatcact

SEQ ID NO: 84787 - DNA, 436 bp, Glycine max
  unsure (1)..(436): unsure at all n locations
gctgcaaaagaagctngccgagaaagtattagttataaatngatattgaagggaatgaataacatgaatgaattatctcacaaagttggttattatagttgagcatatagttagttgtaagggtaactaactcataaccaactataactaactcagctaactctagttacatagagactaacaaactaagcaaactctagttacataatgattcatgctaagagacatggccaagaaaaaggctatcttgagtcctactggtaaagaaaatggattcttgaatcaactttgttggatgaagataggatcacatctgggatgtgtattttaagttaatttgatatacaaaataaaatatgagttgtccaatcctcattcaacggttccaatcaagtgattgtgtgaatgtgctaaatgtgtgactcctaacactaat

SEQ ID NO: 84788 - DNA, 418 bp, Glycine max
  unsure (1)..(418): unsure at all n locations
tatatntacttatttttctagtatgggggggataatgttttctattctatattatcacattgtatgaattaggtgctatatataaccatcaaattagctgctcaatgtataacttaacaccaatttatctcattgatggttgctatgtacacgattgataaataatgatgctcttatggccttagactattggggacatttatncactaattatttatattttactcatgaacttaactttaattaattcactcataagacatcagcaagtgtcctattactgtgttgttctatactataaccttcatatcttgaaatcaatntcttattttttgctaatacactacatgtatatctcatcgagttttgtattagtacgatatatttgttgctgggatcgacacaatgtaacatccca

SEQ ID NO: 84789 - DNA, 455 bp, Glycine max
  unsure (1)..(455): unsure at all n locations
ggatccttaagcaccgctgcatgcactgctttaaaaccttccctcactctatgtcttacaaactacaattgttgagtgacaatagggagttagttgtagatatacacgctttgatatgcttttccattggaaaatatgctgatgagatactgtttgatgtactccctatggaggctagcaatctcttacatggaaggccttggcggtatgataagcgattgttgcgcatanatagcgttcacaaacacaatattcatatggtacataaagggaaaaatgtacccttacacctatgtttgcaagtgaggtttgtgaggatcaaatactaaatgagagtgaaaagagaacatgagactaaggtgaaactttttaaacataagaaaccacactatagcatagattaagtatcttatgacaccattttactattattactatttggatcctacgcatta

SEQ ID NO: 84790 - DNA, 375 bp, Glycine max
acactataatactattattgggaatttccttgaatacttatcctcttcataattgggcataaatagtcatgtaaagacatggggtgaatctatatatcaaccaaatgataacacttcactataaattgatgttaatccactgtgtttgaattgctggagtaaaagtacgataagttatcataaaagcatgcactatgcagtggaactacaaattcttatgctcttagtatggtatttatacgtccgtagtaatataatactactttcgagttgactactatttcaatctgctgttgtttttaacttgcgttcttgtagacagtgctgaccacccatgactttaacatgtactatttgtacaactagaatctcatt

SEQ ID NO: 84791 - DNA, 441 bp, Glycine max
  unsure (1)..(441): unsure at all n locations
atgctccatcgactaaggggnctatgtttctctattgtgatgcatcctcggcgaatgcgctagtagatcagtgtatccaatgcatatctgcccattgtcgttggcctctttaaccataatgacattggcgagccacgtggaatacctaacttctctaatanagccagccttgaagagcttgtccacttcttctttaaccgctctacgtcgctctactttcattcttctcttcttctgtgataccaatttggcttgcggacaaatggcgagcttgtggcacataatgctggggtgaatacctagctctgtgataccaatttggcttgaggacaaatggcgagcttgtggcacataatgctcgggtgaattcctatcatgtcagatgccgaataggcctgcattcctatgcaagacatcagctatgcgcctgtgctcatggct

SEQ ID NO: 84792 - DNA, 427 bp, Glycine max
  unsure (1)..(427): unsure at all n locations
agctngtagaatggctagacatgatacatgtatgtgttggnttgggtcaaggattaaagggatgccccacattattttcatgacacaaattgcaaaatgatgaattgganaatttattgcaaactggtcatgcatgcacctatgtggacgctcaagtgtcaaaattttatggtcatgtgatgctanggctcangattcatttcctctattntaaatcaacccaatgtttccaaaatatgttcttttatcaatntgtgcatccatccgagtccattntgggcgtctgggaaaatcttcacagcattcacccttcaggtgtatacacattttttcataaacctagtatgatcagtgaatttttcaaagaaaaagtggaagtcatctcttttcaaaagcatgttgggttttcagcttgacaacttatttt

SEQ ID NO: 84793 - DNA, 397 bp, Glycine max
tcttaacgacctctcacctgcgggccattaagtctatcatatgctgacaatagccgagaagcccatgaatctctctcggggcggagtaggtgtctgccatcgccttggccttggctaacaatcgcggaagttcttgactcccgttcaaagtaagagcaaaccgatccattcacatgggtgcctcttggtgtaaagagtcgatcacccttcctctagcctctttttccgcatatacttgggcatactcatccgcgattctatgctcgtgggccgtggctagacccaactcttctcggtacttggcgatgatagctaacatgttggtttctgtctcgcatagacgctgagacaagcttctttctgaccttgaacagcaataactcctctttagaccatg

SEQ ID NO: 84794 - DNA, 404 bp, Glycine max
  unsure (1)..(404): unsure at all n locations
agcttggattgtatattatncntcatcaatttgacataaatnacgatnnggatttttctcttttaagtttcttagggtttagtaacacgttgtcctactactttatgacatttatatctaaaattgattttatatgtaaagttaaaaaaaaaaaaaaactaaaaaattgccaaatacataataaaaaaattcggccataaacagaggagcgtacactagctggcccttgagctatgctttgggtgaaccacatgaggacaacgttttctcgggatctaatattggttgagttttatattgtgttagatttgttaatttattaggcacttaccaaataaaaattctttggttgcgtccgtttggagaaccaattggggaaatactttgacaaaaattatttactt

SEQ ID NO: 84795 - DNA, 493 bp, Glycine max
  unsure (1)..(493): unsure at all n locations
cgagagagttntgcgtgctcgagttaaacgtggtgtctattgttatggtctattcatgccaaggatggcggtgagaatgcatctangatcacacactcacactcaatgttcgaaagtcttttatgtcttaaaccttggtgaaacttctttggaaaaggaaacaactatgtaccaactttttcaaaggatggttatatcagntactttatatggtggtttcttatgcaccttagcatgtcttatattctcaaatttaagactacgtgctgtatgaagtactaatggttcaaagttatgtatgttatcccgcctggtatggactttagcaatgttgtgacacaagaagatggccctgaagttgaccgggagctcacacaccttactcgtggtgccgatgggtcttcaacaaacgctctacctacaatctgtgtagaagcgagttactaacatgtctacatatctctgagtacattgacgtcttcactaatactta

SEQ ID NO: 84796 - DNA, 437 bp, Glycine max
  unsure (1)..(437): unsure at all n locations
agcttatgtcanatagaataatccatttattttatagaantgggtgttgaaaaagcataacaagactttctatgattggtttaaagatacaatctttgcagatgaaaatgctctataaactttaagaaagctaacaaatgggcctaaaagaaatgttataacttggcaacgatacgacataaacaagtattcattttacacaaaagcacatgatgacaaaagtacaatgcaaaacaacaggatcaccctaagggctgaatctcaacacttcgcaagtgtgcatgacgccaatccctgtgtagcttccatcccttactttgggttcattgatgaaatttgggagcttaactatgtgaaatttactgtttgtgttttcaaatgtaaatgggttgatagcaacaccggtgtgcgcaccgatgatatatgatttatgttgg

SEQ ID NO: 84797 - DNA, 334 bp, Glycine max
tgttgttgttgttgtatgatcaaatactatatatcattacaaggtcccaattattaagtgttacgaactgtggtatgttatacgtgaataaatatgttctattgtaagtaaaaaaattcttcatgtgcatgtgggagactaataatcattacgtacgctggcagcgtcaatctgaatttgaaggtatgaagaacataaagaattaattattcaaacacatgtatgggcaggagttctcatatccacctttcttggttcttacgtttcgacaatcgtatgggttcacaagaagaacgaattattactatttaactctcttaatacatgacagata

SEQ ID NO: 84798 - DNA, 352 bp, Glycine max
aaatcaagtccatacccctcaaactctgaaaggatctgatgaactcaaggacgtcaatatggccaccgctgcatcctcggaacgagaaacctacgaagaacacgacccaaacacagttgtgacgggctttatacggcaacaatattgagctccagctcctaagaggcgataggaatcttcatgggtcacacgcatgatcttgaacgacaagctaaaagcttgccttaggtcgaacagatatttgtcccaacagttaagccagactgaagggaatatgtgggccatcatcgatgagtgcacagaaaagctaattctatcaacgactcactagctaatgctagaggatgagtat

SEQ ID NO: 84799 - DNA, 313 bp, Glycine max
tgactcacgtgtatagtgatcaactatcacgactaaacacgttgggtttgaacgctccccacactcaccctcgaggcactgagatacttatagtccttgagaggactctctatgttggatgtgtgacttccaatcaagatggaaatcacctcttcgacaaagcgctgaacaatggtgatgtgtttgtgttcccactcggtctcatagatctctgcatcaatgtgggatatggcaatgttgccgccattgctggtctatcagctaatatccggaggcgttactattgaaatgccttgttatagctaatcaccta

SEQ ID NO: 84800 - DNA, 445 bp, Glycine max
  unsure (1)..(445): unsure at all n locations
cgacccggatccttaagtcacctgcggctgcagcttgtagcccaaagttttttaaaaaatgggcagaanataaataggtgccataagtgttgttaaaataaataaataaattgaggcttaaaaataaataagcctacgcagaataaatggaaggttttctaagataaatgctctcttataaccctaatttttgaaatcccagaaaaaaacataatttctttgattagccaggccacattagaagccaataaaagtctttagtgatccaccaagtgtaagtaggataactttaactgagatgaagtgcgaaattgggaaaattaattacaggtcatagaattttaaacactcacccaagacacttctgcgtagagagaaacactaaagccttgtgaggagaagtgaggcaagccgacctgatggtttatgctactaaccaattcta

SEQ ID NO: 84801 - DNA, 432 bp, Glycine max
  unsure (1)..(432): unsure at all n locations
tatcataccattttttaaggctgctttcataattcaatttgtgctgtatcattaccattatggaatcattaacattaaaattcaatttaaacccttttaagaangtgatttgcaaactnttcttctagtaatcaattacactacctggtaatcaattaccagagcctcgatatgtnggaaacaatgtgttttgaggcanaagatgatcttgaatgaatcttgaagcaatgcttgtttgttgaagcaaccttgtcttaatcttgaacaatgttaacctttaatgcttgtgaataatcttacagcaccttgttgatattctttacatctcaaacatgtttctacatcacaatctcccttttatgatacatcatatcaatgattctctcacatctcaaaccgcatattacattctcctttttatatagaatatat

SEQ ID NO: 84802 - DNA, 419 bp, Glycine max
  unsure (1)..(419): unsure at all n locations
agtccactctgattccttgacttctgtgaganttaagccttgccattaattggcatatattaagaagaactgttggaatcttgatgatccaacagtaactttcagaggacccagcaaggccaagggaaagaggtttgaggctcccccatctactgaggttcccccttcctcagctccagcaccaattccatctgtcccatctgcttccacatctatttttccagcttcattctctgcaggaccatctgattttacttttacaccacaaatgctgcactccatgctctagagaatccatagggggcagtccattatcatgcagagccttcagggcttgggcttgccctccattatgagaatggaggagtttgatgcttanggtggcctgccaggagaccatccctcttcttctggagggg

SEQ ID NO: 84803 - DNA, 286 bp, Glycine max
  unsure (1)..(286): unsure at all n locations
tgctntactgtcataccctaatttcgtctggggaccaattgttgtcgacatacnggttttttctggtcacgttgagctgcttagagccaatttatgcacgatccgtaagatttcacgatgtttcagaaggaaataagccaaaaactcaaaatanggatgaactgatcaatttagggggtgttcttcagccctgcacccatcaggaagcttctacatgaagcaaccagctcgcctgngtgagcatgttacttcaggcttaagccactagctcggctaggcgagctga

SEQ ID NO: 84804 - DNA, 313 bp, Glycine max
aacagctaagtattattatcagaataattaaggacaacgtttacaaaaatgccaagtctgctacatatgatccgcaaaaaaggggggtacctatatgacaaggggtcaaacttctaatcactccttagtgcagatagtatcactcattaaaataaaaaaaattaaactcatacatataacatattatctaaatatttctataaattcaacacaccataaggaatcataaaacttcatcttgcattaaaaggatttcacttatttgacaccaaccatataacagtgtttataattattacaccatttcatgtta

SEQ ID NO: 84805 - DNA, 405 bp, Glycine max
  unsure (1)..(405): unsure at all n locations
tctttcattctttctcttcttcccatccctccctatattgtcccccagttggtgtgatctcctccttcctctccggcgttccattccagatctgcacccgatccatgacgtcgtcgagttcatcagagcccacatctatgacgttgtccagttcgtctgagctgagatgcatgacgcccaatctgcattcatttcagntcttgttaataatggaattttagtttatttgcttgcgtatttattttcattggtggaactttgcatttgtgttgcttacttgatgtcaatgtgttctgtngagtggcggctgagtgcgcggaccaagtggttgtgtgctgcgaggttcaatggacttctgctggagaaaacattattgttggatttcgtcacgatggtgatctcaat

SEQ ID NO: 84806 - DNA, 443 bp, Glycine max
ttaagcacgcagctgcagctaaccaggttattattattgcgtgtcttggaaaattcagatggatcataaaagattctgacattctgtgcatacctatgactatgatctcttcttcttagttcttatcatatagtttaactcctcgtagtctttgttaaaacgaaattaacttgtcaaagttggctactaaataccatgtgcgcgcgcgcgtgttacattgattatttaattgataattataatattgattgagttttatacattaattacttactgttgttgggcagtgacaagttcatagtatctataaacaattacaactcgttatttaatccttggttgattgagcagaatcgatgcatccagacaatgagtgactcataaagggccaaatgcaaaatcagtaaaataagaattggcaaacagacagaatcaaggaatca

SEQ ID NO: 84807 - DNA, 460 bp, Glycine max
  unsure (1)..(460): unsure at all n locations
tctctggagaagaacattcgtttttataaataaaacgacattgcttggacgcatctttctgatcacttttcttttctgttgaattattattggatgcttctctgcatctcgggttatatctctgaactgcagccagataaaaggtcagggtaattaacttttctgtcaacaatatcacatgtaaaaagcttaaatntataaaggtattggctgtaccaaatatttaaaacttcacgatacttataaaattataattaaatatataaacattgaatgaatatatgaaattcaattcaatgaattaaaggttggatttaagaccttgcggnggtgaaatcagcacacctaatgctngcacattaagaattagagcttgaacaactcgagctggaaggaggatacgagcacangctgcaagataattacaactgtaaggtgtatatataaatccaaattctac

SEQ ID NO: 84808 - DNA, 422 bp, Glycine max
  unsure (1)..(422): unsure at all n locations
gctttgagcaaattaaaatgacaagaactttanatactgatgtnctgnngagncccgtaatatatcgagatgctcaaatattagatccgaagctctgagaaaattgaattgacaataactntatacacggatatccggttgagtcctgtaatatatcgagacgctgcaaattgaaaacggaagctcgtatgaaattcaaacgacaataactctatactcggatgtacgattgaatccggtaatatatcgagacgctcaaaattgagactagaagctctgagcaaattgaaatgacaataactttatacacggatgtccggatgagtcccgtaatatatccagacacttcaaatttatatccgaagctctgagaaaattgaattgacaatcactttatatacagatgtccggttgagtgtctg

SEQ ID NO: 84809 - DNA, 422 bp, Glycine max
  unsure (1)..(422): unsure at all n locations
tctcgatatattaccggactcatcctgactttcgtgtataaacttatngnncaatgcaatttctccgagctttggatcaaaatattgagcgtattgatatattacgggactcattcagacatccgagtaaaaaattattgtcgttagaattcgatacgagcttccgtgttcaatttggagcatctctcgctaaatngcgacagtctgtcgggcatccgagaaaaaatntattgtcgtgtcatatttctaagagattccgtgttcaatttggagtgtctcgatatattacgggactcaaccggacatccgtgtataaagatattggcatttcaatttgctcagagcttctagtctcaatattgagcgtgtcaatatattacccgactcaatccgacatgcgagtagnaaagtattgtcgttag

SEQ ID NO: 84810 - DNA, 389 bp, Glycine max
  unsure (1)..(389): unsure at all n locations
acccatcaatttaatggattntcaaggtttgagaagtgaaaatgagaatgaggtaattttggagtaaactctcatctcaaacaagtctataacattaatttaaacttgctcaaactggttttacggcgaaaactccaccgattcaaaatttgacccctcaacatccaatttaccctagaaatggctcttgctttcacctttgtcactcatttttctcatttactctgcccaagctttcctacaagttctaattgacattttaaactagcatcaactcactgtagactccaatttacactaaccccaaatttagcttttcaaaccctcaaaacctcacactnttccactcacatcactacgattttcacatttaaccctaggttaactct

SEQ ID NO: 84811 - DNA, 407 bp, Glycine max
  unsure (1)..(407): unsure at all n locations
ctagcgtccgctaagcgcaacactcctgngctaatcgtgacgaagactctggaagaagatgagctgtacatgttcgctaagcgcaccacttcatctcactaagtgcaccacttcagttcatccgctaagcgagaaaggcacacgctaagccgaaattcactaatgtgcgctaagcggtccataagtgcgctcagcgcataagcatgaacaaggccacctatctaagcctgaaatcatatattgtgaagggagttcggactgggattcagagctctgcatgtctagggcttctacggagagaaaggaccaagtctcagagagttttgagagaatttgctatgtgaagaactgcagagaccagagcttgaagcaggagccggtttaagagcttgagatgagtttatgag

SEQ ID NO: 84812 - DNA, 429 bp, Glycine max
  unsure (1)..(429): unsure at all n locations
agcttgggctctngcctcacncaccgccttttttgttncatttctagccancntatacttatcccaaagttcagaatntctacacctagactactccttgaaacactccttttttactctaactttgctctgaacattttcattccaccaccacgattctttacccctaggtccaaaacctctagattcacccaacgtctctttagccactttaataatctcttgggacatcttgttccacatatcatatgcacttccttgtgattgttcacaccaaccctcccatatctnntggtggaagattccttgtttctcacccttcaagtgccaccatttgatccttggtgctaccagaggacttcttctctttgccctatctctaattcttacatccataaccaaaactctatgttgggtagtcaagctctc

SEQ ID NO: 84813 - DNA, 432 bp, Glycine max
  unsure (1)..(432): unsure at all n locations
gtgaatatatattagtagtgtttagaatgatgctgaagatgtgaacaatctcttttgagatgttgaaccaaataagggtgaatcgttgagttttctactcttctacggatatatataatatcatctcatcttattctcatacatgataatgctatttctatgtaattttttatataacanacttcacactttagaaagagatacagagagaaaacagagctaatgtccatatatatgccatacgaaagaagatatcagtagaaagataaaaagaattttttataagaaatattataaataaacactgtcgatcataaacaagnatcagcagcttcactgaagtcttgtgtgcatgcggatgcctctcttaatgaacanatgtcgtgaaagccatctctcgtaatatcaattagcgatatgcatgatcgtcac

SEQ ID NO: 84814 - DNA, 407 bp, Glycine max
  unsure (1)..(407): unsure at all n locations
agcttaccccatgacaaanaacatgtttattcnttataaaaagtccttactacaaagactactcaatagaatggccaaaataccacgcccanacgaangaaaaacctattctaatatttacaaagataatcgggctcatacttagcccatgggcttgaaatctaccctaaggctcatgagaaccctcangccttccctttgatctctaacccaatctacttggagtcttctacccaatgcccttgcngggtaggattgcatcacaagtgaaatgttatgaccatttgcatttctcaagagtttccgttgttcaatttcgagcgtcatgatttattatgtcctcaaatcggacatccgtgtgaaatgttatcaccacttgaattctccagaggttccgtaatcaattt

SEQ ID NO: 84815 - DNA, 362 bp, Glycine max
  unsure (1)..(362): unsure at all n locations
gagttggttaatattttccttgccaagccaatgaatacatgccggtgtcggcggaaccacaaattcgggtgagctggaacgaanaacctagccgacaaaagttgaaatttttacggcgacaccgaacaaaatagaatcctctaccgttaaaaaatagtatctgccagcgtttgtaaaaaaaaataccgcaatgtcgactgataaatatcagtcacggctttacaatggccgatgtcngctattatatctnttattcaatccctgaataanatttggatgatgtctagtaggtaatgttcgatcggtgtcatccggtgatgcttctttttaaacctcgatcggacatgtntcctggcctacgt

SEQ ID NO: 84816 - DNA, 433 bp, Glycine max
  unsure (1)..(433): unsure at all n locations
agctntgttgatntagttttcaccgtctatttgatcgaagtgggtctaaaagaggcaaatntaatcatcctgcttggacgaatgagaaaacaggggcaaaagaagagggtgagaatgaaggagaaacccatgctgtgactgccattcctatacggccaggtttcccaccaacccaacaatgtcattactcagccaataacaaaccttctccttacccaccacccagttatccacaaaggccatcccaaaatcaaccacaaaacccacctaccacgcaaccaatgctaaacaccacctttagcacaaaacaagacaccaaccaaggaaggaattttgcaacaaaaagcctgtagaattcaccccaattcttgtgtcctatgctaacttggtcccttatctacttgataatgcaatggtagccataacccctgct

SEQ ID NO: 84817 - DNA, 535 bp, Glycine max
  unsure (1)..(535): unsure at all n locations
tactaagctcctatccaaggctcatcttggtggtgaagctccttcttctcttgtttattccctagnggatggcgcctcctctcacctcttctcctttgtcttctgctgcatcttcatggtggaaaatcaccattaaaggacctcattgaagcttaaagatccagcctccatagaagccccacaagcaagcttccatcaatagcttccaaaaattcttgaaggtaatataattggttggtagaatgtttgaattaccaaattatgaagtttaattctttcaaaaaaaatcccattgtgtagttgttggaatttttcgtccttgttctaagcttttgttagcctaaccctaagctttttccttgtcacaaattggtggttgaaatttgtgtaaacgttatcttgaattactttacaactcacggagaattctagagtggataaaggcaagagtgtacaacttttctttatctaananaaagccatatttgagagatacacttgagtgtggtgagggtcgatnttctttataactata

SEQ ID NO: 84818 - DNA, 437 bp, Glycine max
agcttatcaactataacaaaagtttaagtaatttacttcttattttaaacattataccacaataagttcaagttaatttttcagcttattaaaataaattaaagatagaagaaacacgtgtcaaacataaaacatacttttaacacatgtaatgaatgtatttttctatttttttattcataaaaatctaactcaagtgcttagagtttataacaatacatacaaattattttagtttttaggcttaattacatattttactatccattttttattactttacaaatttttctatttaagttttatttttacaaattttatcattaaaattttcaatttttacacattttaccaagttgacgtgtcaataaaaaaaaggattaacaaacttttaggaaacaacacggtttattaccaacaaaatgatgaaatgtaca

SEQ ID NO: 84819 - DNA, 319 bp, Glycine max
  unsure (1)..(319): unsure at all n locations
atctaagctattattttgtattttatgtcaatgatatgttagtagctggatcaaatatggatganattaaaaacttaaagatgcagttgtcanaagaatttgacatgaaggacttatgtctagtaaagaagatactctgtntgcagatcacgagagattagcacagaaggattctgcagttatctcaggtagagtacatcaaccactgtttgcaaagaatcaacatgggaaacgccaagcttgtgagcacacctttagccaatcattttcacctatccaaggatcagtcacctcaaatagaggaagaaaaataattcat

SEQ ID NO: 84820 - DNA, 329 bp, Glycine max
aaccacgtgctcttgcgaacaagaaactgactacatgggaagagtagaccctgtcttgttcacactctgcattttgccacctacagcaacgatggaattattcaagtgccgtgcttaaagacctgacacaaatacctctaagtaggtgctttcctatggacccaatctgctagtacacatagtacacaacccgtactattactgatcacattatatgtccctacaacaatgctgtgcgtataaagcaatctgtaagaaggcctatgggtggcatcgatgggcattcctcaagagccgctccatatgacgagactttatgagacttggat

SEQ ID NO: 84821 - DNA, 432 bp, Glycine max
agcttttaatatacacttattttgtttcgattattaaacactattaattgtgagtgtaaatgactaaagctatacactactcctcatatcccagcgcagcttgaatagggtgtctaaatctatagattacaaccacttcggtgctttgtatacttggctaacattactaaattccactttctgatatttagtcttagattctcgagtttgatcttctcataatttaatttataaattcagtccccttattatgtttatttcaatctcaaccccaaaattgaatgctgatcgtcacatgtcgtatttttattggacgttgacagtcatatgtcgtgtgattattagacgttaatttcgcgctgctattaacataagcaattaacagtcaacgttcaatttcggagttgagaattgaaaatacgagagtacaca

SEQ ID NO: 84822 - DNA, 440 bp, Glycine max
  unsure (1)..(440): unsure at all n locations
cttaagagaagaccttatcttctgaattgaaaaatntcccaaaacaagacgcgtcaagtcaaaagtcagaatatgggctacgaagaacctcaccgacggtttctcctaaacctgctggtatggaaacctgttcctcactgtataacctttgtgtagtcntaaccatcttaaccattatgttatatgtgccttcatctaagaaaaaaatattgcttgccatcttgtagtgctaatcctcatttcttaattctgtcatggcgatcaataagagttgttctttacctagaatgaagagcttatcctttcactacattaaaaaacatatggattgaaaatactaatggacggaggaatcaattgacctattgctgtggtaccaatgtgtaatattctacaatccatgattctttttgctctgcacacataattatttctattca

SEQ ID NO: 84823 - DNA, 428 bp, Glycine max
  unsure (1)..(428): unsure at all n locations
attgatcttcaatngtaatatctttctctttcaagagagatttcttcttctcttcttcttacttctgaaaagggattaagagaccaagggtctcttgttgtaaaggattcctgaacacaagggaagagttgtccctgtgtggttcagactttgtaaaaggagttttacaaagagagtgaaaaatctcaagtgggttgcttaaggactggacatangcacgggaagtggccgaaccagtataaatcaagtttgcatttctctcttcccttaaacttcttttatttattgctatntatcttttgctttaaagaagtttattttgaattgtcttttgtgtaattcatgttaagggtgcattgttaatccaaaaagagagagtgaaattttaattgnggaatagtctttgtatctaattcacccnccccctt

SEQ ID NO: 84824 - DNA, 453 bp, Glycine max
  unsure (1)..(453): unsure at all n locations
tatgcaatgggttctccacttattgatcctgtatgaatgcaggctgagacaacatgggcactaacagttctagggtatctggcaaaattcgttttgggaatattanggtaagcaatgacataagaatctgagttgcttggaatgctggatgctgtatgaccccctatgcatagttttacagatnttcttccttcctcgaatgggttatntattactgttgggccgatttgttaaactgagctgtatgtgataattntcaaatgtttctctcacctgatacatttcatatagatggatacatttaatggtttcttttcattattaattgatagaagaatntaanaattaatgaatganatactgatanggagttagtaaaataggtgtggaatagaaattaattaactggagaaatatgatatgtaaataatataatagtgaatgatcaaagta

SEQ ID NO: 84825 - DNA, 425 bp, Glycine max
  unsure (1)..(425): unsure at all n locations
ctcctacatatcttcaattgcgagactacatagttcttcaatatttgtgtgagactacaaatagtctcaatgttattttactaaaatgcgaacatgctaacatgctttagcaaagaaacaaaccttcaactgatcaaggcagacatatattttttgaataaaaacaatgcgtctattggagaaggaaagtatgctaataataatttctcataaccacaaatgagaatgtggatgttagcatttcgtttctaaatgaccatttagaggaaacactgggtccaactaatatagaagaaaaccactcaaagtgtatcaatctcacacanngcaagtgtttttcctaattccgaaccatagatatgtcatgacttgattntgcannatcagtcctatcatatcanagaatacatgcgtgatcatggatc

SEQ ID NO: 84826 - DNA, 444 bp, Glycine max
  unsure (1)..(444): unsure at all n locations
tcttaagcaccgcggctgcaagctttaggacaggatngtgtgtgaatttttggttaaaattatgtatttttttattttcaaaatatttttttatttttatataacagggaactcaattgatccaagttgaatcaattcgttcttgacgaagttatttggtttgggttgtacagttttttaaaaagatccaaaccaatttaaaccaatgaaaattggttgtttaaattatttttccacctattcaatctaaatcaacccatgaatagtcccatatgagaaatgatggtatgttgaaaaaaaaaattgtatttcaccccaagttaaaaccaaaatgacaaatagttattttaccttttccacgtaccagacataatagatttctcatttgtatggcaacacaatttgacaaaaaaaaaatatatctcaacacaagcttaatcttaa

SEQ ID NO: 84827 - DNA, 542 bp, Glycine max
  unsure (1)..(542): unsure at all n locations
actaagctatgttctagtgtgtagtgttctgtccaaagccagactaagaatatnncttctatccttcaatttgatgcttcacataagtgcttctcatggataacttcatcattcaacaaccttgcctcttcttatgtagctagctcttcctttctgatgtgtcttcagtgattatggcaacatatggagggtgaagaactattagactttagtctgttgacattattcaagtgatgcatcttgagtctttntaaattattctgatgttcagaaacacaaagttaaggtcttcatcattctaatgtagactctgtgtagcttcattatgaaccatgatgaatcttctatgtaagaccttgttgttcagtatcttgccaagaactaagtactcagagggaaacaaaattcatcattgtgatgaatntcaagaattctgtctgagtctcaactctaacagtagttctttgaacctctctgaacattattctgagtatctcaaaatgaagaaaacatatatgcttctcaaaataataacattgaac

SEQ ID NO: 84828 - DNA, 423 bp, Glycine max
  unsure (1)..(423): unsure at all n locations
gtgagttgatttaaaccttagtttttctttgattattaggcaaaacattcaaggaaactttctaagaaaaacgtccgattgattttttttggttattttattattatttttttctagatattacgattattttattattttttttgaagatattttgattattttattattattttgcttttgatttaaccgaagttacaacgtgaacgatcggctggattgtattttaatagtgattaaatgagattacaacacatatgatcggctgaaattcattttatcaattattgngcgagataacggcttaaataaacggtaaaaagcttgttaaagcggaagaaaagaaaattgaaagtgaacgagatgaagatgaaagccaacaaaacaagaaatgaattgaaagtcttagattcgaacacttac

SEQ ID NO: 84829 - DNA, 369 bp, Glycine max
  unsure (1)..(369): unsure at all n locations
cttgatatgcaaagtgaatttgaaatgtcaatgatgggagaactaaagtactttctgggattacaaatcaagcaaactcaagaaggtatattcatcaatcaatccacatacttgcaggaattgatcaaaagaattgggatggatagtgcaaaacacatgtctacaccgatgagcactaatttgtacttaaataaagatgaatctggtcagtctatagacataaaacaatatcgaggtatgatcggatctcttctctatttatctgctagtaaacctgatattatgtntagtgtatgcatgtgtgctaggtttcaatccaaccccanacaatcacatctaagtgcagtatagagaatcatgagatatcta

SEQ ID NO: 84830 - DNA, 430 bp, Glycine max
  unsure (1)..(430): unsure at all n locations
agcttattctgcanacatttataatattctctcttcagcagcaaaaccaacaacaacagagtaattatgacctttgcagcaacagatacaatccaggttggaggaatcatccaaatctgagatgggcaagacctccacaacaacaatagtttgtccctcctttccagaatgctgctggtccaagcaagccatatgttcctcctccaatgcagcaacagttgtcataccctaatttcgtccggggacctttgcttgatgacatgcgaccattctttggtcctcgtgaggtgcttggcacccatcattaggcgatttgtgaaattccaggacatgccgaaaaaccaaaaaaatattgatgcagaatccgtaagtttccgtgacacaccggaaatcaaatggaagcatcgttgcataattaagtgaggttccg

SEQ ID NO: 84831 - DNA, 460 bp, Glycine max
  unsure (1)..(460): unsure at all n locations
tgcgagaacaaacatatggaatttattttacaagataatgcttatcttaacacagaaatgacatgttaatccctctgatcttagaatgaactcatgtaatctatttatgcacacgcgtatgtatagaatatcctacaatntatatcaacatacaaggacatccaacacattctaattgtcatacctatatatgcatgtttgaaaatagcacacattctcacgctcaaggcattgcgtcaaaatttacacttaattatgtcctanacatttgctattacaaaactacctacacacacttgaaatatatatcatacaacattttattggttcactcacatttatttatatgcatatnggaaagctaattatatcctgcacacactcgcattcaaaagggaattccacgctatcatatattcatttangaagataatcattcacactctgctangaatttcat

SEQ ID NO: 84832 - DNA, 425 bp, Glycine max
agcttgcaggaagctccatgcctccatgtgttctaacatattcctacagaacaagagagctaaaatgtaccaaggcccggaaaataattgtcccccaaacgtttaatatgggacaagagaccttcgatatgcaacaccagaataacaaaagccttaacaagggagttataaggttgacttggtgattgaagagagatgggggagggagaggtcgtggattcaaatctctcccactaacaaaaattaacaaattaaccattaacattggtcttttgaaaaaaaaaacttaacaaatatggattttggccaagtttaaataaacttctccataagtacttgtagcagcagaaattaagaagttaaaacgaattgagcttcttatataagctaaaattaacttgtccacttaacttctacagaaacat

SEQ ID NO: 84833 - DNA, 445 bp, Glycine max
  unsure (1)..(445): unsure at all n locations
gtcctggattgatattccattgattccgtttataataccctctaaatngggcaaaaatcttttgtttttttttgtnttgaataanaggtcaactcacttagtgagatgctacgcttagtgaggtgccactcacttagcgaattacaggaaattgcctagattccattccattctatttttcctacacacacctctttttttggagaggggcgtgtgttggatatgcaccggtgcatagttttcaaaatgctaatgattatgcacgccacatgcataatttatgtaggggttacacataagtttcttttgttgttcttgcgctacttttactaattgttccaacagtntttttttttaccaaacataaattgcaacctagactacctaagcttatagacatataatagaatataggttgcctcttggaaaagctttgttaaagtca

SEQ ID NO: 84834 - DNA, 308 bp, Glycine max
  unsure (1)..(308): unsure at all n locations
atcctctgagtcacctgctgcatgcaagcttcggaagaaagtgatgaggtacttgctctaaangcaaagcttgaaagagcccgggtagtcaaagagaagttcaagtccatagccatcaaagtctgaagagagtatgatgaactaagggacgtcaatatggccactgatgaagccttggaatgaaaaaccaagaatgcccgataggaataacacgaccaaaacaagttttgaagggctttatagggcagcaatagtgagctcaaacttccaagggtgaaaagaatcatcacggtcaaggcatgatcttg

SEQ ID NO: 84835 - DNA, 472 bp, Glycine max
  unsure (1)..(472): unsure at all n locations
agttgtgctctgtttagtgtgacccatgcctggaaggatcaagatataaataaatgcattacttagaagactgaaattaattggcattgctctagttggcatgtgagcactggtgattcaaaatcaaactttggaatattnttcagtttagactatatgtcctacaaatacaatccgcaaaggatntggtataaaatataagcagtgatcgtataccaaatctaacacagacatagccaaacacagaaatagcatacaagccgacctagcatcgaagagggtgaatcaacaaaatatttgcaagttcaagttagagcattttctcttgttcacaagaaanatataacaaggttctagatcttacaactntggattgcaatgctaattcctttacggcattgaccacattcatcacttttatgcatatacattacaagaacaaatgtgacanatgtgagtcacgtgaaactga

SEQ ID NO: 84836 - DNA, 379 bp, Glycine max
  unsure (1)..(379): unsure at all n locations
agcttgcctcanagagatctaggaatgatattgcagctgaaggaaccagttccgctcccgaatatgacagccaccgttttaagagcgctgagcaccagcagcgcttcgagggtatcaagggatggtcatttctccgggagcgacgcgtccagctcatggacgacgagtataccgacttccaggaggaggtagttcgccggcggtgggcatcactagttactcccatggccaagttcgacctagacatagtcctcgagtattatgtcaatgcttggcctacagaggagggtgtgcgagatatgcgatcctgggtaaggggtcagtggatcccatttgatgcggatgctctcagccagttcttgggatatcctttaatgct

SEQ ID NO: 84837 - DNA, 449 bp, Glycine max
  unsure (1)..(449): unsure at all n locations
cgtgtttatctggtcgtgggatgatgatctgctgatcacaggcctagtgcctgctcgtacccgtccctgagaattggttaagtgggaaatgacattatgctgtgaaacatggctacgctaccacttacctcggttcatccctgtcttggatttggcgccgtattgaccatcgcttgaaatgatcttgtccttgtctttcgattcataaaataaaaatgcatgtgcatgtgtatgtatgagcagtttcaaaagcaataattctttagcaaaagcctgttgggttcagttntaattaagcgcttggggcatccccatggatcgagcaaaaaggctcggatcattaaaagaatacgcatcttttaaggcacanagcgaggatcagaacaacgaatcatcaatgctgcgttctttaaatgattgcgacgaanatttatagaggacaagaatcc

SEQ ID NO: 84838 - DNA, 453 bp, Glycine max
gatccttaagcaccgcggctgcagctaagagtatccttggttaccatctttttggtgagaataagggcttcattgccaacccactccatgagtggttgagaatctctggatattatttccaaccttaattcgtgaaaatcaagacccacttaatgattatataatacctgggtattcttagattcatgggggagtctaagggattgtgtcagtagtgaccttgagaatagttgtaagctaggaggggcaagaaagaataattggtgtaaccgagtttgattagtggaaccttttactattttgtaaaggattgaaggatgtagcttaggttaagtgaaccggtataaaactaagtatttttagctaggcaaagtattttcaaagtctattattgacacattcttacacacaagtctttcattaaaaatatgttttatgtatatcacttgacga

SEQ ID NO: 84839 - DNA, 351 bp, Glycine max
  unsure (1)..(351): unsure at all n locations
cgagctctgaccactgttcttgcttcccgcgatgcttcttttcatgtccgcctgagtgggcttatagcctaaaccatacnttccacgatttccttgggtatttatcaagctagttatgccgcccgtgtttttgcctaaacccatcccgggttcataaccgttccccaacataactcgggccatcattaccgctgcatcggacagacaaagcttgccaaagagggagtccacggaggaaatgctgaccacctcanaagactggaaagcagtttctaacgattcttctgcggcttccacataaggcatggaggatgggcaacttaccaagatatcttcctcgcctgacacgat

SEQ ID NO: 84840 - DNA, 423 bp, Glycine max
  unsure (1)..(423): unsure at all n locations
aagcttgagccaaaattccttctaccatattcctggacccgggatgagaatntccatcctcgccctcagaaagaaaaaaaattcccaatcaaagattggaagatagcaaaatggaaagaaaaaatcccgatcaaagatcagaagaaaacaaaagataatatatagaaaaggtctttggaccagacaatatcttaacaatataaaattgtcacaagcaaacaagaaaagaaaagaaaccatgactggaagtggtcatctccctttgattaccaaccaaaatcttgtgcgccggcgaattttttgccccgcactaaacaaaaaaaacaaaaaaggaaaaaggccaaaacactcagagccaaattcccctccaaaaacactatttctaagaaaaattcctattgatccatgatcacacatgtaatc

SEQ ID NO: 84841 - DNA, 508 bp, Glycine max
accattaatctcagcctttatttacacggattgtattgacattttttgttatgttcatttgggtcttgacgtacgtggtactggtaatggaggtttgagatacacgtgtttctagttttacatgaatcaactcactcttgcactcgatggagttatgtacatgtaccattaacagtattattatttattaatgggaaaaattttgtattccttcaaaatgatgtactgagatttatgctcctgtgtacttgtataatatgctcaaaactagttttggtcatctttgtgtacactgtaattctcactaatcagatgtagtgaatgaactgtaagaaagtagcttattgcttgaagccaaatatggaatatgtgtgacaatgataagaaatatttgtactatattgcaatatttataaattgcgaaccaaggcacatatcggaactctgaagttcactctcttgtgtctggtcgatgactttcttatgatgtattctcgcgctgatcttt

SEQ ID NO: 84842 - DNA, 375 bp, Glycine max
  unsure (1)..(375): unsure at all n locations
actcagccatctatgtccantccactgggctcgttgttgttaattcatgacaangaaccccacaatgacacaccattgaacatggatgcgaccggataatctgggcttggctaactacccaaaccagaagcctctcttactaacactatcgaatgaatgatagtggagtgcatcatactttgatacagaacggacaaaagtgagagaaatccttcactggtctgaccgaaacgattacaatgttgttagcactgctgttcttgtgacccatatctacaganacaatttcattgttcaatacaagacacatcgaggaatatgaattcttctctactctcttccaattgttttgtaacgagcctattcactcacttt

SEQ ID NO: 84843 - DNA, 296 bp, Glycine max
  unsure (1)..(296): unsure at all n locations
gaagaacaaatgtgtaaagggtaccacggaacttcttgatgaacccccccaacagcatgtgtggaggccccagagagggttgccagagcgtgctgtggcaatttctaaagcctggttatttgagcattttcttcatccgnatgtttgtctctattatagttcttgctccttgactctcttcttttctgcattccaaagagacattnggatngaattgtggctnnttttgctgctgttgttgaatntcttttcagttaccctacagacactgataaacacatgctggctagtcaaac

SEQ ID NO: 84844 - DNA, 382 bp, Glycine max
  unsure (1)..(382): unsure at all n locations
ctaaccaattaactactcttaaccttaacttcccagaagtcacatgggctcgagactcgactttctcatacagtatggtcaagaaaaagatttttttgttaacagttataaaaaataccactatatttatggtgtatccaagtttattttcacaaataatcataaaaatattattttcattattttttggaaaaaaatttaaaacatgaaataaaatggaaacaatatatattttttaaaattactaataaaaataaaaacagaaaatatgattacataccaaaagtatatagcatctntaaatatgtcttaccattcaaaagatatcaatatagaaatatccaggttgataaaagctatacaatttaatacatataaagtt

SEQ ID NO: 84845 - DNA, 332 bp, Glycine max
  unsure (1)..(332): unsure at all n locations
tgacatggcngtgcacggaagataatgganggggctcgtatggaacgcgtgaaaagaaaggatgggtgcacgcataacttttaaatgctgggtgcagcagcaataatgttggatgcacctagcatcaccctaatttgttgtggcactataacacttctcacactaattntaacacatgggcattaacaagacacctcgatcagaanacatgatgcccaataacagtttgtaaatttgggccctctttcatgtatgtagctacgaagccatcatcaataaccgcacgggctgngttcttaggttgagaaatgtaattaggtaataattgacta

SEQ ID NO: 84846 - DNA, 418 bp, Glycine max
  unsure (1)..(418): unsure at all n locations
ctagtagtgcatcttgtttgttagctccanaagactcttcatttggagaggcatcaagttactgacttgattgggtcggaagccatctatgaagatattgagttgaaccggctcattgatcccgtgggtgagagtctttctgagtaaaccatggaagcggccaagatcttcactcagtgattcattgggaaattggtggaataaagagatctccacctttccctcagcagtcttggactctagaaaatatttcttcaaaaatttctccaccacctcctcccatgtccgcaagctatttcctttgaacaagtgcaaccatctttttgcttcaccaaccaatgagatagaaaacaggttgatgcatatggtcattttaagaacttctgccatcttcaccatgttgcaaattctatgtatg

SEQ ID NO: 84847 - DNA, 399 bp, Glycine max
agcttcatgcttaactatgtatgggcaaacttcatatactgatgtacacgacatacaagtgagctggtaacaaatcttttacacttggagtgatcacatgcagtcctcttgaacccttaccacccactctgtcatcattgtcgagactcacgaagccaaacaggtggagcctcctctaagaattctgaacaaaattcaatggcttgttctgcatagtacctctcaacaatagatgcttctggatgatatagatacttaggatacccttttaagatcttcatgtatccgcttaaccgggtacatccaccgtagataaacaagaccacaacattagaattcctttgaccagatgcacaatcaagtgaatcatgatagtcaagaaagcttggggaaaacaca

SEQ ID NO: 84848 - DNA, 249 bp, Glycine max
ttcttctaacaccatgcctcctctgatatgctatcctctaagcatttatcttcattggtcctactactcaaagtgaaccatgacttgtctgcacttccaaccttgaccatctggactatagtttgatctttattccacaaataattcctatcacgagggctacatactcattctcaacacgttgacctagctctcgacattgcttgacagctacactattgacatacattcttgatccttctgcacctc

SEQ ID NO: 84849 - DNA, 405 bp, Glycine max
  unsure (1)..(405): unsure at all n locations
ttcttccccgttttggtgaaaaatggcttctggggcttccgtaatgcttccgtaaaatttttgaaaactctgggtaagcctatttcacttaagaatggttaaagggaagaaaaaaaagaggaaaattaagttccaaatgcttccataacttttccgtaaagtacgaaaggggggggaacttantaatttgggggtgcattcggaaacttccctaagaaagcctgggcaagctgggcggcaagctcctccccattttggctaattaaaagacaaatgggttggttaaagggattcctaacccgtatgttatgcatttcagctgtttagggtgaaaaaacgtgtttccatgaagaanatccaagtcgaggtgcctccgtaacgcttccaagatgtttccgtgggtga

SEQ ID NO: 84850 - DNA, 319 bp, Glycine max
  unsure (1)..(319): unsure at all n locations
atctttgagcttcaatgatgtcctttaatggtgatcttccaccatggagatgcagcagaagacaaaggagaagaggtgagaggaggcaccatccactatggaataagccatggaagaaggagcttcaccaccaagatgagccttggataagaagcttggagaggatgcttcaatggaggaaatgaaagagggagagaaagagagaggggggagcacganattgaaggaagaaaaagggagagaagttgaactttgagttgtgtctcacaagactctcattcatcanagttacaacaagtgttacacatgcttctattta

SEQ ID NO: 84851 - DNA, 426 bp, Glycine max
  unsure (1)..(426): unsure at all n locations
agctntagcttctttaagaatcttcttatgtatagcttctcaaggaggtgagcttagttatgagagggctatgtgtagctaagctctagcttctcaaggaagttttctcaaagaagcttctcaaggaagttttctcaagaaagcttctaaaggaagctacctagtctataaatagaagcatgtgtaacatttattgtaactctgatgaatgagagtcttgtgagacatacttcaaagttccactactctccctctttngttccttcaattacgagcttccccctctctctatctctccctctttcttttcctccattgaagcatccttccaagtacttatccaaggctcatcttggtggtgaagctccttcttccatggcttattccctagtggatggcgcctcctcttacctcttctcctttgtc

SEQ ID NO: 84852 - DNA, 421 bp, Glycine max
  unsure (1)..(421): unsure at all n locations
gctatcttggacctcgagcaagccttcaattcatctntcattatcattctgtctactcgtgaatggtccatttcctctctctggagcttaagcgcactgttactaccccacagagcccctcggaacttgttccggtcatgctcctccccacgagccctcttggtttcttgctccaaggccttgagaaccctanggatttctcttgcatctctggcccaatcttcttggagtcttctatccaatgcccttgtggggtaggattgcatcatttcctatgtacttgacttcacgagtggggtgttcttcaataggaatacaacatccagattcatgagctaccccacagatggtacatcctgcaacctgcaaaatagaagcatgtgaagtatgtgcagaatgaatttgagttggcaacttactt

SEQ ID NO: 84853 - DNA, 430 bp, Glycine max
agctggtaattgattacacaatgcttgttatctattaccagttattctgtgaacgttttagaacagcctttagaaatttgaatttaaatttcaaagtttgtaatcgattacatagtgcatgtaatcgattaccagtgttgaaattcaaatttcaaagtgaagagtcacaagtctttagaaaaaaaactatgtaattgattacaccattttggtgatctattaccacagagaattctcaaaaattactcctaacagttacatcttttcaaatgttttttgaatggccatcaaagacatataaatacgtgacttgggacacggatttcttcaaagtttttactgaccaaaaagtcttatcctctcaaaaaatcaaattgtcttatcctctaaaaaattccttggccaatacacttgcaaattcaataaggaa

SEQ ID NO: 84854 - DNA, 487 bp, Glycine max
  unsure (1)..(487): unsure at all n locations
tactcagcttctacggataccaatccataatttatttaaattattggtttttnntataaatnnnatttattggttaattagaanaaaatataattgataattaaaacaatttaaataaatatagctagaatgttcatttgatagttgtgtattgtttgaaagtgatattaatttgaaaataatttatacatatttttttcatttttaatttaatgtaatatattaataaatgcaataaaaatgtgaaaatnttatgaatgtataattatggtgtggttaggggttttttgtttgtcattcaaatttttgaatgttttgtaaagatggacaaagatcagtagatgtatgatagtgtaatgtctgaagaagtgatatgaatgatcaaaatgaagacaaagctggtgtggatgaagaaacatcttgatattttgatgtgtttaatacttctcgcgattaatatgaattatggtataaagtaataatgaat

SEQ ID NO: 84855 - DNA, 434 bp, Glycine max
  unsure (1)..(434): unsure at all n locations
agctnttcaccaaagggttatcggaattgttggttacttcccgccaattaccgtgacacgctcaacaccatgaacaaaattgaaaagggggaaaaaataaacccaaaatcaaaatctaagagagagagagagagagagagagagagagagagagaggtgaaagcgatagacgtaagagtgaaggaaggtaatggaagagagagataagagagagaggggttttgattgaaggtggaattgaaactgcagagaaagaaaagggtattaatttgtttttctaaaaaaaaaaaagttgcctttttaggaattaagattttctgcaactccttacccactgggccactatacatagaatttgtacgggacgaacttcttatgctaagaaagtgacccttttgccctccgatttcccttttttttcctcttttgcgtgc

SEQ ID NO: 84856 - DNA, 498 bp, Glycine max
  unsure (1)..(498): unsure at all n locations
ttctatagaagtntctccttatcttattacacgagtgtgaatcatgctgaanagaaattgcttgataatgattgtcatcatcaaaaagagtgaattatgcacgttntgatgatgctgaanaaaaattcacttgataatgattgtcatcatcaaattgataaagaaattttctcttccctaaactcctttaatntattgcattttaattttactttgcatattttaaagaagtatcaattgaattgttctttactttttttctattaagtctgcatattccgtttaaagagagaattataaatttgttaggataaatgttntaaacttaattcaccattctctgaagttattgaggccacttgtttaacaagtactcaagtcatcaaaacccaatgaaggtagaatacatgtctnntgtaatgtctcaatcctttcccgagaaatatgacctaagtgcttgtgccacataaatgaattttattcaactntanatctttt

SEQ ID NO: 84857 - DNA, 429 bp, Glycine max
  unsure (1)..(429): unsure at all n locations
agcctgtaatattctggtgtaattatcttgtttcaaaatccctacatcaacgggatcggtgtcagactgtcagaattcacaatagcctactttttaattcaatgactaaaatcgaaaaggaatcataaaaataatattaaatactttaacaagatcatggcatacaacaaattaagatctttggatctctgcaacactgttgtctctaaaaattggggtcttgaccattggatttaagggtgataaaaagagttggagctgtcggatcaaattgttntgaccaatcaaaaaataggatgagaacaagtaggagatggctatcaatcttattttgatattctatacatatattattaattcttaattaatttatttttctaaaataaattattattcacaatttaagataacatatttcattgtttagta

SEQ ID NO: 84858 - DNA, 525 bp, Glycine max
  unsure (1)..(525): unsure at all n locations
tactaagctcgatattaatgttgatccaattatgtcacaaacgttctctttctatcctttctataaggtcggtctcgtattcttaatttctaanaaattgatgaaagagaatatggtagtttgaactttcccggaccggatataaggattaagcaattgcaggtagagaaatattcagttggaatgtgccgtggcaattatggtgaattttgagaatattcttgagatataattctaattcaaacacgttaaactagataaaaataattgattgaaagtntcacacgtgggttatgggggggttgagagagaaggccccactgcatcccacgttatgagaatgcanggtgatngatagcgacgtatgaaacacaagactcgatgtgaatttccaatggcggctatctctgctgctaccaccgttgccgattcaaaacaccaaaggtcgtgattgaggtgtagaagatgaagataacacgctaattatgtcctaagaaaagttactgaaaatacaagtactagtag

SEQ ID NO: 84859 - DNA, 434 bp, Glycine max
agcttgtagcagcggatttctttcttctcttcacattcaatgaaatctcagtagtgtccagattctcatttttcggttactcaacgtgcgttcacataaatgcaccatgcaagtggttgtgaacggtcttcagtatttataatggcacaccaatgctttcatgccaattgcaaaatcatggaaatattttttttaaatatgtttggtcctctaaaatttgaaaaatatatgttaacctctataaaagtaaaacatatttttgctgattcttatttgtaactttgttagacaattttctattatattgactaacacatttagttattttctctctctacatcctcaaacacattcacatgatatcaaaattcatcattgtttcattttttctctaatctcattaaaaaagtgcgaaaaatttaactatgtagtga

SEQ ID NO: 84860 - DNA, 391 bp, Glycine max
  unsure (1)..(391): unsure at all n locations
accacgacccttatcattgatgttgttctagagggttgttatcatcttattgtggccgtgttgcttaccaccaccatgatcaagtgtaaagccttcaaatattcataaaatcatacaatttctaactctttaactcaatngagcgactgtacttttgtaatacaaaactagtgtccaaacgtcagttctgccaagaaaatgcatgcaaaatgacacaaaaactcanacaaaatatctctcanaaaatggtttatcagttgctcaaaatgtctctattaccgccaccaatgttgatattgngcttgctaaaccacctaaagaagacataagatccattaaatgttccttctaatnggtattctaacctgaaaaatatgctctgtcaaatctg

SEQ ID NO: 84861 - DNA, 304 bp, Glycine max
gcctcctcgatattttaccggactcgatccaacattcgagaaaaaaagtattgtcattggaatttgccgagagcttctattttcaatttcgagcgtctcgaaatattagagcactcaatcaaacatcttaattaaaagttattgtcggttgaattttctacgagcttctgttttcaattacgagcgtctcgatatactaccggacataatcggacatctgagttaaaagttattggcctttgaatttgctatgaacttttgtattcaatacaagcgtctcgatatacttcaggaacacatcgga

SEQ ID NO: 84862 - DNA, 397 bp, Glycine max
  unsure (1)..(397): unsure at all n locations
ccgaatatatcgagacgctccaaatngagaacggaagctctgagcaaaatcaaaagacaacaactntntacatggatgtccgattgtgtcccgctgtatgtcgagaccctcgaaatctagaacagaagctctgagcaaaatcgaatgaaaataaattnttactcggatgtccgaatgaatcccgtaatatatcaagacgctcgtaattgaaaacggaagctctgagcanattctaacgacaataacgttttactcagatgtccgattcagtctcgtaatatatcgtgacgctcgaaatcganaacaaaagctcttaataaattcaaacgacaataactttttactcggatgtcctattgtgtgctgtagaatatcgagactctcgaaaattaaaaca

SEQ ID NO: 84863 - DNA, 417 bp, Glycine max
gatgtttgtgttgaatgcattaaaggtaaacagaccaaaagcaagaaattaggtgcatatagagctatgacatcttggaattgatacatacagacatttgtgggtcatttcatacaccttcatggaatggtcaacagtattttatatcattcatagacgattactctagatatgcatacttgtttcttatacatgaaaagtcacaatctctggatgtgttcaaaacatttaaagttgaagttgaaaatcaacttaacaaaagaataaattgtgtcagatctgaccgtggtggtgagtactatggcagatatgacggttcaggtgaacaacgtccggggccttttgccaagtacctagaggaatgtggaatcgtcccatagtacaccatgctagggtaacctagcatgaatggtgtga

SEQ ID NO: 84864 - DNA, 433 bp, Glycine max
  unsure (1)..(433): unsure at all n locations
ctatgtgctcgcgactggtccctttcttcccttcgcaacttgagttcactattgctaccccatagagctccgcggaatttgttccggccatactcttccttgcgagccctcttggtctctcgttcaagggctcttgcggtaattgcattctcttcccgtaacccggcacactccttccgaacgtgtgtagcagccaacttgaacttctccttggcgagttttgcctttcctaactcgcttttgagagcttggacttcctcgtcctcttccggtgcttcaaaattctcttcgctgacgactnttaactnggcgagccaatctaaacctcgtatatgaactntcagccattcgtggtacccaccaatgatgccattacgaatgcctctaagctcttgatctttccttaacggggtttcccatgccttatggattc

SEQ ID NO: 84865 - DNA, 432 bp, Glycine max
agcttccacacacccaagcaatacaacatctctttatcatgaactatcaaaaccaagaaaacagggctaaggcagaaaactctgcccaaaaacacaaaccaataccgcagctttccttactcaaataccccagtaacattctcttcgttccaattcgttaactggtggatcgactcgaaaattttactggaggtccctagtacataaatctacattgtgaccgttgggatctgctaaaaaacgtccagaacccaatctgtactactctttccacaaccagcaaatacacatcattttctgcacaaagccaaaattctgctgcacatttcaccagcaaaattctgcataatagtgaagattttcgaaatcacacttgccctcgtctcaatttgcccaaattgaatcctacaagtcctaaatcatgtataaatc

SEQ ID NO: 84866 - DNA, 505 bp, Glycine max
  unsure (1)..(505): unsure at all n locations
cgtcttcattcgtcttcgatcttcacgtgttagtactctcaaaccaagctttcgattcattctatgtacccgtagtggtccacattgtgtttcgtgcattttattctcgtttggttactttntataccccctgttgacgtgcttaagccatnttacttaagtcatttctcgcttaacttanaaataaaatataattccaccgaacgtttgaattatattatccgntaacttcggttaaaataaattccgaccgttcggtcgtgccgtaaccacgttggaaatcaaaaagaggtagaanataatataatgatcaaaaagacatcttttagtaaaataaagcgganaatcaatcggacgttttctctttgggatttctcattcttaatcgaattgataataactaaagtgaaactaaggctaanatcaactcgcctagtcaagctcgtccacaaaaataggctntttgaaggttgtcatttcaatntctcactaagtaaaatgggca

SEQ ID NO: 84867 - DNA, 375 bp, Glycine max
gtcatataataacattggacattcattttcataatatgctgctatatgcgctaaatttctttggttctaagagtgaatgagactgttgttcactggcttgaataggttggggcgatgacccctctttcatcaacgaagaaattatgtttctctcagaaaattgcctgttcatgaacaaattagtgcacaaaaattgtagtatgaactaatgaataatgtgtttgagtatgcgttttaatcggacataacgtgaattttccaaagcaataaatattatcttctctatcaatgcgtgacttttacgtggaaaaaaaaacatacagtcgtcggtgcaatgtttctccaagcacaaaggagaacatgtattcgaaccaa

SEQ ID NO: 84868 - DNA, 392 bp, Glycine max
  unsure (1)..(392): unsure at all n locations
tataagctatctatctcgaggatgaagatgctacataggctcaccatttccgtaaacgagttccctttttaagaagataagtatcatattaatgtgttcaattcgtatatgaaggttggaattgttttcaaaaatatcagtattccgccctatgttcaaataagcaaatactacgataaagtcccgcaaaccgatcctcgtaaattgtaatttggtattacgcgtgggtgctttaatttgaacaagtatactcctgtattagattagaccatctatttnttcttctctttatctaaccttcatggtttatctcttacactaacagagaagagctacatcagtgtaacctacaacttcatttactttaataaatcatttacacatatatgtaa

SEQ ID NO: 84869 - DNA, 362 bp, Glycine max
gatgatactgtaacttgttcaattagatcaacatatgctttaacgcaagaaacaactcttcacattatgtgctcttgcgggcactactaattaatacacattccacgacgtgcatttaaggtccggtggtgcaaaaccggctttgtttgggagggtgttattgttgtaaaaattaactatatttcgaaaacggttttgaagacatcgtctttgaatgatacaaaacaaaaacggttgtggaagattttggaaagacccgcctctaaatctgtgtaattttaaaatttatacgcgtgactcctctgttcgctaccccttatttccaatctctctcatattcccaatgtatttactccttccct

SEQ ID NO: 84870 - DNA, 321 bp, Glycine max
  unsure (1)..(321): unsure at all n locations
ttggtagaataatgcatattttctcatatatctaagnttaattttttgaaacaaatttcttctgaatattaattaattaaatttgatggttgacgcgtcacattctttaagatatattttagattaacaactctatagcanaatatgatcgtaactagctatgttaccatgtactnttatgtggtttctcctatanttaacggaatacacacttcataataacatctgtatcgttttatatataacagtagaagcgagggtaaatatgtcaattactcttttcatcttttaagaataaaagagtaatttatattattttca

SEQ ID NO: 84871 - DNA, 431 bp, Glycine max
  unsure (1)..(431): unsure at all n locations
agcttctatagtttctagaataatcgattatttatgcagtaatcaattattnggaaacaaaaagagctcctaagtttccaaacacaatctgattgataataatacgtggtaattgattattttgagctacaaagaccctcttcttttgaaactggcttaggtaattgattacaaaaatttataatcgattaattagatgaaagtctaaatatttcaagagaaataagttttgttgcttgttctaacactttttaattgattacttaaacttggtaatctattacacaatgttgaacgtattgcttcttaaaaactttgagatcaatacatacattttctcatgtttgataaccactatgcatggttaaagaaactaagtctaaaacattcaacattccttgtctaaaaacatccaatacaaaagccacatc

SEQ ID NO: 84872 - DNA, 508 bp, Glycine max
  unsure (1)..(508): unsure at all n locations
ctaagcttaagacccaagatggcctagcanactccttatttccaaagggtattctatcttatacctccaatctttaatggagagggttaccattactggaaaacccgaatgcaaatttttattgaggcaatagacctaaatatttgggaagccatagaaatagggccttatatacccaccacagtagaaagaattacaatagatggcagttcatcaagtgaaagtataactatagaaaaacctatagatagatggtctgaagaggatagaaaacgagtacaatacaatctataagccaaaaacataataacatctgccctgtgaatggatgaatatttcacggtttcaaattgtaagagttctaacgaaatgtgggtcactcttcgattaacacatgaaggaactacagatgttaaaagatctangataaatgcactaactcatgagtatgaattatntagaatgaatgcanatgcaaatattcanagcatgcaaaagagattacaca

SEQ ID NO: 84873 - DNA, 399 bp, Glycine max
ttctatccaatgtgctacactatctcaggagttcccactccatcccgcacaactcctcagccatcttttgctatcaaacttaagatatgtgcacaacaatgcctgtgaaaaaacacttctttcttaattaaagtgccctacttcaacttatccttaattttttccatcatgcaatcatcttcctaataataaacatatttctaaataccacacacatactagaaaacttaacctattaatcgaaattaataaacagaaaaaattggggtaaagaacgcttcacttagggctgaagagccctcaacatctccttttatccattgcagccctgttacctccctggacaacaaatacgtggtcctccaaacgagttggccattcataaggctgcccatgatg

SEQ ID NO: 84874 - DNA, 456 bp, Glycine max
  unsure (1)..(456): unsure at all n locations
acattctcgtagagtaagtaagatctctctttacttattttgtattctcagatattgttgtgcctatgatgatcataacaaatggctcgcactgtggaatttcaacatgctaattaaatgaaatacgatatttccaagacatagaaaaaagccacaatctctaatgtgctangtacttcaattattggtcctncttacatgtgagtctntgtttaattaatattatcaccccacatgcgagagtgatcaagttgaatttaagctccacattcgaagtttcattcgccttatagaaagatattgccagaaacggtgaccaataaccatggctattagagcagctacctctgttgcaccactatcaattctcattccatcgatgactggtgagatgtgttcatattgcacctcgagcagaagcttgtangtgtggtagttgaatgacatgtaccggat

SEQ ID NO: 84875 - DNA, 422 bp, Glycine max
  unsure (1)..(422): unsure at all n locations
agcttgtagagcaacgtcgaggctnactaaatacgggccttggattttgagaacctgcgaggatcatcaagtgcaaagcttggatatgacgagtcttatgtacgacgtgtgttctatgncactcaccgtgggtggcatgtactggagacataattgcatgctcttgcatacatatcacttgtcacaggtggtatgttatggagacgatgtgcatactcttgcatacattacactcacagtgggtggcatgtattggagacttagtgctctggaggagggctcaacaagggcagtccttggcgttttagagccttggaactacgactatggatgctcttctctcgataagagaaatatgaaaaggaagggatgtaggattcttattcaatgtatttgattcatacaaattccctttgtatctc

SEQ ID NO: 84876 - DNA, 463 bp, Glycine max
  unsure (1)..(463): unsure at all n locations
tatgctgcanacatntataatagacctccacagcagcttatccttcttcaaaatacttatgacctttcaagcaacagatacaatccaggttggaggaatcatccaaatctgagatggacaagccctccagaacaacaacagtctatccctcattntcagaatgtcgctggtccaagcaagccatatgttcctcctccaatgcagcaacaacaacagcagcaacaacaacaaagacaacaagcaactgaggcccctcctcaatcttccttagaagagttagtgaggcaaatgaccatccaaaatatgcaatttcagcaaaagacaagagcctccattcagagtctgacaaattagatggggcagatggctacttagatgaatcaagctcagtcccaaaattctgacaaattgccttcacanactgtgcagaatccaaaaaatgtgagtgccatcaccttgatgt

SEQ ID NO: 84877 - DNA, 382 bp, Glycine max
tctcttcctggctattccctagtggatggcacctccttaacctcttctctttgacttacgctgcatctctggtggaaatcaccattaaggacctcattgaaactaatgatccaacctccatataaaccccacaagcaagcttacatcacgatatctattaatcctgactcaagaaatcatgtaacatgcgaatatacccatgtggttatctctactaacgatttctgttaatcctgaccattgaagttatgtggcatgcggaaatacccatgtggttactcgcgtatacactatttcgctatccgtcagactcaaatatcggtagcctgcaaagtattacattgtaatcatcaccctttgttaaccaatggcatacaaccct

SEQ ID NO: 84878 - DNA, 347 bp, Glycine max
tgactctttgtgtgctattaaaataaatctctcctaaacatcatatcaatgtgacacacgcacattcctacggatgacaatatgaggaaggcgacgcctccgccaacacaacatatggtagaactaatggatctgaagaagaacgatgatgaggcacaacacaagcactagttggcaccacaccaacactcaacaaaggtgcaacaatggtggacaacgactccataacaaaaccagtcaaagcagttggcacactaacttcaacaacatctggagcggccttctgaacaggcatatctagaggaggtgaagaatcacgagtaacagaagtagcaactatatcaata

SEQ ID NO: 84879 - DNA, 437 bp, Glycine max
  unsure (1)..(437): unsure at all n locations
gcaagctttctaaataccaagataatatctttgtattagttcatataggtcaaagttttaaaaaaaagttgacaaaatcacaattcaatcccccttcttaagacattcttatcacttcatttactatatgggctctcctcataattagaattcattccatgtacatacaccatcttatctttcctagtatctatattttagaacttcaaccttatttgaacccaaaaattggatcacatatttcccttgattntagtagcctttaaaatggcaccttccatatttttagattttggtttcctattntttgaaactactctatccagtctcctacatctcatcatttgccttgattttcggtcccctcgtattggcccccattattatcaataatggttgaatttgggtttctagagtggccaccaatagacatttgt

SEQ ID NO: 84880 - DNA, 467 bp, Glycine max
  unsure (1)..(467): unsure at all n locations
tacaaattcatgaatttttgaaggtcatggctgaggagctcaatctccttgacgatcaaggttgaggagctcagtctcctccaatgaaataatcaataggaattgccatgtcttcaccctcttcctgaaaaataggcctgtccccaagccatgcaatgatatctctaacaaaatagattagaaattttataacataattcatgaataaagactcaaaagtaagtttcagccatataagacataagattaaagtaacacaaattaagacaaagtttanaaaacactgggttgcctcccaggagcacttctntaacatcttttaagctggacattattgttgtggctaaggcttcactatttcaccattcatatgtngccattngttctaacgcctcacaaaaagggaatgtaatctgcaattgcttaaaatatcaataaagtgctagtattgccttttcttatctttc

SEQ ID NO: 84881 - DNA, 421 bp, Glycine max
  unsure (1)..(421): unsure at all n locations
agctttgagcttggagcacccacgactgttcttttagcagtctacggttntcttcaacccacagttccgacagtattgtacggctttcttccacttttctttgattggagattctgtgggttccagcgagcggtttctgacagtattgaaatgaatgtggggcaatgtgggtgtcgaccgagcggtttccggcaaatttccggtgggaggagaaagataatagagagtgcagcatggttttcgagcgcgcgagttgtgaaattccaacacgttttaacatattaacataacaacatctacatctgtttttaaggataacagatgttacgaagaatctgttaacatcggttttgtaaaaaccagtgttgacttctactaggaagcatacggtttttttacactgatgcttacattaactcct

SEQ ID NO: 84882 - DNA, 445 bp, Glycine max
  unsure (1)..(445): unsure at all n locations
aactcagctgcaccactttcattatgctaacatacaagtcgtatttaatttttgtttagtaacaagactaagcttcataataatatgaaagataaattgtctatttaatacttgttagtatatattgaaaagaaaactgttgaaattagtaattgttgattatntttgcaacatataagagaggtgttatgtgtgctttctttagtgatacgatgttacgtgtgttaatacactaataatgtaatgtaacattgaaacatcaaattatcaatatattgataagaactaatggcatatttttgttggatgtatctattcagcacaaaaatctattggatgtgatatactttttgtgataggccctccctgtcttctcagtctaggttgcccttgcaagacatcattatccaatgcgcgctttaacatgtcttaattaagtattcta

SEQ ID NO: 84883 - DNA, 383 bp, Glycine max
  unsure (1)..(383): unsure at all n locations
cttccttgacaacttatcaatcgaatcctttgccttttccagttcttccttgaaagcttctatctctgttttcactggcctctgttttcagttttgaatcaagtaaggtcttcaattgcatcaatttaacagaataaaactatgccttcctcagtttttcttatatatatgaaaaaaattactaaaacatataactctccccattatttacatcaatatacatgtttattattcacagcgtaataaataattgatacatctttcttatataatacacataaaattaatcagtacgatgattgaaatgatagacgagaataatgaaacaaactaaaaattgcaattgcaacgcanatatgacgaaattaatgatagtctgaaag

SEQ ID NO: 84884 - DNA, 253 bp, Glycine max
  unsure (1)..(253): unsure at all n locations
cctctcatccacaagatctcagttcattatggacaaactgaaagagttcaagctcacccatcttaantntgtgtgtgtgagtggaggggagagaggttctntntttttgaactgcaaatataatatatatcgataattaaaaataccaatggtacttctggttacaaagagaaaatacactataagattattcatacatgcacccattaaaatacaacacatanaaccttacatagaacctacaatcttattt

SEQ ID NO: 84885 - DNA, 225 bp, Glycine max
cagtgtaacgctcgccagagatgtgtcgtgtggtgtgcatgaacttcccttgccaaaaaagggccatgtgtggggcactgcggcggtgtattgagttggctgcacacatggtcagcgtggcattcttgaaaggtcactaatgcagaccgagcagcacactggctgccaaacaggcccaatagtgagcgcgggtactgttcacccacaaagaaagtgcacacagat

SEQ ID NO: 84886 - DNA, 379 bp, Glycine max
  unsure (1)..(379): unsure at all n locations
tatcattnaagaatntcacatatcctttgtagtccccacattccaccaaaagttatgtttactcattttaaagtcttcctaatctttgtgtgcttgtgcatattttctccatagataatttctttctttgttntgataatcacaaaggccattcagatccttcaaatctttttgaagatctctttagtttttccaactcctgaaagttcttaagaatagtagctctttcactggtatgtgtttcaatctcaagacatatcttggactatttttctttaagagtggactcatctagtgaactatctaattgatcctgaaggatattctcaagttttaaatgatttttggataattttcttaaatctattcacaatttttt

SEQ ID NO: 84887 - DNA, 448 bp, Glycine max
  unsure (1)..(448): unsure at all n locations
tcagcttcttaaattctatggctactggctggtaaatgttggtgctgttctatcttttttgctatgganactcgtnctgtatcccagatcgaatactacttgcaaggctttgtttgatcagagaagaagctcgtgatatgatgggagggggaattatggacganagaaaccatcgtggattctatactcttcctcagcctgaggtatgttgatctgtagtttccatcttgtgatcttaacatggttacctaacagtatntcattntcatctgattttacccttttgtgctaaaagggcttggaaatcaaaactacatagatattgtctntcattgtcagaaatactgtcttggcatctttataactgttggcagtgcaggtggacttcttagccaaatttggtagctctaaaccctgngaaaaacgtgcttgatatgataagaaatgt

SEQ ID NO: 84888 - DNA, 452 bp, Glycine max
  unsure (1)..(452): unsure at all n locations
cgatccttaagtcacctgcggcatgcaagctggccacccagctcgcccaggcgagctatgtttcttcctcctatagcaaccgccttctggaggaattttctggaaggcccaagtgggcctatttgctatttgcacccccatttttactaaatacaccccttgctcttttttggtgagttttttccgtatcgttacgaaactttacgaatntcgtaacgatgcttgttttctttctgtaatgttacgaaaccttacggattacataatcatcccttcttgccttccggaacgttatgaaactttacggattgtgcactaacactctcttttaattttcggcatgttacggaacttcacgaattgtgctacaatgctttcttttgacttccggcatgtcacggaacttcacgaattgtctaacgatgggtgccaagtacctcaaagcggtcaaa

SEQ ID NO: 84889 - DNA, 395 bp, Glycine max
  unsure (1)..(395): unsure at all n locations
ctgaagaataaggagaagaggtgagaggaggtgtcatccactanagaataagccatggaaggagaagcttcaccaccaagaaagtgtcttggattagaagcttatagaggaagcgaatcanagagagagggggggcgtgggaattgaagganattatggagagaagttgaactttgaagtgtgtctcacaagtttcacattcatcanagttatgacaagtgttacacatgtttctatttatagcctagcacatgggaagcttccttgagaagcaaggaaggtagattccttgggaagctagaggaagaaagcttccatgagaagctagagaggggctactcacactcctccaatagctaagctcacccncatgccaaaatacatganaatgcaat

SEQ ID NO: 84890 - DNA, 428 bp, Glycine max
agcttgcatccattataagagaatgagcatgtgattggaattatgactgaaaatgttagtcagtttgtcagattgattgtgaaggaatgcaatgacagtatcccggtgagagtgtgatccttaagttctgagagaaacgactatcatttagtacttgatttttgcatgaatctctgaagtatggactgaatgcttgaaattgaggatgatgaaggccatgtttgattgtgataaccacttagccaaaaatctgaccacgttcttgaatgaattatcccttgcacccagtttgagctgaatgaattattgattgattgaaccctgagcctatacagtgttatctcctgctaccatgacttaggttgtaggagagtgttagtcgatgaatacgacaaacttttgtgtataaaacttgtgtatatcgtatc

SEQ ID NO: 84891 - DNA, 357 bp, Glycine max
  unsure (1)..(357): unsure at all n locations
gaagaatctggaaggcccaagtgggccagattgctatttgcacccctatntttactaaatacacccncttgctctttnttggtgattctttnttcgtaacgttacgaaactttacgaatttcgtaacgatgcttgttttctttccgtaatgttatgaaaccttatggattatgtaattattcccttttttccttccggaacgttacggaactttacggattgcgcactaacatttccttntaatttctgatatgtcacggaacttcacggattgtgctacaatgctttcttttgacttctggcatgtcatggaacttcacgaatngcctaacgatgggtgccaagtacctcanagtg

SEQ ID NO: 84892 - DNA, 436 bp, Glycine max
  unsure (1)..(436): unsure at all n locations
tgcagctangcaattctgagatattcagataatttatatttgaaacatgaaatcaaagagccaagttagagatattaggttgcctcctagaaacgcttctttaacatctttaactagatgcagggtggtgatcgagactttgccatctcatcctccctaacctcccttttggtgtgattgatctgatcatggacctagcacctgttagcacctgcccttatgctttaacaaagaaagtgtcatcatgtaaatgtgaaaaaatactacaagatacttgtatcacctttccacttgcctctagacttacccaagttggtgtggtgctgaccatcacccaaaatgactcttcattcattatatgatttgtacgatcccttgatgataagatgcagatgcatgcatgtgtatgatcgaacgttaaatgtaataaataaat

SEQ ID NO: 84893 - DNA, 477 bp, Glycine max
  unsure (1)..(477): unsure at all n locations
atgagtgtgatgagcatatgaatgtgttatctatgatattataacctcttaaggggttgagattggtgactgaatttgtaatgacatatgatgtcgacttgaatgatcataacatatatgcattgatgaatcacattgcatatgagtagacacgtaagttgagggtgcttggtggaccctcaacctagtgttggaggttgtcaatggtagctaacatgaatatgcctgaagaatggatgggtggatgaatccctatataagttaaggtgcttgcgagccttatcgagataagccattatcctagctcattcattnnttataaaatcacactttntctacacgattaattcgattctccccaaatggttagatcatagagtacgactatgttaaggaatgtgcttagaataatcgctcaagaagtgaaatcttncggaagtatacaatcaacataacataacgtgatatacatgagca

SEQ ID NO: 84894 - DNA, 317 bp, Glycine max
gtcattctgagagcatgagatgagtctgtgagtgattgtgaggttcttaaggtggaggagacatcctcaccgcttgtatttcttcaatccttcatttttctcttctcttttttgtaaaggaaagctcccagttatggagagcaaaatcctctgttggttcttccttgtaggtacttgatgtaaatacctgtatatctatttaatgatgttttttgtgtgttcattgtgctatcaaaactttattctagcatgctttttccttgatcacgtagatgcatgtgttgttaggatcattcaacagttacaactggtctgat

SEQ ID NO: 84895 - DNA, 522 bp, Glycine max
  unsure (1)..(522): unsure at all n locations
ctaagcttggacacactggtttaccttctcactaagccaattgctggcttagcgtgcatccgctaagcgcaacattcctgggctaagtgctatgaagagtctagaacaagatgagctgtacaggttcgctaagcgcaccgcttcatctctctaagtgcactacttcaattcatccgttaagcgagaaaggcgtgctaagccaaaaatcactaacgtgcgctaagcgcacgagcacggataaggccacctatntaagccagaaatcagaatttatgaaaagagnttggattgggattcaaagctttgcatgtctagggtttctagagagagaaaggtccaagtgccagagagntttgagagattntgctgtgtgaagatctgcagagaccagagctcanagtaagagctggtttgagagctngagatngagttgtgagtgattgtgagatcctagaggtgaaggagacatnctcaccacttggatttttggcaatcttcatcttggtcttctatttggtggta

SEQ ID NO: 84896 - DNA, 433 bp, Glycine max
  unsure (1)..(433): unsure at all n locations
agtcgcctgctgcatgcaagctngtagcatattcgaacaacaatttcttttcactcggaagtctgatcgagtcgtgtaatatatcgtgacgctcgaatattaaaaccgaagctcgtagcaaattcgaacgacaataacatttcactcggaagtcctattgagtcccgtaatatatcgagacgctcgaattttaaaaccgaagctcgtagcatattcgaacgacaataacatttcactcggaagtctgattgagtcccgtaatatatcgcgacgctcgaatattaaaacctaagctcgtagcagatgcgaacgacaataacatttcactcggaagtccgattgagtcccgtaatatatcgagacgctcgaaatttaaaaccgaagctcgtagcatattcgaacgacaataacattgtactcggaagtccgatga

SEQ ID NO: 84897 - DNA, 419 bp, Glycine max
  unsure (1)..(419): unsure at all n locations
tttgagcgtctcgatatattacggtctcattctgactttcgagtganaagttattgtcgttagaattagctgcgagcttcggttntaaatttcgagcgtctcgatatattacgggactcaatcggacttccgagtgaaatgttattgtcgttcgaatntgctacgagcttcggttntaaatttcgagcgtctcgatatattacgggactcaatcggacttccgagtgaaatgttattgtcgttagcatttgctgcgagcttccgttttaaatnttgagtgtctcgatatattacgggactcaatcggacttccgagtganatgttattgtcgttagcatttgctgcaagcttcggttttataattcgagcgtcacgatatattacgggacttcatcagacttccgagtgaaatgttatt

SEQ ID NO: 84898 - DNA, 357 bp, Glycine max
caagctcctcttttcttcgggtgccgtgggctttccttctgtgtacaaaactattggctgcgtcgcgatgttgggttgaggcaacgtgctgggtgcccgcccttctgggatcgggggatagaactcgacatcccttcgagcatagtcttgagggtctttgtgggcactctctggctgttgagaaggttctctatcatggacgggagaagcagtatggaccgcatcgtcttgccagacgggtggtgagtagttacgcggcaatacataagggtaagccgctcggctgtatcccaagtgagggctgccatcgtgccctagtgtgtcatttacctgtcctactatgtttgagggaagatg

SEQ ID NO: 84899 - DNA, 434 bp, Glycine max
  unsure (1)..(434): unsure at all n locations
atgattacttgtatgacatgtttagaagtatttgattgatttctcattnttttttaaaaaccattatattatacaaaattatttttttgatatattaaaactttttatgttcatgttggtaagtgtgtttttttgtttgttttagaagaagtgtctggtaatcgattaccttctcatgtaatcgattacaggcagttaggctaagtgtaatcgattacaacattcctataatcgattacatagcgtctatgtctataaattcaaaatttcagaaaccacgagaacacaatttctgctgcaactcgattccaaaatccctanaacttcagaacttgatttctccctcaattctcaaccaaatcacgtcccacanagcccanaattcagaaattttcattctctttcatctncaccgattaaaactttcaaaaaca

SEQ ID NO: 84900 - DNA, 434 bp, Glycine max
  unsure (1)..(434): unsure at all n locations
agcttatgctntgtgattcattgtccttgattgtggatataaactgtcttcacgctcaaatgcaacatgccttgagtttactaaaaaaacatttcacctgccaaagatgaaattacaaatattgttgaactaaggccatgcataagctacctatttatcacttatcacgaatganacacgtagtgagctaaaatttgattgtatatgcaaagccaaataaaaaaggaatttgaaaccaatgagtcagtaataacctataagcagaatttgctcgctaccactgtcaaagccttccatttcaatgaggaactgcgtctttagccgtctacttgattcatgctcaccgtctgatttacgctgcaaaaagttatttgcattagtaaaaaaaatcatgacgcagttgcagtaaattttcaccgagtaaaattgcatgt

SEQ ID NO: 84901 - DNA, 400 bp, Glycine max
  unsure (1)..(400): unsure at all n locations
caactggtgcgtcggcaacttggtacccagctggtcttgtatcanaaatctagacctgtcgcaagggtttgtggtttgtgctcctctgctgaccaccatacagacctttgcccttccatgcagcaacctggagcaattgagcagcctgaagcttatgctgcaaatatttacaatagacctcctcaacctcagcagcaaaatcaaccacagtagagcaattatgacctttccagcaacagatacaaccctggatggaggaatcaccctaacctcagatggtccagccctcagcaacaacaacagcagcctgctccttcctttncaaatgctgctggcccaagcagaccatacattcctncaccaatccaacaacagcagcaaccccagaaacagccaacag

SEQ ID NO: 84902 - DNA, 411 bp, Glycine max
  unsure (1)..(411): unsure at all n locations
caagctggttcgaggttcttactccgtgaagttcttagaacgatgaagaacgaatgaagaacgtcgaagaacggttgaaacctttgcgagattcctcacggaaaacgttacggaaacgtttcggaagcgcctcggcttagattttcttcacggaaacaatntttccaagcaaattcgaaagagagagaagtgcctaaagggctgggatcccttccttcttcatttcctcccctatttatagcaaaataggggaggtggttgccgcccagctcgcccaggcgagctcagctcgcccaggcgagcagggttgcttcctccagaagcaaccgccttctggaggaatcttctggagggcccaagtgggcctgggtgctatttgcacccccatttttactaagtacacccccctct

SEQ ID NO: 84903 - DNA, 404 bp, Glycine max
  unsure (1)..(404): unsure at all n locations
gacgcatcaacaagaatcaagccaaggctattgtgcaagcaatcaatggggcaaaacacaccaaatgattataatgatggatggctcanattctcacaaaggtaaaatcatcactttcaaaactatcatgacatgtagagaagaatcaaggatttcaagtcacaaaatgtcaagaacttttattttcaaaacaattacccatntatttcttgaacatatcctataattcaaagaanaacatgcaaagtcgtgcgtgcacacganattgacccaaaatattaaacttaaaatccgacgaaactaacaacattaacaaattaacacaactaacaaattaacaaaaccaacaaaactagaanaaccaaagaacactccccccccccccccatacttaaacaacacat

SEQ ID NO: 84904 - DNA, 339 bp, Glycine max
  unsure (1)..(339): unsure at all n locations
tctgctcatccatcgccgatatttaaattatttgttgtaggttaatattgtgttaattatttgtgtcaaatagcttaggttaaatatttatgttaatattcttgtaccttagattaattatttgtgttaatattcgggtaccttaggttaattatttgtgtcaaaatagcttctaagttattattcaaatatatatattgtgttaatattgtgttaattttgtacatatatttgtttaaattgtctttgcatattaagttctcttattcaaatatatatatngngttatttattttaaattgtctttgcatgtattttaatttatttgtataatatatt

SEQ ID NO: 84905 - DNA, 407 bp, Glycine max
  unsure (1)..(407): unsure at all n locations
ctttctttttggtcctttttcttcaaatnttttttattttgaacacatattttactctcaatctaattcttttagaaatacaatggtttagaaatttatatttatgtgntggatttttaagaaatggatatgatattaccggttttaaattcatactatntacatngtataaaatatatgataaaatactttatanactcatttttttaaaaataaatanggcaataacagttcatatattattatgcatagttcatattntaaaaaataaaaataaaaatacctatctcaagatattngtggtctactcntccatggaagatattngtgatctacaccatannnaaatacattncatgatatatttagaatcaatntcactaaatttanactacatgggaactatg

SEQ ID NO: 84906 - DNA, 366 bp, Glycine max
ttattacctatattcaacattaaatacttattacacttccaaattacccttaattgggagaagttgataccatttataccagttggatacacaaaagttaatcgttttcaaccacctacatctgggcatgcgggacttctaatgaagggccttgttatagggggccaaatgagcttttggggtgagactgataccttgtagactggcaaaggcctgtgatcaacgctggaaatcctagtgccctgttgaacttctctgggtccactgggtgtcttggaggtgcaatacctacaaactggtagatgacatccgagataagctatgctacatgaacactaatctgagtcaggatagtgtagaccaact

SEQ ID NO: 84907 - DNA, 291 bp, Glycine max
  unsure (1)..(291): unsure at all n locations
cccatttttactaagtaccccccctgccttttttggtgattncttttttcgtaagttacggaaacttacaaatttcgtaacgatactttgtttctttccgtaatattacggaaccttgtggattacataatcatcccctttttgacttacggaatattacggaacctcactaattgtgcaacgatgcttccatttgatttccggtgtgtcacggaaccttacngattgtgcatcaatattnntctttgctntccgacatgtcccgaaatttcacaaattgcctaatgatgg

SEQ ID NO: 84908 - DNA, 431 bp, Glycine max
  unsure (1)..(431): unsure at all n locations
gctttacgtcacccggttcgttagtaaactgtttctcgtttagtatgggtaaagggcggngagaaagtgatgaattgaggcctgaattccaccaagaacaactctggcaagggaagctgtagcttatggctttggtcttcttaatttagtaagattcttttttattatttcttccgtcttgggaaagccagcccttttccactatacgaaaggaacgaaagcttaaagcagctgtggtaaagaattggattgagaagcttggcccagtagtgccttgcggggtcggagatcataaataaagaaagactgcaatgcttttctggtgtttaatgaattgtagataggaaacctaaatgccacagctgactcataagaaagtcatgggataacctgaccttgtcaacgaaacaagaaaaggtaacagagtcttc

SEQ ID NO: 84909 - DNA, 448 bp, Glycine max
  unsure (1)..(448): unsure at all n locations
ccatgaaggaatgatgtgttcacaatgccatttcttggctgctccacagacaanagtgttctgacagtagtaattttcaccactggactgaatgtctcagtgtaatcaattcactcggtctatgtatacccctctgccactaatctagctttgtatctntctatagagccatcagctntatgcttgatcttaaacacccacttgcatccagtaggtgttttcttatgaggtaattctgccaactgccacgttntgttcttctaattcagcatctataacttcctgccaaagtctcttttactggttcatgatatgtggttgggttagtaagtgatgacaaggctaaagaatagtctctgtgagaggatcataatnggttatatgagtgtattggagatggatatctggtcntagttgggagcacggtagtaataacaatggtaatcta

SEQ ID NO: 84910 - DNA, 435 bp, Glycine max
  unsure (1)..(435): unsure at all n locations
agcttgaggcgagagttaaacaagagaactttttgttctatntggaacttcttcctaagaatcctagaatcatgaaacctcttcacttactatgagtgaagtaagagtgtctcttaatatatatttgtatcattataaggatcactcactcactgggctaggtctacaagtttctttatttgctttcaatttttcatgcctaacttattacacatctcaatcaagcaaaaacaatggtattcacatttagcatttgagctcaactgcacaaagaaggatttaagcacaaaagtttgttttatttaatggtggatntgtaagaaaatggtgatgtttcttaatcaattgtgtttccttatcttcctagtaataaacatatttctaaactaccacacatatactaaacaactaaactaataaagtgaaattaacaaa

SEQ ID NO: 84911 - DNA, 509 bp, Glycine max
  unsure (1)..(509): unsure at all n locations
tactcagctttagccaatggactaccttgaataattcctttgatagcccttttgagctcttgttccctttccttgtnttgaagctcactacaagccttaagtgaaaaaccataatattaccatatccttaaggaattttggagctttggaattgttttgggaataagtgtggggggtttttgtttcattggacaacttgttttgttggctatgcttcatgatgtattttgggccatacttgatgtacattgtatattggttaaatgttggacatgctgaatgaaatgttgtttctcanaggccaaagagntaaaaaaaaaaaataaataaataaaaataaaaaaattcgaaaaanaaaattcgaaaaaaaaaaagaaaaagaaaagcaataaagttgagtgaataagatcttaaatggcacaagaatngatgaaactctcggtctgctcttcctggtnanaatttatctntacttctctatattntctctttttttttaatatgcactt

SEQ ID NO: 84912 - DNA, 323 bp, Glycine max
cgtgactattatgctcttgaatatctatcacctgatgttgatgtgtcaccaattgttcccacacttcgggacttttttgatgatgcacttaattatactgccagtgaacttaacttccgaacactaatggatggcctgggaaaccctctgtatcaatttccatttaatggtaagactacaagatgctttttattgacttctcatttccatcctgcaccttttttatagagattgttgagtcaggtctgcatggaatagatacacacttctcaaagcacactgataataatgttaacaatattctacccataagagacatgata

SEQ ID NO: 84913 - DNA, 275 bp, Glycine max
acttcttttctgctcaaatccacttcgtttttgctgtaatgaagctgatcttatgtgctctctgagataacatactctctcgacgtatgtataacataaatataatcattttcgcttaccaatatctgattagagctgaataatctgctgctaagctgataacgctctggttataacgtctgctaaggcatgtaaagataatgggttggtgtaacactatgacgcatggtatttgctataataattcagtgattacggtgacgatgggtaatcta

SEQ ID NO: 84914 - DNA, 469 bp, Glycine max
  unsure (1)..(469): unsure at all n locations
tcccacccgcgatacactcagncacctgcggcatgcaagncttgatgatatgggcttcaccgatgatattgatcaaatgtgatgtctaaaaagagacaaatctgattatcatactttgataaatgccaaaaaactacggcaagtgaagaggatgagaagaagggagaaacctatgttgtgactgccattcttatacgaccaagtttcccaccaacccaacaatgtcattactcagccaataacaaaccttctccttacccaccgcccagttatccacaaaggccatccctaaaatcaaccacaaagcctacctatcgcacttccaatgacaaacaccacctttagcataaaccaaaacaccaaccaagaaatgaattttgcagtgaaaaagcctgtaaaattcaccccaattccagtgtcctatgctaacttgctcccatatctacttgataattcaatggtagtcata

SEQ ID NO: 84915 - DNA, 320 bp, Glycine max
  unsure (1)..(320): unsure at all n locations
tgcttcactttttgggacttccagctgtcacccatggtggaagaatttgaagagatcctatgatgccatctaaggggaaggaaaccatacctcttctcaggattctatccctctntagctagaatttctaagatagtccaaatctcggcgcaggaattagaccacagaaagcaagtcgaaaatggggtggttagagtaccgagaagatgtttggaggcaaaggcaagaatcttggcaggtagaggtgaatgggccccnttcacatcctagcactcgtgatcttcggaggagttctatttccaaatgtggatgggttagtg

SEQ ID NO: 84916 - DNA, 424 bp, Glycine max
  unsure (1)..(424): unsure at all n locations
agcttagacatattccttggcttntactttttaggattattttatgtgaaatctgatgttgttagctttgtagctcttgttctagaaattagagattcaggactccttctggtttgaattctctgatagtctctctctaagtttatatactattgagaacttgagatatacatntttttctctcttaaaatcctttttatctttcagcgatttgtttttaatttctgttttactttgaaactgaatccttggatgagcttctatagagtttatttgggtttatgattcctattntgtcttattggcttatttcaataagtttaatggttaaatttatgatgtaagttttcatgttgatgtaataaaagcagacaataagcgcttaactaagttgtttacttaaacacaacctttatatgtgttt

SEQ ID NO: 84917 - DNA, 442 bp, Glycine max
  unsure (1)..(442): unsure at all n locations
tactcagctctgctgtctagagagtttagagagaganaggtccaagttccttatatgttgagagatnntgttgtgtgaagatctgcagagactagagctagaagaggaagccgtcctaagagcttgagatgagtntgtgagtgattgtgaggtcctataggtgaaggagacatccccactacttgtatttctgcaatctttcatctttctcttctctttgttgtaaaggaagcttcctagttatggaaaactaaatcctttgttggatcttccttgtaggtacttgatgtaaatatctntttttntatctatttaatgatgttntgtgtgttcactatgctatcagaacttcattctaccatgcctttgccttgatcacatagatgcatgtgtttttaggatcattcaacagtggaaactggtctgattcttanaacttgat

SEQ ID NO: 84918 - DNA, 361 bp, Glycine max
ttttcgctattgtttttcctctctctcgtacaaatatcaggaattttgcattggtgatgatcatgaaacgctcaacacttaatcattccgtggatccgttgcaagcaacaacgaatttgagtgctggtctggcatgactaatctatgtgaatgcacatacgccccttcaatcctattgactattcccctgaacatgacaatgcctaggagtgaaaactgaccacgctactcaattatttcacgacttagagggtcaatcacaggccgctttgtgaatactaacctactttgcgatctgaacaatctatggatgaattctttgaactgttgtaatgcatcgactgaacatcacactcgcaca

SEQ ID NO: 84919 - DNA, 386 bp, Glycine max
  unsure (1)..(386): unsure at all n locations
ttaagttntataattaattgtcaattataggatatatctttgatttatcatccttctataaattcgtttcagatcggtacgtgttctgatatagacatgaaaaatctctngtgatatatatcacatacttgtttctctcttacgaatatgctatacggccatatgaattgtcatatttgacaatggggtgatgagatataaagtatcctattacgtattacgctctgatctttctgcacatctatcttccttaatgataagagacttaaatagtntttaagtccctcgcctatgacaataagcatcgataattattagtcgacatctaaagcttttaatngactgattatatttgcaattcaaatttaaacattaataataattct

SEQ ID NO: 84920 - DNA, 309 bp, Glycine max
ataagatggtggaggatgcacaaacaacattatgcaatcaattcgtgggtctctggactcaatggtggatgataaatacacgacaatcaattcatggcgctccgagtaagatttgatgatggaggatgcacgaacagtgctatgccatcaattcatggtgcttcagactcaatggaggaggatgcatgaacgacaatcaattcatggtgctgcgaataagatttgattatggaggaagcaccaacagtgctacgcaatcaattcatggggctttcgactcaatggtggaagatacatgaacgacaatca

SEQ ID NO: 84921 - DNA, 419 bp, Glycine max
  unsure (1)..(419): unsure at all n locations
agcttacctgttatgttcgtttacaagcatgaatgaanttttatattatattatatctctaagacactccttcggacgagccttctgggctcaatgcacggataatgcagaaacccatttacctcgtgcaatattcaactttttataagaatactaggatggaaacagtataagtcaaactctagatcacttagtgattgattgaggctttgacaccatgtcatgagccaaaaatcccaaaagtttgagcttttaggtaaacacatgaatggtttttacattatatcatcctctaacagtattttcctattgctttgttaaggtaattttcctaaaaataaattttattttattcttttaggaaactcgaagtgcaactgggattttatcctcattcacaataattctcctaaaaatag

SEQ ID NO: 84922 - DNA, 454 bp, Glycine max
  unsure (1)..(454): unsure at all n locations
gtgtcggcatggtatatatagagagatattcatacaaaaaggcacaattcctttttctgaagagtgttcactttgtctccattactgatacgaaaacaatnttgtagagaatatcctaattgtgccgttgttcgtgtcttataggcataaacttgaaattcaaatgataagatatttttgaaaatgcgagagaacaaaaaaggacattaaacgtttggttagtatcaacctcgacatannaatttggttagtatcaacctcaattagtggtgtgttggatgttaatgtggttgtccactcccccaagatggtgcatgtatcgattcagaacaagagtggtggctgtaggtggttcatgacgacggtggatggtgatcccgttagaactagcttcaatcaacaattctgggttgattaactaacattggtttgctatgcangatccttggatgtg

SEQ ID NO: 84923 - DNA, 426 bp, Glycine max
  unsure (1)..(426): unsure at all n locations
agcttaaaatatgctggtntatttgattaatatattaannnnntataatcaacaattattattattagtagtattagtattattattatcattgtgaaggttataatctgaaaaaaattgacatgcatgtgtagttagtttgctttgacagaccagccagaccacaggtttggctggttctctctctggattctaatatatctaaacatggaccacctgatatgctatttgactggtcccctagacatttcatggtcagtatgtcatcagttccaccaacacgttgataatttatgtctcagtgggtacatttatggccaactatgctaaagaactcgatccctttgtaggctgtttcaactctagtaggaatcctttttctttgtgggactaacatcattattataagcttccaaacacttcttt

SEQ ID NO: 84924 - DNA, 430 bp, Glycine max
  unsure (1)..(430): unsure at all n locations
aaaagataaaaatctacttcagattcaaagacngtgttcataanacccgtctttggataatgtagttcaacaacggtgcagtaaacccgtttttgtaacgcgcagataacgtcatttttaataaaaacgtcattgaaataaatctcttatttactaaaatgccaccgcctctaaaacaacatcatatttggaaccaccgatgttggcaacgcgtcttagaatactattattttagtagtgtagggaccatgttaatanntttaacctttttttttcttcttctcaaaagtagcttgtagtaaaaagttgcataaaattattatttcanacaatatatcccatgaccctcatctttgtntgccttcacaactaatttcatatactcacatgtgccantntatttatgaaatctatnntatatatgtaaaag

SEQ ID NO: 84925 - DNA, 394 bp, Glycine max
ccaacactgtcgtggttgtcgtcgacgattatacaggccagatcgtcgacgattatacacttctagttttgaatatatataccctagggtattattgtatactactgatgctgtgtatttgatacagaaaatcgaaaagaaaaattggattcgaggccagcacctccagacaaggtaagagtggaaggtaagcttaagttttcatatctccattgtgccttacaattgctttatttatactaattccttggtaacagaatttgacattttgcgcaaaggaatatctaaggaattattggctaacaatttatgggtaagcttgtctccctaaggcaggaccatcaaccatctagcaattcttcattccaagtcagcttcctttctccctttcttt

SEQ ID NO: 84926 - DNA, 362 bp, Glycine max
  unsure (1)..(362): unsure at all n locations
tatcattattttctaaaattatgtctactgcaaccatatcaatcttaggtcaatttattgataaagataaaaattaacaaaaaaggataaaactcatagataaaacctaatagaagcaaaacatgacacttctaaatataaataatttttaatatataaaaaggtcaaacatgaaatgagacaatatataagataaaatgtggcttgccatgaatctatagggggtgaatagatccttcaaaaaattatctttagtttctttattcaattaaaatgatcccttttgaataatcaaaatttcttaaaagcttgtcacanaaagaatatcataaccaagaaaacaatgaaatcaatatcatatg

SEQ ID NO: 84927 - DNA, 431 bp, Glycine max
  unsure (1)..(431): unsure at all n locations
gagcttagaagcanagtttgagggttttatcttacttttgatatcctatgtccacacctttgctggggatgaaccaattacttcatctccctgagtgttattccaattggcactttctttcttcaaatgaccaagctcgctcaacaaatattcagcattgatgtaatggcattccctccgagtcttccagaaaaggagttccacaaacaaaaggggttgctctttcattttctttagcatctttctgaccaaacaagtagagaaaaagatcaaaatgtagggacatcaatgctgaatttatagactccttgaatttataagatataaagtagagaaaaggatcaaaatgtagtaaaatcttagttggtatgctcatatttacatctgaataactatacctgcataatccttgcagggacatcaatgccgat

SEQ ID NO: 84928 - DNA, 337 bp, Glycine max
  unsure (1)..(337): unsure at all n locations
tatatgcatcttaattcttctagatcctattctactcatacaccaagtgagactagatcccgctgaacagaggtgggtgagatcattctagacagaccaattggaaaaatcttcacaagatngcttgaggggaaggtagccaccaattttttcatgtgcccctaaaaccgcattgaaatcaccaatgtaaacccaaggtctcaggaagttgatcagcatataagagagctcatgccataanattgttcttttaatggtggaggtggaaccataaatagtagctacataacatgagatgttgtaatagaaactacaaaagaaatgctgtgatcagaga

SEQ ID NO: 84929 - DNA, 324 bp, Glycine max
gaagaaagaagtttatgagtttggccttgcatgcctagtgtgtcagaaagctaagatagaacaccaaaagccttcagggaagttgccacctttaaagatacctgagtggaagtgggataacatttccatggatttcgtggtggggttacctacaacccccaaaggtttagattccctttgggttattggagacaggatgaccaaatctgctcactccatgccaataaacatcagatattctttagagaggttgactagcttgtatgtcagtgagatagttagactacaccgtgctccttctatcatattctctgatagagatcc

SEQ ID NO: 84930 - DNA, 389 bp, Glycine max
  unsure (1)..(389): unsure at all n locations
gagtattctttatgaaatattnttttttatgagtcatggaactataaagtatcaccatcgctaagaacaagaatctcaaacaaccatactctttatgcaattaagggtaaacaccatactacaagtatacatagaattataaggttcttataataagtatacaacttacatataagaagtaagaattaaatagttaataaggatgtattaaggaatcataaacttcaactactacattcacgactacgcacaaaataaagggagttaagtagtcatgcgtttacacatcaagaaagacacactcatccaagacatatatattgttcanaagagtttcacaacactaatccacacatcaagatagaaataagtntattaacaacatacat

SEQ ID NO: 84931 - DNA, 289 bp, Glycine max
tgcattcgtcattgattatcccggctagttgtcgcttttgccgtgactgctcttactcacctttttacctgcttcagatgcgcgctgcgggtcattcttgaaattacccccgctgtgctgtccaccttttttacctgcttctgatgctctttcgcggtcttctgcaaaattgccggaaccgcctcgatggtttgccattactgacctccgtctgggtatagacatcatattgcatagaattaacgcggcgtatggcggctgccatattttcgctacgtgggactaagct

SEQ ID NO: 84932 - DNA, 278 bp, Glycine max
tagcacgggctgcacatgctaatttgtctccctttctgagggaccgaatgcttcctaaatggatcacgttgagcctgggtgctgtatttgggaaaaggaatctggattgataaatctgcaccttaagaacaagctgcaaaacacccctatgatcagtattctgactgatttaaccatgttatcaacaattactcctattcttgattctgggaagactatgtgatttggacaagcacattttttcttttggggattatacttattcttggatactttac

SEQ ID NO: 84933 - DNA, 404 bp, Glycine max
  unsure (1)..(404): unsure at all n locations
caaaactcagctgagtgatctggtactttcctctttaagtttaactacatcaatgaaagcgacccgaagagctgtatttctaatatcataaataatccggaaaaacaaaaggatgcaactataaacttaagcattcaataaccaagaaaatcaattagcagagagaaaaaacataagtgaacccacctttgcctaagtaaagcaatatcagcagcctcaggctgttgctcttctttctgcttaccataaatntgacatgtgacaacataagtgaacttaagatctgcctgcgcacgtgcctcacgggataattcagagccatgcgtattagtgacttcatcacaacctattgcagccttcctatctatattacacgggaanaaattacacacatagtaacatac

SEQ ID NO: 84934 - DNA, 375 bp, Glycine max
gtgggtctaaatagaggcaggttaatcatcctgcttggaccaatgagaaaactggggcaaatgaaaaggtgaggatgagggagaaacccatgttgtgactgacattcctatactggcaagtttcccaccagctcaacactctcattacttagccaataacaacctttctccttacctaccacccagttatccgcaaaggccatccctgaatcaaccataaaacccaccttccacacaaccaatgctaaacaccacctttagcacaaaccaaaacaccaaccaaggaagggaatttgcagcagaaagccagtagaattcaccccaattctggtgtcctatgctaacttgctccattatctacttgatactgcaatg

SEQ ID NO: 84935 - DNA, 439 bp, Glycine max
  unsure (1)..(439): unsure at all n locations
accatcatcttagacttatattttttattagtactttgantttcagccttgtgtggtggctatattattatactatctaaataatttactatttccctatntgcatggtatgcttgaacaattattaagtatgttatttgactatgtggagtttataatttatctatgaatggttgtttgcttcatggtttcatgggtcttgcttcttgcttcatgatatggttgatattttttatgaacattgtatggatgtttaaattaaatttatttgatacgcactttggctnttttgttgatgccaaagggggagagaaatgggaataaatcaagaattcacatgagcaatcacacttattttaagataagcataaattcaaaaacaaagggggagcatttataagagtgatcgactanngaaaagtgcgtgtgtgtttcttga

SEQ ID NO: 84936 - DNA, 458 bp, Glycine max
tcgacccggatccttaagtcacctgcggctgcagcttactatcgaataggtttctccttctattgaaattccattcccacccttcctccttgtggctttccatgaggctgatagtttgctattggtggttacaaacttgatacagcgtaagaaatttgtccattaaagttatgtccctcctaaccatttgtcctcccaaaatctggtcatgtctccatagcgcaccttccactctatttgatcttttatttctattgactcctctatttgattgagctgccttaggtccttccagcaatgggagtgtaagctgttatttctttcctcatctaaatttctccaccctctatattttgagttcaatattctagtccacaactgtccattctggtggaatagctcccatctccacttgccaagcaatgctatattgaatttccgcaagtttttttacacct

SEQ ID NO: 84937 - DNA, 453 bp, Glycine max
  unsure (1)..(453): unsure at all n locations
tcactcctacatntcatctctagcatgcattttctttctntacccactcctcacgttgggttgtgtatggaanaacaccataactaaacgcgccgcaagggatccctatcgcaccagatccaaatctagaacgatgggtgatcaagaggagacccacgaacagatganagccgacatgtcggctctgaaagaacaaatggcctncatgatggaggccatgttaagtatgaagcagctcatagagaagaacgcggccaccgccgccgctgccagttcggctgccgaagcagacccgactctcttggcaactacgcaccatcctccctcaaacatagtaggacggggaagggacacactgnggcacgatggcagccctcacctgggatacaaccgagcggcttacccttatggattgccgcccaactattcaccacccgtcttgcaagaagatgc

SEQ ID NO: 84938 - DNA, 416 bp, Glycine max
  unsure (1)..(416): unsure at all n locations
agcttcctcggggccatttcctgttggtgatatcaaaggcgcaaaacggaatcaaaaaatgcgaaaaatgaggaccctagggctgcaagctcgtcaatctcgtgggtatggctcttgaaaggggggaaaagaagtttttgaatgcaaaaacgtcccccctttcgtcattcttataatttggtgcaagggtggctcgcccangcgagctaacttgcatttttttttttttgaggggaacattaaccatgtctcctcctttctcatggattagcatcttgcctaacttgaacttacttaggttagaattaggcgttgattacttatttttactttttaaaacaaacaaatagtaaaagaaaactgcgaatacaaaggatacggggctaccttgcagcgacgttctcttgttgtctagc

SEQ ID NO: 84939 - DNA, 500 bp, Glycine max
  unsure (1)..(500): unsure at all n locations
ctaagcttggaccacagcaacacanaatctatgtgtgcaaaacccctcaattcaatgtgttntctaggtttgaaaagtgaaagttagaatgaggtaaatntgaagcaaactctcacctcacacaagtccataacatcaatctaaacttgctcaaactgaatttacaccaaaaattccaccgaatcaaaatttgacccctcaacacccacatttgccctagaaatggctcttggattcactttggtcatttgtttntctctctagcacagtccaagctttctcataagtcctaaatgacatttcaagctaggattaactcactttaacctccatttaccacagaattcagacttaaccttccaactctcagagcctcactctttttccactcataacatcacattctcactttctaaccctaggttagttctacccttcatctctaacagatntccatcagcaatttcagcatatatacatcacaaacatcatcacaaaaa

SEQ ID NO: 84940 - DNA, 450 bp, Glycine max
gaccggatcttaagcactgggctgcagctacaaagactgtatctcttggggtattcacataaaacaaacatgcagcgactctcttaattgccccaagcctcaagcgtagtatcgcttgacgatgtcgacctttacgggtgaaggtagttcctcgtcatccatgtaggtgagcacaagggcccctccagagaaagctttctttatgatgaagggcccttcgtagtttggggcccacttcccctattgtctcttagggcttgggagactttcttcagcaccaggtcctcttctttgaacttgcgcgggtgtaccttcttgtcaaaagtattcttcacccgtctctagtagaaacgcccatggctcatagcggccagacgcttgccttctatgagattgagcaaatcgaaacgcacttgggcccactctgatttctgtaatccggactccgcc

SEQ ID NO: 84941 - DNA, 374 bp, Glycine max
  unsure (1)..(374): unsure at all n locations
ctagaactgatgtangggtacgtgcatgattccgttaagttgatatgttgatgaccggtctatttaatttccatattcaattttgaataanaaaattaattntgatattcaatnttttcttttgctagtgtatgatctttatgattaatattagctaagtggattattacaaattatgaattttgtgccagtataaatatatgtcccgtgtaaataatcatgttgcacaagtcaaatgtgggtgaatatagctaggcccactccccgcccgtgactgataaaaaactttagtgcttaattgactaagcacagcactcgcgtctgcatcctcttctcttgtgggaaccattactggatagtgttcgtctcaatat

SEQ ID NO: 84942 - DNA, 364 bp, Glycine max
  unsure (1)..(364): unsure at all n locations
gtggtataaagaactttatcaatggaagaaaaccctcccagcttcccttcttctctaagacacatgctcttaaaaggtccttccacgactgaatggtccgtatagtttgaccatcactctgaggatggtangctgaactcattctaagcttggtttccaacactctgttcaagctctcccaaaacctagaggtaaatctaggatctctattaaatactatgctaaatggcacaccatgtaacctgacaacctcacttatatacaaagtggtaaacttttccaaggaaaatatgatattaatgggaatgaaatgagcagacttagtcaatctgtcaacaataacccacatagagtctaaacctct

SEQ ID NO: 84943 - DNA, 431 bp, Glycine max
  unsure (1)..(431): unsure at all n locations
ttattccataatggatggcgcctcctctgagctnttttacattttcttccgctgcatctccatggtggaaaatcaccattaaaggaccccattgaagctcanagatccagcctccatagaagccccacaagcaagcttccatcacatgagccaaccatgttgggatcataaacccatttcacttataaacaaaatgaatgaacagggtacctaatgcatggttaactaagaaaagatgtttcttcaggcatctcaatctcataattacatttgccatgcatagcttaagtatgcttgagtcattcatctctatgaaatgttgttgaagtattggcgatcagaattgccattccttggataccgggttgaaccaagttcatgctcttacgaanagggtcatcaagtcaagttgaagtatggaagtaaccatc

SEQ ID NO: 84944 - DNA, 252 bp, Glycine max
  unsure (1)..(252): unsure at all n locations
acattactcttaaagcagaaatggcatatgacctcctgccataaatacaaacatcaatgtatatttagagcaagcttatgcgcatgtttccttacgaacgttcacttgcggaagacattctattaacacgaaaaatgcacccatatacaatcaaggcagctttgntacctagattatttacacgtacctccaaggggtgtatggtacttacatcacacacatcttcttggctagaatcacatacatgcatac

SEQ ID NO: 84945 - DNA, 474 bp, Glycine max
  unsure (1)..(474): unsure at all n locations
gaggtacttacccgttgaagactgaagaacgatgattatcgaatgaagaacgtcgaagaacggtcaaaaaccttcgcgaaatcactcacggaaacgttacggaagtgcctcggcttggattttcttcacggaactaattttcctcagctatttcgagagagagagaagtgcctaaggggctgaacccttttctacttcacttctccccctatttattgaaaattgggggagaagcttgccactcagctcgcccaggcgagcaaggttgcttcctccacaagcaacaaccttctggaggaatcttctggagggcccaagtgggcctggttgctatttgcaccctcatttttactaaatacaccccctgcctcttttggtgattctttnttcgtaaagttacggaaacttacgaatntcataacgatacttgttntctttccgtaatgttacggaaccttgcggattacataatat

SEQ ID NO: 84946 - DNA, 302 bp, Glycine max
cttatctttctcggagggtaccacgggatacagcacttccgtacccttatatgaagacttttctttcctatggatacagattaacaggaggtaactcctgtctccacccaaatgctatttgtggcgtacatataaagaatatcctaggagtgctttcttcagacaacatcacaagttattggtgaagagaaacaaatcatctccatgatgatgaatcaaaggattgagcttattcttccagatgagctgtgcacctgcaggagatctatgcatacaacatgactgaccgcatagcgggtatc

SEQ ID NO: 84947 - DNA, 412 bp, Glycine max
  unsure (1)..(412): unsure at all n locations
cttaagaagcaagtgttacacccctcttatatctaagctcacccncaagggaatacacacccctccaaaatacatgaaaatacaaaaaaatcccctacctcagagacaactcgaaatgccctataatacaaggctaaaaccctatactactatgatacccttaacttgtaggatagggtgcctttaatttgtatggtaccctacaaacctaaaatggccaaaatacaaggcccataagaaggaaaacctagtctaatatttacaaagaaaaatggacccaaccttgtcccatgggctcagaaatctaccctgaggttcatgagaatcctacggccttcttcctgcatctttggtccaatcttcttggagtcttctatccaatgcccttggaggtaggatcgcatcacttatg

SEQ ID NO: 84948 - DNA, 301 bp, Glycine max
  unsure (1)..(301): unsure at all n locations
acgattcctttcaatttcatgtgataaacaatgctntcaaattcatgaatctgatctgaaatagactntccatcaaccatttgaaactcaatcagtttttcacaagagtaacgactaagacctttgtcagcagatccatatttcaattcaagtgcttcccataactcaacagaagttttggtatggaagaaaatcttactatatgtatcagccanagcacttanactgcgtccatgacataaaatatctttatcagaaacatcatgcttaatgggtgcattagtctgaactataatcagag

SEQ ID NO: 84949 - DNA, 487 bp, Glycine max
  unsure (1)..(487): unsure at all n locations
gtatcttccaaccattattntgtgtgaagactcggtgccattgatgctagaagccaaagacactaattgtttgtcttgctgctcccagtttaagtactctagcntcttgtgtgtaattagttcatgttcttcattcaataaccttgttggcctcaattttctgatataagcttatgcagctgataaccctttattgttgcaacaacctattgtctccacgtaagatagttttcataatgtgttgtttgtagtcggcacacgttttgatgcatgcttagatcaatccaagaatcttgtgacattggattgaactagcgtttgagacttgttaatactaaaacaaacacaccattcctcgtctaattntaggttcgggatgtaatagatacgatactangcagagttatgtttgatcattcaagttctgataccataaagatatgtaagcagtaactaataaatgagagaacgaatatggataaattat

SEQ ID NO: 84950 - DNA, 315 bp, Glycine max
  unsure (1)..(315): unsure at all n locations
gcttgtganagatctctaacattcatatagagaatacttacgtttctatattctaagagaatggaagnttaacaatagatactcgatagtatcaaaatcaatatcaccgacatcacatgaagtattactgggacctcattatatcgcttatcatctatgtaaggatatttgattaactaatgaaccttcctaatccataaatgaaataagggtcgcggcataactaacttctgatattaagggttttacttcgaaatctcagaattcttaaattcacacaagaatgcgtcttgtntagactcttgtaaatataat

SEQ ID NO: 84951 - DNA, 294 bp, Glycine max
  unsure (1)..(294): unsure at all n locations
gcactcctctaangactatggcatcatttctggcgctaaactgctgngaggtggaagccatcttctcagttaaattcctggcttcagcangagtcatgtctccaagggctccaccactggcaacatctatcatacttctctccatattactgagtccttcataanaatattggagaagaagctgctctgaaatctaatggtgagggcaactgacacatagtttcttaaatcgctcccaagactcatacaggctctctncactgaggtgtctaatacctgagatatctttcctga

SEQ ID NO: 84952 - DNA, 491 bp, Glycine max
  unsure (1)..(491): unsure at all n locations
gactaagcttgctttacatcttccagttttgatttgactaccctgttatatgaaacacatacacatactgtttgctagtcgatcactcactcaattctccatattcttcccctctgtnttcgagtttatgcttcacttgaaattaaattaattacttacgtgagttcttgatttaatccctatttctttccacctttggcatcgacaaaaagcccaagtgcacaacaaagttaaaacatacatacatgaccaatcattcacaagacagtcattgaaaaataaatctaaaccaatcatgaagcaagacacatgaatagatcaaatatataaaaaccacatagtcatataacataattcataattgttcaatcatactatgcaaataaaacagatactaaattggtcaaatgtcataattatatagccaaatacacggctagaaatcaaagtactaataatgttagacataatagaaaactatgatgatggtg

SEQ ID NO: 84953 - DNA, 295 bp, Glycine max
  unsure (1)..(295): unsure at all n locations
acgcatcaacaagaatcaagccgaagctattgtgcaagcaatcaatggggcanaacacaccanatgattataatgatggatggctcanattctcacaaaggtaaaatcatcactcttcaaatgagctntcaaaactatcatgacatgtagagaagaatcaaggatttcaagtcacaaaatgtcaagaacttttattttcaaaacaattacccatttcttgaacatatcctataattcanagaaaaacatgcaaagtcgtacgtgcacacaaaattgacccaaaatattaaactga

SEQ ID NO: 84954 - DNA, 474 bp, Glycine max
  unsure (1)..(474): unsure at all n locations
actaagcttcctacaaaagtttcatgcaggtggaccttcttctagttattatgacttaccacaacctcctatccctcttccattcccacctagagaaattccaaacaaaaaaatggaagaagcaaaaaaggagatcttggagaccttcaggaaagtagaggtgaacatacctctgctagatgccatcaagcatattccaagatatgccaagtttctaaaggagttgtgcacccataaaaggaagctcanaggcaatgaaaggattagcatgggcagaaatgtgtcaacatttataggtaaatctattcctcacattcctaagaactgtaaggacccatgtactttctgtataccttgcattattgngaacagtanatttgagaatgccatgctagatataggagcatcagttagtgtcatgcctttgtccattntcaattctttatctcttggacctntgcaatctacaaatgt

SEQ ID NO: 84955 - DNA, 529 bp, Glycine max
  unsure (1)..(529): unsure at all n locations
atcttaagtcaccgcggctgcagctttaggatacacttaaatttccncgtatctttctatatgcaatggccaccttcacgatntgaaatcaaataaagattggttggtggtgctctctcttgtgtccagcaatttctttggaagaacatgaanattntagattntaaaatatataatatttaagtgattgtgtttcttgctctcttatatttacaaaaaaattatttattgattgaaattcaaagtgaggtgtatttaataaccttctcatgtgtagagatattcattntagtagacatgtttgtcacatgtgtttctacttgattaatttataatatgtaatttctatcttttaatgtggtgattaataacaatggaaatctcttttatagttntaattntaaatacttacacaagcaatataatatattagaaccctcatgaagatgatggattttcaaaatatatttgagatttatacaataatatttttatgacatatgtgttgattgtagaaaaaatctatgtc

SEQ ID NO: 84956 - DNA, 480 bp, Glycine max
actcagcttaatgactttcttttagagaagatatttatgtcattgttacaaaagagttatggcgccagaggcacaaataccatatttctatactctacatctctaattcaggttacgagtgtttgacaaaagagtttttgaaataattgtaaaactaatgatataaaaaaactaatatttcttgtggaactaaatttgctagaaaattcacatgaaactttatcctaattttcctaccacattattataatattaataaattttacctacacatacatgtccacaagaaaatcgtaggtatttcctggaaattatatatccaataaaatccgcaagtatttcctatggattttcttcatataaaacattgcaggaatgtcttgtggattattcttcacaaataaattcgcacgagattatcacttctctagtagtgtaacttgatgtccctcttcatttctatatatatcattacaatgc

SEQ ID NO: 84957 - DNA, 290 bp, Glycine max
  unsure (1)..(290): unsure at all n locations
caacaccattataagataataataataataatcatcataataataataataataataataatatatcatagntagtaagaaataaataacacaatataaattaggtacatgagaacaccatgcactgggtgaggttatactaactacaattatgtgataaaattgctaagaaagtaaattagtactctgtgaataacatcataatatattatttgttggnggtgctactgctaagcccataactacacagttacagatctagaaatagaaaagtaaatatcaatacagtt

SEQ ID NO: 84958 - DNA, 484 bp, Glycine max
  unsure (1)..(484): unsure at all n locations
tagttacttctaccagattntgcacgtttcaagtatncaatttattaatatcaactttatgctggtttgggcagcttgatgatgatatcaaaactcgtatacaagttaaggaagatgggcccaagaggaggtttgcatcttataactagtggatattgtagtttttgagctgtgtattacttgtactgtttagacaccaaataactagcataataaacaacccaatatgcaataggcgcatgatgccatctataatgctntttaattcaatatttatcagcttgctgtatatagagacagcagataggccgggattgctggttgaaatcatcanagtcattgcagatgtaaacattgatgttgagtcggctgagaatgatacagaggtatcttcctctctgtctctgtccgcctctgcttgattcatttaccctaaataactttacccccctttctctcaagcgttggntgctaagatacattt

SEQ ID NO: 84959 - DNA, 458 bp, Glycine max
  unsure (1)..(458): unsure at all n locations
ctttcttaattataccaattcttatatcaacacatactatatacactatattaaatacaggactccatcagtgttttaaataggtgaatgcaatagcgcatcataagggtacggatgatacattatagatcatttggtgaaagtgaaaatctcgttcatgaaaactgcagtagtgatctaatcgacttctcaagcatgtatgaacggattgtcgcgaagatgaatttgagtgaacttcttctttgctaatactgngtgtgatctatgcactcctaataaccgagcttttcaggtttttttgcctggattgggtgctgagacctgatcctagcaaaccttcgattttgacaatactatttgctcatctatatttcagacagatgaactctttactaaaatatagaaatataggagtatttctgagcatgctaatgttacattttaatgactatccctta

SEQ ID NO: 84960 - DNA, 499 bp, Glycine max
  unsure (1)..(499): unsure at all n locations
aaactcaagctcagatggtttacattgaganncatttgtcttcctctctttcaactatcncgctactacgctattatcaatcaaatcaactctctctatngcggcttctattggtcttcttctcacaatgaccaaattaagtgtgattttaccatcgtactcattggtgttactcctatattgtgtctagtatatgcattactcatctagttttgtaggtctattctaatattgtcacctcagcaactgcaactaaggacagacacagacctacacactatgtcctataggcatatgtcccctcagtcacactatgtcttatatgttatatcctacattagtattggttctcctacagcttgcttaatataattataaatttaagataaaggtcaaattctttcgatgttatagtaacttatgactnaatgataacaacaaccaagaatattaacaaacattaactttctctctcagagaatatctttaatcgaaatat

SEQ ID NO: 84961 - DNA, 285 bp, Glycine max
  unsure (1)..(285): unsure at all n locations
ttaatggatggcgcctcctctcacctcctttcctttgtcttccgctgcatctccatggtggaaaatcaccattaaaggaccccattgaagctcaaagatccagcctncatagaagcctcacaagcaagcnttcatcaagagtgaccagcgacgtccaacgccggcgagttatctctttctataaatacgtgtactcatcgtccctgagctggacgcgtctctctcggtggaatgaccatnctttgatggcctcgaaacgctgctggtgctcaacactcctgaaac

SEQ ID NO: 84962 - DNA, 505 bp, Glycine max
  unsure (1)..(505): unsure at all n locations
tactcaagcttaagaaaacaaaaagatcaacataagaagttntattttggttcgtctctactattagactacatccaattcttgacaaaccaccaagttctactcacttcacacaagtgaaaagtattgttcaatgtcacttctggctctcacacaatcaagctctacaccaagcttgacaaaaagccactattcttttttctaccaagccactacaggctctaaacaaatcaaaagatttgttgtttaagattgctcgttgactaaactgtgaacatcttacagacatatatccaataaactctnttagtcttttctctcaatatgttcaaagtgttttgagagcttttgaaccttacaacaatatataaatagccttttacaaaaagaatgaaagaatgaaagtgcataagaatgatatcttcttcttcaaagcttctagtatttatagccttcatcttcaagtgttcattgtctcacaatagttggattcttcatttaatct

SEQ ID NO: 84963 - DNA, 373 bp, Glycine max
  unsure (1)..(373): unsure at all n locations
cgtgtaatactcgtagcgtttaagagggaaagcggtagttaagaatactattttcttctttcaaacaaataaaaggcttagaaataataataaaaatattaataacatccttggtgttaatactaataaaaaagtcattaattgtaaactagtaataacagttaatanaataagaatttcacaactcacactggatctgattgaagtttgtcccctatatttgagaataattcgattntatcattaattntttattcaacttaacattctaattgttatgtttctataatctgactccaaatgtgatcttttaatttagccagtgaaatgatgaaatntntatatgtgatcgtacttatcattaaaaatctct

SEQ ID NO: 84964 - DNA, 461 bp, Glycine max
  unsure (1)..(461): unsure at all n locations
taaaacacattaaataaccttcttagtatagttctctgttggngaaatgatccggaagcaaaacctcaaatctgattggtcagtatctactttaattgttgatgtaagcaagttcacagtgtgatgagcaacaaatttctcatcatgtactccaccatgatgatgagaagacagatcgacttaaaagtccagagctcagagctattcctctggccagaatgttgactactagacccctacacatgataaataaccacaaaaaatgtttttttatataaatgtttgccaattaatcaccctcaatgtatcacttgataaatgtttgttataaatggcatgcacttacggaaaccaaaaaatgagtgtgtaaagacaaagctgattccaaacctggataatatagggctccatttggtgcaacaattcatacccctacttgtggaaataattcaagtcacaca

SEQ ID NO: 84965 - DNA, 87 bp, Glycine max
cattccctcactaacatagtaccaaccttacctaccagtcaccactaagccttataaacataagaatatgcacaaaaatgggatcta

SEQ ID NO: 84966 - DNA, 473 bp, Glycine max
  unsure (1)..(473): unsure at all n locations
ctcagctgtctaaaacgctcactagcctttgttcccataatggattcatatgatcttcctctgaccggatgaatatngcaatatttggattaacaacataaaaattctgacaaagaaataaacaaattgagaaatgagatgataaggcaggaaggcaaaacctttttcctaataataataaagaaattcatattcacaacagaagcttaaaaaacatctcataggtagggtaaaaattttactcatattcacaatactttcaatagagttaaacatgcaacaaatgataatagaagctcatttgctattgctaggaaaaggctgatttcattatggcaaggaaacaagctccaggaaaataagaaaaggaaataaactctcaccagttttagcctacataatgtaatataacaagcttacatgtatcattttcttagtatatcttcatctggcttaatagtcagatactacct

SEQ ID NO: 84967 - DNA, 454 bp, Glycine max
  unsure (1)..(454): unsure at all n locations
gcttctccatanactanaactagttcataaactaaaactagtttatgcataggntaaatattagctgtnggagaagcaatatgagaaagcttctactcattagcttatggagaagctctttctttntaattgtcttctcctattagtgcttatagaaaagcttatccaaacaaggtccactatatattctgcaatctggtactgtgccatatatatggatggtggttttggacatttggatttgtgtagctgttgttaataacaatgatgcttatgcctttgggcatgggtttggactagttgtatcaaactatgcttgtgtattggaattttgggggaggatttccacttgcttactgcattcttacatgtatattatgtaactggtttcatnttatggctacatgtgaggtataactattctatttttaaagccatngcattccttttttat

SEQ ID NO: 84968 - DNA, 286 bp, Glycine max
  unsure (1)..(286): unsure at all n locations
gatcgnnggccgatactagactatgcaatatactgtgaagttngccaacaatctccataaagaagtgcaccacanttaaaggtgtatggtgaggtggaagagaacccacatgtattcctttggaaaaacgatccacaactaccaaaaccaccatgtgtcctcggaaagcaagcaactccccaatgaagtctatggataaatcctcccacggccaagatggtaccgaaaggagacatagtaagccaggttgtttgcgatggtcatattaagttngctggcaatcaac

SEQ ID NO: 84969 - DNA, 452 bp, Glycine max
  unsure (1)..(452): unsure at all n locations
ctcagctgaagctnttatttgtctcttctctttgcttcataatagcttgtgtcaccaactcctnttgttcttccctttgcttccgcatagctagagttaccatggcttgaactttgtattntgaaagagcatctacattgngggcaacatagcttatgggatcaacatccttcgtgttgcttgagttgctgagaaaaacaacaactgcattatgatcctttctttgtaatgaggtggcctcattggaaggtttaacctagttngctcagtgtgtaatccttaatcagccttagcaacattggatgaagcttgtgaagcaactttnttgacatcctttgcaaggcatcagaagttcaagatagtantacttggtgacctggagnttttccttactattttgcataactagctggatagctttccattctccttttgattaagatttatacctg

SEQ ID NO: 84970 - DNA, 313 bp, Glycine max
  unsure (1)..(313): unsure at all n locations
tagaaagcataaagagtagccgaagaatttcataagtcaaaaaaataattttatctcttaaatggtacaatattaaatatgatatacaatgtataaaagactaacatatatntaaatatttacaaggattntatgnttgaagatatgatatatattaaataattatcatatatgaatcacatgatttacgaatttgaanagatgggatatttaataaattattgtcatatatgaatccaatanactattnnnattatttgaaagctcttatgaatgagtagtgcaacattacttacatggtattangaacaaa

SEQ ID NO: 84971 - DNA, 486 bp, Glycine max
  unsure (1)..(486): unsure at all n locations
ggtaggagtatggggtacccatcacatgtggtactaggtggtagtcgggcgatggtgcacaacaagatttccacatccacaaatcgcgcataaacccaccatcccctgttgcccacctccaactgagctcacgtactcccacgtagcccatatcctcgtttctctcaacaccgggtccccatcaatcctcccaagcttccccaacatccaagtaactcaacattcaaacaacacanaccatcacagccaagaaaacagggcaaaggcagaaaactctgcccaaaacaccaaccaaaatcacagcttttctcacttaaagaccccagtaacaattccttcgttccaattcattaacccgtggattgactccaaaattntactggaagtctctagtacataagcctacattntgaccattgggatctactagcaaacatccagaactcattntacattactggttccacaaccagcanatacatagca

SEQ ID NO: 84972 - DNA, 363 bp, Glycine max
aagcaccgcggctgcagctgtgcttcatatcctgtaggggcttcttgttctttatgactatacttgcttccagttcatggcttgaggaaatctctagctctaagagtctatgttgtcactgagccctgtgtcgaaacatattttaagtttctatcttgagaggcaagatgtgctactgtccagcatccgtgggactaagggttggaaattctgcttaacatgctaaaaactcgctcgcctatggaactgtatctgaaatcaaatggcagtgctcccaatttactggaggtatgtcgtgggacctggatactgtagtgatgtgaatgtcaccacatggaaaggtttctaagctgggccgtcttt

SEQ ID NO: 84973 - DNA, 484 bp, Glycine max
  unsure (1)..(484): unsure at all n locations
ntctggaganaccttccttgagaagctntcttgaganaactttcttgagaagtttctttaagaaaacttgcttgagaagctagagcttagctacacacacccctccaataactaagctcacctccttgagaagcttccttgagaagattccttgagaagattcctaaagaagctagagcttagctacatacacctctctaataggaaagctcaccttcttgagatgagaagctagagcttagctacaccccctataatagctaagctcacccctatcccaaaaatacatgaaaatacaaaaaaaaagtccctactacaaagactactcanaatgccctgaaatacaaggctaanactctatactactagaatggccaaaatacaaggcccgaaagaaggaaaaacctattctaatatgtacaaagataagcaggctcatacttagctcatgggctcgaaatctatcctaaggctaatgagaacc

SEQ ID NO: 84974 - DNA, 476 bp, Glycine max
  unsure (1)..(476): unsure at all n locations
tgaccaatcccgacccaacccgggcatattcagtcagtgagatcctgtgatgtacctaagcaggcgagctcctggcagtcaaccgataaaagaacaaagaccacacaacagggaggcttgtgtggtggctggccagcaatgagtcttgagtgagatttgcgatatggcctctggtaatcgattaccaagggtaggtaatcgattccaaggcttaaaagtgaagacaggaagctaagatggccactggtaatcgattaccaagggagtgtaatcgattaccaggcttgaaaacgagatcaggaagctaggagggcttctggtaatctattaccaaggngtgtaattgattaccaggcttagatatgggactggaatgttgaaggggcctctggtaatcgattaccaggctgtgtaatcgattacacagaggaacaagccactggtaatcaattaccagtcatgtgtaatcgattaca

SEQ ID NO: 84975 - DNA, 491 bp, Glycine max
  unsure (1)..(491): unsure at all n locations
ctggcattggaattgcgaaagccccactccatcattaggattattacctgacatctcaaacaaacaaatcaaacgtaacaagacaattatagttgctgtttgaatacctcacccactcaagtgtatcacacaattatggcttttctctaatgaaacactcttgccttttaccactctaattccccttgagtacttaggcaattcaagagattatggccacaacaaagaacaattcaccaatatgtgtaaggtaaggctagagagacaaggaaaaggttaaccaagaaaaggctaacaatgtttttaggcacaaatgaaggaaataaaattcagaatttaggaattcaagtaacaatccttcatgcaaccaatatattaccttanagagatntttttttanagttcttcaagcatgaaccacttcagcccaatttttttttttnttttgaattntgcttatatgaaattctgcttcttttttntatatatat

SEQ ID NO: 84976 - DNA, 416 bp, Glycine max
  unsure (1)..(416): unsure at all n locations
gatanagaattccattgccaatgcaggtcatggtatggaagttggggagtctgctacatctatggcacttggtttgcacttcgtggtcttgcagcggcgagtaaaacttacactaattgagctgccattctcaaaaccattatatntctactttcaacactgaaagaggatggngggtgtggagaaagctatacttcatgcccaaaacatgattgtcattgaatggtcatggtaaacaagatactatatggtctattaaactgcattaaatatgcttgtatgtactgctctaacctcatttagtctggatgaatagagcacatattctntatgtgggttcaggacatttcactcctcttccccttggtntaaatttaatctcaattactaatcactgttctcgtcactgactatct

SEQ ID NO: 84977 - DNA, 275 bp, Glycine max
tgacttttcaaagtgttttctgaggtgtcgctgctggtaatcgcatacaagattccaaactctaatttcaaatatttttttgaaaagcccactcgcgatctgtctctggtaatcgagtacaatgtctggatatcgattaccagcgccctaagttgatgaaataatctgtttgaggcccaaactgatcaaccagtgagattcttttaacaagtgactctaggccctatctttttcttgatctgttgcttgaccttgaataatcttgaacaatcttt

SEQ ID NO: 84978 - DNA, 319 bp, Glycine max
  unsure (1)..(319): unsure at all n locations
ctatacagtctcatacctgcacagcctgtggacccctctgattattctgagattcatatggagtgttacatgtccatcaactttngcttggttcatcctctaaccacaccatactagaagagaggtctaatttgatatcatctgtaacatccctgattgtcgacttatcgacaactctcacactatgacaagtcacttaactccttgatggtcataatctgcaccggtcataaccctctgtaagtagccctttacgtgagatcaacantntgcttcacctactttcaagagcgataactatcctcacagactaacatgt

SEQ ID NO: 84979 - DNA, 439 bp, Glycine max
  unsure (1)..(439): unsure at all n locations
atctctaagtcacctgangcatgcaagctngaagaatcttanggaaccactagagataccactatatgtgtgatcttacttagaggcaagggatgggttattgatagatagagagtagtgagaacatgtgtagagatccttagcggatcaattaggatgagtnntttggatgttttgtntatttgattctatctttacaattataacggagaattgtatatgtttaacaaatcaattgatgtatcaatgcgaaattactatngaaatgatgtgttcttgcgttgagcgtgaaccctagcatagtgtgataaaactgaatgattagtatgatatatttacntaataaattgcattatgagtttatatttgaatctagcatagtgtgataaagaataaatggtcaaaagaaaaanaaaatccatggtgttgtttacatatt

SEQ ID NO: 84980 - DNA, 447 bp, Glycine max
  unsure (1)..(447): unsure at all n locations
agctacaattaagganaacaacaagtgagtaagtgacanattgaacctgtgatcaatgttgaaatatatgtgtatttagatgtgtatattaatttgtgagccatgaactgtgcaatcacacaactgtaagaccctttaagggtgatgagtttttgcgcaattagtattgtgatgggatccactatggggacccgacgagtttaatcacaagtgcgacgagataaaatcattgtgagaacaattgagaaatcgtgtgtattgcatagttcataggtaaagtgtatatgattcatgaggtgtgataacatactactttgagattataccattgtgattgagatcaaatatatgtgataaattgagtatgcattgactcgtaatacatatgtgcattgggatattgtgtgcattgagttgtgaactatgaatcgtacaatcacacgacta

SEQ ID NO: 84981 - DNA, 342 bp, Glycine max
  unsure (1)..(342): unsure at all n locations
gtctacgatagcacgtgctttgctttctttgtagccgnggctatatgagacatcttgctaaacanagtcaggttcacaataactcgcctgtgctttntcttccatgctatatgtagcanagtgattgatccagtaatggttgatgagttggaaaatgaggccgcaattatactctgccaattggagatgtattttcccnctgctttcttagacatcatgattcacttgattgtgcatctggtcagagaaatcaaatgatgtggtcctgtntatctancggtggatgtacccggtgagcgatacatgaagatcttaaaagggtatacaaagaatctatatcgt

SEQ ID NO: 84982 - DNA, 489 bp, Glycine max
  unsure (1)..(489): unsure at all n locations
cttgagaaaacttccttgagaagctagagcttagctacacacacgcctctaattactaagttcacctccttgagaagcttccttgagacacttccttgagaagcttccttgagacacttccttgagaagcttccttgagaaaattcctagagaagctagagcttagctacacacacctctctaatagctaagcgcacctccttaagatgagaagctagagcttatctacacaccccctataatagctaagctcaccccatgacaaaatacatgagaatacaaaacaagtccctactacaaggactactcaaaatgccctgaaatacaaggctaacaccctatactactataatggccaaaatacaaggcccaaaagaaggaaaaaactatntaaatatttacaaagaagagtggatccaaccttggcccatgggctcagaaatctaccctgaagatcatgagaaccctatggccttctttagtagctct

SEQ ID NO: 84983 - DNA, 221 bp, Glycine max
aggcttcatgtcacactctacaaacaaactttcaggcaagggcgacaaagcgtagtttggtttctagaagtactcacccacacacacgttatgttttgaaccccaactatacaactcacagttcccaactgccagttacctaatcgacatctactctttgatctgctcgatactcgcaacctatggatcgaaatctacattatattaaacgcagtacacct

SEQ ID NO: 84984 - DNA, 476 bp, Glycine max
tcagctccttcatctgcacaagggctcttaatattgacgagtattcttgtggaaccttcacccgacgaagacacagacaaaaacttatcttctcctttttggacaaagtatggcaagctgggggcaagtaaatattgttgccatcagaccttggatgcaactgtgatcgtatccccatatcagctagatcttgacgggtattcaagccatccttcgtcttgccttgaatgttaagaagtgtcccaatcacactgtcacatacatttttctccacatgcataacatcattacaatgtctaacgtctagatcagaccagtacggaagatcaaagaaaatggacctcttcttccatatgcaactcttactcttatccttcttttaggtctttccaaatacagtattcaggtgttgaacccgctagtatacctgctcaccagtcaatggtatgggtgctgtggcgccctaaattaatgac

SEQ ID NO: 84985 - DNA, 481 bp, Glycine max
  unsure (1)..(481): unsure at all n locations
tgcagctttcgtcatactggcctaatagaccacatgtataagtatggncctctgaattggaccagagctctcttgtatgtttcgagcgtctcgatatattgtgtctgaatcggacatccgagtgaaaagttatgacaattttaatttctcgagaacttncattattcaatgtcgagcgtctctatatatcatgggcgtcaatcatacactcactgtcaaaagtatggcccgttgaatttctcgagaacttcaattatcaatttcgagcgtctctgatattttgctctgatctgcattcgagtgaaaagtatgaccactgaattctcgagacttcattttcaattctagcattaatgcaaagtatggctgtgaattgaccgagttgatgttaattcagcgctcaatatatacgcttattgaatcaggatagtatacattaaatctagaactcatttcaatacacgctgatttatggctatct

SEQ ID NO: 84986 - DNA, 482 bp, Glycine max
  unsure (1)..(482): unsure at all n locations
cttgcttctacagttatgaccatntgaatttctcgagagcttccgttgttcaatttctagcgtctcgatatattatgcgccagaatcggatttccgagataaaagttatgaccatntgaatatctcgagagcttccgttggtcaattttgagcgtctcgatatattatgcgctttaatcggacatccgagtgtcaaagtatgaccatttaaatttcttgagagcttctgttgttctatttcgagcatctcgatatattatgcgccttaatcagaatccgagtgaaaagctatgaccatttgaattactcgagagcttctggtgttcaatttcgagcgtctcgatatattatgcgccagaatcagacttctcagtgaaaagttatgaccatttgaatttctcgacaacgaccatcggtctatttcgagagtctcgatatattacgctccagaatcggacttncgagtaaatagttatgaccat

SEQ ID NO: 84987 - DNA, 355 bp, Glycine max
  unsure (1)..(355): unsure at all n locations
acttcctgcttttattgtgaccacagagtggtacctgtagatatgtcgtgggggtcaggagaccttgnggacgtcaggtggggtgctattgcccaaaaccaagcttgaccaatcccgacccaacccgggcatagtcggtcagtgagaacctgtgatgtacctaaacaggcgagctcctggcagtcaacagataaaaggaacaaagaccacaaagcaaggaggcttgtggtggctggccagctgtgaattttgtgtaatatgtggattatggcctctggtaatcgattaccaagggtgggtaatcgattacaaggcttaaaattgaagacaggaggctaagatggtctctggtaat

SEQ ID NO: 84988 - DNA, 369 bp, Glycine max
  unsure (1)..(369): unsure at all n locations
agcttcttctataagttcatntagactccanatctacttctatttctcattctntctcttcttcacaagctggtcaagaaggaaggangcaccatttccactcttcttccaagctnttccaagtggatgtgagcccttctttcatcaagcttaagtaaatgacctncattntcaactctaagctagaatttcacttcattttcttgctctttctcacttgtagtttcaaatcttatttttgcactcttgaagggtgcaaactagaacctaaactccctcatnntcttcttctaaattagtggagactacaaaaagtaatgggggtgctccaactcttgaacctaagcttgtgtaaacttccttaacatg

SEQ ID NO: 84989 - DNA, 444 bp, Glycine max
  unsure (1)..(444): unsure at all n locations
accttgaaactaagcttctattgagctagaactatattagttattatgtgataacttttactgctagatnttgaaagntntaaatttactacttcattgcgtaactaanattattattatttttatttaattattagctatgcggtaaatcggtgtcataatagctgtaaagtgcacctacttgctcaagaagcttgttagttgagtggagcccaccgcaatggtcttcttgggagctttgtgaggtattttcgaagggtgtgattaacaggaagaagcattccataacagtaacatctagagcaagatctgtgagtgagaaatctacatttctacttcaaccctttctgtgagagtggcctacttctgtattgtgcttacaaatctgtaatatcctctatatagaagtgagagatntaagtcttgagtggaatccttcttttg

SEQ ID NO: 84990 - DNA, 420 bp, Glycine max
  unsure (1)..(420): unsure at all n locations
agcgtgngttcccgtgtcctctagcatgagggtcttcatagtcatccacctattcatctgctcccccgaacacaagttcaagatcatcacaggatccaaacacaacaacacacagggagtgagttatcacattcctagctaatagagaaacaagacaattaaatatacatattatataaatgagataccacttgcttaaacatagctcacgtaacttcaccacttcatcattcanaattcacttttcaattatcaatcacattacacaagaatcccacacttcgatcaagatataataacacatcaattagcaagcatatgcaatagttatgctaagactcaatcctatattgcatgtggtaccatgtcagtgaanaaccaccctgaggcgcttangagtacataacaagacacaccaca

SEQ ID NO: 84991 - DNA, 314 bp, Glycine max
  unsure (1)..(314): unsure at all n locations
tctactgtanactaaattcagcttagggcaggctcctttattatatataatatatggnccaattatatactctttaattaactatagtaaaagatnttgtcatggtgttcagtttccttattgcatgaaagcacatagcgaatattgtcttttatgcattgcatgcttattatctatcctaactagaatttgcttcctcaattntaaaatgcttttacatcatatcagaataagacataagcatgtccctgatattagtcgcttgtgggttgtaccgcttcttataaattgcaatctctgaacatgtttgtatt

SEQ ID NO: 84992 - DNA, 460 bp, Glycine max
  unsure (1)..(460): unsure at all n locations
agcttcgagggctttcttccgaaacttcagccgatccatttaanacgtagtcaactactttttanaaagtttttctattcccaaattgtcctttacacttaccttttctgcaagagcattcattngcattngggtgtcccttttgcggagaacatgcgtgacccaggcacaagtcaccttcaccgctcctctctcttntttttttatcatcagtggcatcttcaggccggcccaatctatntagagacttanaacaactttgggtgttgtaggtggacatgtctttaataagttttttttaattttttttgaaaatatatgtgatgacataattaaaataatgattaagaataatgagacttcaatattagcacatgtctaccaactgagctatgatcantaagtataaataatatgtactatcatatctaaattctataatattaatgctatgtaatta

SEQ ID NO: 84993 - DNA, 484 bp, Glycine max
  unsure (1)..(484): unsure at all n locations
ggccacccagctcacccggcgtgctcagctcgcccaggcaagcatggttgttttgtccagaagcaacaaccttctggagggcccaagtgggcctggttgctatttgcacccncatttttattaactacacccnctgcctttntttggtgattcttttttcgtaaagttatggaaacttacgaatttcgtaacgatacttgttttctttccgtaatgttacccgtgcttatctttacttcctttttcccattgctggttcctaagtccactagtttcgtctcttctcgatgaggccccatctcttctcgatgaggccccatctctcggtcctcctgagcgactatcttctcaaactccggnggaagtgccacatcctcgtcctcttcactctccgtctgacctgcttcttgcttgaaatcgatggtcgggtcccaggtattagtaccttcgagggactcgtcgtcggatctgggcgtttaagcgt

SEQ ID NO: 84994 - DNA, 51 bp, Glycine max
  unsure (1)..(51): unsure at all n locations
ctgcttaacctacaacccatggtcttngcatctggtgcttggcatgctgct

SEQ ID NO: 84995 - DNA, 334 bp, Glycine max
  unsure (1)..(334): unsure at all n locations
agctttggcagcatcatgggcaaaccacaatgatatagaggtggtcactctccaagaaaacatcctatcaatgacttcaaactatatgacatgtgagagaatctggattcaagcacaaatgtcaaactttatttcaaacattcccattcttgactatctatatcaagaaaacagcaagcgacgtgcccaaatgaccaaaattaactgaaatcgacaactacacataacaataaccactacaattacaaccacaactacaaacaagacaacccccncctactaacacacatgcctatgagccaataagatagacataatctcaaaatcgcagtga

SEQ ID NO: 84996 - DNA, 481 bp, Glycine max
  unsure (1)..(481): unsure at all n locations
cttctctgaggtaatcttgacttctaagttctttctcctacatagtgttgagctcgctattanggggtctcttggtgtgtcgaggtacttgtaatactggtgtnntttacancctccttctgaaaaaaccctagagaaatgagaacattgtcacaagttatgctttttataacactcgatgttatntgtcgtgaaccttcaattgaaccctcggtcactattggccgtgatcaggaatattaaatatgatgtcttcttttagtagaatcttaaacaccctccagtcctatatgctttgacaggggtatctgactctgaatatggttattaaccttacttttgaaacctatactaaagttccttcaattcagtatatagaaccttgcgtttggactgacgaacgtgacctagagagacatatgatctacacaaagatgaactgaaagagagctcacaatangtgagggaagtttataattgt

SEQ ID NO: 84997 - DNA, 365 bp, Glycine max
  unsure (1)..(365): unsure at all n locations
atcttaagtcacctgcagctgcagctgtctataaccagctagattatatcattctatttggttgaatgacggcaattgtgttaatccctatgcccgtcatcctataacaatacagatgttgacaatcaagtctgtgcagttgcacagaagcttcacagtacaacagacactctggccagcatctgcattgcagcacctgctctattcaaattcataccagcagaagcagtntagacgttgatacaactctagttcccaatactgtcaagactgggaatattctacgctcaaactacttctgagctaatcttcaccatgaatacaatgccagaccgaatatttatagttatcttcttacactgcct

SEQ ID NO: 84998 - DNA, 242 bp, Glycine max
tgaaagaggggagaatggatcctcagcctgtcaacctggatgatataatatacatgaagctaagcatctatgatgctctcgaacaactcaatggagcatatccacttcttgaacacttatgaggcattgggacaactcaactatcagtgacctgaattgcgagcaatagtcgataagagagcgtcatcacttatcctcatactagaaagatggaccctgagcgctaatagagacagagacct

SEQ ID NO: 84999 - DNA, 322 bp, Glycine max
ttcttagttcagatgatgtatgtggggttgtatctacctcattcactcctctaatgactatggcatcatatctggcgctaaactgttgagagtcggaagccatcttctcaattaaatatctggcttcagcacgagtcatgtctccaacggctccaccactggctgcatctatcatacctttctccatattactgagttcttcataaaaatattggagaagaagctgttctgacatctgatggtgagggcaactggcacataggttcttaaatcgctcccagtactcatacaggctctctccactgagctgtctaatacctga

SEQ ID NO: 85000 - DNA, 413 bp, Glycine max
  unsure (1)..(413): unsure at all n locations
cctatngcagtanagggttgatacaaaactcanaagtgattcagagaananaaaaaagaatttagttaaagaaaatctttagaatttgccaacttctattatccacatatcataaaattgnttggaaggtggttnttcactttctgtacttcctcttgtcgccaagtgatgtcgtgtgggagagctaagaccttcacattcaacattcatatntcatactatnggtgaagccgaaatgatatagttaccagtggtgtacagtatactcaaatgttcatgggaccataangaatacactgacatantgacatggaatngngagtgaaggtacatacatagtcanggaagtgacttatcttgaaggctaaatatgtattngcatgtcatggagttttggacatgatcagtattca

SEQ ID NO: 85001 - DNA, 486 bp, Glycine max
  unsure (1)..(486): unsure at all n locations
gctcgagagagaaagaaagaatagataaatatatgatngataatgtagggtaataataaaagaaaaaaaatattgatccgatgcttgaaatttttgggtgtcaaaatataatcccttttaattatatatgaattagacgaagaaaaaaagggatcttatttaatttttgaacacttatgtgaaattggcttaacttaattataagtgatcttaattggtgttaataggtaaaaggataacttcatcacttatagtcatcttagatagtttgagcaaatttgcttctagtgagagatacatgtaatctatctacaaataaaataaatgaatactacttattgtaaatttttttttttggatttattgaaatttagaggaagggaatgacgatgtagtccaagacatgaaaaaactttagattaaacaaatacttacattntattccggngagaagaatgaagactcanatctacgtagaatgcaaga

SEQ ID NO: 85002 - DNA, 214 bp, Glycine max
  unsure (1)..(214): unsure at all n locations
ctttagaaatgtcgatgctgagtgatactatntttctttctgtttcaattgnacatagcttatgtcttcttcacaaatagtgcatgcaagatgaaccttaacactgtatccactcanatntccgtatgctgganagtcattgatgatacanaacaactttgcacgcaacttgaatgtctcatttcgatacctgatgtagctccatgtggagctt

SEQ ID NO: 85003 - DNA, 476 bp, Glycine max
  unsure (1)..(476): unsure at all n locations
gaagagccatgaagaagtttntcttttacatgcccaactctgtagagnggcatttgtatnggatggtatattntatgttgcatcttagtctctatcatatcatatgtgccatctgtgggttttttgggctcccttcctatgtgcagtaaaggcccaaatgagaaggcctgtatgtctcacttatttaagtggagaggagtcagattagagagtgagatacagttagagggactcatttgaaagggaaaaatagttacaaatcattgagagagaaagaaggagagaaaaaatcattgtgattntcacatacccactagagagtgtttttcagattataattgtggattcattcactattggatcgggctgatttttggacagtaggttctaagcgtgtgatacttgaagttgcccagttggatcgggaaaaggatttctggagagagagataatnngttctcattatctgctctata

SEQ ID NO: 85004 - DNA, 490 bp, Glycine max
  unsure (1)..(490): unsure at all n locations
tgcagctatgcgcatattattacaacgtctcttgctctgacattctattaaccgaaanaaatgcacccatatacaatcaagggcagctttgttacctagattatntacacgtgcttncaaggtgtatntgttacttacatcacacacnatctcttggctaaattcacatacatgcatactccgagcattatagggtaccaaaaattgcacatgtgcacatcttggtatttctaatacctatacatacancaaattcatgatgaatcttgactatctacacaataaagtgctacatttcatgcctttttccaagttntcgctacctanagccgcatgcanattcaagcatattnttcctttggtgactaaanantgatatcanattatatatatatatctttgtggaatatgttgtctttcacataacattcaacatnattatatataattnttgtgagacatcttgactacccaaaattatatatacata

SEQ ID NO: 85005 - DNA, 494 bp, Glycine max
  unsure (1)..(494): unsure at all n locations
atgctcagatganacaagaacttagatctagatgttcccaagctttttatgatgaaaatagaaattggaaccaagaatgcgagctttgcacaaaaatggtgaggaaacaaaaagagaatgaaaattaagagtctcttaccaaagctttgagggaagaaacctcaagaacactttatgaagcttggaagaagaagaagaaaatggattcctctccctcccatgaagaactcgtgcacaacaatggagaatgaaggttctaagtttgatttttttggagaagtgaagagataaggctttaaggcttgatccanatgaaacttggttagtttaatgttgataaaatcaaattgacaacttgaatgatcattcaatagccatggtggacatgccaaatgcagccatgcataatgagtatnttaccttntgaattttaaccagaaatgactaaagtatacttaaagcaaaaatggtaaaaattgtttntgctaaaacta

SEQ ID NO: 85006 - DNA, 470 bp, Glycine max
  unsure (1)..(470): unsure at all n locations
gagacttaccggtcatctttaanaaaagtattcttccattacacctttattactattaatcatatattatacataaaacattgctcacttaatctaaaataaaataaattagcattcatttaagtagatgtcatatttttcattatgttaattaatataatagttaagatatcctaacatataatatttaaaataatataataaatagtgtaaatgatataatgattaaaataagtagtgtagaagaaaaaaatccttattaaaaactaataaaaaaattgaatattttaaaaataaaaagagaataaaatctaanaagttaaaagttattagctagcatttcttaaaatntaattggaaaaaanaaacacaacttgtaagagtatattggaaaatgctattctctccgtttcanaaaaataatgatctttctattntctttcacaaataatagctttttttaaatcatt

SEQ ID NO: 85007 - DNA, 158 bp, Glycine max
cttctttccgcgaagcttcttttcatgtgcgcctgagtgggcttatagcctaaaccatacttcccacgaattttctcgggtatttatcaggctaggtatgccgcccgtgtctttgcctaaacccatcccgggttcataaccggtccccaacataactc

SEQ ID NO: 85008 - DNA, 457 bp, Glycine max
  unsure (1)..(457): unsure at all n locations
ccttcaatcatcaaagctcattcccatgatctttcgttaccacttcaacaaccatttagctttcttataattggggatacagattgggtcattgctggcacatgcttggaaagtatgactgaatatttcattaatctccattgtttgcactataagatacctttctaagataactgctgctgcacgttgacaaaaaaaataatactacactttgccagctaatatattntattgaagacaaggaacatattttttgctctttctgttcctcttaaggaataattcaaaaagtcatgggctatatactttccacgtgggcactgcgcttaaagggggcctgtgcattctcacctctccacaattgtttctctggtgccatgggtgtcatattccttggtacacctttcatggtgganggattatataatatatatatatatatatatatatatatcta

SEQ ID NO: 85009 - DNA, 295 bp, Glycine max
  unsure (1)..(295): unsure at all n locations
atgtacattgnngggaagatgtagatagagagaaatgcacaacatgtcatgcatttagatggaagcaaaagggtcatgaaaatgctagtgatcatggttngatggttgggaagcgacaaanagaattgcccgcannatttntatgatactttctatttgatatcagggctgaaatgatatttatgtcttcaaagacaattaagagtatggtttggcatggtgaagaagaataaaatgatgggttgatgaagcatcctannagattaaaggcttgaaagactttngatctatgata

SEQ ID NO: 85010 - DNA, 407 bp, Glycine max
  unsure (1)..(407): unsure at all n locations
tctaggactntaacacctagctggcagttgtatnggctgttgtggtgaaatacaggatataatacatgctgtacacatatacatgtatatataacaagtagtaacaatgtgctttacctggacttgatataatgaaacagcttccacaacaacaccaatggacaaaccaacttcaactacaacagactaactcagattctactagagctcatataatgagtaatgacattagaagaactcanagccaaaccaagttcaagtacatcaaactaattcagcattttctcagacagagtatgtcaaactacttgctggttattaaaagtgatacttattaatgtgacangcatagtattctagtttctattcatgattaagattcactaagcagatatagcggtctttct

SEQ ID NO: 85011 - DNA, 352 bp, Glycine max
  unsure (1)..(352): unsure at all n locations
gctacctacaagcctaatggcatttaaactatgatcaactttcgttagactccaattacactaaccccannattagcttctctaacccttcaaatctcacacttttctacctacaacattgtcattctcacatttaaccctaagttaactcttcccttcatctctaccaattttctatcagcaatgtcagcacacaatcatcacaaagcatcatcataaaaccctaaaacagaatgggtaaatttgctcacatanacatgacaagttagcatgctttaacaaatccttcacaaatactaccatanggataaacctagtagaatacccatcatatcntccaaaacccaatacc

SEQ ID NO: 85012 - DNA, 384 bp, Glycine max
  unsure (1)..(384): unsure at all n locations
tcggaagatagtgatgaggtacaacgccctattgcanagcttgaaagagcctgagtagtcaaagagaagttcaagtccatagccatcaaagtctgaagagagtatgatgaactaagcgacgtcaatatggccaccgatgaagccttggaatgagaaaccaagaaggcccgaaaggaagaacacgaccaaaacaagttttgaggggctttatagggcagcaatagtgagctcaaactccgaagaggtgaaaggaatcatcacgggtcaaaggcatgatctggaaggactatctaacggcttggcttaggtngaaaagaaatttgtcccaacggttaaagtgagactgaagggaatatgtgggccatcatcgatgagtgcaaagag

SEQ ID NO: 85013 - DNA, 301 bp, Glycine max
  unsure (1)..(301): unsure at all n locations
tacccatcacatgtgttactatgtgtgcggtcggcgatggtgcacaacaaagtttccacatccacaatgcgcgcacaaacccaccatncnnctgtgcccacctncaactgagctcacgtactcccacgtagcccatatactcgtttctctcaacaccgggtccccatcaatccntccaaagcttcacaacatncaagcanaacaacattcaaacagcacaagctatcacagccaggcaaaacagagcaaggcatanactctgctcaacacatcaaccanaatcacagcttttctcacttaa

SEQ ID NO: 85014 - DNA, 401 bp, Glycine max
  unsure (1)..(401): unsure at all n locations
gagcaagattggatgaggggaagtgtgaatttcgaaatctgcacttatgcagaantttgctgtcaaaataggtgcagcaggattttagcttggtgcagaaaatgcttgtgtgtggttggctgtggaaagagtaatacagaatgagttctggatgtttgctagtagatcccaacggtcaaaatgtaggcttatgcactatagacttccagtaaaattttggagtcgatccaacggttaacgaattggatcgaaggaatngttactgnggtctttgagtgggaaaagctgtgattnttggttggtgttttggcagagtttttttgcctttgctctgttttgcttggctgtgatagcttgtgctgtgtgaatgtntgtttgcttggatngtgtggaagcttggg

SEQ ID NO: 85015 - DNA, 208 bp, Glycine max
  unsure (1)..(208): unsure at all n locations
gactcanatctaatagntattatatctcatttcatggtatttcttattattatntggttcgggcgactcataataaactcacataattngagttaagaattaaacttcttgtatactattattcattntttttgagctcggtatattaatttgtgttgaactcatactactttttttcttttttaaatcacacaagatggaatggagt

SEQ ID NO: 85016 - DNA, 489 bp, Glycine max
  unsure (1)..(489): unsure at all n locations
tgacgataaagcacgcaatcctaagcttttaanattgcaagtatttcatcgtatatagacatggcggaagatcggtatccagaaccaaagagatcgtaatgatttaaatagcgatacagcatataaaggtctctcctctcctcaaagcctggttgcttaggcatcacctgcagatcatttaaaattattatcagaaaatgattgtatgaaactgacatttcacatggcaattcaataccaagaatgtgtttctctgaaataaggcaatcatatccggctataaacaagtttaacaaggatattgagaaagccaaacaaatattcacctcattgaggtagaatgttatccaaaaaatgcactataaatgacatcaataactttgatagatcttaattaacacaacggaaattgattggactgagaagattgctggaagcattatctatttctcttaatataatttgatcttacatcaacacatacagata

SEQ ID NO: 85017 - DNA, 308 bp, Glycine max
  unsure (1)..(308): unsure at all n locations
gacattaattgaatgcaaaacacacaatttaagtaaaggttatcacactctttgtagtaacatttatatgtggcatggatgtatttaagtacgaaaacgtaattaaaatatatgaaaaatatgttgaaaaattaaaaatttatttatttttcattataaattatntcacctatgatggactngggttcgaggtatctttggattattaatatgtgggggtgctatngatcccaacacattntctattggctcctatcaccattataaaattccaaaaacaccctttcccataatgcacaacagaaata

SEQ ID NO: 85018 - DNA, 488 bp, Glycine max
  unsure (1)..(488): unsure at all n locations
ctntggagtagaaacatgggaccaactcattntatttcanatagtcgtatctagtcaagatctgagagaccatacaagtttcctagcggtttctaattatatgggtcattaagtctatcatatgctgacaatagccgagaagcccatgaatttcttcggggcggagtaagtgtccgccattgccttggccttggctaacaatcggggaagttcttgactcctgttcaaagtaagagcannatggtccatccacattgttgcctcttggtgcaatgaatcaattaccctctcccttgcttccctttctgctgatatcttggcgtactcatcctctagcctttgctcgtgagtcgctgctagatntagcttctctttgcactcatcgatgatggcccacatattccctctagtctcgcttaactgttgggaacaaattcttttcgacctaagacaagcctttagctcgtccttcaagatcatgcctttga

SEQ ID NO: 85019 - DNA, 373 bp, Glycine max
  unsure (1)..(373): unsure at all n locations
agcttcatgagagagtcaaagatcanatngagaggaatttaatatctatgctaaacaagccaacanagggagaaagaatgtgtcttcgaacccgaagatngngtttgggtgcacatgagaaaagaaagggttccggaacaatggaaatcaaagcttccaccaaggggagatggaccatttcaagggcttgaaagaatcaatgacaatgcttacaaagntgagctccccggtgagtataatgttagttccacctttaatgtnctctgattatctctntntgatgcagatggagaaatccgattgaggataaatccttctcaagagggagagaatgatgaagacatgaccaagagtaagggcaaggatccacttg

SEQ ID NO: 85020 - DNA, 468 bp, Glycine max
  unsure (1)..(468): unsure at all n locations
tccattaggctatctctgaaagatcaaatggtatcactatttatagggtacctanggcctctagctctgtagagtatagggttggacaacgaaatacaaaggcacaacaacattaacaagcatgtaacctaactgtgaatgagcaagcatgaaagaagagagaaagaggatagacaattggctattcaattntgttaattgttggtgtgttattcgtttccactgaagtatgaatcctgcacaagagaagaagataattttgaaaaaaaaattatagaattgaggtatggttaataatttatggaggtatatttaacaattnntcaatttaataaaactaacattggcccaattgttggacatatcaaaatttanaatcaatnttaattcacatcttgaaagaggaaaagaannatgatcaataaacattgaanacattgaggttgctntattgtcacaagcatgaaa

SEQ ID NO: 85021 - DNA, 379 bp, Glycine max
  unsure (1)..(379): unsure at all n locations
gtaaaaaaaaacctgatagaaaattgatatganttttatataggaacgtaggatatatattttatataagaacgtaatatgatatgataggatataactnttatttgctaataaaaaaacttgtaattaannatttacttaattatagaaatgaaatcggctgattttacaaaaataatattaattgtaccaaaaaaataatataaataaataaatatacatataggtcgaccttttaataagcctaagtctggacctattaatntaatagactnttaanaaagtctgacctagccttttaataaataggtaggccacttatatatgcaatagtggtggcactctatttccaattcgcacagaacaaaacgggtcggtc

SEQ ID NO: 85022 - DNA, 436 bp, Glycine max
  unsure (1)..(436): unsure at all n locations
ttatctcaatntctgttcaatcaagtaagtggttttagaaccttttcgatcatttcaagcatggaaaaagatatatattgtgaaattactgatttcttggttgattctattggctattgttatgatagttgcatcaaaatcttgggattaaatgagttttttttaatatatatcttattagtattaattctcccaaaaggatagaaaatcaattctgaatagcttgttgattgtcaatttctattctgttaccattgtgcatatattttaattaatagtgaactcaatttaattgcaggcaattctgtataacatgggagattattcggaaagaacttaaattctcaaagcatataaattgatatataccaatattcaaattaagttggttntgcctcgttgaaantaaagtatatttgcaactnnttgcttatct

SEQ ID NO: 85023 - DNA, 289 bp, Glycine max
  unsure (1)..(289): unsure at all n locations
aacggggtttccagcgcaccttagaaacgatcactataattgtaagcgcaacacaactgttatgcacgggagttatccatgttggagtttcagaagttgttgcgcacagaatgggaggaagagtatgagtgtcagtttcagctgcggcatatacgaatactctctttcaganataattgatttcacaaagtaactctttttcagcagctatgtcttcattgatttcagtttcagaattaattgtaactctttntttcttttcacanagttgtttcgttctttcatgtac

SEQ ID NO: 85024 - DNA, 486 bp, Glycine max
tcaagctatatattctatcttgacggcgatcgcttacgcgtaactagatattatactaaatatgatctttctgacagaatatgtatacactggaatccgacaagagtacttattggaaccatttctttagccgcatatcaaataccacagagtatggaaagcccatgccactggtacaaaaaggcaatcatcatatggatatttgttatggagtctttgatagctacataaacaagtagcgcatcactgtaagcctctttactcattaatctttattaaaccatctttaaagtcttccaatatcactttattatctgcataaagaagaccataagcagatatcattcaattcattaaaacacattaaaggactgtggtcaaggtcaaatgatttgaagctgttctaattatactctatcagaacagaggaatggcgcaattatcaacatcaacatacatcatctagccactttgaatgtctagcag

SEQ ID NO: 85025 - DNA, 501 bp, Glycine max
  unsure (1)..(501): unsure at all n locations
tggggaagcttgtccttgtgtttgatgctagcttcttgatgatagcatgaactgtgatgcatgtcatcataattaagtccatcattatttgtggtggagagtggtgtacgtggtacaatattgatgtagaattagtatatttatattgctttctcacagttttttttaagtaacaaataatntcaaagtgataattattctgaaatcttgagaaatatgaatttatatatcttggtcattgttaaatgaaaagtaaggtacgttgcttctactcaagctccaatttaaaggttatatgttgagggagggatggaggttgggcattgtggagataatgcttccactaatttngtttgtnttatttatgaatagatatgtatactattattattttataattaaatatatatataacctcttctatatgatatattcaccaatagttagctactctttatttctcaaacattaaatatatcctttcactatgtgatttacaat

SEQ ID NO: 85026 - DNA, 474 bp, Glycine max
  unsure (1)..(474): unsure at all n locations
tagtagcttcagaacgctttcttggaaccttcatctgctcaaattccggcagggaactttcacttcccaagataaggccaaacagagctttcaaacactccgaaagaacagctggactagtgtcctccatctcagccaatggggtacccacttcattgtccccttccttgtggattgaattctggaagtgcggcatcttctctgacaaattacatcttcttaagaatgcatcagcttctttttccacgagaacacacaaatgattatctatcattgctccaagtcttttcacgtaatcagcaacagcctcgtatccagatagaggttgttgaatggcacacaagcagttaatgagaaaaatctntgaaggggtttcactagtctgtcaaaacaaacatggcataagttaaggcaaacgtcgtacaaaaccaaaagctagtctattggataaaataaaagaaactttcataaaag

SEQ ID NO: 85027 - DNA, 411 bp, Glycine max
  unsure (1)..(411): unsure at all n locations
ctaatctcaactataaatggtgttagatcgacaattagtctcataactgacttaaaagatcaaaacatatgaaaataagtcacataagagttaacgttctaattatggtgattagaagaaaaaaaatctcattgattaactctaatagctgaattcgattcttataaataaaaagattacaactatagctgcatcaatcacatttatttataatttaattataaatttcacaatatcaagaaacacaattatatataatcccaatttcaaccccaacatcaagatttttgagtcaacatcaatttaaaatcttgatggttattgaacaaagagcaagaacctttctaagaanaacacttataattaataccgagctgcaccacaaccgtgaatattacacatataattata

SEQ ID NO: 85028 - DNA, 269 bp, Glycine max
  unsure (1)..(269): unsure at all n locations
cttcatgtgctactcaatggtttgaaaaaaacttttgtacttatcttgattgagcctttttctattcttgaatcttgagtcttgaatcttgatcttgattattcctgattcttgattcttgagacatganacttctcttgaatccttctcttgattcttgaattttctggactcaatcttganatcattctcatgggctngttgtcatcatctttggtattatcanaacacattgaatcaatcttgattcatcattatgaatcaatctt

SEQ ID NO: 85029 - DNA, 422 bp, Glycine max
  unsure (1)..(422): unsure at all n locations
ttcttatcaatgtgaaaccaacaccaacaaatggtagcctcaaggaatacaactttcactgcattcattaatgctagatctctatcggtaacaataactctagggagtgcatcacgtctgaggaaaagaccttgaaatcgttgtagagcccaaacaacattattcagttgttctctctccaaataggcaaaagcaacaaagaatgtaatccttggtggtgtcacaccaacaacatcaagtaatggcagtatgtacttattctgtttgtaggtactgtctatcaaaaataccaaattacaggcatttggtaatntgactacattaggatgactccaaaatatgtcacgtacaacatcttcatccttcaacattaatcattaggttgattagttgttgcattntagtattattgcctcttatgg

SEQ ID NO: 85030 - DNA, 502 bp, Glycine max
  unsure (1)..(502): unsure at all n locations
gctttatcagaacagggtttttactctgattatatgcttcttttttcaattgatttgttcattaaaatcaaatcgcgttattctactatgtttgataaacaggcagctgtgtctccagcaaagcctccagataggccgcatcctgaggtcgatgatcccctatatctgataacattgaccatcccacagcttttcttgaggcctctncaggttatgtgggatgctatcgtgtttggggtgtttaattaagacttcccattgtacatcaagcacaaaaatctctctgaaattgcacacgatggtcaatgtcttagcatatctgttntacagttgtgaattctgtatgtcaatctacaatatgggtaattacttaagttattgttttaaattcatacataattaactntgtcttcacaacaacaggcatctgactgagacaagtatgtgagcgggcgaatctgatgtgtatggantcctcgagccacagcccattcacagatct

SEQ ID NO: 85031 - DNA, 434 bp, Glycine max
  unsure (1)..(434): unsure at all n locations
aagtgacctgacgcatgcaagcttcttctgtgggtcaccatctcctccacatattattatctatgaganaagncaattcttcagtgtacttctagaactctaagaagtagtccatcaatttccgcttattctgtgtatggtggaatatttctcgcagaagagcatatgttcaattcaaattatagaattttccatatatgattttttaanaaaatcccacaactccttcactgtattacaatgggtgataacagattgagtctgtttatcaattggattgacgagacaggctaagattaatattccacatcattgtcttagatccatctggacatgtttctggtagataatcttccttagtcatcccaccaagactanattcaaccagatgcttgcattncatataattctcactgtcggcatcaagcttgata

SEQ ID NO: 85032 - DNA, 413 bp, Glycine max
  unsure (1)..(413): unsure at all n locations
tcttgcgtagccgctcttggngctcagattatcccananactttatcctcttattactagctatgttgaattctttagttcctgaatgtacaaccttcanatngttgctcgttcncctctttcttttctgcataaaagacaatcaaatgctgtcacaacatggatgaagtcctaacataatcaatatcaaagaaaacatggatgaaatcacaattaaaaagcacaactacctatctttcagagtcctttggttaatctgccttgtctccttatgtggtggcgttttgtttaataatcttatacttttgccttccaaaaaaacttatcactaatcctcgtttcattaatccacatttgcatgttattgtataaaagatcatgagttcttcacctgcctccactactcctacttc

SEQ ID NO: 85033 - DNA, 489 bp, Glycine max
  unsure (1)..(489): unsure at all n locations
aaagctaagcgtggtgagctagctctatatgttcttcccagagcagtagattcattatggtatatcttggtgaacaggcacctccttccaaatatcaagaatgctgaggtatgccctctagttactttgcactgaattaaaggaaaccctcttctgatctgttnttctagcatcctccgaaaatatatttctagaactctagtgccaaccatacttttttatgaaatgaaagtcagttnttatgggtgatacctctntagatgcttctttagttccaatatctatccgtgcagttagagaatgtgagagtttattaaacgggataaaacaatatctccaccatgtctctagtggcagatgcttgctttgaactcattaatttgtctttcttttcatacctacctatcggaacatgttcatttctgatggagagaatgagagatgctacctgtgaccataaatgttattatcttactgacagttctgttt

SEQ ID NO: 85034 - DNA, 478 bp, Glycine max
  unsure (1)..(478): unsure at all n locations
tcacgcaagagcgaaaccgcgcatcactcgctntcgcactttctcaccctcaagccgcagaaatctcctcaaacagttccggtaatttctttctatcattntcctccctttttttgtttaataattttatttccgtttattaaaatgaaatggtaaaattatatcgtcaaccaatgatttgtaccatcgagcaccggatgaactgatataaattgttctagcttaatcaatagtctcaagtttatgagatataaggttggcccctgtggttaacaaaactgacaaactaacatttgtggataaaaaaataaaataaaaataggatcttgagtttactgtattcagtatgcagttgtgttaaataatcgaaatgagacatttgttgcatacagtaattntagccggctcgaacaagattgactctaacaaggaatgaatattttttcatcanaaaaatgaataattgctcgtgtcctct

SEQ ID NO: 85035 - DNA, 501 bp, Glycine max
  unsure (1)..(501): unsure at all n locations
atcttaagtcacctgccgctgcagctgtctaacgttatgcgaacggaaccatcattcttctatatcgcntagaccaagaagagaggagtctagccacgacccacgagcatataatcgcggacgagtatgctcaagtgtacgccgaataagaggcttgaggaagggtgatctactctttacaccatgaggcaaccatgtggatgggaccggttgctcttacctcgaacgggagtcaagaactttctcgcttgttagccaaagccaaggcgatggcagacacctactccacccccgaagagattcatgggcttctcggctattgtcgcntatgatagacttatggccacatattaaaatcngtagaaactgatggctctcaaccttgactaatacactcctttgaaataatggttgcccatgtttactcaaaactgtcaaacaatcatctacatcatttagaggcattctcttaccctcctcgttggtttagaaaacactact

SEQ ID NO: 85036 - DNA, 424 bp, Glycine max
  unsure (1)..(424): unsure at all n locations
ngacanatnccgacccaacccgggcatattattcagngagtatctgtgatgnacctaaacaggcgagctcctggtagtcaaccgataaaagaacaaagaccacaaagcaaggaggcttgtgtggtggctggccagctatggattctgagtgatatctggaatatggcctctggtaatcgattaccaacggtgtgtaatcgattacaaggcttaaaaatgaagacaggaagttaagatggtctctggtaattatatttcaagagtgtgtaatngattaccaggccttaaaatggggtatggaagnagagatggcctctagtaatcgattaccaaaccggcgtaattgattaacctgcttacacatacagacagtatgttgaggagacctntagtaatcgattaccaatactgtgtaatcgaatac

SEQ ID NO: 85037 - DNA, 354 bp, Glycine max
  unsure (1)..(354): unsure at all n locations
aaaacacacagagctcgtaagtgtctagacgcaatctaaccgactaccatatgtggtaatcaattatttcgagctacagagactctcttctattgaaattggcgtgcgtaatcgattacaaaactcgacaactatttaatttgataaaacttgtcaatattcgaatagaagtttngcagcttgttctaacactttataatggattacttaagaccttgtagtcaatacacaatattgaacttatggctcttagacacgttatgatcaaatatatatctatgtttgtaccactaacatgataagagacaagtctaacatttcatgctagctaaaactccatacaatgctcatctt

SEQ ID NO: 85038 - DNA, 458 bp, Glycine max
  unsure (1)..(458): unsure at all n locations
ggccacccagctcgcccaggcgagcatggttgcttcctccttattcaacagccttctggaggaatcttctagagggcccaagtgggcctggttgctatttgcacccncattnttactaagtacaccccttgccctcttttggtgattcttttttcgtaaagttacggaaacttacgaatttcataacgatacttgttttctttccgtaatgttacggaaccttgtggattacataatcatcccctctttgacttacggaatgttacggaacctcactaattgtgcaatgatgcttccatttgatttccggtgtgtcacggaaccttacggattgtgcatcaatattctctttcgcttttcggcatgtccccgcaattcacaaatttcctaatgatgggtgccaagcacctcacaatgaccaaacaaaagttgcatgccatcaagcataggtccccgga

SEQ ID NO: 85039 - DNA, 373 bp, Glycine max
  unsure (1)..(373): unsure at all n locations
catatgctagatgcattaaacgtttcataggaattgatgtctaagaaatagcatccatttatcattagcgttgtaaattgcatcatggtgtgtgttcgtgtgaagttgagtgtctttccacctgaagctattccatcatatctcattntaacaagtttcacctggacaagacttggtagatgtagttccttaacggtaggtttggctctaagaagggagaggaattgatagaaatttcactattagtgtgagtccacacctctttcactattagtatgggttagtatgaatctaaatataaaatagaataaagtcacgtattatactcctaatgggtgcttatcatatgaatggcgtttataacatatacatg

SEQ ID NO: 85040 - DNA, 382 bp, Glycine max
tagcagccaactcctgaggatcaagcctcaggagtgcaaacttataatatattcttagatgctccccctctgacacaatcacaagggtcttgagaacacgattcaaagtatcttcatcaaatttgatcagatgacctctgaccctcacctgcttaagagaatcgtcttccggcgcgaataggctaagataaaattccttcacaatggctacatagatgttgttgtcagcaaaactagttagctccttatcccatttccgtctctcgagttcctccttgcactccacatatggcgcgtaatatactaatacatttctctctggtaggagaaccctaggcaccaccatatcgaggtacctctcccaagcttcttaagaatggaa

SEQ ID NO: 85041 - DNA, 353 bp, Glycine max
  unsure (1)..(353): unsure at all n locations
gagacgaacactcgtatttcaacaatgcccgcattgccctagagtacgtaaggggatatgatcgcgtatagaatttcctacgaggtcaanaccacaagctgctgtgtcggcgagatccactatacatatataagtcggtaaacggctctctacatgttttaagctctttagctgattagattactatcatttgtcgaggtactgagtaggaggatatctgatcccttctgcaaatatgtaccttgctctcttgtctatctaatactatgctattctacattgaatagaagagcacaagacatacgtatgtaagaaatatattatgtatataacgaacaggaatagtacatcat

SEQ ID NO: 85042 - DNA, 379 bp, Glycine max
  unsure (1)..(379): unsure at all n locations
gtcacactcaatttaccagtatcgattgaccactatatacatacataacagacttgctctatcagataattgagattcattctaataaataataataaagagtacactgatatatgcataacatatcatgtgtaacttattaaaggataaaattaaacgctcatatactacaaaagagtacgccttgcatgaaagaagagggaagagaaatggattngancttgtggacgatcattgcgtgctggcgatacgaaagaggaaaactctgcacgcgttgctacgaataaaaatgcgaacgacaggtaccaaagtaaatgggtttttattttcatgtgcaaaccaaaggtctattacccgccacacaagttaaattaaccca

SEQ ID NO: 85043 - DNA, 306 bp, Glycine max
caccactcgccttgtgtcagatgagttcataattctggtattcatgcgctcctatataaatatgtttacatcgcgattaagatgtttatgaaactatgtagaaaagttgggatttttgaaataatgacttgtactcacttataaacgagtggatatcctacactagtttataaaaacaaaaacaagtattcactctaactggttgaaacgattggctacctacatggttgtaaacgagtattttgcgtgctattaataaacgcgtaaattccactcgtttaaaggagtgcattttaaaacctgcta

SEQ ID NO: 85044 - DNA, 473 bp, Glycine max
tgtaatcgattacaagaatctgtgattgattatatctcatctctgcctatagaaagctgcactgtcgcagaaccctcactctcctcttctgcttgaccgggtccaacctcctctaaacttcaaatcctcataactttctcgtttcttggccaaattacttcaaacaaagctcaaacttcttctctgtttaattctccaaagatcctacctatcagaattagctgaaacaagctccaatggcagaatcttcaaagaaacgaaagggatcctcctccaccaccactactgtaggccaccgtcaccatggaacattcgatgacccaccagcatccattcctccttccttttcatctcccaggtcattaactctattttcctctgatgatcagtgtcagaggaaatattcccaattttgaaaacgcgtcattcttgaccctaaatatttagatattgaattctttgatggtgaaaca

SEQ ID NO: 85045 - DNA, 423 bp, Glycine max
  unsure (1)..(423): unsure at all n locations
acctggagatatgtcgcgggggtcacgagaccttagggacgtcaggtggggtgctattgcccanaaccaagcttgaccaatcccgacccaacccgggcatagtcggtcagtgagaacctgtgatgtacctaagcaggcgagctcctggcagtcaacagataaaaggaacacaagaccacaaagcaaggaggcttgtgtgtggctgccagctgtgaattntgtgtaatatgtggatggtggcctctggtaatcgattacaagggcttataatgaggacaggaggctaagatggtctctggtaatcgattaccaaagggtgtaatcgantaccaggctngaanacgaagtcaggaaacttagggagcctctggtaatcgataccagcctgtgaatcgatacacagaggaatgggcactgggtatc

SEQ ID NO: 85046 - DNA, 471 bp, Glycine max
  unsure (1)..(471): unsure at all n locations
acccatcacatgtggtactaggtggtggtcgggcgatggtgcacaacaagctntcctcatccacaatgcgcgcataaacccaccatcccctgttgcccacctccaactgagctcacgtactcccacgtagcccatatcctcgtttctctcaacaccgggtccccatcaatcctctcaagcttccacaacatccaagagaaacaacattcaaacagcacaagctatcacagccaagcaaaacagagcagaggcagaaaactctgctcaacacatcaaccaaaatcacagcttttctcacttaaagaccacagtaacaattcctttgatccaattcgttaaccgttggatcgactccaaaattctactggaagtctatagtgcataagcctacattttgaccgttgggatctactagcanacatncagaactcattctgtactactctntccacagccaaccacacacaagca

SEQ ID NO: 85047 - DNA, 383 bp, Glycine max
  unsure (1)..(383): unsure at all n locations
tacaagagggagagaagtggaactttgaagtgtatctcataagactntcattcatcaaagttacaatagagtggtacaccatgctnntctatntatatgaactangggtagcttnctttgagaaaagctttcttatagaaaannacttccttgagaagctctctttgagaaaaaccttccttgagaaagctatgaagtttagctaccacacacnnncatctaaaannactaagctcacctccttgagaagcatccttaagaagctagagcttagctacacacacccctctaataactaagctcacctccttgagaagagaagctagagcttagctacacacccctatactaagctcaccccatgacannaaacatganaatac

SEQ ID NO: 85048 - DNA, 464 bp, Glycine max
  unsure (1)..(464): unsure at all n locations
tctntggagaaacttccttgagaagctagagcttagctacgctcacccctctcatatctaagctcacctccttgagaagcttccttaagaagattcctatagaagctagagcttagctacacatacctctccaatagctaagctcacctccttgagatgagaagctagaacttagctacacaccccctataatagctaagctcacccccatgacaaacaacatgaaaatacaaaaaaaagtccttactacaaagactactcaaaatgccccgaaatacaaggctaaaaccctatactactagaatggccaaaatacaaggcccaaacgaaggagaaacctattctaatatttacaaagataagcgggcttatacttagcccatgggctcgaaatctaccctaaggctcatgagaaccctagggccttcccttggatctctagcccaatctacttggagtcttct

SEQ ID NO: 85049 - DNA, 350 bp, Glycine max
  unsure (1)..(350): unsure at all n locations
tctctgcttcagacacaatgtgctcatattcccaatacaatttttaatcttgtcaagaaattaatctttcctactaaaatttgcaactctcttgttctatggaggcctaacttctaacaccattgttgcttttattatcgtctacatttatgctttgntgatgaactaagaactccaagaaagtactagtcgctacctcataagaacacttagttggatttgttttgaaaccatgaaacctctcttttgttgcacagcttattctagagtgggcaaatactgattcatgttgactgactttaccactacattatcagtatacacttccatattcttaacagtggaatcat

SEQ ID NO: 85050 - DNA, 487 bp, Glycine max
  unsure (1)..(487): unsure at all n locations
gctgaagtcacatgttgaacccatctttaagtagtagaacaaatcaagggtcttggaagtacgagtggaccaaagagagggagtgatgttgaagttctggtttatctttgttgggttcatcttcaaggcttaagtgaaaatcattatttcatgcctttcatttgaactgcttgatgatcaacaaagttaaagaaggtcttcttgttgagaggataacgtgttagctctagtttagtcacattactattgaagataaggttgngtgttttgtacttactaatccctttcaggggaagcgacattcactaatggctggcatgattttgttaggaataattcacagttttaaaaagctgtcaactggtagttataacgttggttaagtttgttntcttataaccaacaagcagttactattaacctgctatataagcaaggttcctactgtaatcaattgagaagtgaataagcaattcaattcattttt

SEQ ID NO: 85051 - DNA, 487 bp, Glycine max
  unsure (1)..(487): unsure at all n locations
gctatgcgcatatntccttacaatcgttctcttgcacaacacattctattatacgaatttatgcacccatatacaatcaaggaagcttcgttacctagattatgtacacgtacttccaaggtgtatttgttacttacatcccacacatctccttggctaaattcacatacatgcatactccaagcattttggggtaccaaaaattgcacatgtgcacatcttggtatttctaatacctatacatacacaaacttcatgatgaatcttgactatctacacaataaggtgccacatttcatgccttttttttcaagttcttgctacctaaagccgcatgcaaattcaagcatattttcctttgctgactaaaattgtattcaaattaaaaggtatacattntttggtaatgtattntctttacataacatgcaacatatttatgtatatatgnttttgtgagaaatttttantacaaaaattatatgta

SEQ ID NO: 85052 - DNA, 421 bp, Glycine max
tacgcacatcgttcacgtgtatgatatccactccacaatgtttgaagtagaggataacttcaaccttataacgcaacgtggcggacaaaagtgggcagttaacttgaatggtcatcattgtcaatgcggaaggtattctacgcttcactgtccatgttcacacattattgcagcttgtggttacgtgagcatgaactactaccaatatatagatgttgtttatacaaacaagcacatcttaaaagcttactccgcacaatggtggcctcttgggaatgaagcggctattcctccttctgatgacgcatggacacttatccctgacccaactacatttcgtgcgaaaggtcggccaaaatcaacaaggataagaaattatatggattgggtcgaaccatctgagcaccgacaaaaatgtagt

SEQ ID NO: 85053 - DNA, 373 bp, Glycine max
  unsure (1)..(373): unsure at all n locations
atccttagagtcacctgccgcatgcaagctnttcgattcattctatgtacacgtggtggttcttattgtgtttcgtgccattttattctcgatatgcttactgtttatacccactggtgacgtgcttaagccattgtacttaagtcatttctcgcttaacttaaaaataaaataaatttccaccgaacgtgtgaatgagattatccattaacttcaggtaagataaattccgaccgttcggtcgtgccgtgaccacgttggaaatcaaanagagggtaagaaataatataataatcaagaaaacatctttttagtagaatagagcggaanatcaatcggacgttntctctttgggatntctcattcttaatcg

SEQ ID NO: 85054 - DNA, 418 bp, Glycine max
  unsure (1)..(418): unsure at all n locations
ttccgctccggagtacgacagtcaccgctttatgagtgctatacaccagcagcgcttcgaagccatcaagggatggtcgtttctccgggagcgacgcgtccagctcanggacgacgagtatactgatttccaggaggaaatagggcgccggcggtgggcaccactggttactcccatggccaagtttgatccagaaatagtccttgagttttacgccaatgcttggccaacagaggaaggcgtgcgtgacatgagatcctgtgttaggggtcagtggatcccgttcgatgccgaggctatcagccagctcctgggatatccgatggtattggaagagggccaggaatgcgagtatggccagaggaggaaccagtctgatgggttcgatgaggaggccatcgcccagctgctatgtata

SEQ ID NO: 85055 - DNA, 270 bp, Glycine max
  unsure (1)..(270): unsure at all n locations
agcttctntgagaaaacttccttgagaagctagatcttttcacttacacccctctgtcgtaacctacccttcggcgggaggccgacgcgtgactcgcgggatgcgtgttccacgaaaggaatacgcgcagagtcgccaccaacgtttatttgatgaaaacgtcgganaaaccggagaagacgcgatctacgaacttttaagtgaaaggttcgggagttgtatttacgcacggngaaggtattatcaccccacacgtccgtcccaagggac

SEQ ID NO: 85056 - DNA, 482 bp, Glycine max
  unsure (1)..(482): unsure at all n locations
ntntagtcaagtggctntcaaaacaataatggccttcatcatatccacatttatgaatttcattctaaaattcagagattgatacaaaaatcattgctttatgctagtcattcacactctcaacaattaagttcactctctcaccaggttatggttcaagcttttctttctcaatcaatcagcccactgactaacatttctaattgtgatcctactttattggtctttctcatctacatacatgctcattcaaaactcatgatttcaacacatgcttcacccattcatgcaatcaattcacaacaccaatttcacaaaaaaaatagttatgtttgcactgcatactcagataatcaagtcaaactgttcagtatgcttcaagacatgcatactactatccacaatcaaaagtaaaccaatatcacaacanaaagtgtactaaagacataagtataataattataataattataatatttata

SEQ ID NO: 85057 - DNA, 248 bp, Glycine max
  unsure (1)..(248): unsure at all n locations
agcttagccctagaggggatggaccttctcatgtcttgtatatgatctataacaattcctatagggtggacctcccagaagagtatggagtcagtaccacttttaatatttctgatttaattccttttgcaggtggaactgatattaacgaggaggaaccgatnagattgatctcatatcctcttcaaggaggagaggatgatgcaatcctccctatgaagggaccagttactatagccatgagcaag

SEQ ID NO: 85058 - DNA, 488 bp, Glycine max
  unsure (1)..(488): unsure at all n locations
cttgatgaatgaggtattgagaccctgcgtgagaagaattgttctagttntttcttacgacatattaatatacagtaaaaatgatgaggatcatggtagacaagtaagaccagtcttatccttattaaaagggcatcaactgttttccaaaaagaagaaatgaagttttggccaaggataattggaatatttggaccacataatttcaggtcaaggagtagcagctgatcccaagaagctggaagtgatgtttgattggcctaccccaaaagatatggctctgaggggattcttatgacttacacgatattatcaacagtttgttagggactatgggaagatggctagaccactcaatcaactattaacaaaagatggtttaattggagggaggaggcacaactatctatggaaacactaagaaaaaactatggctgaaatccccatcttcagtgcctgatttcagtcanaacttctgcatagagact

SEQ ID NO: 85059 - DNA, 277 bp, Glycine max
  unsure (1)..(277): unsure at all n locations
attgagctggcatatatgtactaaataaattcattaaggcaacaaaatggaacgggccaccaaaccacacacatgagctggtggaccacaccctaagtaaagagtggggcctggtatagctacagatgcttgagtcattatgtgggtatgcttcctaagaaactatgntntctttatatgagatatataatataccttcctttcaaccaatgaaatcatgtataaaatcaaactcttgtttgtaacatagctacttataagttaaataactattaat

SEQ ID NO: 85060 - DNA, 308 bp, Glycine max
  unsure (1)..(308): unsure at all n locations
ataagncgttctaaaggcttgaaatcaaacaattcagacaattatgggtggtcatgtgtgtatatatgtatatagctagaaagatacatgcatgatatcattcttgcatgtttggtattttatttaaaatccctttttataaggtaaagacttatgacaattaagttgataataattagccacgagcactcaaacattaattattaataataaaatatattttaaaatgttttaaattcctaattaagtgtttattatacgtacccaagtgtgcatgcttgaaccatgatgcaatgaagcaagtgtat

SEQ ID NO: 85061 - DNA, 471 bp, Glycine max
  unsure (1)..(471): unsure at all n locations
agctngtcaataataattaaagctagttatgatgtgttctgcacgagaactangtccctaacataaagggcatgtgtgtnngtgagttatgaattcttcctaaagaggctggcctggattgaatctnctttctataggaagatagcttcattatgagtnttggcccataatctgatagttcccaataagagaaatttggactagcttcaggatcatccaacanaatatctntagtctgaaaggtcacgttgttaggtttggacgaccatgtgtctcnatccaccttagatttgatgaataacaataagaataaattattgatattctaatgagtctttgagaagtggaccatgatactatgttaaaggaatntaaaacattaaatatcgtccacaacaatagagtatgctttattttaacctagcgcccaacatgatatattcagtgagcattcactcttatgcataacat

SEQ ID NO: 85062 - DNA, 474 bp, Glycine max
  unsure (1)..(474): unsure at all n locations
actaagcttttattggagagcctctttatcgtctttcgactattgacaatctgngggagaggaatgtgcttgagcatgacagcaattcgctatgtccnctttgtctagatcaccttgaatttgtccaccatattttcatttcttgcaaggtgagttatctagttctgttggagtgcttttcttgaaagtctctaaatttacctctcgtgttgccaacctcggtgaaagctcttctatggctacattcaggtttggggaattctaattcagaaagagacctatggcatatcttacgtgtgcagtggtgttntgctcatggaaattaaggaatatagtcatcttcaaacaacaatcaatggataaaagcaagttgattgatgctattaaattcatgagctggacttgattatgaaatctccactctggtgttcaattttctttcgtgcagtggtcttcanatacaacatcttgtct

SEQ ID NO: 85063 - DNA, 482 bp, Glycine max
  unsure (1)..(482): unsure at all n locations
tatcaaatatgcatcaattctgccgtaccaagtaccttgggtctgctntaagccatacaaggtctttntcagtcgatagactntctcctcctgtccatgaactacaaatccttcaggctgctctacaaaaatttcttcttccaagtgcccattcaaaaaggccgatttaacatccatgtgatgtataatccaacctttntgtgcagcaagagctaacaacagccttatggcatccaacctagcaaccgaagaaaaagtttctgagaagtctaccccgaacatctacacatatcccttcacgacaagcctcgccttatgtttgtttatagaaccatcagcattaagcttggttctataagcccatttcactccaatgacatttttatctttaggtttctcgtgagctcccactgtttgatgttntcaatcatatcaagctcctccttcattgcacttacccacttcaaatcangtgcagcttc

SEQ ID NO: 85064 - DNA, 500 bp, Glycine max
  unsure (1)..(500): unsure at all n locations
gctgcaccattagaagagaaagaacatgtgattagtagtatgtctgataatgttagtcagcttgtcagatggattgtgaaggaatccattaaccgtatcccgatgagagtatgatccttaaattgtgagagaaatgactatcattaagtactgacttttgcatgaatctctgaattatggactgaatgcatgaaattgaggatgatgaaggccatgtttgattgtgatagccacttagccaaaaagttgaccacgtgcttgaatgatttatcgcttacacccagtcttgagctgaatgattgattgattgattgaaccttgagcctatacagttttatttcccgctaccttgtcttaggttgtaggagagcattatccataaaaaagcttggttcaagacaaacttgtcccaaatttggnggagacactgggtaagaaataaaatggtcataatagagcagcatatacacactggtttctatatatatatatatatatat

SEQ ID NO: 85065 - DNA, 384 bp, Glycine max
  unsure (1)..(384): unsure at all n locations
atctctgagtcacctgcngcatgcaagcttcttatccaaagcaattctgggtggtgaagctccttctttcttggcttattccctagtggatggagcctcctctctccttntctcctttgccttccgctgcatctccatggtgtaaaatcaccattgaagaacctcattgaagctcanagatccagcctccatagaagctccacaagcaagcttccatcacaccctttgtgcatgtccttcatgttntacatgcctcatgacacctaaacacacttagtagagaatcttgaatttgatcttggattagtgggctgaaccatagctgaaattcactaatcataattagtgaaatgttggctccacanatttcaagtcaaattcaag

SEQ ID NO: 85066 - DNA, 496 bp, Glycine max
  unsure (1)..(496): unsure at all n locations
ctcagctttccctatttgctataatagggggagaagtgaagaagattatggttcagcctcttatgcccttctctctctttcgaatttgctgaggaagagtattttcgtgaagaagatccaagcctaggcgcttctgtcacgttttcgtaacgtttccgtgagtaattacgcgaagattctcgaccgttcttcaaagattcatcgctcgttcttcgttctcttcagtcttcaacgggtaagtacctcagaccaagcttttcaattcactctatgtacccgtggcggtccacattttgtttcatgtatttgtattctcgttttcatttactttttatacccccttttgacgtgcttaagtcatttatttaagtcatttctcgcttaatctaaaaataaaataaatttccaccgatcgtttgaattgtatcatccgttaattttggtaanatgaattccgaccgttcggtcgtgccgtaaccacgttggaaatcaaaaa

SEQ ID NO: 85067 - DNA, 479 bp, Glycine max
  unsure (1)..(479): unsure at all n locations
ctcagcttatatgctaactggccttgttgttgggtgcaaagnctataatatgatcttgttcttggntttctatggctgggtcgctattgaaaagctgcatgaataattctatacatgattttcatgtaagacaagctcctaagatcattcctgtttgttggcatcctccccggacagaatggataaaatgtaattcgagcgatgtagctcatggaactcctgcgcctacaggttttggttccttgctctatgatagtaatggtgtccttttangggtatttgttaagtcaagagatatttatatcttatagaccaatgaagatttgaattatttttattagataaaataaatataaacgttaaaagttacttctaatactatatcaaatcatatttcttgaatctgcaaaacaaatgtatatcatgatctaatacaactactaaaaatttggtattttctgctggaaattcttgtgatt

SEQ ID NO: 85068 - DNA, 298 bp, Glycine max
  unsure (1)..(298): unsure at all n locations
caacatattataaaccagaacttaatccacagatccctcttggtaaactaagtttcaattctggttcatttcaagtttaaggcaacaatacatttcctaatgctaaagtcacctaactaggcacacaaacggntgatcagaccaagagcatacattatttatgcactaaaagaagcatttgacacaagagacccantcaattagatataaaacaatacattagttgttcttagaaatcccaacaagagtgttagccagccattcagaagaaaccctacaataatgagatacaaaacct

SEQ ID NO: 85069 - DNA, 485 bp, Glycine max
  unsure (1)..(485): unsure at all n locations
ctcagcttttatccaggctcatcttggtgggaagctccttcttccatggcttatgccttattggatggcacctcctctcacctctnttcctttgtcttccgctgcatctccatggtggaaaatcaccattaaaggatcccattgaagctcatagattcagcctccatagaagccccacaagcaagtttccatcacaagtgatttggatcaatggaaaaaataagaaaaatcatacacgttggcaggaaaatcagtgtccagaataaaaaagtgaaagacaagtgtgcttgttgtttggctcanaatttgttttataattggtgnctatttnataccaatnttaagtacgaaaaatnaattgaaaagcagtgtgaccacaagtgccaaaactaaaggctctctgagcccttctttttttagctctctactctacttagagccattctacattctctttgagncgcggcctgttttatgtgctttcg

SEQ ID NO: 85070 - DNA, 230 bp, Glycine max
  unsure (1)..(230): unsure at all n locations
tctacgtgggagtacgtgagctcagttggaggtgggctacangggatggtgggtttatgcgcgcattgtggatgtggaanaacttggtgtgcaccatcgcccgaccgccacctagtaccacatgtgatgggtaccccataatcctacaagcttgagatgaagaagtgttgaaaggtgatacttcctgcttttattggtgaccacagagtggtacctggagatatgtcgcg

SEQ ID NO: 85071 - DNA, 352 bp, Glycine max
actcaccttggaaacggatgcttacaccttctcgctcaaccaatctgttgtcttaacgagcatccactacgtgcaacacttctaggctaagcgggaggaagaatccacaagaagatgagctatacaggttcgctaagcgcaccgcttcatctctctaagtgcaccacttcagttcatccgctaagcgagaaaggtgcgctaagccaaaaatcactaacgtgcgctaagcggtccatacttgcgctaagcgcacgagcacgaacaacgccacctatttaagcctgaaatcagatattgtgaagagagtttggactgggattcagagcttttcatgtctagggcttctagagta

SEQ ID NO: 85072 - DNA, 386 bp, Glycine max
  unsure (1)..(386): unsure at all n locations
agcttcgcaagataggcttctcgtcaagctcatttatctctcagtctctccatagccaacactaagagataattctctatanagctcaccccccatcttcgaattcgagatgtcaactttaaataggcaatcctattggctgtcgcgtgcttagcacgagatggctcgcttagcgcacataagtggttnttggcttancgcccatcctctcnctcatcctagacgatgttagccgtgcgcctatcgagctgacactctgtcagcgcttctatactactcatccttactctatagtgctttatgcactcagccacatggagacgctctcatctaatagctagctcaacacctagatcggtttcgctagaaatgaatcttcactcacc

SEQ ID NO: 85073 - DNA, 465 bp, Glycine max
  unsure (1)..(465): unsure at all n locations
agcttcaatgctggaaacatgcttatggctaggaatccaaaaattggttntaggattagaaaagcatgacaatagggactttttgtaaggatttgagctgccccatgattggcactttgcacctaagtaacgtgggagatgcttttcaatggtgtgtagatatacgtgaatatatggcataaagatatgttgcaaagtgtgtgaatatatggcataaaaataccttgcaaagtgaatgaatggtaaataatgcatttcaagatatgtatatttgtggataggtagcataagaagctnttcaaaaaatgtacccatgccagaatggcgcaagaatgcttcccaaatgaatgtatgatgtggaattgcccctcaagagtangtagatgacatgaaagttccttttcaaatgcaagtgtgtgcgtgatgtgagattggctcttcaatgtgcatatatgtataaataaa

SEQ ID NO: 85074 - DNA, 381 bp, Glycine max
  unsure (1)..(381): unsure at all n locations
atcttaagtcacctgggctgcagcttagagaacctgaaactaagagtttctttcttatatattngaagaagcttcgccaagtatccccattgaaaaacctntattcaaacctttcaaagttagtgagaaagctaaacgataaattanggaacttatgaaaactaaatccttaattgagggcgtaggtgataaccatagtgaattacttaacaagaattggagtctacttaaggtcattccagatactccccaagcctcggaaaatactttcagaatggtaacaagaagtacctccanattgattaatggtattaatgaagatagtgaccaanactcagataacacaactganatatgatcagtgtcagaanagaatataaa

SEQ ID NO: 85075 - DNA, 367 bp, Glycine max
  unsure (1)..(367): unsure at all n locations
ngaagtgaggaagtgtggaagggtgagacttcctactnttattcgttgaccacagagtggtacctggagatatgtcgcggnggtcagtagaccttgtggacgtcaggtggggtgctattgcccaaaaccaagcttgaccaatcccgacccaacccaggcatagtcagtcagtgagaacctgtgatgtaactaaacaggcgagctcctagcagtcaacagataaaagaacaaagaccacaaagcaaggaggcttgtgtggtggctggccagctgtgaactttgagtgttacatgggatatggcctctggtaatcgattaccaagggtgagtaatcgattacaaggcttaaaagtgaagacaggaaact

SEQ ID NO: 85076 - DNA, 338 bp, Glycine max
  unsure (1)..(338): unsure at all n locations
atgactntctctntaattggtgctctacccttatacaaaagtgaactagctcatataggtctctatatggaaggagttcaaccatgtctcttacttccatatttaaaccacttangaacctagcaatgcttgttctttcctttcccctatgtctagctctcaaaaagagtagttccattttgtgtctatattcttccacactcatactcctttatctaagcctttggagctngtccataagctccctntcatagtaagaagagaatgtgcctttttctaagggcactcttaaaaatatccaatactatatnggaggaatccccatgaatcttctttcc

SEQ ID NO: 85077 - DNA, 492 bp, Glycine max
  unsure (1)..(492): unsure at all n locations
ccttgactccttttccctttgctaattccaaggcttgcaacatatcattctttntatatcatctggtcagctngaacaacattgatctttcccttgttgcttggaaacttcatcgttagacaaggtgttgagataatggcacctagctcattaagcaaaaggtgtcaaatgagtatgttgtatgacgtgtgtgcatctactangagatacttgatcatgatggacttcgaccctccgaaagtagtcaacagatggacatactctattgtgtcaattgtctctcctacaaaacctatgagttattcgagaatggctntatttggccctctgatatgcccaactgttngaaggtcgaccaatataggacatcaatcgagcttccattatgagtaagactttgtaaaataagaaaatttccacctctatcttgataaccatgggatcattatggcatcattcgatgtccccaaagtcctcatctgtgaaactgat

SEQ ID NO: 85078 - DNA, 281 bp, Glycine max
  unsure (1)..(281): unsure at all n locations
gacactacacaanacncaagctncaacattcaatntggagggtctcgatatattacgggactctatcggacatcccagaaacaagntatcgtcatttggatttgctcagagcatcaacattcaatatcgagcgtgtcgatatattacgggactcaatcggacatccgagtaataagatattgtcggttgaatttgctcacaacttcacaattcaatttcaagcgtgtcgatataatacaagactcaagcacacaaccgagcataaaggtatggacgtgtga

SEQ ID NO: 85079 - DNA, 275 bp, Glycine max
  unsure (1)..(275): unsure at all n locations
ttccctgntgatctaactccagatctcttcacctctgctgtggaagtggctgcacaagccattcatgatttttctaaaccttagatcaacatgatgaaagcagctgggtgggaccttgatgctgctgccaactcaatcgaacctgatgttgttacgcaaagagagctcataagaaaatatgcattgagtcttacatatgccanagaatgttcagtggctttgagcaggaaaacttctctgtcanattagacaatactactgcaactaaagagagc

SEQ ID NO: 85080 - DNA, 448 bp, Glycine max
tttttactattctcttgtggatctggctatacttggaatgaggttaaactttggtgcaatcaaaccccaaacccttaaccatgtgagtatttcttgagcaataatcctacttatcaatacgaacccgtcaagcaaaaatctgatttcctctaactttcattgcaacttgctcaagagagagcacttcaaggccatgaaaacactctctcacttggctctaagtgccgaaacccacgtgaaagagttgcttgggctgattgaggtgagctttatgagcaaactattcgcaaactcaaccaaaccctaaagcctaacaccaagctctcgcaagttgatgcccaaacatggctcagcacagctctcactaaccttgagacatgcaaagccgggttctatgagcttggtgttcaagactacgttctctctttgatgtccaacaatggtacta

SEQ ID NO: 85081 - DNA, 383 bp, Glycine max
tgcaagcttggatgatctagtaaacatgggcatcatcctcatgttacattccatagggactccccgaattagcacgagacttgcaggagcaagggagcttggagtcaatggaaaggcagcttctgacatggataactgctcagagtatagtgataagcattcagaaacctggtctcatcaatcaatggatgatttcaggaacaagtccagttcccttcggttgaagttaaccagagatcatatcagtcaaaatgtcaatgaagacattgacctcttaagaattggagatgcggattcagaggagagattaagtgacatatctgatggtggtctttcaatgggaaccgacactgaagggtcaatcagcagtattgtggagtaca

SEQ ID NO: 85082 - DNA, 389 bp, Glycine max
  unsure (1)..(389): unsure at all n locations
cgtcatgactgtacgantatctaagaatgcccttaaggcccttatgactagttcatgatatctgctgtggaaatagtataagatgaatgaattaatgtgtacaatggcaggatatgtatgcattctcttctccttttcttaggatttttctccctcccttccgaatcgtaaatgtgtgccataataagggtaccgctttacagagttgtcctagcagtttgtgatgttttaagttctatagttaccaatagtgctcatcaggtctttgattgtatcttttcttttctctttcttatgcgtttatatacatattcttttattgtatcctttaactgatatatgatataatacacatgagcatttcttttattgaatataatgtgtacatc

SEQ ID NO: 85083 - DNA, 314 bp, Glycine max
  unsure (1)..(314): unsure at all n locations
tatctagactctcgcagattataacggaagctcgtagcaaattcaaacgacaaataactttaactcggatgtctgattgagtcctgtgatatatctagacactcgaaattgaaaacagaagctcanattcaaatgacaaaaactttntactcggatgtccgattgagtcccgtaatatatcgagatgctccaaattgaanatagttggtcctagcaaattcaaaccataantaacttttactcggatatccgatggagtcccgtactatatcgagaacgctcgaaatgaaacagatgctctgagcaaattcaaa

SEQ ID NO: 85084 - DNA, 434 bp, Glycine max
tatattacaggacactatcggacatgcgagtaagaagttatagtcatttgaatttgctcagagcttatattttcaatttcgagcgtcacgatatattacaagactcaatctgacattcgagttaaacgttattgctgtatgaattatctcaaagcttatgttctcaatttcaagcgtcttgatatattacaggactcaaccggacattcgacttagaagttaatgtcgcttgaatctgctacgagcctcccgtttcattacgagcgtctagatatattacggtactcaatcatacatgcgtgtaaaaagttattgtcgttagaatatgctcagagcttacgtcttcaataacagcgactgatatagtacggcccacttggcatacgacttaaaggatagtggttgatttgtcaagctatgtttaattagagcgt

SEQ ID NO: 85085 - DNA, 463 bp, Glycine max
  unsure (1)..(463): unsure at all n locations
gctatgctganatagttacgtagacctgctcaacctgagcagtataatcaaccacattatagcaattatgacctttccagcaccagatacaaccctggatggaggaatcaccctaacctcagatggtccagccctaagcaacaacaacaacagcctgctccttacttacaaaatgctggtggcccaagtagaccatacattcctccaccaattcaacaacaacaacaaccccagaaacaaccaacagttgaggaccctccacaaccttccctcgaagaacttgtgaggctgatgactatgcacaacatgcagtttcatcaagagaccagagcctgcattcagagcttaaccgatcatatgggacaactggctacccaattgaatcaacaacagtcccagaattctgacaagctgccttctcatagctggacaagatcccaaaaatgtcagtgccatctcattg

SEQ ID NO: 85086 - DNA, 482 bp, Glycine max
  unsure (1)..(482): unsure at all n locations
tctgtctactgactaacaattctaaatgcaagttcacattgttgttctttctttggtcgacatgcacactgttagtgcttagctntactgagctntaaaagattggctaaaattttgttaaaacataagcacttagacattgaaggaaagctggagttgctgcacatgatgtccaacgttatgtcaaggaatcagattgggctgcacaatgcacaaggcaagataaaatgtcaaatgaagaattgaagctgcaggatccacgatgtcggatacgatgtccaggacatcttgcccgaaaatactggacacataaatctgttatatctttaacagattaatgtgcagttagcaacagatttggcgatctatctttatgaacgaattaaaagataattaaagttcgaattacaaacttgaatagttcgttcagggattaaagattaaagataaaaaactaaaagatcaagctntatcttttagat

SEQ ID NO: 85087 - DNA, 472 bp, Glycine max
  unsure (1)..(472): unsure at all n locations
ctcagctgaggcaactggtgcgtggtcaactggaacccaactggtcttgaatcagaaatctgtacctgtcgcaagggtttgtggtttgtgctcctctgctgaccaccatacagacctttgcccttccatgcagcaacctggagcaattgagcagcctgaagcttatgctgcaaatatttacaatagacctcctcaacctcagcagcaaaatcaaccacagcagagcaattatgacctttccagcaacagatacaaccctggatggaggaatcaccctaacctcagatggtccagccctcagcaacaacaacagcagcctggtccttccttccaaaatgctgctggcccaagcagaccatacattcctccaccaatccaacaacaacaacaaccccagaaacagccaacagttgaggccccttcacaaccttccctcgaagaactngtgaggcanatgactatgcagaacatg

SEQ ID NO: 85088 - DNA, 483 bp, Glycine max
  unsure (1)..(483): unsure at all n locations
ctcagctttacttatgggagggcgggcttccttcactntcttgtctcaacgcgagctctaaccactgttcttncttcccacgatgcttcttttcatgtccgcccgactgggcttatagcctaagccatacttcccacgatttccttgggtttttatcaggctagttatgtcgccgntgtctttgcctaaacccatcccgggttcataaccgttccccaacataactcgggccatcattaccgctgcatcggacagacaaggcttgccaaagagggagtccacggaggaaatgctgaccacctcaaaagactggaaagcagtttctaacgattcttctgtggcttccacataaggcatggaggatgggcagcttaccaagatatcttcctcgcctgacacgatgaccaagtgcccctncactacgaatttcagcttttggtggagtgtagaaggcacaactcccactgagtggatncacgggcg

SEQ ID NO: 85089 - DNA, 430 bp, Glycine max
  unsure (1)..(430): unsure at all n locations
caagtgtctatagctaagaagaatctgctntaggaggacattctgatattttcactanaccatctatgttatagtgaacttgcatattagaatttcatattggtagcatttactttctcttacgtaacattntgtaatgcatatacaatatgatattctagataccgatagagctaggaagaaggtcatgatatcaatgggaacaatgtggaggaaaattaagacatatttgaccacaaaatggacactcgctgaagacaagaatgaagatgagactccttgtgataagtatggtattgatccanagaattgagaagaagtntctactagccgaaaagccgcttctaacagagtagtgtgcgtcgtgctttgaattgagatctaattattaagatatagtttgagtgacacttatatcacatgatctgta

SEQ ID NO: 85090 - DNA, 479 bp, Glycine max
  unsure (1)..(479): unsure at all n locations
tgacaacaaggaactacattagtgttngtactaaatgaagtttctgactaaagcncactaatatatacagggactactcagaaggaaatgatgagcctagattaggcccatctaatctacctaattaaactaattacacaaggcaaagcccatatttgtagcccaattgttcaagtacaaaggttctaactgccaagcttatttctgacaaaattgaagctctttttcttagatttctaaggacttctcatatgctccatttggtgttctgtagtgtcctataggccctgcacaacgcagataggtcaagtcagcacanaaactcaaaaataagcaataattatcaattaagctcaatcatgtgcctaagatcaaaactgagttaaagtgagaaaatanggtcaaagagatgtcaattgagctaataagaataacagaatactaaaccacaatgctcatcaaatccncccacttatctt

SEQ ID NO: 85091 - DNA, 277 bp, Glycine max
  unsure (1)..(277): unsure at all n locations
ccggagtatgacagtcaccgctttatgagcgctgtacaccagcagcgcttcgaggccatcaagggatggtcgtttctccgggagcgacgcgtccagctcatggacgacgagtatgctgatttccaggaggagatagggcgtcggcggtggacatcattggttaaggggtcagtggatcccattntatgccgacgctatcggccagctcctgtgatatccgttagtgctagaagagggccaggagtacgagtatggccagaggaggaaccggtctgat

SEQ ID NO: 85092 - DNA, 465 bp, Glycine max
  unsure (1)..(465): unsure at all n locations
tatgctgcanacatctacaacagaccttctaacctcagtatctttatcagccacaatagaacaattatgacctctccagcaacaggtacaatcccgggtggaggaatcatcccaaccttagatggtcgaatccttcacaacagcagcagcagcaacagccttattttcaaaatgctgctggcccaagcagaccatacgttcctccaccaatccagcaacaacaacagcaacagccccaaaaacaacaaacagttgagactcctccgcaaccttcccttgaagaacttgtgaggcaaatgactatgcaaaacatgcagtttcaacaagagaccaaagcctctattcagagctaaactaatcaaatgggacaattggctacacagttaaatcaacaacagtcccagaattctgacagattaccttctcaatctgtctagaatcccanaaatgtgagtgtcattgcat

SEQ ID NO: 85093 - DNA, 420 bp, Glycine max
  unsure (1)..(420): unsure at all n locations
tctgagtcacctgacgcatgcaagctngcagaggtcggtggcagactcaagaataatggtatgtgtattggctntgtctcatacctccattacacttcatttgtacctgagcttgcttccctattattattaattntgntcatgtttatgtgtgaatagaatcttcccctcgaggaccaaaagataaaaaaattgtaaatataagaacctttntatagggatagacaccaaaatctaagaatacatgataattatctatcatccaaacttaactcangataaaaaaaagagcacatntataatttatagggatagagatgatatatnntaccgtantttttttcatgctngacttaactctcaacatttattggcaatgataagaaaacttgacatagaattgatggagtggcctatggt

SEQ ID NO: 85094 - DNA, 441 bp, Glycine max
  unsure (1)..(441): unsure at all n locations
tcccaatcatcattngaaagagaatctgtatgagtgaggtgtttctgaagaagatgggaagngacgttgtggcagaggactccataccagtggcaacagttggtattattatgattccaagaccaaagcctattggaaggatctatgagattattcttaaacttcaaaagtgtctcacgctcactngggatgcacacactctctctgcatggtaagctcaacaaccaaagctggacaaagacaagaatataaataatggaggaggaattcatgatcacacaagaatatatagaaaacaagtgtagttgttggttccgcatataaatcatcaaacttctattatttatactgctgccctgcctgtttttttcttcactttcattattntttaccttctttattattgtgccaaatactataatattctctccattctttttt

SEQ ID NO: 85095 - DNA, 381 bp, Glycine max
  unsure (1)..(381): unsure at all n locations
agcttatgttagataaannanacgatttatattacctattctattatgtataaccaanaaatattatcccgctaanattaatactttatttatttgntaattacattcaatttatttgcatcaacgaattttacatgcatgctattcacgaatatgatgctttgttcattggaattctcaacatatattttacattagaatcgatggaatttaattcagttaattgaacaagaaaatataaatatttataaattttaatatctggtnttattcttacatgtanaaaanatatttcataggatattacattgattcanatgacaagatttaatagcatttgtagcctctaatcntgttctggttctggtacaatataatatt

SEQ ID NO: 85096 - DNA, 416 bp, Glycine max
  unsure (1)..(416): unsure at all n locations
ntataagcgcgggtctgggagacaaattgtattgtgttcgcaatatgcgaagatgatgttccgagtacatngaatttggtacgaccatgccctcctgatatccagttgggaaattggcgagtggaggaacgccccggcatttacgcgacgagcataatgtaaacctttacggttntaaaagctctatagttgggcctaggctttagagtttttccttttgttaaggctttgtgtcttttgttgttgattttataatacaaggatctatcttcatctgttcctacgtctctacccattctcattcattggcatgtttacttctttntctgaaacgacagatccgatgacgagtcccccgaaggtactaatacctgngacccgcctatcgacttcgagccagaaatgaatcacacgga

SEQ ID NO: 85097 - DNA, 451 bp, Glycine max
  unsure (1)..(451): unsure at all n locations
agtcacctgacgcatgcagcttatcctctaagtagaaatgggtattctatatntatgtctgtttgtcacattataaatacagaataaccattgtttgatagtagtctnttttgtagggctgactntnggctctttcttttgaaaaggattcgggtaccccttgtacccgtgttagtataaatatgtctntgctgataaaaaaaacaagtttaactntgcaagatggtaatacaccanatgcagaagccaaattntggccataatatgttagtatagaactatagaataaaaaaagggtctcacagaagaagtagctctgggaggcctaggaacactgctagctcgtgcacccatgccaaagaaggattcaagatcattntcattctttnggtggttcatccttgcagcagctgctgccctttctcgggcctcagcagcagccctttctaca

SEQ ID NO: 85098 - DNA, 427 bp, Glycine max
  unsure (1)..(427): unsure at all n locations
ggcatgcacaaagtgcctgtgagttcattatatcgtgggtcttaatggccagagaagtggccggcaagactgaccaacacaccttactggttgacaaattctcaagttggagtttacggaaagcctgcccctgaagattatactgctgattatgaacactggaaacgtatagtgtccaaatcttatcttaatgggataggaattaattggtctaatgtgcggaatgtcatggatatgagatcagtctatggagggtgagtgaaatttgttgtttcccatgttactctgaattatattaaccggccattntgacatacatcttgttttttgggttacacgcttgctgctgccttgaacgatttgaatanttgggtnatgaatgtggtttcagtaaattccgcggacacacttcctattatttatgagc

SEQ ID NO: 85099 - DNA, 194 bp, Glycine max
tcgtgaccacagagtggacctggagatatgtcgcggcggtcacgagacctttgtgatgtcaagtggggtgctatttgccaaaaccaagcttgaccaatcccgacccaacccgggcatagtcagtcagtgagaacctgtgatgtacctaaacaggcgagctcctggcagtcaacagataaaaggaacaaagacca

SEQ ID NO: 85100 - DNA, 481 bp, Glycine max
  unsure (1)..(481): unsure at all n locations
nganatgaggaagtgtagaagggtgaaactttttgcttttattctgtgaccacagagtggtacctggagatatgtcgccggggtcaggagaccttggtgacgtcangtggggtgctattgcccanaagcaagcttgaccaatcccgacccaacccgggcatagtcagtcagtgagaacctgtgatgtacctaaacaggcgagctcctggccgtcaatagataaaagaataaagaccacatagcaaggaggcttgtgtggtggctggccagctgcgaactttgagtgttatatgggatatggcctctggtaatcgattaccaaggatgggtaatcgattacaaggcttaaaagtgaagacaggaagctaagatggcctctggtaatcgattaccaaggggtgtaatcgattaccatgcttaaaaacgagatcaggaagctaagagggcttctggtaatcgattaccaacgtgtgtaatcgat

SEQ ID NO: 85101 - DNA, 308 bp, Glycine max
  unsure (1)..(308): unsure at all n locations
catcgataatggntccaggttaaacgtgatgcctaagagcactttggagaaattaccattctatngcctccacttaaagccgagttcaatggtggttcgtgccttctacggcacccgccgagaggttaggggagagatagatctcccagtacagataggccctcacacatgccaagttaccttccatataatggacattaatcccccctacangctgtctgttgggcgtccgtggatccactcaatgagaagtgntccctctacactccaccacaagttgatattcatagtggaagggcatctggtca

SEQ ID NO: 85102 - DNA, 332 bp, Glycine max
  unsure (1)..(332): unsure at all n locations
gctcacttgcaagtccaacactggtagaattctgtactcaattatacttcatagccaacaacgtcccacgtgtatggacatgtaacagctgaagaaaatatggaagttattctcaaaaattgcataacattaacaacaagttgaagagcacgtgactcccttggtctgaagccttacacgaagtagagggaagtttcttagaacacaccactaagaaaatgctctancttggggtgaacttgtaatttcatgatgaggttccaatttctagctaccctttagtggttattttggattatattcttcatgacattgtggggacttgatttgat

SEQ ID NO: 85103 - DNA, 299 bp, Glycine max
acctaatgcgaagaaaatgagttgcctgccacctatcttgatgagtaatatattgatggggtcggtcgtgcaccctctcacccaattctatgcgatgtgtccaatatataacacatgcctataatgttgtgtcatgcacccactatcacatcttgaatatgcactttgtattgactcatgcttgtctataatcaaacacataccatgtagtgggatgacatgccttttatactttggaggaagaacaaccatgctcctgttgattcactcttgaaaacagcacaggctattggaaggat

SEQ ID NO: 85104 - DNA, 471 bp, Glycine max
  unsure (1)..(471): unsure at all n locations
gcttgactgaggctgggatgctgctgtctctgaaaattttttcgnatctatttccgccgccaagccacaaaacaaactgagtcctttccttgttggttctgaaaagcaaaaatggaaacagagcatcatcaccagaccttcaacgctggtggtattattggaggcccttacgtcaaaggtatgaccgacgatcaaatggaactgctcaagcaacagatctctgtctatgccaacatctgtcaacagctccgtgagatgcacaangccgtaactacccaacaagacctcgcaggttaatttccattgtttctcttataacccaacattataagggtctgattatgacaataaacataactcattctatgattcaactgactggacaaattaacaacatatacttttcttcatttaaaatagcatcacatgacaaggtaatctgccatacattccagaaatattacatatatc

SEQ ID NO: 85105 - DNA, 254 bp, Glycine max
  unsure (1)..(254): unsure at all n locations
tagcacggctactgggcatatactactaataatgcggctttgcgttcancgaaccgcggcgctgatatgatcgcaccgaccctgcgcgccggcgnnacatttatgttgaactatatcaattctgcattatccgttatatccttatcggcgagcacaagcgtataggaccatactgctaaaaatacgccccctgcacatccagactgtgattattagcattgcgactgagcatccaacgctgagaactgatccac

SEQ ID NO: 85106 - DNA, 357 bp, Glycine max
  unsure (1)..(357): unsure at all n locations
cttgatttgattgctcagatcggctctttgaatgaatactttctaaaaaaagggtacctcttcaacttttgaaacgatccttcttcttcttctatttcatcgtcaagcatgtaatgaatctttgccctttatcaacanagactgccttgngtcattggatgtgtgaatttctgaactcattntacaaaggtcatgcattattctgctgcctctcttcgcatccaatacctgctgtcggttagacttggaatatctgattcaggatagtctaacgaagtacacttactactgcttggataatgggaattcatttcaataattgctctttcttcatgagtcgcatttcataagatacta

SEQ ID NO: 85107 - DNA, 193 bp, Glycine max
tgaccgagaataagttacatgagaattctacttagaccttcttctatcctactatgtgctgagccgttgaatgtaagactaatcaccacatcacatcatcaacccctcagaagtggctgaaaacaactttcagtcttttaactcaagcagcttatttgtccttatttacatttccttttggttgtatgcaact

SEQ ID NO: 85108 - DNA, 489 bp, Glycine max
  unsure (1)..(489): unsure at all n locations
nntgcggattggtcttcgccagtgaaaggatcttagttgatctgtttagaagcaaattanatcatcctgcttggacgaatgagaaaactggggcaaataaagagggtgaggatgagggagaaacccatgttgtgactgccatccctgtacggccaagtttcccaccaacccaacaatgtcattactcagccaataacaaacctcctccttaccccaccacccagttatccacaaaggccatccctaaatctaccacaaagcctgtctaccgcacttccaatgacgaagaccacctttagcacaaaccaaaaaacaccaaccaaaaagtgaattntgcagcgagaaagcctgtagaattcaccccaattctagtgtcctatgctgacttgctcccatatctacttgataattcaatggtagccataaccctatccaaggttcatcaacctncatttcttcgagaatacgactcgaaacgcacgtgtgctt

SEQ ID NO: 85109 - DNA, 201 bp, Glycine max
gagcagacgagttgaaaaaacgtcacagaccgggaggaaaccaccctgccaaccagagacaagcgcacgagagaaagcccgcagccaaacccaccccaaacaccgcagacccagaacgcgaaaaaagctcagacagacccccggagggaagaagggaaagaacacagggtggccggatccaaaatcaacgcaaaaagcacc

SEQ ID NO: 85110 - DNA, 309 bp, Glycine max
tgggtaggctcactatactcactgattttaacttatataaaaattggtcatggcgacggcctttttttgaaactggttctgcctatgcaatttctcataacaatttgcttttatagaagggcttatattataaagtacattcagccctattgtgttttgcttatatataaaaataataaaaccaagctaatcggaaaaaaatcaacccagattatataccaaacaatctttgtcttttttactattgtatacaaaagatcctacaaatcatgagcactcttataatacgttaaatacactataaataaa

SEQ ID NO: 85111 - DNA, 441 bp, Glycine max
  unsure (1)..(441): unsure at all n locations
tataaaactcagcttccctctntnacaaatacctctcagccaaatagtatccatcttgggcctttttcccacaactcttgtaaatgggagagaaatgttcatctaaagcatacaagtccctaatgttatcaaatcctaaaatttgagctcctagggagcaaaacaatgtgtgtctcctagagagggcatcagctaccacattngtttttccctttttggtattgataacatatggaaattgctctacgtactctacccattttgcatgccttttgtttaacttgctttgccctctaatgaacttaagtgattgatgatcactatgaatgacaaattccttggaaacaaggtaatgttcccaagttcagagtgctcttattaaggcataaagctctntatcatatgttgggtagttaagggtggcaccatgaagttttcact

SEQ ID NO: 85112 - DNA, 456 bp, Glycine max
actaagcctttacccttatcgacgatgaaaaagctttaatggaagtatgagaatgatggccccccagaagcattaacgggaaaccaagttcatgatcgtgtaaaggacattgtaaccgtgtttggcaagtcccagaagaagacatcatctcccaacaacatgtggaagaaacgctcaatattctttgatcttccatactggtctgatctatatgtgcgtcattgtctagatgttatgcatgtggagaaaaatgtatgtgatagtttaattggtactcttcttaacattaaagggaagacaaaggatggtttgaaatgtcgtcaagacttggttgacatgggaatacgagagcagttgcatcccatatcacaaggtcgacgaacatatttacccccagcatgccacacactgtcaacagcagagaagaaaagcttttgtcaatgtctgcggaatgtc

SEQ ID NO: 85113 - DNA, 452 bp, Glycine max
  unsure (1)..(452): unsure at all n locations
ggtagaatggctagacatgatacatgtcagggcnntggtttgttcaaggtttaaaggatgccccacattatttccatgacacaaatgcaaaaatgatgaattggaaaatntatgcaaaactggtcatgcatgcacctatgcggacactcaagtgtcaaatttttatggtcatgtgatgctagggctcaggatttatttcctctattttaaatcaacccaatgtttccaaaatatgttcttttaatcaattgtgcattcattcgagtccatttcgggcgtccggngaaatttcacagcattcacccttcaggtgtagacacgtttttttctcttcaaaaatcggtcatgatcaatgaatttttttttcgaagaagagttggaaatcatctcttttcanaagcatgtcggttnttagctagacaacttattttctctttntccacccttttcct

SEQ ID NO: 85114 - DNA, 495 bp, Glycine max
  unsure (1)..(495): unsure at all n locations
taagctaatcatgtcattaattntattctntttacaggaagggttctttcacaattgattactatccgngcatacatanacgacaggataatagacactaatatgcatagagataagaccttgactcaatattaatgaagagaggtacgacaaaatatgatgaaaattacatttacgagtgcatcgactaagataatcttatttatgtattgagatccacaatgataagggtattaaagtagagtatattttaaaatatttttctcttctctgtgaaccaaacaagacaatatttactccccttttcttccattaaaatgtatttcctctcctcccatcctntataccanacagtgcataaagataatcaaataagttttctaagatatattaatctattgataatgatgataagatgttatattataacatggntaaaagaatatgtaaagcgttcggtacatctatcatatatttcaacaatttctcaaataa

SEQ ID NO: 85115 - DNA, 238 bp, Glycine max
  unsure (1)..(238): unsure at all n locations
ttgagatagcnagacatgaacagccattggatgatacccggacggtcacttataagagcatgaagaagcggtctgctcctgctcattacgtaacggactcgaaattcatacggcgagaactaacccaacgttacaatgggaaagacgagcattcgaaggaaacggatgtgctcgtgacacaagctaccattgaaaaacatgaggaggagaccatggttcgatttcttaatggtttgac

SEQ ID NO: 85116 - DNA, 330 bp, Glycine max
  unsure (1)..(330): unsure at all n locations
tggagatgcagcggaagaccaacgagaagatgtacgaggcggcaccatccactatggaataagccatggaagaaggagcttcaccaccaacatgagccttggataagaagctnggagaggatgcttcaatggaggaaaagaaagatggagagaaagagagagggggggagcatgaaattgaaggaagaccaatgggagagaagttgaactntgagttgtgtctcacaagactctcattcatcaaagttacaacangtgttacacatgcttctatttatagactaggtagcgtccttgagaagctttcttgagaaaacttccttgagaagc

SEQ ID NO: 85117 - DNA, 120 bp, Glycine max
caacaacatgatcaacagtttgaacatggacgtgaatcattaaactttcaacacttcactgtatgaacacattgtatcatacaaagcaacgttgaacgagtcaaaaaaagcaccaattga

SEQ ID NO: 85118 - DNA, 490 bp, Glycine max
  unsure (1)..(490): unsure at all n locations
actaagctgtganataatagaatccagatctatttttacaagtctttctattctattcntagaaatgtgacctaagcgtttgtgccataatgctcctgagtttgtattatcaattctatgcttagtaccatgcaattctgcattaaaggcttcaccataagaagctacaatatcaagtaaatatagattatcattaaccaagagtgaaccagttccaaccatatctaaattaaaagacaacctgaacaaattgtttccaaatgaacacaaataacccaatttgtctaaataagaaactgaaaccaaattccgtctaaatgacggtacaacaaaagtgtctttcaaatccaaataaaaatcaatacataataataatctaaaatgccctatagcttccacttctacctatttaccatctccaacatagatccatctttcaaaatcaatgggctttcggtagcttatgcaaccctttattgaaacactgatg

SEQ ID NO: 85119 - DNA, 377 bp, Glycine max
  unsure (1)..(377): unsure at all n locations
attaccggttataacttcaaggaatctaattattaacgatactgatttgtgtccgcatagaccggtgcatttggaaaagccaatagtataatgcgatttttgaatgttctttagatgaaaagttacttattgaatcagcgcgggtgtatttaacttatgtaatgtaataataagtctgtaatgcacttttgggttgaaaatagtaattagctactctctttgttctctgtcaaaaaagatgaatagatatgcatacgatgtcgctatgtggccagttatggtgttgctggtactgcatgtttgtgcagttatactaatataaatactcncaatgnaaagttactagaagcatatactccaagcatatattaaacact

SEQ ID NO: 85120 - DNA, 268 bp, Glycine max
tatttttaaacatcacgaaaacgaagagcatttgagcatgcggtcagtatcacgcattatttatttatcttactacctaccttttccaacaacgtggctcctcgccttccttttttccttccaattcctccctcctgagacctctctcctttccttctcttttctaacccccagaagcctttcccttcctcctattctctcttctcacgcatctttccccccctctcttctctcctttcttcctctgagatgcctccctcctcttttt

SEQ ID NO: 85121 - DNA, 486 bp, Glycine max
  unsure (1)..(486): unsure at all n locations
tctggaattttgctgaaagaagagagagaatttggtctttatttaaaaatgantttctctttcctttttctaaaagcaatgccacatgtctcattntgagtggagcaaaaggggcccacctcttccccttgatgtgacttcatactcagccacaaggagagaaaaanttgatcttttgaatgctaaaatcctgcctcggtttgcgtgcttcttctctggttccagttcctcgcgtttctctccactcgtcggggcccgttttcgaaagtaggcaatatatatatcaaaacgctcagaatgaaaccctgagcgtggttcagaggttggttntgttaaatttttagttgcacgcaaaacgataatttttttagactaattaattgagaattaatctataactgtccatttatggattactcttcgttaattagcctaacccgcgtatctttccccaatgacatacttcttcaaaatattatatatata

SEQ ID NO: 85122 - DNA, 342 bp, Glycine max
  unsure (1)..(342): unsure at all n locations
cttgagcaaattcaaacgacaataacttnngattctgatgttctatngtgtcccgcatcatatcgagatgctcgtaattgaaaacagaagctctgagccaattcaaacgacaataacttttgactcggatgtccgattgtgtcccgtaatatatcgagactctcgaaattgaaaattgaagctctgagaanaatcanacgacaataacattttactcggatgtccgattgagtcccgtaatacatggagacgctcgtaattgacaacagaagctctgagcatattcaaacgacgaataactttaactcgggtgtccgattgtgtcccgtaatatatcgagac

SEQ ID NO: 85123 - DNA, 151 bp, Glycine max
tacctaatggtcacctagagcacacagagctctctcctcaaatgtgtggccaagacatcttctcacatcacacagcacacccaaacagcacagtgggccctcacaccttcctcgaaaacttggagcaatgacatgctaacatgcagttcag

SEQ ID NO: 85124 - DNA, 420 bp, Glycine max
  unsure (1)..(420): unsure at all n locations
tataaatctattttaagtccaagcccataaactaaatanatttattattggacaagataaggtaagaatggatgaaataaaatctagatgaaataaaatctggataagataagatttgataaaataaaattgtctgctcttgtcgcaacctacccttcggcgggagggcaacgccgggctccgagagtgtcttccatgggaggaaaatgcgcgaagtcgccaccaacatttatttgaggaaaacgtcggaaaaaatggaaaggtgtggtctatgaactttaatcgtgaaaggttcaagagttatttttacgcacggngaatgtattagcaccccgcgcgtcaatcacaagggacgacaacctttaattaagtgtgcaaatatgacnttcaaatgtntttattttcccgtttctacatctt

SEQ ID NO: 85125 - DNA, 145 bp, Glycine max
ccggtacttctaaacttttccacttcatttagttgggaatcactatacatcaggtatacctgggaaattctccctgatatcttggcccttaaaagcgtaacatcgggtggaaagttaaacttataataggcacttttcacctttg

SEQ ID NO: 85126 - DNA, 378 bp, Glycine max
  unsure (1)..(378): unsure at all n locations
ttgaaagtttatcatttcaggttcttaccatgttatatggttcatntttaagggccaacgccttanaatgatcacctttcaagtaaaaagaatcacttgattcacgcataagaaagaactacataggtctgatttcctcatcacaattgaggaatacgtatgagcaaagggaaacaccctcgtcgaccacaaaaataaaaaaatataatatatataaaaagggtataaaggatataaggacataaaagggaacgtaaaaatcaaagtcatgtttgcacattcgattaaaggctgccatccctcgtgacggacgtgtggggtgctaataccttccccgtgcgttaatacaactcccgagccttttacttaaaagttcgt

SEQ ID NO: 85127 - DNA, 406 bp, Glycine max
  unsure (1)..(406): unsure at all n locations
tctgatcatcatgctgtgataaatgcaaaataaaaaaactagggcaaatgaagagggtgagaatgagggagaagcccatgctgtgactgccattcctatacagccaagtttcccaccaacccaacaatgtcattactcagccaataaacaaaccttctccttacccaccgcccagttatcgacaaaggccatccctaaatcaaccacaaagtatgtctaccgcacttccaatgacgaacatcacctttagcacaatccataaacacctgccaagaaatgagttttgcagcgaanaanaaaccctgtagaattcacccaaattccggtgtcctatgttgactttgctccatgtncactcgataatgcagtggtagccataaaccctgctanggttcctcaatctcca

SEQ ID NO: 85128 - DNA, 396 bp, Glycine max
  unsure (1)..(396): unsure at all n locations
tgcgtgtctacgaatgggacttcgaaatttcaggtttgggtggacttctntctcctttgattttcgtgggtatggggttttgggagatatgatgggtagttttgttagttttctgcttcatgatggctatttgtgaagactcttgttgaaagcttgttgaaattgccatgtctggatgagttagacatacccattctgttntanggtttttgtgatgatgtttgtgatgtttatatgctgaaatttcttatggaaaactgttagaggtgaagggtagagttaacctacggttagaaagtgagaatgtggtgttatgagtggaaaaagagtgaggctctgagaagtgaacgctaaatctggattctgtggtaaatggaggttaaaatgagtaatcct

SEQ ID NO: 85129 - DNA, 465 bp, Glycine max
  unsure (1)..(465): unsure at all n locations
attcctaggtacatgcataggctaaaattaaaagatctcttcttatgccacaatatgatcctactgggatcttgtataatgaagccgaatgctacaaactgacatgatgcttgcgctgagacatggcccaactctaccgatgtatacccttntgcaccgattgaccaaaactaaaggttatcaggtaattcgatgattaaataatgattcagagaaattcagatatatacttttgcgcctgtaatatctgatagaaattgtgctttctgtggctaaacaagcatatctggtattatgaaatgttcaacaatttgagtgaactgttgctggacaaattctccttacatagccgactggtggttattcgtgcacattatttaatttggtatgtttaacttggatcactatgataatttatcangacattctatgttcttctgaattaattactcttacgtatatata

SEQ ID NO: 85130 - DNA, 293 bp, Glycine max
  unsure (1)..(293): unsure at all n locations
tgacccctattagcgcagccctataattatatgaaaatctgttgtgacgccacccttgtgtcttaccctagctgtgaccctctcggacacatctttgattgctcaaatatatgcaacacaacgccttttttctttagggacttccggaatacctatccagataccctataataccccttttccaatcaatgaacaccacatgtatgtcnttttattcctttcatactgcttcatcacatggtgcaagaagatattgcttcttgggcacttccaagcataatacccttgctttt

SEQ ID NO: 85131 - DNA, 264 bp, Glycine max
cccacttagactttcctctcagacactctgcttagagctctggctgcttataactcgacctgctactgatatgaaactgtagctccttaaatcactcttgcttctctcatcatcccctcatttttttattcttctcatgagctctttagctctatcaggacttctgtgtgaccttcctctggtattttatggtagcctcttgccttttcttatttggtgactcctgtgaatacctgaggctatgactaaacccctctgacttta

SEQ ID NO: 85132 - DNA, 487 bp, Glycine max
  unsure (1)..(487): unsure at all n locations
tgaagaggatgctttaatggaggaaaagaattatagaaggttgtatctcgaaatngaaggaataaaagagggaaaaaagtggaactttgaagtgtatctcataagactntcattcatcaaagntacaacaagtgttacacatgcttctatttatagactaggtagcttccttgagaagctttcttaagaaaacttccttgagaagctctcttaagaaaacttccttgagaagtttctttgagaaaacttccttgagaagctagagtttagctacacacacccatctaanaactaagctcacctccttgagaagcttccttgagaagctagagcttagctacacacacccatctaanaactaagctcacctncttgagaagctttcttgagaagctagagcttagctacacacccctataatagctaagctcacccccatgacnnaaaaacatgannatacanaaaanatcctactacaaagactact

SEQ ID NO: 85133 - DNA, 196 bp, Glycine max
gatctttgtagacctaaattgtaatagtagacataaataaaataaggcaagcttcattggtgtataaaggaattacatctttagtacagaaaattcaaggactattcgaaaccaaatagcaactggactccctcaatatttataactgctcaaaaagaaagaaagtgctaatcaatatttatatgcctgttctata

SEQ ID NO: 85134 - DNA, 426 bp, Glycine max
  unsure (1)..(426): unsure at all n locations
tgtcgttgttcgttgatctattcaacagtggtcacagcatttctctacgaccaaccatgacctcgcacgtgccctacctctntgtgccaaacaacatttacacgccctcttctgccagtgacagcacatggtcaacccattttagccatgtttctaaagtataggttgcccctccattatgcccttaccccaggtttttgggaccattccaacaattggtgacaatgcctctgttctaaccccgttttctagcatctttgtcattcctttgttttataggtactattttgttttctcaccaatggctacacctaccacacctagggcagatgctccaattntctccaatcttttgctctctattaaaaagttggatgggttaaactgaggcatcctgaacattgatgaaggcaaggagtgatcatc

SEQ ID NO: 85135 - DNA, 450 bp, Glycine max
  unsure (1)..(450): unsure at all n locations
ntgaaggcatgaatnnggntgtattgatggcttctatnagtatgatngngcaaacccatcacanttatattctctgctgatatgaatgatagcatcatcttatctttaatttattatagcttctgcattgcatatgtcagctaatgtaaaatagaattatgcgtgtcaatttactttcgattgttgtcagacattcaacatgaaaattatagtttgctgaactggttatgatttcatcaaggtttntgaaaaaattagcttcaatttggtttacaatggatcatgagtgctttacccattataccccctctgcgacattgtnttcagccatccttggtatttgtgtacttgtgtgagccatatagtaattattaatttattatgccactcaaagtgaaatcttattttgtgacgaccatttgctctcgctatcacttgatatttcatgtt

SEQ ID NO: 85136 - DNA, 478 bp, Glycine max
tgaccaatcctgacccaacccgggcatagtcagtcagtgatttctctgtgatgtacctaagcaagcaagctcttggcagtcaacagataaaaggaacaaagaccacaaagcaaggaggcttgtgtggtggctggccagctgtgaatcttgtgtgatatatgggttatggcctctggtaatcgattaccaagggtgggtaatcgattacaaggcttaaaaatgaagataggaggctaagatggtctctggtaatcgattaccaaggggtgtaatcgattaccaggcttgaaaatgaggtcaggaagctaggagagcttctggtaatcgattaccaaggggtgtaatcgattaccacgcttataaagggaactggaagattgtggaggtctctggtaatcgattaccagtctgtgtaatcgattgcacagaggaatgggtcactggtaatcgattaccaggtatgtgtaatcaattacat

SEQ ID NO: 85137 - DNA, 435 bp, Glycine max
tttgggggagcataggcctgcgagttctcatatctgatgatcgattttttcgagaacattatggaaatgtcaaactgtgaaggttattctcaagagttttgagctggtttctggattgagaattaattttgctaagagcaaatttggagttgttggtcaatctgaggagtggtgtcttcatgctgcaaactatcttaactgtgctttgcttcaatttcctttctgttatttaagaattccgattgatgtaaatcccacaacaaaggtggtgtgggatcttgtaattaggaaatttgaagataggctgaataggtggaataagagaaacatatccatggctggcagactcactcttattaaggttgtcttaacagcactacctcttgtttacttatcttttttcaggcccctaaaacagtcattaataagttatct

SEQ ID NO: 85138 - DNA, 481 bp, Glycine max
  unsure (1)..(481): unsure at all n locations
ttgtgatctcttcaagatgatcaacacaatattgcattggctttttaattttgggctgcagatttcataagcaatgcatttagtatgtttacttggtaggtttaaatnttcaataaaagtaattaatttttttagaatttaattttttatgcaaggtcaatgtgagttcttgttacacaaatgtaattcattttattaccatattacccaattcattaatatgatgcagtgaatntgtattaaaaaaatatacttttaattatatataatatagaagttttagcatttagcaactcactctttaacacanttttatataagaaattntattatacgttaaaatttattaaaaaatataaaagaaaaaagactcacaaaaattatgatttttaattaattttaaccaatcttacctaatgcattcaaaagaatttgtttagaaagggatctttgtaatatttntcataataatggtaaaaag

SEQ ID NO: 85139 - DNA, 164 bp, Glycine max
catgctgtaacattatatgtacgacttatgatgccacatctgtaacatttgagcgcaaagatgcgatgcacaatatgtccctgcgaatttagatacagcgtctcttctattttattgaataaatgaagaagataacctattcttcagtgacatgatggcgacat

SEQ ID NO: 85140 - DNA, 369 bp, Glycine max
ctaagctgagaagccttctgattctgttatacatttctgactctatggcatgagatgcaatgctcatgatggacctcctgttagttgttatcaaagaatagcttatacacttgtgcttgagtgatacagctgctgtgagactgtggcttgagctactttccttgatacctgtcttatgattaacttcatctaactgtatagttcacatgttgttctcctctctgtctagctgcatattctgggaaaacaagtgataggtacacattgcttcatcttttacatcatgcaatcaataaattttaatgcatacacctttgaacataaacactgcatgttttaccacttgaggacaagtgagatgttctcttt

SEQ ID NO: 85141 - DNA, 407 bp, Glycine max
  unsure (1)..(407): unsure at all n locations
taaaattaataaaattaataattgattgagaaggatgcaacccaaaaagttgtgtcgttntgcatccttangcatgctaaatttatcatcctcattaaccttatctgatatagctccatgtggagattgtatgccttggatcttcttcatcaatggagtcctttgcttcttgaagatcatggcagcagaatggagaaggaagaaagatgatgggagacaccacttcaaggagaagatgagtcaagaagaagctcaccaccataggaagccatggataagaacttgaagttaggagaagatgagtggagggagagggagagaangcgcacgacaatttatgcctcanatgtggtctgaactttgagctgtaattctcaaatgatcaaagttgaaataatacacacaca

SEQ ID NO: 85142 - DNA, 362 bp, Glycine max
  unsure (1)..(362): unsure at all n locations
tgtaatcgattacacanatactggaatcgatttctagagcatattntcttattatattctcaacagtcacatctttttatgtggttcttgaatggctatcaaaggcctatatatatgtgacttgagacacgaatttgaaaaaagtttttcagaacaaaaaggtcttatcctcttaaaaagcaaaattggtttatcctcttacaaattccttggccaaaatacttgtgattcaataaggaattatttgagtgctcaaattgttcaatctatctctntcaagagagatttcttcttctcttcttctgtattctgaanagggattaagagaccgagggtctcttgttgtgaaagaattctaaaca

SEQ ID NO: 85143 - DNA, 465 bp, Glycine max
ggatttatactggttcggccacttcccgtgcttacgttctgttctaaagcaacccacttgagaatttccactctctttgtaaaactccttttacaaagtctaaaccacacagggacaacccttcccttgtgttcaggaatcctctacaacaagagacccacggtctcttaatcccttttcagaaataagaagaagaaatctctcttataagagatagattgtacaatgaagatcaatcaaaattccttattgaatatgcaagtggttgaccaaggaatctttttgagaggataacacatttcagttcagaataactctcttaatcttttgagaggataaaacttttgggcaatgaaaactcttttaatggccatcataaaaatttgaaagatggactcttggaaatatttctgaaatccccttagaatcgatacaaacttggcaacgatacagatttaaattcta

SEQ ID NO: 85144 - DNA, 475 bp, Glycine max
  unsure (1)..(475): unsure at all n locations
ggagctcattgttgctgccccacanagctccacggaattgtctcggccatgctcttccttgcgagccctcttggtttctcgttcaagggctcttgcggtagctgcattttcttctcataactcagcacactctttccggatgtttgtagcgactaacttgaatttttctttggcaagtcttgcttttcctagtttagtttttagagctcggacttcttcatcctcttccggagcttcgaagntatcctcgctgataattttcaacttggagagccaatctaaccctcgtgtacgaactttcagccattcatgataaccaccgatgatgccattacggatgcccctaagttctttatctttccttaacgggctttcccccgccttgtggactctttgtataatcttgaaactttgcgcgctacaatctctcacaaagaaaggagagagggctctcttccgcggtgctcccctcatg

SEQ ID NO: 85145 - DNA, 379 bp, Glycine max
  unsure (1)..(379): unsure at all n locations
tacaagaganatgatatagcgtctgaacaaaacacctgattgcgttgtaaccttgaaaattgacacctgtcaactagtttcacagtaaatatttattaatttgaagtttaatctctttccaagtttatcccttcctacatgaccccacccaatcgattccgctcaaacccatcatgactnttattatctctttccttctcctcattctccaccaccacgtcgagttaactcagtctccttattcctacaacttgtcctccaactcaccttacctattctggttaacaccaagctccctatcgcccagcgaacccaagaccttgtctcgggacttaccctcaacgagaaactcgcccaactcgtcaactcagcactcgag

SEQ ID NO: 85146 - DNA, 365 bp, Glycine max
  unsure (1)..(365): unsure at all n locations
ttgagccttgtggacgagattctagatggtgattcgaagaaaaagatcattgtcaacagttgtatcatttgttgctagagaaatgatttattggactcaccaggttcactagagcagacttggctttaacttttacagacagcttcaaattaattccatttttcattatcaaatcgatatgaagcacatgatcaaatctttcactttttattatagtacagagataagtttcacatgaatggatgttctttttaatataaccaaagattnttattagatatatggttcacagatttaattaaaaaaatcaacatgtcattatttattagaagaatctgattgacaaattgtgagacacttatctg

SEQ ID NO: 85147 - DNA, 160 bp, Glycine max
atgctctgatatgggacacagctacaagttagcagtgattgatccttgcatgggcaagatagaatatgttattcgcactttagaatggctgactcgttccgcaagctggcctgtgaattaagtccccctttggtaatccatctatgcatatccgctcctt

SEQ ID NO: 85148 - DNA, 326 bp, Glycine max
  unsure (1)..(326): unsure at all n locations
aagggagacggctncggaggagtagtaacaagaccaaagatagcaactcctcacttgagctttttttttcatttattcattccttgttcatatttattttaacctccatgactttaaggtaaattatcatgttggggctgataccaacctcttgatgaaagaccttacaccattaatgtattcaatatatgcttcttctaagatattccttttatggtgacatcatcacatgttgtttatgattatcttggaaattttacctaaaactgaagagctctagatcatgctaggaaaatgggtattacctaatatcatgttatctaaaa

SEQ ID NO: 85149 - DNA, 337 bp, Glycine max
  unsure (1)..(337): unsure at all n locations
cttancntccagagctgactttactcttaggccttggccacaagaatgagtatcatatctatatgtttgataatataaataacattgctatttctttcttgatacatgtaaaagacaacaacattacataagttaaaaagatttacattcagttgattgagttggatatatgagttattataagtcttttaattttcacggataaaaataaaaaagagaactaacacaaacttctatatatgcatatcagattgatacggtaacataatgactccttttcctttaatctgcttctttcaggagagatcatcatcaattgacattggaatcatgtgtg

SEQ ID NO: 85150 - DNA, 370 bp, Glycine max
  unsure (1)..(370): unsure at all n locations
cagcctacacanacattctctagtgcaacacacacttataaaatattcatattattccatagcnccaancaatcatgctcaatatgatgcatgcacctgacctcaactctggaaatgcaatgtagtaccatccccaatgaaatagcctaagtgtgtccacacgacactctcacttatgaaaactatgcagtaagtgtcaaggtcactttgtcatgcacaggcaactcccttctccccctccccccacgcctattaacctgagtctcaagggaagttcaaactgaattggatgtcccccagtacaagtatttttcctctctataaattacaaatacttactgactaagcttatactggtttccaacaatat

SEQ ID NO: 85151 - DNA, 244 bp, Glycine max
gcgagccctaactcttctatcatgccttaagtcttgcccacataatttctcaaggtgcattctggatttacaatagcattgtcttttattcaacttgtttgacttgcacacttacaagtcgaaccatttttattcatacatcatggtaccatcaaacttatttgcctatacactcaattctgaaggtcactttttcagcaattcctactttactcttgggatttttgcacgacgtatctatcca

SEQ ID NO: 85152 - DNA, 180 bp, Glycine max
actcgtatggacacctgttatttttttctgctcccccactttacgcggaggttttttggactcacatacctgggaaatcaaatctagtgctctggaagaacatcttttctgtgttctattacaattttaaaaaccattgcgagagcacccccatattcaaggtggggtacataaagtgaa

SEQ ID NO: 85153 - DNA, 414 bp, Glycine max
gatggaacctatatttatattagttgagtgtgagttgctggtccttgttagtaaaggttggtgtagcctctgagataattactgcgttgtagataatggccaagagcttatagataatgctagacataaacatttgcttatagatagaaagtagaaaataaccgtatccttgtgataatatggtgctatatataattaaataccagccaatggataagatattcaaatacatttgaatattagtcaggttagagataacctattctgtgtggagccccgctgctaatggtcaagcgtctgcgctgctgtaacaaggttgacacatttcttctaatgccaactaagatgccacgtaaattatgtgggtcctggatagtacacttacatctgtgattctatgctgcaataaattat

SEQ ID NO: 85154 - DNA, 376 bp, Glycine max
tcataatattctgcgttgcaacacgacttcaattatcttcgctttcttcgattcctaggtctatctccttcccccaccgccctaattcccttatatgttttaatggttatgctctgtgtccttgatcgaagaatgctattggctgaaaaaatgctgctactactgtaaaatagttgatctgtgctgatacttgtggcagaatggtgctctgacaaatgttaatctaattgagtattcgtcgcgttttccggactaactagcttaatgatactggactgtggaatcaaatttatattacttggctccgacagggataagtctaattttttgactattaataaaacttggatctggttgtacattttaatgcaatttt

SEQ ID NO: 85155 - DNA, 410 bp, Glycine max
  unsure (1)..(410): unsure at all n locations
ntgcggattcngncttcgcttgctatatgattgaagngggttttataaagaggaaanttaatcatcctgcttagacgaatgagaaaactggggcaaatgaagagggtgagaatgaaggagaaacccatgctgcgactgtcattcctaaatagaaaattccctaccaactcaacagacatcattactcagccaatatcgaaccttctcattacccaccacccagtcatccacaaaggtcatcccttaaatcaaccacaaagcctacctaccacactttcaatgacaaacaccacctttagcacaaaccacacaccaaccaagatatgaatnntgcagcgaaaaagcctgcagaaatcacccagaaattccngtgtcctatgctgacttgctccatatctacttgataactc

SEQ ID NO: 85156 - DNA, 330 bp, Glycine max
ctcactattttgtgctcgctaccccggaccgttattacagcctctcgggcacccacttgaacatttggcaaagagagatcctctcatcctgtcacttgattgcccctgataccaccaaatatcctatccgctaccaccataaaatttccctctgaataggaaatagcctgagaagttaagatccgctcgatcccatctgatacgactagtaaccaatgattctccgtcaagcgcttgtaatcaagcactggaaggcttttatgtgcgaagggcgtttcacaagtggtctttttaaagtgcgcactgctattacacgactcaacaatgaac

SEQ ID NO: 85157 - DNA, 449 bp, Glycine max
  unsure (1)..(449): unsure at all n locations
tcatgatgatgaactaagcaattatgatgatgccaaagctctgtgattgattcaatattgattcaagacttcaagatcaagcatcaagaatccaatccaagattcaagattcaagagaagaaatcaagaagcaacaagtcaagacttcatattggataagtattaaaagaaattttcanaaaccaaatagcacagttntgttntacgaaagaattttctctaattttctaaagttacagagtgattactctctggtaatcgattaccagttaacagtaatcgattaccagtgaccagattggttntcanaatgctttcaaatgaattgtgacgttccaaaatgattttcaaatagtgtaatcaattacactatattnagtaatcgatacaagtgaatctgaacgttggaattcanatccaattgtgaagaagtcacaacgtttataaaa

SEQ ID NO: 85158 - DNA, 384 bp, Glycine max
acaatacggacatggctcccgatcggaaccagcttcagggtatgactaaacgagagcatgagtccattaaggaatatgcccaaagatggggagatctcgcagcccaagtcgtaccgcccatgacggagagggagatgatcacaattatggtagatacgttacccacgttctactatgaaaagctgataggctacatgccagctaacattgcggatctcgtcttcaccggagaaaagattgaatccggactacgaaaaggcaagttcgaatatgctgccaatatggcccccaacaacaacaaaagagccccagtagtgggcacaaggaaaaaggaaggagatgcccacgcggtcaccaccgccccaacatggatgaaagcaccct

SEQ ID NO: 85159 - DNA, 358 bp, Glycine max
  unsure (1)..(358): unsure at all n locations
tgaaagcatagtggaatcatacgctttattattctcctaaaacatttgagtcctcgcatgttgataactctaaaatctataatgcaattcacatgattatttcgttctggtagagatatggatgaatattaaaggatggaaggtttacgtcagcaaatanaaaaaatcctatatggatntttcccaggtaagtagtttacaaattgaaaatcaattaaaaattataatagttacttaaataaacttgatattcacactactataaaaaaaagtttctacatcggntctttaacactcttcacaatggttntcaaccgtctntgaaactggtgtcatggaaaatattgactttccatga

SEQ ID NO: 85160 - DNA, 465 bp, Glycine max
  unsure (1)..(465): unsure at all n locations
ataatcggacaaatacccaaattcttttgtcacacattcttctcaagcaaagggaagtgcttataatttaaataagcattgaagcaacatgaatctccaccaattntcatgaattattatgcttgccatattgactggacttgtcattntcatacatcaaaatataagaatcaaaacataatgtgtaagaatggatcaaaagccttatgttcctaactattaatttcaataataaagctaatagttgcatggtcaaaaatagataagttccaggtaaacataatagccaatgaatgcatagaaaaccaacatacacaaaaatatgaatgattaagttaacaaataaaatngattacacacatatttagcatcaaagatataataataatctatttataccaacctttgctgaatgcaatgaagaagaaaagttctcaagaagcagaagaatgacaaatggctcaa

SEQ ID NO: 85161 - DNA, 241 bp, Glycine max
ataaaaatgctgatatatccattcgcgcggtcaatttaatactaaactcaaatacagcattttttaacactttatcttttaacattgtctaataaatgaaaattggctacgcatatagaaaaaagaaggtcaatctcttttgagatatacaaaagtactcaagcataaatcacttggtaaccattcattcataacacaaacacattcctataagaaaatattggaaaactctttctacata

SEQ ID NO: 85162 - DNA, 433 bp, Glycine max
  unsure (1)..(433): unsure at all n locations
ccttacaatactaagcttgagacgatgcttaatggagganaagacagagagaaaggttggtgggttcaccaaattgaaggaatganagacggagagaagtganactttgaagtgtgtcttataagactttcattcatcagagttacaacaagtgttacacatgcttctatttatagactatgtagcttccttgagaagctctcttgagaaaacttgcttgagaagcctctttgagaaaactctcttgagaagctagagcttagctacacacacccctctcataactaagctgacctccttgagaagcttccttaagaagattcctaaagaagctagagtttagctacacataccttnttaatagttaagctcacctccttgagatgagaagctagagcttagctacacaccccctataatagctaagctcacc

SEQ ID NO: 85163 - DNA, 407 bp, Glycine max
  unsure (1)..(407): unsure at all n locations
tcacccacccttcggcgggagggcgacacagtgctcacgggtgcatcctccaagaaaagtaaatgcgcagcatcaccaccaacgtttattctaggaacacgtccaaagaaaccagaaggtgtgggctacgaactttaagtgttgaagttctggaattgtttctacgcacagggaaggtattagcaacncacgcgtccgtcatagcggacaacagcactgcaaccaagtgttgcatatcatgtcttcgatattttctattttccctttttacggcttatgtcttttatgccttttgcacttatttcatcttttgtggacacaagggtgttacctcgtcctacgagtctcattgcatgaggaataaaccacatattcttgaaactacttggtaagtgtgttatttttcg

SEQ ID NO: 85164 - DNA, 217 bp, Glycine max
tcttcagagttgctataagaccttttctgacagggcctatgtagtatacggctttgaaatgctaaacttgttcccggcccccaaagacaccgttatgcgtagcacggacgtcaggacaccccgtctgtgggccaatcggttgtccgcgtagccgccaatctctccagctcgaggactttagattggttgcatagggagcaaggggagccttatggag

SEQ ID NO: 85165 - DNA, 468 bp, Glycine max
  unsure (1)..(468): unsure at all n locations
ngataganacacagatgttgagctatagaatatgatgaatgtctgcttctgagaagaattgactgacaactatttattctgtcctaaagctgtagatcttcagtacaaggatttaaggcattntcagtggcattgggaaaagggggagcctgtcattgtcagcaatgtccttgaatgtacatctggtttaagctggaaaccgcttgtcatgtggcgtgcattacgtcatgtaactaataccaagcatggccaacatttggcggagaaaacaattgattgcttagattggactgagggttgcttaattacccaatctttaactntattgaccttggagagctttttacacaaatntcattcttcaccttcattctcatgaagattatgtntaattgtttaatgttggtacttattntaactagaaccactgcaattatggcatttggagaaatattaatatagcaattt

SEQ ID NO: 85166 - DNA, 388 bp, Glycine max
gtgccacactattctattgtagcattgtgatttttcaatcacacttggatatggataggtttcgattaacgcaaacattatgatatttgcttgatcaactaaaatgttctttgtacatatttttctgcgtatataatattaatttatgtatatctaatttataatatttctattatttattgctattgtagttttctaattatcatgtgatgtcttgggttttatttgttaagtttttttatcattctaatcacattggtgatgattgttaattaactgtgattctatttttctgaccttgctatgaaatgatattaaagatgttcttgtgaatgataccattccaattcaataatatacccatattgtgtattatattgttggtatg

SEQ ID NO: 85167 - DNA, 142 bp, Glycine max
ttgttactaatttatttggtcaattttttcttgatggtcattaacatataaaactttgttcaagaacttaaatttaaaccatgaccccatctgtgtgttgcattaaactgcaaaatttgtgggcatttagggcaagcttaat

SEQ ID NO: 85168 - DNA, 368 bp, Glycine max
  unsure (1)..(368): unsure at all n locations
ngaaggtgtgtacatgaccaaatctttagtttatcgtctcttcctaaagcattctttgtattcgnttaaaatgcatgaagatagatcagtaggagaacaattggatttgtttaataaactgattctagatcttgaaaatatcgatgtcaccattgatgatgaggatcaagctctgttattgttgtgctctttgcctaagagttactctcatttcaaatagactttattgtttggaagagattttgtttctcttgatgaagtggaggctgctctgaattcaaaggaattgaatgaaagaaaggaaaagaagtcctctacaagtggtgaagggctgacagcaagaggcaagaccttctagaaagatagta

SEQ ID NO: 85169 - DNA, 427 bp, Glycine max
tctactacttcccatctctagtatttgacatatctgctggtgtgtatggaagcattacgattttgagcatacctattaatccagtccctcttgatgatcctgcctgagagtacactgtcctcattggagataggtacgagctcaacctcacggtcattaatttcacctagtattatcttatctttcactttattaattagtctatctttggcacaagctcaaccatctgtttgtcttattttacaagatttgatgtctatgcttgataaccgtatgaaactgcctttgcccaatggaatactaatcaatggtcgtggttctaatggtgcatatttcaatgtggaacacggtatgcatcccatttgtaacttgactttggccttcttaatcgagtagtacaatgcttatctcattacataagcctctt

SEQ ID NO: 85170 - DNA, 401 bp, Glycine max
atataatatggtccttacaacaacactccactgtgcaaatataaactataatattatcaactgaacacaataggaacatgggaaaccatagatttatagcaagtctgattcaacacaagccaagagcaacagaaagcgtattagacaacaaaaagtccatcttgatgttcagcataatgtccaggcaagtctcaatccagcttcatcccacactgaagatgattataaccaaccaaagacaccacctcatagtgttcatgcaattgccgatccggctccacacgatgctgaagatcatcgtgcgttatcaaagctaaccatttaagatctttacattcagctcatatcagtgaaatatgttaatacaatatccatatatagtttgttgtaaaaggaaaaaa

SEQ ID NO: 85171 - DNA, 307 bp, Glycine max
  unsure (1)..(307): unsure at all n locations
tctgctgaccaccatacagacctttgcccttccatgcagcaacctggagcaatngagcagcctgaagcttatgctgcaaatatttacaataaacctcctcaacctcagcagcaaaatcaaccacagaagaacaattatgacctctccagcaacagatacaaccctggatggaggaatcaccctaacctcagatggtccagccctcagcaacaacaacagcagcctgctccttgcttccaaaatgctgctggcccaagcagaccatacattcctccaccaatccaacaacagcaacaaccccagaaac

SEQ ID NO: 85172 - DNA, 433 bp, Glycine max
  unsure (1)..(433): unsure at all n locations
atatttaaagactctgtaatttattctaattattatagaaatataataacctttgatattatattctatgttagaaaagtgatcacataaataaatatcatcaattataatgactangggtggcgtgccgtggtgttttcttttcaagatattcttgaaatatataattcaatcgcaagtatttaaaaaactccttaatccttaattgaccctttcagaaaaatatttcctatatttagaatattattatccaaatattaatttattttaaatatttcatcaataatttatattnttctttatctctcttnttatcacatcatannatttatannatattatattttttctctttaagnatattatgacatatgtattataacataataagtgtccactgaaacattttcatgtatttactggnnttgtatca

SEQ ID NO: 85173 - DNA, 74 bp, Glycine max
aaaaagcactattcggtgccctgctcttacaacccatgatcatatttgaaacttaactcacccagacttctgga

SEQ ID NO: 85174 - DNA, 343 bp, Glycine max
ccttcatctcagcttaccattagataataggcatgtatgactaattgtttttacctagttctgaagctgaatgcatcaaaggttcagcagaaaaaattcatatcataacttaggtcataatggacgagatgaaaaatttggagtccgttctgtgttctcgaaaaaacctgggaaagacatgaggggaatggtgtgggatgcctatggctcagacgatgactcttgaccgaacggagcggaaaacctttcttttttgagatctgctttgaggagtgtacaatttaatgggaatcaaaaaaatgaaagagagattcctttccgagtgtttgtgaaatgatgaaag

SEQ ID NO: 85175 - DNA, 466 bp, Glycine max
  unsure (1)..(466): unsure at all n locations
tgaagagagacaacaatggtggtgaagaaaatgtaaaagaattgctggtttatgaaagagagagccgtgctggaagtttctggataaagagagagaagatttggcttttaaaatgggttttcttctctttttcattttctttttaaaagcaattccacatgtcattttttaattggagcaaaaagggcccacctttacctttgacttgaccacatactcagccataaaagaagaaaaaaactggaccgttttggatgctgaaatccagcctcagtttgcgtgccacctctccggttccagctcttcgcgtttctctgcacccgtcggggcccgttttcaaaggtaggcaatatatatcataacgctcataatgagaccctgagcgtggttcacaggtcggttttgtttaattataagttgcacgtatacgataattnttagactaattaattgtgaataatctata

SEQ ID NO: 85176 - DNA, 392 bp, Glycine max
tactcagcttaagaaactggctcacaaccctcacttgcacaatgttttctaatctgtacacctccgatcggtgatggtgaggagtaccactactggacaacctgaatgcttatattctatgaagcgcctgacttaaatatatgtgaggccatccatatacggccatatataccgcccacaggacaatgcattactatacatggaaccgcatctagtgaaagctttgcaatataaacacctatacatagaaggtctgatgacgatagatgacgagctccatacattttaaaagccagagacatactaacatctgccctgagaatgtgtgaatattttacggttccaaaatgccagagcgctaatgaaatgtggtacactctacacttaacaca

SEQ ID NO: 85177 - DNA, 337 bp, Glycine max
cgagccatatccagctgctggtatgggtccggtggcatcaccgacagaatctcgtccgtgagggcgaaatccaccactgaacctgtgccctgctgcgacatccctatccaccctgttgggtgtggttgtgctgggttctgatccaactggtgtgaatacgagggaactaaataaatgcaatctgggccaaactgtcataaccacatttattttaaaccatggacctaaataaggtttccgtgagggtctctaacacctaacctatataattatatttatcatatggaaagtatgaataaatttaaaaattacttatttgtgacgtccaattgaaagc

SEQ ID NO: 85178 - DNA, 372 bp, Glycine max
aactcagcttgcacacgcgcgctaagcccgcgatctaatctcttgattcaggaggtgtcgcgccgagcgcgcctacaaagacccaaagctcacttcaacaactattaatagaaggtcagtcccaaggaaagaaaacaccacgacagaaccccctcttctaggggtttcatttactccctttctttctttcacccttcctctcattgtaaaagccctcaatggccatgagtggctaaacccttaattaaagtctggcaagcctataagccaatgtgatgtatgatgtactcttcactatttatcaatgcaataccagagatttctgtcctattttcttttctggtttaccatgcatactcatctttatattct

SEQ ID NO: 85179 - DNA, 330 bp, Glycine max
ataggtgtctaatatctatcatacgttggttacatatatttatattttattgatgttgcaggtgcacatttgggacttttcatgacagacaacccacttcttcttgaatgacaaatctagattgccaaacgattctcctggtcaacttggaaaagaggtaggtggcgattgttaatagattggcaagtgtatcaattttatcacaagtagtaaagattaaaatggaagttcaagtatcgaatccacgaagactttggttgtactttagtgattctaacccaattattatgccatgagaagatgtatacgagaaaatgaattgtacgtgtg

SEQ ID NO: 85180 - DNA, 274 bp, Glycine max
atgtgggatcggcgcgccactacatacgtactagacatgtttttttcacaaagaagactggtgcgagaacacctacacaacataaacatgcacctgcgacgccattatcatgatgtggatgtggatgcatgtggctaactagaatgcagtatcatgagatatcattaccagctcttctatctaacagcctagagcagtgccgtgtgatcccattaaagaatatgaaagcaactgatagagatgcagagctaatctttatctcactactagtgat

SEQ ID NO: 85181 - DNA, 132 bp, Glycine max
cataccttaactcgaggcgatgatccggattatcaacctcgaatgaacagagctaatcaagacaaaactttcttgatgcgatgatccgataatcagagctaaatgaatagagtctacaatcaaccaatactt

SEQ ID NO: 85182 - DNA, 452 bp, Glycine max
  unsure (1)..(452): unsure at all n locations
tatgttctcaatttcaagcatcttgatatattacaggacactttcggacatccgagtaaaaagttatagtcatttgaatttgctcagagcnttctatttcaatttcgagcgtcacgatatattacaagactcaatcagacatccgagtaaaacgttattgctgtttgaattatctcaaagcttatgttctcaatttcaagcgtcttgatatattacaggactcaaccggacattcgacttaaaagttaatgtcgtttgaatttgctacgagcttncgttttcaattacgagcgtctagatatattacgggactcaatcagacatccgtgtaaaaaagtatcgtcgttagaatttgctcagagcttccgtcttcaatacgagccgcttgatatattacgggtttcatttgacatccgactaaaagttattgtggttgcattggcagacttctg

SEQ ID NO: 85183 - DNA, 420 bp, Glycine max
  unsure (1)..(420): unsure at all n locations
attaattctagacatgagcacttgtgtgctctttatgacttttgnaacaaaggggatcaaattacaaacagaaatttaaaatgtactaagttgtctcccagtagcgcttctttaacgtcttgagctagacgcgtgatgacttgtcngtcacgaacctagtacttttgcttacctttggctttggacttggtcgcctgctggtcggccacaggtcgtaagcaacgctccaacctttgtagatgagctaangggctctggatgtggcggcggtgcgtctattgcccactatcggccaaccccangctgctattgtgtctcgccctgcgcctgcctgagggcgcaatacttcttgatgaaagctcacttagtaaggggcctgatgaccttgctggtggcaacaggcactcctttgaactgaca

SEQ ID NO: 85184 - DNA, 463 bp, Glycine max
  unsure (1)..(463): unsure at all n locations
agtctgtctctgatgctgtatcaagtgttttttcatatatgcatagcataatctggcaatgaaaactgtatttcgtatatcataaaccaaataagttaccctttcatctcactataaaataatggtatacaagtggaaaattntagactctcaatcatgtccttattactgtttcaataaaataatccttattcttctataacaatgtattcctctntttcatgtntttttaatcagggggtagttatgttccatgatgtcgttgacaatgagtatgatgttggcggttctcaagtcagaataaaaggtgtatatatatggccttttatacagcttcgaatggtaaccaatangtaatntcatggatatcatcaatgtggtgagcagatcaagtttatattgggctcaaattggcttatatagtcgcgagtggttaaaatttaaaattctttttgtctaattt

SEQ ID NO: 85185 - DNA, 474 bp, Glycine max
  unsure (1)..(474): unsure at all n locations
actaagctgaggcaactggatgcgtggtcaactggtacccatctggtcttgaatcagaaatctgtacctgtcgcaagggttagtggtttgtgctcctctgctgaccaccatacaaacctttgcccttccatgcagcaacctggagcaattgagcagcctgaagcttatgctgcaaatatttacaatagacctcctcaacctcagcagcaaaatcaaccacagcagagcaattatgacctttccagcaacagatacaaccctggatggaggaatcaccctaacctcagatggtccagccctcagcaacaacaacagcagcctggtccttccttccaaaatgctgctggcccaagcagaccatacattcctncaccaatccaacaacaacaacaacctcagaaacagccaacagttgaggcccctncacaaccttccctcgaagaacttgtgaggcanatgactatgcagaacatg

SEQ ID NO: 85186 - DNA, 469 bp, Glycine max
  unsure (1)..(469): unsure at all n locations
tactcaagcttgaagacaagatcatacgaggtctcttccttagtatagcaatatctctattgtgctctgagtctacaactcgcaaactaagaaactcgttatcaatcgagatgtngaagttgatgagtacgcttcttggaatcgggatgaagaaaaagtggagaaaaacgttcttatacccgatcaactacctcaagaaaaagctgaggaagaagacccaggtgaaccaccttcacctccaccacaacaacaagatcaagaactatcatcaccagagtctactccaagacgagtaagatctttggtggacatatatgaaatctgtaacttggccatacttgaacctgaaagctctgaagaagcgtcaaagcaggaagtgtgagtcaaggcaatggaagaagagatacagatgatcgagaacaacacacatgggagttagtaaatcgtccccatggaaaagatatcattg

SEQ ID NO: 85187 - DNA, 259 bp, Glycine max
  unsure (1)..(259): unsure at all n locations
ngcgcgacaagcaactacatttgtttgtgtacataacgaattatctgactgaatgtcactaatatattcagtgactactcagaaggaaatgatgagcctacattaagcacctctaatctacctaattaatctaattacacaaggcagagcccaaatttgtatcccaattgttcaattacaaacgttctatctgccaagcttatttcttacaaaattgaagctcttgttattacaattctaaagacttctcatatactcc

SEQ ID NO: 85188 - DNA, 475 bp, Glycine max
  unsure (1)..(475): unsure at all n locations
ntgagaatattcanacgacaataactttctactcggatgtttgattgatcccgaaatatatcgagacgctcgaaattgaataccgaagcgctgagcaaattcaaacgacaaaaactntntactcggatgtctgattgagtcccgtaatatatcgaaaagctcgaatgtgaatgtagaagctctgagcanattcaaacaacaataactntttactcggatgtctgattgagtcccgtaatatatcgagatgctcgaaatggaataccgaagctcggagcaaattcaaacaataataacttcttactcggatgtccgattgagtcccgtaatatatcggaacgctcgaaattgaatgtagaagctctgagcaaattcaaacgacaataactntttactcggatgtctgattgagtcccgtaatatatcgaaaagctcgaaattgaatgatgaagctctgagcacattcaaacgacaa

SEQ ID NO: 85189 - DNA, 124 bp, Glycine max
ccgatcacctggacactgtgggatgtgtacatttgctagcacacctattcataatctggtacaactaatcgattcttgagattccactaatattttggatcaatgactccccagatgcaagctt

SEQ ID NO: 85190 - DNA, 360 bp, Glycine max
atggagaatagagatcattatgaagaataatagacgacaagaaggaatgatggtgtttctatacaaaaccgaatcgatggtattaacactcacattcctccatttaaaagaaagaatgatctggaggcctactttgagtgggagatgaaaatagagcatgttttctcatgctacaactatgaggaagaccaaaatgtgaagcttgccgcactgagtttttcgactatgctcttgtgtggtggaacaagctcaaaaggagagagcaagaaatgatgagccaatgggtgatacatggacggagatgataaagatcatgatgaagcaatatgtgccggcttggttcttcaagggacttgaaat

SEQ ID NO: 85191 - DNA, 273 bp, Glycine max
  unsure (1)..(273): unsure at all n locations
atccgctaaatttatacttattattagctactacattcaattattgcatcaacgaatnttacatgcatgctattcacgaatatgatgctcgttgcatttgatgatctcaacatatattctacattagaatcgatggaatttattcagttattgaacaaaaatataattatatagatnttaatatctgcgttattctacatgtaaaacaactcatggatttcattgatcaatgacaagataatancatttgagactctatctgttctgttctgt

SEQ ID NO: 85192 - DNA, 484 bp, Glycine max
  unsure (1)..(484): unsure at all n locations
tacggacctataaatctcagctnttaagcgcgggtctgggagacaaagtcatgtgttcgctatatgcgaagangatgntccgagnacattgaatttggtacgaccatgccctcctgatttccagttgggaaattggcgagtggaggaacgccccggcatttacgcgacgagcataatgtaaacctttacggttttaaaagctctatagttgggcctaggctttagagtttttccttttgttaaggctntgtgtcttttgttgttgattntataatacaaggatctttcttcatctgttcctacgtctctacccattctcattcattggcatgtttacttctttntctgaaacgacagatccgatgacgagtcccccgaaggtactaatacctgtgacccgcctatcgacttcgagcangaaatgaatcaaacggaagatgaagganatgaggatgtgggacttttcccagaactagaaagaatg

SEQ ID NO: 85193 - DNA, 122 bp, Glycine max
tttgagggcttgctttttgaaagatggacctgaccggtagataaattcttgtgaaaaaacagttacttgcagatggatcacaatgcaaacaatttggctatatgtagttgacttaataaaaa

SEQ ID NO: 85194 - DNA, 471 bp, Glycine max
  unsure (1)..(471): unsure at all n locations
tgcacaaagtgcctgtgagttcaacagaacgcgggtctctatggccagagaagtggccggcaagactgaccaacacaccttactggttgacaaattctcaagttggagtttacggaaagcctgcccctgaagattttactgctgattatgaacactggaaacgtatagtgtccaaatcttatcttaatgggataggaattaattggtctaatgtgcggaatgtcatggatatgagatcagtctatggagggtgagtgaaatttgttgtttcccatgttactctgaattatattaaccggccattttgacatacatcttgttntttgggttacaggtatgctgctgccttgaaggatttgaatatttgngtcatgaatgtggtttcagtaaattccgcggacacactttctatttattatgagcgacgtctctctggcatgtatcatgaatggtgtgaatcattaataccta

SEQ ID NO: 85195 - DNA, 307 bp, Glycine max
tgcgacgcagctcgctcaggcgagctggattgttttctcctcatgctaccgccttctggaggagttatgtggaaagcccaagtgggcctggatactatctgcccccccatatttactaagcacaccccttgcctattctggtgatactctgaccgtaacgttacgacactatgcgaatgacgcaagaatgcgtactctcgttccttagagcctcgaaaccttaaggaatacctactcagacccctattggttcccgggatgtcatataactttacagattgcgcactaacactttcttttaatttcc

SEQ ID NO: 85196 - DNA, 309 bp, Glycine max
  unsure (1)..(309): unsure at all n locations
ttgaccacacaatggtacctggagatatgtcgcggtggtcaagagaccttggggacgtcaggtggggtgctatttgccaaaagcaaactttgacaatccctacccaacccgggcatagtcagtcagtgagaacctgtgatgtacctaaacaggcgagctgctggccgtctatatataaaagaataaagaccacanagcaacgacgcttgtgaggtggctggccagctgagaactttgagtgttatatgggatatggcctctggtaatcgattaccaacgatgggtaatcgattacaaggcttaaaagtg

SEQ ID NO: 85197 - DNA, 453 bp, Glycine max
  unsure (1)..(453): unsure at all n locations
gcaagcttctaattggacatggttgggtcttctactttttttataatnatgtgcaatactaaagaaagataaaattttataattaaaacgagtgagtataaataattttagaaaaataaaattttaagatataagaggtaatattaaactattaaaaataggcaatttctttctttgaggatcaatatgaggggggttatggatatatttaccaagaatttgaatatttaaaaatggaggagaaaatttttgctgaaaattaaaagataaaaataggaaaataaatctaaaaagataaaaatatcaatctattttaaaaactgaaatatttatttatttatttatttatcaaaaagggaaactaacatttattgctgaaaattgaagataaaaaaaactaaaatatatgtttctattctctgttctaaatttatttatcaaaaacggaaaata

SEQ ID NO: 85198 - DNA, 439 bp, Glycine max
  unsure (1)..(439): unsure at all n locations
ctcaatttctgtgtccagtgaaggtgtgttagaatcatcaagctcttcagctatggagtttggaaaggatcatggtacggaagggaattggaattggatggagaaacctatggctcatcataccataatagagtttctgagagtgagagaaattgagagagaatttaaagagataaaaatggagtctaatgtttattcattgcttatataggctctcagtacagctgtaactaactgttaactagtaacagttagtacctacactaaccaacctaacagattcactaactgatctcagttgaataactggttatttacatatataccctaatacaattaatgttatccaacacccgatgctcattattgtgaggtangggatgcttctggctatgttctctagatgtgttgtattgttctggtaatcaccaaatcgaca

SEQ ID NO: 85199 - DNA, 449 bp, Glycine max
  unsure (1)..(449): unsure at all n locations
agcttccatcaagtggtatcagagcacaatagcttcaagtatgtgctccttaaacctccattaattgttttgctttaccttctcttccattgttgtttcttcatttttttctccatgtatctcctcacatgtcttgtgctaaatgttgttaacatgattctttagagtttccaccaattaaacttgctatagaagcaagatttgattttctatggttcaaatttcttgtttttgttcttgaaccatgaattgtgttgagtttaggttcctttgagttntgtcttgttattttttgtggctgaaacctaaaccataaaattcttacaaaaacattaaagtagaagaaaacctcaaaaatctagagtgactcgttcacctattgtagttttgtcatagaagtcatgtctagtcatgagacttgtcacataagaattcttatgtcgtgctga

SEQ ID NO: 85200 - DNA, 296 bp, Glycine max
actaaacacacccctgccttttttggtgattcttttttcgtaaagttacggaaaccttacgaattcgtaacgatacttggtttctttccgtaatggtacggaacccttgcggatacataatcatcccctctttgactttacggaatgtacggaacctcactatttgtgcaacgatgcttcctttttgattccggtgtgtcacgggaattttatggatggtgcatcaatattttcttttgatttccggcacgtcacgaaattccacacattgcctaatgatgggtgccaagcacctc

SEQ ID NO: 85201 - DNA, 434 bp, Glycine max
  unsure (1)..(434): unsure at all n locations
agcttagcaaatggacctgggtgttgcccanttttatcatatctttcgtaatactcatcacctctgtcatatctaataattttcacatttatgtctaattgcccttttacttcattgtagtaaatttctaaggcatccattgcctaagaaatctcgagcagtaagtagacataactgtaacgtgaataatcatcaataatggtgataaagtatcattcctttccgaaaaaactaacatcaaaaggtccacatgcacaatttcaagaagctgagtgcttcttgtagctcttttctttgtatgttttgcttattttcccttaatacaacccacacaaatatttagatccatanaatctagataaggaagaatttcattctttattaactttaccatcctttctctagaaatgtgacatacacgtctatgccacaag

SEQ ID NO: 85202 - DNA, 384 bp, Glycine max
  unsure (1)..(384): unsure at all n locations
atgttacacgatttgagatgcaaagaaaatcaacaagctatttgcttcaaatactacagaatgttcaacaataagccctaattcacgatttcttcaagatcaagccttgcctcaaaacgaaaggtttcaagtcatccaaggcacatgtaatcgattaccaatacattgtaattgattaccaatggttcgaaagtgtgttatcgattacacatcacatgttatcaattaccagatactctgaaagtcgggaattctaatcttatataaagagtcacaactggtcaagaanaataactgtgtaatcgatacactaatgctgtantcgattaccagagaggattttcanggatattcgcaacaccacatcttatcatttggattttg

SEQ ID NO: 85203 - DNA, 407 bp, Glycine max
ttaagccaccgcagctgcatcttcacatctaccacttcaggtgttgttctactctatggactctgtggggcctatgcaagttgaaagccttgaacgaaagacgtatgcctattttgttgtggatgatttcttcagaattacctgcgtcaactttatcaaatagaaatcatactcctttgaagtattccaatagttgagtctatgacttcatagagacaaagactgcgtcatcaagagaattaagagtgaccatggcatatagtttgaaaacagcaagtttactgaattctgcacatctgaaggcatcactcatgaggtctctgcatcattacatccatcataatgtgtaattgaacgaaatacagtcttttcttaatccctatggttatgtttatgcctagaacttc

SEQ ID NO: 85204 - DNA, 290 bp, Glycine max
  unsure (1)..(290): unsure at all n locations
gctcctctctcntgatttcaactacctatgtattaccattgacgagttgtgttctggaatatacggtncnactcancatactacattgaatcaactatgggcaaacaagactgctgcttcaagaactgtgcctctccactccccaagcctcagattacaatgaatcacagataacatgaatctgtcatacctctaacatattcacaaaagatgacatatactgtagacaaatgatcaagctgaatgtttgatgatgcacaatgtcacatgtgcctcaagcttattcaaac

SEQ ID NO: 85205 - DNA, 368 bp, Glycine max
aattatataaaccaattgcaaataatataaatctattggctaatatctaattttagaactaaagtttacatgagaaaaaatagcttaatttagagacaaataacaataattctagtgggagaaaactgactctaatatattatttttagttcaatttcggcatatttcttgtgtaacaaaacttatgctttttctttagctttatattaatactatatatattatatatttttattgggaatcgtacaaaatgacagcttttatccatctgtgtttacaaaacaatggttcataattagggtttatgaggagtgatattggcttacattatatgttaatattagcttattcttaagaacattctgaat

SEQ ID NO: 85206 - DNA, 450 bp, Glycine max
  unsure (1)..(450): unsure at all n locations
caagctttagctcgtccttcaagatcatgtctttgacccgtgatgattcctttcacctcttcggagcttgagctcactattgctgtcctataaagcccctcaaaactntgctttggccgtgttcttcctttcgggccttcttggtttctcgttccaaggcttcagcggtggccatattgacgtcccttagttcatcatactcttttcagactttgatggctatggacttgaacttctcttcgactacccgggctctttcaagctctgcctttagggcttgtacctcatcactntcttccgaagctttaacctcatcatctctcatagtctttagatttgggagccaatccaatccttgtgtccggactctcagccacttatgatagtcgccgatgctcccattactgcttccnctaagctctctgtcctttcttcacaccgcatcacatg

SEQ ID NO: 85207 - DNA, 451 bp, Glycine max
  unsure (1)..(451): unsure at all n locations
agctntgatggtgttgagaagatatcatatgtttgtcatcatcaaaatgggggagaatgtgaatgtatgtatacatgattttgatgatgtcaaaagaagaatcaaacaaggctcattttgcttcaagattaatacaagattgtttcaacaaacaaagccttgattcaagatttcttcaagatcaagccttgcctcacaatgaaaggtttcaagtcattcaaggcacatgtaatcgattaccaatgatttgaaagtgtgtaatcgattacacatcatatgtaatcgattactagagactctgaatgttgggaattcaaatttgaaatttgaaatttgaaaagttaaatttgaaaattgaaaattaaaatttgaaatttgaaattaaaatctggaagttggaagttggaagtagtttctggaagttgaaagttaaaaatggaagttggatagt

SEQ ID NO: 85208 - DNA, 428 bp, Glycine max
  unsure (1)..(428): unsure at all n locations
catgaagcttgaagcaactggatgcattggttacttgttacccagctggccttgaatcataaatctgtacctgtcacacgggtttgtggatcgtgctcctctgctgaccaccatacagacctttgcccttccatgcagcaacactgtagcaattgagcagctataagcttatgctgcaaatattcacaatagacctcctcaacctcagcagcaaaatcaaccacagcagaacaattatgacctttccagcaacagatacaaccctggatggaggaatcaccctaacctcagatggtctagccctcagcaacaacagcagcctgctccttccttccataatgctgctggtccaagcagaccatacatttcttcaccaatccaacaacaacaacaaccncatgaacaaccaacagttgaggcccctccac

SEQ ID NO: 85209 - DNA, 370 bp, Glycine max
  unsure (1)..(370): unsure at all n locations
acaattaagcttcaacagtgtcatgagttaagtgtgtaactgcatcaatgtgcatgggacaggcacttgacgggtatactatacttcaccggcattaatatcgntctgacgattgttgctgctattctctgtgtgtgcttagcacccacagcagcatgacctggaattcctgaaacacagcgtatcttaatggtgtgatactcccaacatgttaggtgctcaacattgattgtaacgaacattcatacttgattgatgaacactgctctgtccttcattgaacattttgataaactccacaaccagtaagagttaaccactataagatatttgagagtcagagtctattgtacgatgaagtcatgagaaa

SEQ ID NO: 85210 - DNA, 448 bp, Glycine max
  unsure (1)..(448): unsure at all n locations
agcttacttgtgctgttgtatatgagtgcaatgagggagcaaaaatgcaggccatgcagggagattgaagtactgtgtagagggtgaatgctatgaatgggagaaaatgctcagaggaagtaaaatggtaactacctaaggcagttgccttatttgctggcagtttcgaatgactcgcttagcgcatggactcgctaagcgagtcaacattacgtttgagttttaaagctcatgcgcatagtggatctgctcgctaagcccaatacaaaattatgaaattctagagaagtttttgggcttagcgcgaaggtatatgctgggcgagttctgcagctttgattggtcttgcaactctcgcttagcgggccaaggccgcacttagcgaataaaatgctccttgaatgcagnagtggcccacgcttagcgtgtctgtctcgcttagcgctat

SEQ ID NO: 85211 - DNA, 358 bp, Glycine max
  unsure (1)..(358): unsure at all n locations
tagtgctttgattgtcattattatctcctatttcttnctctttcttgtaccaatataattactgactaactctcattgtcaaatttattattcagtgttatcaattgggcccacttgactaatttggtgtgtttaattcaatttcacgataattataagcaattggtctgagcccgattgaacttgaagagagaagacaactttgttagatgtcgtctaatcttattctattggcgtcaatatttatttagtattgttatattgatttacgccaaaatatagtaatcaggcccagtgactctgagtgacccttatatatagcacagtcttgggattcatgcatgctattcttgtattc

SEQ ID NO: 85212 - DNA, 293 bp, Glycine max
acatgagatgcgatgaatccagccgctccagtaatgaagatattactcggcgtgtgcgtatccatgtcaagagccttctatcataaaaatacaggagaggcccaatatacaaatcagaatcacatcacattcaccagaaagatataatgaatgatcataatagaacaacatagcatactacaacaattgtcatcttatcatacacagaagagtccattactatattaaaggaaagccaacttccgcataagaagttcataagtataatatgaagaaatcaagcaactatgaca

SEQ ID NO: 85213 - DNA, 450 bp, Glycine max
  unsure (1)..(450): unsure at all n locations
agctngttagtgagagttctgcaagttcttcttctgtgagtaatgtctcttgcatacttgtgctgttgtgcaggcttacctttctcttaactgttgttttcattgaaataaagcagctgacttcattctttgttgtctatattggtggaaatggaatcagatgttatcttttatctgtacttaaaatttattagtctaagctgacatttggagttagctgtctttcctatgattctacttgttttatgaaaaattgcacgctcgttgtgtcaaatgtaattatcagagtgataagtatcttggttttcattaacattaataagcatcagaggaggaatttatttatagattataaaacttaatgaatatatagtggaaaatttacaaagtggacctctttaaaacaaaattatactgttatatttattgttggctgctatatgggtggta

SEQ ID NO: 85214 - DNA, 522 bp, Glycine max
  unsure (1)..(522): unsure at all n locations
tcctaaatgctatttctctgcatcacattgatagaactagaacaaatcttgataagttcatatggnggctctctaaaatgtattccccttgcaaagaagaaaagctatcaagattttccagactaaaccactcaatgctgatgtgggacactctcaagtactctctgacatcaatggagattgctgcacggtgtggaaagacttctttacaccaaactttgctcttagtgcattgtatgaagaactgaaatcttcaagtggctntatattatccctgatgctgaaacttgttcaaaagacacgaagtaataattctcttcatgttctacaaagatctagaggtgctcaactctcggcagaatcaattagatctggcgtatccctgaattacgcanataatgacgagtctgcgagaggtacaattcttgttcttagttctgtttattggttcnacacaatgatatactaccttatagtatatgtaatgtatacgactcttctttaatatcactatcaattgga

SEQ ID NO: 85215 - DNA, 314 bp, Glycine max
  unsure (1)..(314): unsure at all n locations
agcttangggcagatacgagcaggtgctatgtcctttatcaatcaatgatcatcctgcgtccagctcaagacgttaaagagtctattttcctgctttaattttgttctttaaaattcctgcttttatttatttgtctattttcttgaatattatctgaatttgcctatttatctgtgaccataggagtttaaaaaatataaacatgaccaggaatgatcaaattttgcaaaaaaataaagggggttagctcgcctgggcaagcatgtctgaagaagaatttaaataggggaggggtgtnctcttttttcatccc

SEQ ID NO: 85216 - DNA, 312 bp, Glycine max
  unsure (1)..(312): unsure at all n locations
catgtggtatcaagagcatcttcatctaggtgatgtttctttgcttcctctatctntttgttcggggaattctctntaattcctagttcttcatcttattctccatgtatatcctccattgtcttgtggnttggtgctgtttatagtatattaataaaaatgaattaattaaatcttagatctacacttcttcttgcatctctatggttcaaattntgtagatctactcttgaatcatgttcgtgtgttgatnttaggttctatcattctcaattcataatatncttgtgctgaacctcagatctaaaattt

SEQ ID NO: 85217 - DNA, 456 bp, Glycine max
  unsure (1)..(456): unsure at all n locations
agctntactatgcaaggaataaccaaggataatttcttcatctgacttagcatcaaattntcctaagttttcttttccattgtttaatacaaagcatttgccaccaaaaacatgttgatgtgagatgtttggttttctaccattgaacaattcatatggagttttcttcaagataggtctgattacagccctattcatgatataacatgcagtattaacggcttcagcccaaaaatattttggaagaggggtatcattcaataaggttctagcaatttcttccaaagacctatttttcctttcaacaactccattttgttgaggggttctaggtgcagaaaaattatgttcaatgccattcttttcacaaaataaatcaaattctttattttcaaattcacccccatgatcactcctaatagatataatcttgagactcttcttatattgaataac

SEQ ID NO: 85218 - DNA, 457 bp, Glycine max
  unsure (1)..(457): unsure at all n locations
ctcttggcccttaactactgctggcacctaactctgtgaaatgttggctacccaggcctggtactgctgccgtaactaaacttttgttgtatatctaatggctagcgtgcggcacggctaacgagcatgcttccggtagcctgtgtgctcgctagcggatttgcangaaattcctnctgcanaactctctaagccctatgtggcatgctaagcccaataatatctctgaagttgccaattcattnttggggcttagcgcacaagttgggcttagtgcgcacaanaaaaaatcaaaatttcttgacttctattttggatgtctcctacgcacaagttagtggcactacacgctagccttagtgtcctcaatgttgattttgtgttggctaacgccagtgccctaagctaatagctactgtctttttgtgtcaatggctacattggtactttatagtac

SEQ ID NO: 85219 - DNA, 455 bp, Glycine max
agcttgagccttaaaattacacttacacttatttttatgtgaatggatttgatatgtgcatttccggttaatccatggatcaactattctttttcttaacaatagttaaactagaacactagccctaacaattcaacaacaaaaaaatataaaatagaacaccagcttgagaaccctgcctctaactgtttaaggatgagcgtggaatgaattaaaatggatgtatctttatttctatctaagtcgaagatttgatgaagctattatttatttgaatttgaattcaaacctatcaagacatgatataatatgagataaaattggtcgactggatgtattaatataatatcttttttgtcttaagcagaaaaaaaaatcacaactaatttagagttgtgacaaaaagataagtagaacctaataagtattttcatcataaatcagacttgaatata

SEQ ID NO: 85220 - DNA, 390 bp, Glycine max
  unsure (1)..(390): unsure at all n locations
actttattcttttatttcctacatcagtagttacacgaaaacatgcacaaagagttatcaatatacctcanggagctgcagatgtccatgatatgcattagaagatttaacaatctgtttcccacttatgatgcaatggtgttgtcttgcgagtattagtgtttgcagtaaaggtggactgtgaagtcatgtttctttttgcaatggtatgtaaagtgcgcttaagccaagactctgatggagctcttagtgcacgaagggcatgaagaagttcaaaacagcttgcaccagatatttcttgatggcctaactttgtaagacattggctttctaagtcaatctttccattatatctcacctttgagctagccaaagtgcattcttcatcaa

SEQ ID NO: 85221 - DNA, 439 bp, Glycine max
  unsure (1)..(439): unsure at all n locations
agcttttgcggaagagactcagtganaatatagaatgtcttctaaagaggganaaaatgctctctattnttttaaatgaagggcaaaattgacctttccatgaattgctgggtgcaccagcaatattactgggtgcacctagcataatccgatatattattggcctaaattacacatctgagtcaaaagttatggtcgtttgatttgccttgcactctgatgtttaatttcgagcatcttgatatactatgcgcctgaatcggacatccaagtgaaaagctatcaccagttgaatttctcgagactttccgttgtttaatttcgagcgactcgatatattattgtgctgaatcggacatcctagtcaaaagatatggctgcttgaatttgacttgccctttgatgtttaagttttagcatttcgatatactatgcgcct

SEQ ID NO: 85222 - DNA, 407 bp, Glycine max
ctgcaagcttaacctcatcgtctctcatagtttttagatttgggagccaatccaatccttgtgttcggactctcaaccacttatgatagccgccaatgatcccattactgcttcccctaagctctctgtcctttcttcacaccgcatcacatgccttgtgaactccttagagtaccctcacattggggtcactgaaaccccgtgtgatgaaaggcgtgatgctttcatctgatggcactcctctcatggggtagccaagctgtcttatggcgaggatgggattataattaatacaaccccttgttcccatcaagggaacatttggacatccttcgcatgaagatagaatcctgattcttccttccttctagcgagggaaccaattaacagacgcccctccatgctag

SEQ ID NO: 85223 - DNA, 446 bp, Glycine max
  unsure (1)..(446): unsure at all n locations
tactcagctcggttggagtacttacccgtngaagaccgaagaaaacgaataactttcgatgaatcttgaagaacggtcgagaatcttcgcgtaattactcacagaaacgttacggaagcgcctcggctnnggatttcttcacggaactaattntcctcaacaatttcgagagagagagaagtgcctaaggggctgaaccctnttcttcttcacttctccccctatttatagcanaataggggagaagcttgccgcccagctcgcccaggcgagcaaggttgcttcctccagaagcaacaaccttctggaggaatcttctggagggcccaagtgggcctggttgctatttgcacccnctttntactaaatgcacccnncttctatttnttggtaattctntntccgtaacattacgaaactttacaatattcgtaacgatacttatt

SEQ ID NO: 85224 - DNA, 444 bp, Glycine max
  unsure (1)..(444): unsure at all n locations
agctttgcctggaaatngtcattttgtttattaatacccatatgaatcactggttcatacggatcaacaatccgtatgggttttttttattaaatataattgggtttttttaatttttttttaaattataaaaatatgtttaaatattggctggtaattttttttaaaaaaaaataattattgctaatgccatacggatcagtggtttatacggattgtgaatccgtatgaaccatatggatcactaatccgtatggttttttttttgtctttttaatttaaaaaaatgcttaagttgatttttaacactgtatttgcttttgtgccatacggatcattgatcccgatgatttttttaaaatatcttttatgaaccatacggatcaatgatccgcatggttnttttttattatttttacatttataaaaattgtaaatgttttt

SEQ ID NO: 85225 - DNA, 399 bp, Glycine max
ctcagcttccaccagaggtcagacagatgctgtggaagggttcatgtcttccacagggcatggatttgagggcacaattccaagtgaggacaccacaacgacttgaggccattaaaggctggtcgttccttaaggagagacgagtccagccgatggacggagagtatactgagtttcaagaggaaatttcccgaaagcaatggactcaactggtgtcacccatggctaagtacgacctatagatagtcatgtgagtttatgccaatgccatgcccacagaggtgggagtaagagacaaacgctcctgtgtgaggagccactggatccccttcgatgaggataccattaaccatgttctgggcatccattggactagaggacggccatgctgtagtacag

SEQ ID NO: 85226 - DNA, 449 bp, Glycine max
agcttgaaggtaaacttgatgccttggttaacttggtaacccaattggccatgaatcaaaaatttgtacctgtcgccagactctgtggtttatgctcctttaccgaccaccacacagacctttgtccttctgtgcaacaatctgaagcgattgaacagcctgaagcttatgctgcaaacatctacaatagacctcctcaacctcagcagcaaaatcagccacaacagaacaattatgacctctccagcaataggtacaatcccgggtggaggaatcatcccaaccttagatggttgaatccttcacaatagcagcaacaattttagaatgttgctggcctaagcagaccatacgttcctccaccaatccagcaacaacaacaacaacaactactacctcagagacaacaaacaattgaggcccctccgcaacctttccttgaagaactt

SEQ ID NO: 85227 - DNA, 474 bp, Glycine max
  unsure (1)..(474): unsure at all n locations
cgaagctcactgtgnagtctgaagaagctntagaagatgttttgtgtttacatgctcaactccttntagtggcatttgtattggttgttaacttgattgttgcatcttagtacatttgatatttgttatgcattgtcaatcatcatagtatgtgtgaagaaaattttctaagttaggaaaatctcttcagaggcaaaaactctctgttgtaattgagtacagaggtgtcttaatcgattacaacaagctgtctgaagctttaagagttaagtctcatatcggtttaatcgattacagtagtaaggattcttgatgcatagtggaaatataaatcagggtgtagattagataactgcattagcttctctagaaatagacagtgaacgcggtataacagattgtgtcttatctcttgatcatgatttcactcagtcagggttaatcactcattcaatcacccccctcttggttaat

SEQ ID NO: 85228 - DNA, 398 bp, Glycine max
agcttgcttgtggttcttctatggaggctggatctttgagcttcaatgaggtcctttaatggtgattttccaccatggagatgcagcggaagacaaaggagaagaggtgagaggaggcgccatccactaaagaataaaccatggaagaaggagcttcaccaccaatatgagccttggataagaagcttggagaggatgcttctatggaggaaaagaaagagggagagaaagagagaggggggagcacgatattgaaggaagaaaaagggagagaagttgaactttgagttgcgtcttacaagactctcatttatcaaagttacaacaagtgttacacatggttctatttatagactacgtagcttccttgagaagacttcttgagaaaacttccttga

SEQ ID NO: 85229 - DNA, 300 bp, Glycine max
  unsure (1)..(300): unsure at all n locations
gcacagcaagatttccacatgcacaatgcgcgcataaacccaccatccnctgttgcccacctnctactgagctcacgtactcccacgtagcccatatcctcgtttctctcaataccagggccccatcaatccttccaagcttccacaacatccaagcaaaacaacatacaaacagcacaagctatcacagccaagcaaaacagagcaaggcagagaactctgctcaacacaccaactaanatcatagctnttctcacttaaagacccgagtaacaattccttcgatccaattcactaacc

SEQ ID NO: 85230 - DNA, 419 bp, Glycine max
agcttaaacattcaacttcgagcgtctttatatattgcgagtctcaatcagacatccgagtaaaaagttatagtcgtttgaatttgctcagagcttcaacatttaattttgagcgtctcgttatattacgggactcaatcagacatccgagtaaaaagttattgtcgtttggattggctcacagattcaacattcaatttcgagcgtctcgatatatgacaggactcaatcagacatccatgtaaaaagttattgtcgtttgaattggctcagagcttcaacattgcaatttgagcgtctcgatatatgacaagactcaatcagacatccgagtaaaaagttattgtcttttgaattgcctcagagcttcaacattcaatttcgagcgtcttgatatattacgagactatatcagacat

SEQ ID NO: 85231 - DNA, 439 bp, Glycine max
  unsure (1)..(439): unsure at all n locations
ttatctcntttatcttagtgagagtgattctcctaaattcttgagtgattcaagaacaccttggctgtatcaaaggactttcacaacctttgtgtgttgccctcgctggaaagagtgattcttccctttctttcatcatcacccttgttctttcaaaccacaattccagaanatccacctctgcccaaaattatctcgtggccataactcccattttacgcactncaaataagtgattcttgagcctaaattgaatttcagaacgagacctttcacctcgttttggaatcacctcanttggagccatgtagcttcagttattgccatttctatatttctgtccagccaccacttaacctacgtcttaccatcccattcatccattntatgccaagaaccaccttattaagacccacgaatttagccaccctattttcca

SEQ ID NO: 85232 - DNA, 405 bp, Glycine max
agctcacatcaagtggtatcagagcacattatcttcatgtatgttgctccttaaacctccattaatttatagctttaccttctcctccattgttgaatcttcattttctccatgtatctcctcacatgtcttgtgttgaatgatgttaacatgattttttagaatctccactgatttaacttgctatagaagctagatttgattttctatggtacaaatttcttgctctctgtcttgaaccatgagttgtgttgagtctatgctccattgagttctgttttgctattttttgtggctgaaactgatgagaatactgaaacttggtcatatacaggcttaatgcccaagtgaagatagatgaaagcccctatgcaaagacactatcaagactattaattgttactg

SEQ ID NO: 85233 - DNA, 490 bp, Glycine max
ctaagcttattgcctacaagccacgtacaacagcaagctccaagagactcttcttatgtatgcacaggtcacagttgagtatgagaaaagattgtatgaccaagtgaatgtgcatattgcatagaagaatgatagctatgccaagcaagcctacatgaaaaggaaggatgtggttgttgaacccggtgatgatcctggacatttgaggacaaatgttgttcaagaaggagggaatgatgagaatcatgaaactggccatattcaggctatagacccaagtggagagagacgatagcctaagtggagaacgacaaagcccgcgagtggagaaagatgaaggcctacatgcagagacactatcaatacaattaattgttgctaaaggcccaaactacattgagagcccaagtaaatatgctttaattatatttattttattgaattttgcccaactgttaaacgccatgttatttatctttaatcaatcaca

SEQ ID NO: 85234 - DNA, 445 bp, Glycine max
agcttgacattaatcatatattatgcgtttgttatctctgctggcacggcctatgcaaaagtgggagacgcataaatggtttatacatgagactataatatgacaccataacacaccttggagcagctcaaattgatcgactacgacttgaccttcttataactgagcaagagcatagtcggttgtatacatgtaccttactacagttatcaatattgtagcgagggtgataactgatctgttcttgcttggttattgctaaatttctacaataattttgaattttgaacttacttttcatggactatctacctgcatatattagttatcaaattgatcgactacaacttggccttcttataactgagtaataacattgtcagttgtataaatgtaccttataacagttattaatattggagcgtgggtgattaatgatcctttc

SEQ ID NO: 85235 - DNA, 504 bp, Glycine max
  unsure (1)..(504): unsure at all n locations
gagtaagagtagcataggttcttattaccccactttctctcanacttcagaaggagttgtggttatggtgttacgaaagacagtgccgctctatatagtttattacacctcgttaacaccactaattaattaatcatctttaaagatgtacagtgatcttgatctaatcaaaattggagaatcagtctcggacactctaagtctagggtatagagtattgacactcgtcatctattcaaattgacaaatcatcggacaatcatgggtatagacactcacagaaaggagaattatatacaataatgaggatgtatcacattgaataatcatcggacaatcatgggtatatacactcacagaaaggagactatatagaataatgtggatgtatgcagattcatcttattntcttaaagtaaaaataagtgacttcttatgactttaacgccgtagcaatggagctatgttaattgatattaccattatctattcacaactctaata

SEQ ID NO: 85236 - DNA, 327 bp, Glycine max
tgctggaagtagaagatagtataacctttaaatgctacctctgtcatttattatataaatgagtattgattatatataatcatttaagaattcatctctattatgagaaacactgcctaggtatgttttggataatgttcaacagttgcttctttgctccattgatttctttacatacattaaaatatagctgtcgaatgtttccctgccatagtgttgatttactgaataatcgacgcatagctagcgctgataggataactcatctatcttgcggctgaacaacaatgctgcgagaatattgtattgtgatgaatggaaggagtc

SEQ ID NO: 85237 - DNA, 249 bp, Glycine max
tcttttctagacatatatatagtacgactcatgatcaaaatccaacttttcgaaacaataattgtgggcaatactagttaatacattcgggtcgatgcgccataatgagaagattcataaattctaattcgcttttaaaaattcttgtttgcaaagtgtaacatagtactctttactatctatgtaaatatatctggtaccaatgacacgctaacatgtgagttattcattttgattgagttgttacaa

SEQ ID NO: 85238 - DNA, 471 bp, Glycine max
gatcacttgagtcacctgccgcatgcaagcttcaatactcatttagacttcctttttcatcactgagtcgagtctcctttgtagttgtgctactggtttgaagtcctcttcaagggtgatgttgtgcatgtagatggatgcgattaatcctttgaggtcgcagatttgccatcctaaggcttgcttgtgcttctttaatacctctactagtctcttttcttcttctttgcgtagtgtgctactaatgattgtctggttctcatccttactatctaaaaagacatatctaaggtgaagaggcaaggactttaattccaagataggtgatgacgacattagtgcatttgccctcgtcatccactcgtaaagtgcatttgccctccataacactgatgatgacattagtagtattcatgaatggtcttcctagaattaaagggacaacaatgttttctttatatccacgatgac

SEQ ID NO: 85239 - DNA, 390 bp, Glycine max
  unsure (1)..(390): unsure at all n locations
ctcagctcacaacactggcacccttccttgaccactttatattttcttctacaaccacttgttagtggttcctccatttctctcataatatcctaactgttcttttttatcccactataaccgttccttgatggtgaaagtgttatagttagtgtcgtatactgttggactctatgaaacatcatatgtaccatgccacatccaaaggacatcatctacatacantaaatgtattttggtcttgttaccaaatatagtatattaccatggaatgtaaaaactaaatagtaataacaaatgatagtatattatgatggatagcttccacaatctanatcagtagaaacaaacttctagaaaactttcaaattccaatgaaaacttgataag

SEQ ID NO: 85240 - DNA, 438 bp, Glycine max
  unsure (1)..(438): unsure at all n locations
agctttgtatttgaatgcaagagagcattattatgagtgcatggnnggggggatttccctttatgacaacattcagttttggggctgcaccatgatgttttccttgcacctagatgtttgaaaatgcctcatgaaatgtatgtatgttgcatgtaggtaacaaatgcctcataaaatgtgcatgttgaatttaggtagcaaaaataccttattatattaagtagcaaaaataccttactaagttaggtagcaaaaatacttgaatacgccttaaatataatttatgtagcaaaatacttgaatatgcatgaaatgtagtttgggttgcaaaatacttgaatatgcataaaatataatttacgtagtaaaaaatgtttaaatatgcacgtgtgcatattttggtagcataatacttgaatatgcatgtatgtagttgtt

SEQ ID NO: 85241 - DNA, 451 bp, Glycine max
  unsure (1)..(451): unsure at all n locations
ctaatttgtagaatataatagtctgccttcttcaagtccaagcccaatgctagattcaagcccaatgcttcattaattcttgaaattagattaaaaacatcaaattagctgaatgggcccaaataataaaactgcctaataaatttgacaattaagactaatcagtattntaaatggtgcaaaaaggggtaagaaatangagaanataatggcacatcatgccggctggctaaaatttgaggagcataattgcttgtgaattctgacattgtcgagtgatactacgcatgatacttgnngtcaattgaagggtgttagatgtctccaatgacttattangattttcaagtntatgccattactgtaaacaatagttaccgtgcanaanatatnggataaattgatgtccttgcctctattctctcacaatacatctttggtattatttaca

SEQ ID NO: 85242 - DNA, 453 bp, Glycine max
agcttcggaagaaagagatgatgtactatcttcttaggcagagcttgaaagagtccgagtagtcgaagagaagttcaagtccatagccatcaatagtctgaaaagagtatgatgaactaagggacgtcaatatggccaccgctgaagccttggaacgagaaaccaatatagcccgaaaggaagaacacgaccaaagcaaagttttgaggggctttatagggcagcaatagtgagctcacgctccaaagaggtgaaaggaatcatcacgggtcataggcatgatctggaaggacgagctaaaggtttgccttatgtcgaaaagaaatttgtcccaacagttaagcgagactgaagggaatatgtgggccatcatcgataagtgcaaagagaagcttaatctagcggcgactcacgagcaaaggctagaggatgagtacgccaagatatcagcag

SEQ ID NO: 85243 - DNA, 528 bp, Glycine max
gctatacgcatatttccttacatacgttctcttgcacaagattttctatttccggataaaaatgcacccatatacaatcaaggcagcttcgttacctagattatttacacgtacttccaaggtgtatttgttacttacatcacacacctacttggctaaattcacatacatgcatactcaaagcatttcggtgtaccaaaaattgcacatgtgcacatcttggtatatctaatacctatacatacacaaacttcatgatgaatcttgactatctacacaataaggtgctacactttatgctcttttcaagttattgctacctaaagccgcatgcaaattcaagtatattgtgctgactaaaattgctttcaaatcacagggataccatttttggtatgtatcttcttacatacatgcacatattatgatattttttggaacattttactccataattattgtcatacatcaagatcttgtatataccaagtgtaatgcaaagtatttctcctatttaacctccattat

SEQ ID NO: 85244 - DNA, 464 bp, Glycine max
  unsure (1)..(464): unsure at all n locations
ggatcttaagcacctgagctgcagctgctctaatnacattgtaatacttattccaatgccagatgtcgnacaggatgtcacgacatcacgcttcagaacatgcagattatctctgagtgtatgaacagattaaacaagtaaataacacaagagaattgttaacccagttcggtgcaacctcacctacatctgggggctaccaagccagggaggaaatccactaaaatagtgttagttcaaggtctaacagccactgtttacaaccttctcacctaaccactacccgtgcaacctctacctaagagccactcttagatatgagaacccctctcactccctctcaaacactctaccgtgtttacaattaaatcaaggacacttcagagattgctctctgaacaaaagagatcaactctacacactagagatcaactctacacactcaggtccaacacttgatgtta

SEQ ID NO: 85245 - DNA, 482 bp, Glycine max
  unsure (1)..(482): unsure at all n locations
ctcagctgaggatatggggacccatacatgtggactaggtggtggttgggcgatagtgcacnaacaagtttccacatacagaaagcgcgcataaacccaccatccnctgttgcccacctncaactgagctcacgtactcccacgtagcccatatcctcgtttctctcaacaccgggtcctcatcaatcctnccaagcttccacaacatccaagcaaaacaacattcaaacagcacaagctatcacagccaagcaaaacatagcaaaggcagaaaactctgccaaaacaccaaccaaatcacagctgttctcacttaaagaccccagtaacaattccttcgatccaatntggtaaccgttggatggactccaaaatnntactggaagtctatagtacataagcctacattgtgaccgttgggatctactagcaaacatncagaactcattctgactagactttcacagccaacacacacaaca

SEQ ID NO: 85246 - DNA, 436 bp, Glycine max
  unsure (1)..(436): unsure at all n locations
agcttattatcccaccccatgttttctattagttgaaaatacattctggtaacgaattatgagcaggtgatggacctggtacacaccatttggaagcaggaaaaagaatattcctaattaaccataattttttcaaaagaattttatgtacattaatttattcatatataatctcaaagtatactaaaatagatatacaaataatataaatntgcaacttaccaactgaattcagcgtacataggtagctcggggatattgttgttgtagttgttgccagtcaaagagagtctgcataaaagctngaacaatttcagtagcctcataaatgatcaaaaagtgcataaatgaaattatggaaatggtggaagagtaattaagagaataagaaccgtatgatagcgcgcgattgcgcgcaccaatgggaatggcagtt

SEQ ID NO: 85247 - DNA, 420 bp, Glycine max
  unsure (1)..(420): unsure at all n locations
ctctnttctctctntntctctcaagggttcttcattcttcttcctctattcactntntttcttcctttctcttgcacaaatttaatgccttttccattggtgatgatcatggaagctaaagacttaatcaacccaaggatccactccaagcaaggctgaatttgagttctggtttagtatctctaatctttgtgaatgttcatctttttcttcaatcctattttcgatcttcatgattatgattatgcttagaattgaaaatggattacgttatggattcatttcctaattntcaaatataatcacagattggttggatgattttccaacataattngcattctcaaacaatntaaggattaattcaattgaactatctctaatacattngactgaactttcacactctgaacatcattc

SEQ ID NO: 85248 - DNA, 432 bp, Glycine max
  unsure (1)..(432): unsure at all n locations
agcttgatctacaattcttaacacctcttaacaacatggaaatcacttgaatatgctttgtctttccatgctaaacaggattttcaccaatgacaattgcttatttactgtcacaataaatctcagtagcgtccatcttctccactcccaaatcaaacataattttcttcaaccaaatggcttggtttgttgctgcagctgctgctacatattcagcttcagcagtagattgagttacaatgtcctgcttctttgagttccaagagaacatgtgtgagcctaaggaaaaaacatattcagtagtgctcttcatgtcatcaaggtttccagcctaatcattgtcaacataaccaaacaaacttccattttcatncggtttaaactagattctaaattgagtttcaagtacttaagtgctctctctgctactac

SEQ ID NO: 85249 - DNA, 490 bp, Glycine max
  unsure (1)..(490): unsure at all n locations
tctttnggaccttgaacaggcaactaactcctctttataaccatgctatgtgctcgcgactggtccctctcttcctttcgcaacttgagttcactattgctaccccatagagctccgcgaaatttgttccggccatactcttccttgcgagccctcttggtctcttgttcaagggctcttgcggtaattgcattctcttcccgtaacccggcgcactccttccgaacgtgtgtagcaaccaacttgaacttctccttggcgagtgttgcctttcctaactcgcttttgagagcttggacttcttcgtcctcttccggtgcttcaaaattctcttcggtgacgactnttaactnggcgagccaatctaaacctcgtatgcgaactttcagccattcgtggacccaccaatggtaccatacgaatgcctctaagctctggtctttcttaacggnngttccatgcctattgattcttgtataacctggaattt

SEQ ID NO: 85250 - DNA, 454 bp, Glycine max
agcctgtatagtagacctgcgcgcatgctagctcgcagacttttgatttatctgcattttccaaactacgaggctgagtcataaatacatatccctcaagcagacccatttagaatagcattggtgacatcaaactgaaataactcccacccttgagaaagagcaagagtgagaataacacacattgtgacaggcttgaccacaggaaaaaatgtctcatgaaaatcaaatccatgaacctaatgaaacaaaccccttagcaaccagattggctttgaacttgttgatagaaccatcaacattttcttttactctgaaaagccatttgcacccaatagcttgcctattacgaggtaggggaaccaagtcccgagttctgttctacagtaaagcatcatactcctcttgcatagctgagaccaatctgaattttcagggcctctttgacagtctt

SEQ ID NO: 85251 - DNA, 243 bp, Glycine max
  unsure (1)..(243): unsure at all n locations
gcctcttcaactcagtagagaaacatcccactgcaccacactcacatgctaaatgatcgcttatgtggaagatatatgaccccagactacaagctagtagagacttattctcatggtccacatcatatatgcctataatcaactgctaagtccactatcacatgctagcactctatctataatctagacctgttgtgcanagaacatataaactagatcccttctagcggataattatggatg

SEQ ID NO: 85252 - DNA, 459 bp, Glycine max
  unsure (1)..(459): unsure at all n locations
agcttcagaccaaagcaactcanaatctatgtatctataacccctctatttagtggattttcaaggtttgagaagtgaaaatgagaatagagtaaatttggagcaaactctcacctcacacaagtctataacatcaatctaaacttgctcaaactggttttgcacctaaaattccaacgaatcaaaatttgactcctcaacacccaatcttaccctagaaatggctcttgccttcactttggtcatttgtttttctctcttgcacaacccaagctntctcataagtcctaaatgacatttcaaactaggattaactccctttaacctccaaataccactaaatccagatttggccttcccactctcaaagcctcactttgttccactcgagacaccatattctcactgtctaaccctaggttaactctacccttcatctctaacagttgtccataagca

SEQ ID NO: 85253 - DNA, 473 bp, Glycine max
ttatgcgagacagagaccaacatgctagctatcatcgtcttgtccaagaagagttaggtctagccatggcccacgagcatagaatcgcggatgagtatgctcaagtatatgcggaaaaagaggctagaggaagggtgatcgactctttacaccaagaggcaaccatgtggatggaccggtttgctcttaccttgaacgggagtcaagaacttccccgattgttagccaaggccaaggcgatggcagacacctactccgcccccgaagagattcatgggcttctcggctatggtcagcatatgatagacttaatggcccacataattagaaatcgttaggaaacttgtatggtctctcagaccttgactagatacgacttcctttttgaatataatgaagttgcccatgctctacttcacaagctatgcaatcaagcactcccgctttatctctacatgcattgtatgtggctc

SEQ ID NO: 85254 - DNA, 460 bp, Glycine max
agcttgtgctaagtctagatcagattgtttattatgcccagcgccaacatggacaacatttacgataacctagcaatatataatgtgttagcaacaaataggaaatgttagtacaacgcaaaattaaaagttcataacaacttatagtacgtgagtgtcacaaagctggctcacatgtatgccacacccggtaataattaaaagcaaacaattctcagttgtccaagatatatagtgaatgtgatgaacaggaactgactagtgattgcattttttttttcaatactgatcactcaagcaaatacctttccacatgtcattttcatcaggccaccatataaacctttattaaatggattactcaatagcattcataactgttatatcaagtaatcaaacatcttctttaaataaaagcatctcactcgaaaccttactcaggtagatgcatgcactttgg

SEQ ID NO: 85255 - DNA, 424 bp, Glycine max
  unsure (1)..(424): unsure at all n locations
actccaagcgattattctattttaatatctaaataaanattggtcaagttntttaagagtcacgaatgtatgtggtcaagttattntagagtcacgaatgtaatatgtttaataaaattagctgataaattaactaagaacttatacgttataagttaaaattaaaagttgaaaaactgaacacttgaaagcttataaattaatttaatcgatttaattagaaatcatttctaacattaactagtagatatataatagtattttaagtattggaatatattttaataatttatcattgtaaaaaatagaataatatttttttaagaatttatatcataaaagaatgataaaaactcgatgaatttcattaanattaactgatatttctttgaactaacaagactaaatacttaatcagtttatc

SEQ ID NO: 85256 - DNA, 453 bp, Glycine max
agcttatcttgaaacagctggtagatacataatattgctattatgtgagaacagaagatctgtctataagttagagaatgtttgttttgtttgacttacagttacaaaaatgttacttgtttttatcattctttcacaaaatcatgaacacaaataatgaaatgttttcttggtgatgattttataattatcagtggaaacaaatgatctggaaatgaagtggtataaagaccaaatacaacctaacatttttttttctttttttactgcagttaattggacttggatgctgatgtaattgatccactcatgggaatacacctcgccttgtttctctttctggcttttcttcgaatgactttatctcaagatattgaacatggttcaattctagtagatggaattcaagcaattgctgaaactgatgataaattcatctgtgctactattgat

SEQ ID NO: 85257 - DNA, 455 bp, Glycine max
  unsure (1)..(455): unsure at all n locations
atcgactganataattctgtcgctatntggatatttatattctcattcttactaatatttaattattaatattaatatattgtaaatatttcatatacaattgtaataataataataatcataacataatttaggatatgattcttttaaaacaaatatttttcatatntttgtaaagaagacctaacataaatatgtcttacaacatagttttttttttcttttataatagaggcactttacatgtttgcatgtaaatggtggttaaaaaacgctaaggtgtgctaagtttgaaaatggattatgaactatctaaatttataatagtaagagcatatcataagggaaaaaaggataaaaatatctctacattatacatttctaaatattttctactctagaanaatagaaatattatctagatatatttttttggtaccttgaattaagtgata

SEQ ID NO: 85258 - DNA, 413 bp, Glycine max
  unsure (1)..(413): unsure at all n locations
cactatatggntttcttgaacatcaatgtatacacaacgcaaaggacaaacgttaagaatctcaacaatacatctcaacatgggtcaaggaatcacaacgacaagtgtacctgtgagcttatctgaatcagtaagtccacttgatgttgaaaaatgtttagaaaatacattataattgcgtaactaatgttttttgtcttcacggcacattggcaacttactgttctatgtccatgggacaaaattgttgtgtggttatgttccctacgtcagaagcctgaagttaacatcaagggtgaaattaatacgttactttcgtaatttaaagtcaaatattgtataacaactatagtggttaaacataatggttttgatattatataatgtattggcatttcggaactagtgcaatg

SEQ ID NO: 85259 - DNA, 377 bp, Glycine max
  unsure (1)..(377): unsure at all n locations
acaacttacaagtctntatttttcccatcccagtctaaactaagtgcacaagcaatttctaatactttaaattaaagtgttcgatgaaattcattagcatcttttgaattaattaaatgttaagaatcatacatactggctccaatgtgaacactaaggatgcaaaccattgaagaaactatggaagcaatgccttccaagattatnttgatgatgccaaagaatcaagagttaagcaaattcctaagaattaagaatcaagtttcaagaatcaagattcaaggataatcaagatcaagattcaagactcaagattcaagaatcaagagaagactcaatcaagataagtactaacaaagtttttcataacattgagt

SEQ ID NO: 85260 - DNA, 476 bp, Glycine max
gatcttaagtcacctgggctgcagctgcttctacactcccatttactatgggcctaccactattcgccccaaacaacaaccaaggagactccttctgtcttacatatggaatagatgccatgatccctgtataagtcaaggaacccttgacaagaaagctatttttccagactcaacagaacaaggcaaacatgagggtcgaacttgatataagataagaagtccaagagattgcagcaatcagggaagaagctaccaggctccatgcctcaagaagatacaacaccaaagtccggccccgcacctttgagactggtgacctagtatggcgagtttgaggagaggcatggaatattccacgagcaagatagctaggatctaattgtgaaggcccattcaaggtcatggcaagcctcgacaatggagcatatatacttcaagaactatatggaatagccatcttgagaacatggaac

SEQ ID NO: 85261 - DNA, 452 bp, Glycine max
  unsure (1)..(452): unsure at all n locations
ctaagctgatcctgaatatgntctgaattcaactctctcttgaatctttgaagagccttcaacctttcctcttgagtcttgaactgttcttgattccttcttgtacatcttgaactcatcctttgattgacctttgagctgtttgtcatcacctttgtcatcatcattgttatcatcaaaacatctttgaatcactcttgattcaccatgaagctttgcttctacaaagaagataacacagagaacaaacaaaacatcattacatagatagaaatatatttacattagatacctacagggaagatccaatagaggatttagctttccatagtccagagacctctcttacaacaaagagaagaacaagatgaaagactgcataaacacaagtggtgaggatgtctncttcacctctaggatctcacaatcaatcacaaactcattctaagctc

SEQ ID NO: 85262 - DNA, 448 bp, Glycine max
  unsure (1)..(448): unsure at all n locations
agcttggactcatgagtggtaatttgttatctaagtggattggtccctttgttgttactaatgtttttccttatggtacaatgtttttccttatggtacaattgagatcaaaagcgactccacaaacaagagcttcaaggtcaatggacatcgacttaagccattcctaacaaacccttctttagtggacgtagtggtggaagagacttccttactccaccctactcttcctccaccatgacttanggagtttttcttttcctatctccttctttacttttattacatttgtctgattctatntgatggtttaattgcttttaatcttttaattgtgctacattgaggacaatgtngttgttaagtatggggggagtgttctttggttctggttttgcctagtttgttagttccggtaattttggtaatcgtttaaacttgtagcttt

SEQ ID NO: 85263 - DNA, 393 bp, Glycine max
  unsure (1)..(393): unsure at all n locations
ctcagctgaggcaactgatgcatnggtaacttggaacccatatggtcttgaatcaganatctgtacctgtcgcaaggggttggtggttgtgctcctctgctgaccaccatacagacctttgcccttccatgcagcaacctggagcaattgagcagccttaagcttatgctgcaaatatttacaatagacctcctcaacctcagcagcaaaatcaaccacagcagagcaattatgacctttccagcaacagatacaaccctggatggaggaatcaccctaacctcagatggtccagccctcggcaacaacaacagcagcctgctccttccttccagaatgctgctggcccaagcagaccatacattcctccaccaatccaacaatagcaacaac

SEQ ID NO: 85264 - DNA, 440 bp, Glycine max
  unsure (1)..(440): unsure at all n locations
agctnggagaggatgcttcaatggaggtttataaagagggagagaaagagagagggggggatcacgaaattgaaggaagaaaaagggagagaagttgaactttgagttgtgtctcacaagactctcattcatcaaagttacaacaagtgttacacatgctnttatttatagactaggtagcttccttgagaagatttcttgagaaaacttccttgagaagcttctttgagaaaacttccttgagatgctagagcttagctacacacacccctctcataactaagctcacctccttgagaagcttcctaaagaagctagagcttagctacacatacctctctaatagctaagctcacctccttgagatgagaagttagaacatagctacacaccccctataatagctaagctcacccccatgacacaaaacacgaaaatac

SEQ ID NO: 85265 - DNA, 470 bp, Glycine max
  unsure (1)..(470): unsure at all n locations
ctcagctaatgatcgttatgagtaactggtgtatgtgatgctattcacttttgaatgccttatgttgaatttcgcttagtaatttaatntaaggttggattaagtggttaaactgataaaggatatactctcgtaatctaagataagagacttgcttgtgaatcaaggggaagcaacgtgttttaattctgatattttctaattcacatatattcgctgtttaatttacaaaagcaaacaacccctctcacccnccccatcgttactgttactgttactgcaagtatattatgaacatttggcttgtcactgctcgntgggaaacgacctangatcacttcctagttactacatattaatgtttatttgattcgggtacggcctcgatcaatagacttgatgacccatatacatacgaagcgctaagaagtctgtattatcactcatatctngaataggtactactttca

SEQ ID NO: 85266 - DNA, 467 bp, Glycine max
  unsure (1)..(467): unsure at all n locations
ggatccctaagtcacctgcggcatgcatgctatgagataaancnaacgacaattatctttaacttggatgtctaatcgagccctgttatatatcgagacgctcgtaattgaaaaccgaagctctaagaaaagtctaacgacaatatctttgatcttggatgtgcgattgagccctttaatatatcgagacgctcgaaattgataactgaagctctaataatagtcaaacgacaattactcttgactcggatgttcgactgagccccgtatgaaatcgagacgctcgtaattgaaaacggaagctctgagaataatcatacgactataactcttaactctgatgtctaatcgagccctgtattatattgagacgctcaaaattgacaactgaagctcttagataagtcgaacgacaataactctttactctgatgtgcgattgagcctcctaagttatctagacactc

SEQ ID NO: 85267 - DNA, 231 bp, Glycine max
  unsure (1)..(231): unsure at all n locations
ctcagcttgcttcatacgagcgctcgaatanacgggactaatttacatcttattaataagcnatnatgcgggagaatcatgttagagctacagttctcactttcgagcgtctgcgatatactacaggacatcattcgcacatctcgagtctagagctattgtctgtcgaacttgctgagcgcatctgggaatcaatgttgagcgtctcgatatttaaccgggctctatccg

SEQ ID NO: 85268 - DNA, 451 bp, Glycine max
  unsure (1)..(451): unsure at all n locations
agcttgaagctcaagggaaattttgaagattttttggcttttacatgccaaactcctttgagtggcatttgtattgattgttaacttaattgttgcatctcagtacatttgatatttgtttttcattatgcatcatcatagtgagagtgaaaaaaatttcctaaccgattactaggggggttaatcgattaattctctcttgtttaaggtcttcggaggtgaacaagaacactntaatcatttacttaggtcatctaatcgattacattgttcttgaggtcttttccagatgttggatgaatactttaattgattacttagataatctaattgattactaccttatagatttaatcgattacaggtggttataactgttttctctataaataaccagcttgtgttcacatctacacatcatgagatcattagagaatactcaatacatctc

SEQ ID NO: 85269 - DNA, 434 bp, Glycine max
  unsure (1)..(434): unsure at all n locations
tactcagctcggatttctttagtagggaacctatccttcctaagatggagctcttctcagtcacncttattaagaactaactttgttcttcctctattgcctttagttgaatacacctttngttggttctctatttggttcttaaccctctcatgcaacttcttacaaactctgacctagattccccttctttatgtataaaagaagtgtctagtgggaggggaatgaggtctaacagtgttaggggattgaacccatagacaacctcanaaggggactgcttggtggttctatgaacccccttgttgaggcaaattctacatgaggaagatacttatcccaagacnttatggttcctttcagaagaacctntaaaaggatggatanagacctattcactacctctggttgcccatcagtttctggatgacaag

SEQ ID NO: 85270 - DNA, 389 bp, Glycine max
gctagagacttttttttttcagcttttgctcaacggctgtcaattttggagaagtctttgatgaacctctaatatagacctgcttgtccaagataactcatgataccctttgcatttactggtggtggtaaacttctctataacataaatttttgctctgcacacctcaatacctcacgctgaaactttgtggcccaatattatcccttcttgaaccatatagcgacacttttcccaattcaacaccggattcgctttatcacatcttcacagcacaagctctagattattcaagcagtagtcaaatgagggcctgaagactgataaatcgaccatgaagacctctatgcacttctctaccatgtcaacaaagatggctagcatgcacc

SEQ ID NO: 85271 - DNA, 416 bp, Glycine max
  unsure (1)..(416): unsure at all n locations
ttgccactatggcgtntcggtttttgcctttgatcttgtctgtggtgaccagtacggcgggcattntgtgttgatagcaagcattaacttttagtcgtacacactattgttactaactagaccccatggttatgtttgttggaacattaattaatagagttctgttgtggttgttcacccctctggtcacttacatttatgcagtggatatactactatactatttgtagaaataacactcgaacaaagagtaatggataattagatattgtggggttaagctagctagagatattcttcccatgtaaagatatatgtgggggtgaggtagatattctagcatgtaacatagtatgataatatagatgataaacacaaatttcagatttgcattgtatcacaaaggagtatgctgt

SEQ ID NO: 85272 - DNA, 416 bp, Glycine max
  unsure (1)..(416): unsure at all n locations
agcttacctgttatcaatgattatatcttttgcacccatctttgagctaaactgtaattgtattgaaccgtgagccttgagttgtaattcctatttaccttgcttaggttttaagagagcaaatnggtttaagacaatttcaccccaaatttgggggagtctgttagatggttaatgtntaaaggtaagaaacaacaacacacacaacaaataataataacaaaaaagagaaagaagaaaagagttcaagtaagtgtgtgtgttgttagaacaagtcaagtgaaaggctaatgagcaagctaagtttattaaaaagactaattgtgtaagtctaggatntgtgctctcttataatccaaacattggcatcctagaaaaaccaatatttattgtaacctagcctcattacaagccac

SEQ ID NO: 85273 - DNA, 430 bp, Glycine max
  unsure (1)..(430): unsure at all n locations
taagtactntagatnntctttatcgtgatatgttagaacanatgatttgttgaaaaanaaagaaaggagaanaaagannaaaaaagcttcagtcccacatcgctcaggataaacacttgaatagtgtttcactccctatatatagagagctcatttcttctttnttccttgccccagttgagaagcatntcctcaacttttctttctccctcccatatttcagccgatgcattttcggcaaacttctccctctttctttctgtcactctaaaatttcggttgcctntaagagtgactntgtaagtcatatttttcggttacctttaagagtgactntgtaagtcatattnttcgggtgcctttaagagtgactntgtaagtcatatttttcggttggttntaagagtgactntntaagtcacatttctcg

SEQ ID NO: 85274 - DNA, 456 bp, Glycine max
  unsure (1)..(456): unsure at all n locations
agctnggattaattcagtctaactagggttcgttgtttagtaatttaggctacaacatagaacacaaaagcatgattgattagagaaacatcattatatacatcaactggtttgttagaaagacccaatacctttacctactgctgtcaatcttgcatttttattgtttttagcctagacttagtttatttctgttctaaatcatcaatgtttctttcaacaatgccttatttatgaatntaatcctgtctaagactagttccctgagttcgatactcggattcatccgttttaattntaaatacttgatgatctggtgcgctttatggcaaaccgaatttcccttgaacatatttgtataaagaaaaagtggaccaaaaagtaactgcaggggaaatccaacattgctcaccaacgttatttgatgaaaacattataaaaaccaaaaccagatct

SEQ ID NO: 85275 - DNA, 411 bp, Glycine max
  unsure (1)..(411): unsure at all n locations
accttctcttccattgttgnttcttcaatttttctccatgtatctcctcatatgtattgtgctaaatgttgttaacttgattctntagagtctccatcgattaaacttgctatagaagctacatcttgatttctatggntcaaatctcttgttcttgttcttgaaccatgaattgtgttgagattaagttcctttaaagtttggctcgctaatttttgtggctgaaacctacattcataaattcttacaaaaatatcaaagtagaagacaacctcaaaaatctagagtgacttgttcacctattgtagttgtgtcatagaagtcatgtctagtcatgaaacttgtctcataagatttcttttcgtgagttgaatttattctcttgtcntcttgtctaactcacttgttcat

SEQ ID NO: 85276 - DNA, 479 bp, Glycine max
  unsure (1)..(479): unsure at all n locations
ttaagtcacctgccgcatgcaagcttgtntgggtgaatgcaatggctattatagtttaacagaacagacactaacagaaggaaccactaaatccatcttttggatgtattaaatagaaagccaaatggactgaagtgttccctataacatatgtcaacttgacttattgttcccctcaaaatcaaaaatagaaaaaaagtgacgtctgtggaaagagttacacaagaatttatgatatttcaaatgacaaccaaccataatatagaaataaagctgtatattaataatcaattcattcagtttattgcctcatgcacacacaaacctgtattaggagtgaattaatgaaatatttggaaaaatgtggagttgcacttaatgaatagaaaacaagatatactaatctaaggtggtttgatcatgtgagcaaaagaacagcanatgtccaatgtgaaaagtaataaaattgaagatgttca

SEQ ID NO: 85277 - DNA, 441 bp, Glycine max
  unsure (1)..(441): unsure at all n locations
gactggaagactcgaattgtgatcaatatgaggttgaaaacacaaagaacgtgtgtctgtctacgtatcttcaatcaggaggagtttggattctcgtttgatcatatagaataatgttgtcaatttacgtaaatatttacatgtctggcttcgtgtggaggatatgaatttgagctgaaataatcttaaataagttttaggttataggtacttctgtttttactactaactngctgttagaataaaaacaattattacattaaaaacatatttgcaaagtaaacttcattcataactaatcttgcagaatgcccatccaaatacactaagttgttgaatgagggattaaggattcttattggacaaatgcacggactttgaatggaactgcttacgtatgatggaaaactgtgtattgctgttatagttatacaacatact

SEQ ID NO: 85278 - DNA, 292 bp, Glycine max
aaaccaccgacgctgcagctatcttaatactggtggccctttatcacacatatatgtcctccgcaagcgctagaaaggtctaatagaccaacaaccattctactctagcttccctcatctagcgacacttcatttttttcttttgccacccatgaataggaggcccaggcatttccctctaccattgttccaatcactccaagtcagcttgtgtatttgctcttggtggttgtgtagagttagaacaagaaaatttctttcatttgtgagagttatgagacaccagatgctc

SEQ ID NO: 85279 - DNA, 359 bp, Glycine max
acatgcatatatctactaccactttgcttattttagtacacagatgtttatgacttcctgttgtagattcaaactggttcccacggctatagtgcattttttatcctttatcaaaccacacatcatgtgctatgatacatctaagagataatcctatcgattgctccgacatactttgaaaatcgtgtgcaatcagattctatcacattctcctttgatattggattatgtcaccctcctattaaatcgacatgactctatcataaactgtgctggtcacctataagttgctaatctatcgaacacttgtcataaatcctcttatataatactattgaatctaaaaaaaaatcttaaaa

SEQ ID NO: 85280 - DNA, 446 bp, Glycine max
  unsure (1)..(446): unsure at all n locations
agcttcgtctccgagaatgtcaccatcttatcactttttgtttccaagcacagcaccgatgatattagcaaccaaaccctaatcgtgtccacgctttctttcttctttcctggcacactttctccctctccactttcagcacacactttttcgttttctggtaagtcctaatttagagaactgtgtgatggatttgaaattatggttaatgaaagtgcatttcttctgtccaaattagggttatcatggaacctaattttacggtctaaatgcgttaacgttcaaggacgactacgaatgtgattattgtaatatataatcatcaatgcaattacttttatctttcatgtgctttaataatagaattatgattgtgtcttgtgactctgaaattntgttgggttgaactggtgaagctattcttattgtggtgcactttgtgcatg

SEQ ID NO: 85281 - DNA, 440 bp, Glycine max
  unsure (1)..(440): unsure at all n locations
cgctggagctgacccatcaattgtcctaactctttcatactggcgactcctaggctcttgatcttaacttgatagaacctctttntaagcgaaggcgcctagctcaatcccatgcnctntactaaagtggaataaaaaccagtgcgaatcaagactctgacatctatcatangtgaaatggatgaatgcatgaagaaatgcatatggcacaaatgcattttacgaatacgagagcccgggagaatatctctttcttaaatacaacattcgggctgcgtagcgcccgatgcatgcattngagaaagcgacactgaccttccgtcttctcgtgacanagtgaggggatcaagatgcaacccgtgcatgatggcatgatgcacatgcgataaagggggaagggtaacaatgagatgtcacaacatggaatatcccaaatatca

SEQ ID NO: 85282 - DNA, 446 bp, Glycine max
  unsure (1)..(446): unsure at all n locations
agcttaaaggatgtgaaagaattattattggcataaatgtctccgcattgattggtaaatctgttccccaaatccctgacaaatgtaaagatccaggtacatttagcataccttgtattatagggaacagntaagttgacaatgccatgctagatttaggagcttctgttagtgtgatgcctctgtctatttttaattctctatctcttggtcccttgcagtcaattgatgtggtaattcatttagctaatagaagtgttgcctatcctgctggtttcatagaggatgtcctagttagagttggtgaactgattttccctgttgattnttatatcttgaatatggaggagagattttctaaaggatcagttcccatcattctaggcagaccttttatgaaaactactagaactaagaagaatgtatatgcacgcacactatctatg

SEQ ID NO: 85283 - DNA, 408 bp, Glycine max
  unsure (1)..(408): unsure at all n locations
tcactcctacatctcatctctagcatgctatttctttctttacccactcctcacgtntggttttttatgtgaaaacaccataactaaacgcgccgcaagggatccctatcgcaccagatccaaatctagaacgatgggtgatcaagaggagacacaggaacagatganagccgacatgtcggctctgaaagaacatatggcctccatgatggaggccatgttaggtatgaagcagatcatggagaagaacgcggccaccgccgncgctgtcagttcggctgccgaagcagacccgactctcttggaactacgcaccagccttcctcanacatagtatgacggggaagggacacactggggcacgatggcagtcctcacctgtgatacaaccgagcggcttacccttat

SEQ ID NO: 85284 - DNA, 428 bp, Glycine max
agcttcatattccttccaccattgctgttctccatgtctggaacaggctcccagtacttgagatgctgctctcgaggatcctcttatttcattttcatcttctctgcgtggcggctagcaacctcttgagcaagggtccagtcatagaatttacgactctcttcattgctatgaacgttgtctacctctcttaatttcatgaactcttctgatgcagctttgagagggagggaagttgtgtcgggatgatactcctttgacagtttccgataagcaactataatttcttctaaatccgcatctggtgatacgcctaagaatctggtggcgtcactgatatttgaatgattcatcatgtcaggacaagataactatttagttagttatacagcagatcaaagagtgacttccttttattgaaaacctaa

SEQ ID NO: 85285 - DNA, 332 bp, Glycine max
  unsure (1)..(332): unsure at all n locations
accgatcttcaccggccagcacatggaccttcgacttctggttgctcacaggaggtctaaaagacagaacaccttgcgcatcaatactctccatggtacacacggacttggcttgaggggtctcagacagatccatgcaagttaaactacatatattcttaattaatttatcattggggcaaggtcttcgcgcaacacagtgatacaatatctcatcaagggcctcagctgacttcattngcagtatttccttctgaaagatacgacattgtattcaatatcaactacataatcatggtaatatgcactagactaacagtataagttaaact

SEQ ID NO: 85286 - DNA, 174 bp, Glycine max
gacacatactcttattgcatgggaggcacctgttttcgccttctaaatctctatcaatgcctagggatgaatactctcctgactactcctcctttatcacatccctgatatcccactaccattgtcccacatcagactattattttgccctgaacttctgcttttactctcccc

SEQ ID NO: 85287 - DNA, 433 bp, Glycine max
  unsure (1)..(433): unsure at all n locations
taagcacctgggctgcagcttattggccaaaaantttacctttttatgatcacaacttccttcatgaattttcgccaacatatataagcttgtttggaaggtaacaagtacttcaatagtgattgagaatacccttttctataaagttgagtgttatgttcgcaatagtttgttgccactctttgtaacttcctggcttctttgtcatcaaaggtttgtttcccatctacaagataagacataattggcatcatccaactttattggcttacaactatcatgatatgattaggttcaaaaagagtttgatgtattaccatcctattattccctgtactataagtgttcgccagctgtgatagtacattggccctttaattcttcccttgagaatatgtgataattcagttgatttaaacttaactttccacac

SEQ ID NO: 85288 - DNA, 401 bp, Glycine max
atcaccacctaatagatgtgttgctcaagttcatgtaatcctctttcactaacatgacctaatctcaaatgccatagatttgttgtatcaatcaatgtattactagctaccgatgcatgtccaacaatagtggaaccttcaagaataaacaagccattacttttattcttggtacccttagctatgattaaagatccatttgatatcttaccaacgccatttaaaattctagttgaatatcctagatcatcacacatgtttatggaaataagatttcttttgtagtcttgaatgtaccttacatgtttcagtagatactctctatcatcaaacattttcaatctcacagtctcaatgccgtgtaccttgcaagggtagatatcttctatcagtacagcttc

SEQ ID NO: 85289 - DNA, 445 bp, Glycine max
aggcgaccagcaagcatgcaagcttgtctgaggcaacacaccatacttgtgtgaagtttttgacgggaggcggcacattgcgtttgactgtgccagctctcagcaatacgttaaaggaggaggagaaaacacctacgatgatgatgagggcgtgctactttctggtttctgatagatattgtgaagctgataattttggcaatagcgattctcaatgtgttgcaggggtacaaacatcaacatgccgtttttcgttggatcgtccgtttatgcaagtccatactcctaaatatatacgtatgggcttacctggactctgttaattattatattttattctctggccctatggaacattataattggctctcgtgtgtcttatagagagtgatgataccaggaactggatgtgaccaaaaattgttgtatataatttatgagttct

SEQ ID NO: 85290 - DNA, 339 bp, Glycine max
caattaacgctgcacaatcatccaagaaccagagtcgctctggatagctctctaatgtacctaagacgatgtgtaacgaactttattgaaatgtcctatctcatttcacagaccaaatggatcgtcagtcagatggattgcctctcatcctacactatattcccgccgcacatccatatgacatcatgtgcaagaacagtgtttggtgaactacagaaccactaaatgataactactgactccacgtttggagcaccttataatatgtgagattataacacccaaatttctagtctcctatctagctactatgatccctaccaaactcccaaatatact

SEQ ID NO: 85291 - DNA, 429 bp, Glycine max
  unsure (1)..(429): unsure at all n locations
agcttatgccataattttttttatatatatgcaagtacattggcggncagcaaaattataattctttgaacattatcgatattatgtaacacttctaatattaaattttcttgagagtgaataaacctcctggtttggtctgcttcatatcaaagaataaaaatgccattctgcaaacttctattaacttctaaatttaatatttttttaattattgtgatcatccctggatcccatgagtaattttatgaacatcaaattatagtgtaaagagtaaaatgccatggagagagaccgcanacatggcgtcccatgatataaattctgagacagtcttagggcccctatattgcaatcaacagttagcccatgaagaatgaatnctcagcanagcatagagattcagacgaattgaatatggttcagctc

SEQ ID NO: 85292 - DNA, 384 bp, Glycine max
  unsure (1)..(384): unsure at all n locations
atcattaatatcgatagtggagaaaggaaagcagttctcataatanataacatgtcaagacacttcaatggttcgtgtatggagatngtacacaacgtaacctttcttgtgggatttaaaacccagaaacacacaaggtaaggctctaggatcttgcttttttctgttagcactgagagtgctagtgttacatatacagcatataactcacagtatattaatatcatataatgcagaatagagtctttggtatggtgattcatttctctataaaggagtacgaataatgtttatcaaggtagcagtatgaagtaaagcatacgaccataaaatgtgtggaaggttagactgaaacaaaagggctcgagtacattgagtaatgtt

SEQ ID NO: 85293 - DNA, 456 bp, Glycine max
agcttcttctttcttctttcgtgctctgctccttcctcatttctggaggtgctagacctcgaattctagctcttgatactttgcacctaacaaattcggacacagaggtatcaatcactacttcggacacaggttgcagagttttgtcagataacttccttcattcaggtgtataagctagaaccattaagtgacaaaaaatctttggaattgttatgatgtggaaaggcatttttttcgggttttggtggatgctgtacaaaagaatatgaagacgtaggtcttgaaatggttagaaagtgtgaacgtttacctctagcaattgttgcattggtggtcttttatatagcaaatgtcaaagtgcacttgaatggacagggttagtcaaaatctatgttcggagttgaagaggaactctgagttaattagtatttaaaaagagtaattggtctgagt

SEQ ID NO: 85294 - DNA, 479 bp, Glycine max
  unsure (1)..(479): unsure at all n locations
cgatgaagtcttactcagactcaccaatcatcaactatccctcggttattctatgcactcactcactcagaannatgatgaactccttaatcgtgtcactcccatcctcttgtcatcttcttctccaacacctccaccatcaccatcggtacctgcaaacaatcaccaaatgaaattagatgtgcctcgttttgatggcaccaaaccacttggttggattttcaaaatcaaccaattcttcgaataccatggcacaccaaagaatgaaagaattaccatagcttcgttctacatggaaggcagggcactcacgtggttccaattcattctacatgatcctttctatcccttgccctcttttctttgaagaactacaccacgaatnggaggatcatcttgagtatcgacatctctgagaagcaatcacggcggaccccgacaagcactctggattcactcttgttcataacttgatcctc

SEQ ID NO: 85295 - DNA, 461 bp, Glycine max
  unsure (1)..(461): unsure at all n locations
tgcaagcttgatgaaggcagcatcaatgttgttgttgtgaaagaattctacgcacacttgtatgaaccagaagatatatcacccaagcaggtgtgggtcaggggtcatctggttaaatttgatgaagataatttaaataattttttgaagatcccagtgattgtagaagatggggagaatttatgtgcttattcgagaattgcactcctgaggcctgatcctcaggagttagctgctaagctctgtatcccagggaggggatttgagctgaatactgatggtctccccttgaagatcttaaggaagaaaatgactactctcactcagacatgtagcattctttcttattgttacttggtcccgaccttccacacttctgacatcacattagaaagggccaacttaatctatggcatcatcatgaagatggatatgaatatggngtacctcatctcccatta

SEQ ID NO: 85296 - DNA, 404 bp, Glycine max
  unsure (1)..(404): unsure at all n locations
tatatcaatacgttgtggttattggatgcaatctctatatttagtaaaacacatcgattatgtggttgattatttattgtggtatttgcatttcaaatttagtgaaacactctactttaaaaaaagtcttatagttttttaactctatcaaagattcatttccttctaaaccttcacatgtttcaattnttctctccaaaccttccgcacacatctgctctgttgttttcatcccacacaagtagttgggaccataagaaccattctagcaaatatatggcttcaattcaaagttaattggtggaanatatatggatcattaaggatcatcttagcaaacatgtggtttcaatatgggactgaattgaatagaaaatatctctgtgtgtatgtgtaatggtcat

SEQ ID NO: 85297 - DNA, 445 bp, Glycine max
  unsure (1)..(445): unsure at all n locations
agctntggcaagaacttcatcagagatatgatgtttttatcctatcacagcatttgcaatggtaataactccagtgttttggctactaagaccagcaatggtcaaagcattatcataacctatgttttgctggatgtgaatgaacccaatatggaacacaaacacataacccttgtatagcactttggtgaataaacggatatcgttttgattggacgcaacaaagccaacatagagggtaccttccaagactacaagaatctctgtccctctagggtgagtgtgtggagggatcacaccctttggtgcaaaatctatgcgtgccaaggaaatgccaagtgtgttgagccctaatattttattaaccgtgacagctgtcacctttgagccttatgggtttgaagtgttttcgggacccaatcagaatagaagaattttctcctta

SEQ ID NO: 85298 - DNA, 384 bp, Glycine max
  unsure (1)..(384): unsure at all n locations
tctatgatanggatcatgattgtgctataactttatgttatttgaactggcttggaactaaagagcatctctttagaaagacttgccttgctgtgtntgannatttaaccgagtctcaatactggtgttcttgcatttaaggttgaagagttggcttttcttgtcaaggacaatcttccttgcaagcatttagttctcacaatggaagaagcactggttaactctcttcangatgatgacactangtaacatttatgagatagttcgagtgatgtttaacttgactattagtccaaggtattagcatcacagttcgcttattaatntcaagaccgtatactgcatatgcatgttgngtaaatgaaatgtatataacacttgatt

SEQ ID NO: 85299 - DNA, 447 bp, Glycine max
  unsure (1)..(447): unsure at all n locations
agctaggccaaggaaagtgtattttgtatattacatgacataagtagatattaaatattatatgcgattaaatattgtcaaacaaactattcaaaagatttataaactatatgtatgactatttgtgcacaactcatctaagcaaggtacaaaatgtagttacactaatcataacttaactcatcagtaactgactagtggcaacaacttgggtacatctaaacaatgtaggcattattgtcctctgaatgaatgacatactaagatcaaattgttaggcataaaggtttatacgttacctttgtatgaatgttcctatcatgataccctgcttcgtggatctgatctggcacctacaaggaatggtaatnttcattactctctaactcaactacaaatagaacaaacaagttngtctatggttataagagaacgaagattgaatga

SEQ ID NO: 85300 - DNA, 376 bp, Glycine max
  unsure (1)..(376): unsure at all n locations
ggactcgttcgcacattttatcttcgttcgtaccacctacgccgcacctgcattggtcgcactcatacagccgccccccacaaccttgcccgggccgctttccattgtgattggtttcctcatcaccaacagcaaccctcacatgttctctgacccccgcgggatcaccattctcggagtccgcaaggagcacttcagccgnggaaaggagctcgaccactccttccccctcactctttacactgcaaaatggttagactttcgcaacactaacctccatctgctcatttcttcacccatattaatttgggatcctggttcgaatgttgaagccatggaggtagccccaacaccttgaggacaatgtgtttttgat

SEQ ID NO: 85301 - DNA, 431 bp, Glycine max
  unsure (1)..(431): unsure at all n locations
agcttgttatgggtgancctatttttttagcattctgtttgcaacgtattgctcgatttatatcttaattatttcggtaacaatttaaataactgatgttgctataatttgacttgttacacatattttctttctttttgggcttcgaatttttttttcactaaaaaaaaataaataagaaaggatttgattctgctagcatctctagtactcatattactagaacgcttgatatctttgggagaagaagaaaatattgtgagttcaatctgctccactaacaaagttatcattctaaataaaactatatttgtcggatatttaggtgtttctttgtttgtgttaggattagtgttcaagttgcctatcaagataaataaaacagttagtgtgtaagttatctgtaaatacgacaacctgaatatggtaat

SEQ ID NO: 85302 - DNA, 330 bp, Glycine max
ttggcactggcttgtggccatgttcatacgtcaatgtagcgatgctcatgcgggggcgcattgaccttgtcaggcgtcccttgttgtggatattggtgatgtcattgaaatggaatgttaatgatgttggaaatgcattgacaagtgcatgttgtgtatgttcgtggggggcggagagcactgaccttgtcgaatggcccattcgagggggacaagcatggttaaagaatctaagcatttatgagatgatgcttatgcgctttaattggtccatggtctttggcacttgcttttggacacagtcatacgtcgtatgtagtgtatgttcat

SEQ ID NO: 85303 - DNA, 428 bp, Glycine max
agcttcaaaatccaaagatctaatccattgtaaatatttcataagtaggattccgttacttgtgctatttgattccggtgcaacccattcctttatatcttgtttagagaaacttaagctttttgtgtcttctttaaataaagatcaagcggtaactaagtggttctgtgttaacttctaatgagagtttgaattgtcctgtggaaatttttggtagaacattcttgattgatctgattcctctgcctttgaggctaattgatcttattctgggtatggactgattatcttccaaccacgtcatgttaaattggtctgatataactgtggtgtttgatgactctcgagtgagtaatgatgggatgtttatctctgtctaccaagtaatgacatcttttaaagaagatgctccagtatacatgatcttg

SEQ ID NO: 85304 - DNA, 318 bp, Glycine max
  unsure (1)..(318): unsure at all n locations
ataacaagactntctgtgattggttaaagatacaatctntgcagatgagaatgcttcagaaacattaagaaagctagcagatgggcctataagaaatgctataatctgacaaggatacgacataaacaggtattcattttacacaaaagcacaagatgacaaaagtacaatgcagaacagcggggccaccctaagggctgaatctcaacactttgcaagtgtcaatgatgccaatccctgtgtagcttccatcccttactttgggttcattgatgaaaattgngagcttaattatgtgaaatctacagtatgtgtttc

SEQ ID NO: 85305 - DNA, 419 bp, Glycine max
  unsure (1)..(419): unsure at all n locations
agctttgagcaaaatcaaacgataataatattntactcgtatgtccgattgtgtcccgtattatatcgagacgctcgaagttcagaacagaagctcttagaaaaatcaatcgacaataactttttactcggatgtccgattgtgtcccgtagtatatcgagatgcttgaaattcataatagaggctctgagcgaaatcaaacgatatataacttttacacggatgtccgattgtgtcccgtagtatatcgagatgcttgaaattcagaatagaagctctgagcaaaatcatacgataataactttctactcggatgtccgattgtgtcccgcagtatatctagacgctcgaaatacagaacagaagcttctgagcaaaatcaaacgacaataaacttttactcggatgtccgattgtgt

SEQ ID NO: 85306 - DNA, 409 bp, Glycine max
  unsure (1)..(409): unsure at all n locations
tctgttctatantacgagcgtctcgatacactatgggactttatctgtcatccgagtaannatttatgggcgnttgactntgctcagatgcctttntctgaatttcgagcgtctcgatacactacgggacataatcggacatccgaaataaaagttattgtcgtttgaatttgctcagagcttctnttcttgaattcaagcgtctcgatacactaatggacacagtcggacatctgagtaaaaagttattgtcgtttgattctgctcagagcttctgttctgaattncgagcgtctcaatacactacgggacacaatcggacatccgagtaaaaagttattgtcgttagattttgctcagagcttctgttctgaatttcgagcgtctcgatatactatgggacacaatc

SEQ ID NO: 85307 - DNA, 486 bp, Glycine max
  unsure (1)..(486): unsure at all n locations
atactctaccctcgagctgtacgcatgcaagctatataacgtaactagctttttttgttttgtagcangtcctattcttccgctatggacctgtatcatacttgctgcaattcaattagctcatatgtcaaggatgtgcacatttctttagttgtacacatcatttagaatatttggtataatatgaaccaagctaggtgtgaaagaggcccttttcagtatgagcacattgtccataaagttatgtctactgccttaatctcaggcaactactcaaatgggatggattaagtgcaacattgatggtgcaacaaatagttgtctatggccttcagctagaggaggaatacttcgtaagttctaggggtgcttttgtgggttgttctttcactctttgatatattaattgcctttcatgctgagatgcaagttggattcttagctattgaaataacacaaggcaaacgtccggatcaattatggttg

SEQ ID NO: 85308 - DNA, 330 bp, Glycine max
  unsure (1)..(330): unsure at all n locations
atcttcatggaggcctcaaggtggctctggttttcattttgcacactccctttttactactatgcaccgcgccttctatattntgttggtaatatctactttgcggaacgttacgagnactttactgaatttcgagacgatacttattattcgtcggcgatgctacgaatccttacagattatgtatttactctcttttagctttccgagaagttaccaaaactcacggattgcgcataaacacctgtttttgacttccgccacattacggaatatcacggatcgtgcaagcctgcttcctttgatttatgagacgctcgggactcatta

SEQ ID NO: 85309 - DNA, 450 bp, Glycine max
  unsure (1)..(450): unsure at all n locations
agcttggagaggatgcttctatggaggataaganagagggagagatagagacaggggggagcacaaaattgaatgaagacaaagggagagaagttgaactttgagttgtgtctcacaagactctcattcatcaaagttacaacaagtgttacacatgcttctatatatagactaggtagcttccttgagaagatttcttgagaaaacttccttgagaagcttctttgagaaaacttccttgagaagctagagcttagctacacacacccctctcacaactaagctcacctccttgagaagattccttgagaagattcttagagaagctagagcttatctacacacacctctctaatagcttagctcaccttcttgagatgagaagctagagcttagctacacatcccctataatagctgagctcacccgcatgacataatacatgaaaat

SEQ ID NO: 85310 - DNA, 357 bp, Glycine max
  unsure (1)..(357): unsure at all n locations
ctatgtacccgtaggggccacattgtgtnttgtgtatatctattcttgggtcattgacatttttataccccctgttgacgcgcttaagccattttacttaagtcatgtctcgcttaacttaaaaataaaatcaatttccaccgaacgtttgaattgtattatccgttaacttcggttaaaatgaattctgaccgttcggtcgtgccgtaaccacattggaaatcataaaagaaggtaagaaatattataataataaaagaaacatcttttagtaaaattaagcggacaatcaatcagaccgtttctctgtgggatttctcattcttaatcgaactgattaataactaaagtgaaact

SEQ ID NO: 85311 - DNA, 451 bp, Glycine max
  unsure (1)..(451): unsure at all n locations
agcttgacaggttcaggtgcaggtgttgttactggtggaggcacttgaatntggttgccagacctcaaggtgatggcactcacattntttggattttgtatagtctgtgaaggcaatttgtcagaatttagggactgagcttggttcaactgagtagccatctaccccatctgatttttcagactctgaatggaggctctcgtcccttgttgaaattgcatattctggatggtcatttgcctcactaactcttctaaggaaggttgaggaggagcctcagttgcttgttgtctttgttgttgttgttgttgctgctgtattggaggaggaatatatggctcgcttggaccagcaacattctggaaaggagggacagactgttgttgttatggaggacttgtccatctcagatatggatgattccttcaacctataatgtatctattgcatg

SEQ ID NO: 85312 - DNA, 387 bp, Glycine max
  unsure (1)..(387): unsure at all n locations
gaactaactgatgaaaatgtttaaagatactcaaataatataagaatatttattcctttattaatacatatgcgaggtgtatatggtgtcacaggtctgcttatccttaatgcactccacacaagtcttaaggtcttatacatctacagcattgaatacctcatgatttactaaccatttaatcctctcaatggagatatgctctaatctttgatgccataacatagaggaattctcattaatattacaccttttaaactatatcgaacatgcattanactattagtggcctaacattgtgaaccactatgatacgaaccatcatacatgataccattcgcagcacacatcaatcattaaaattataagtaactcacaagatgtgtc

SEQ ID NO: 85313 - DNA, 418 bp, Glycine max
cttgtgtctcttttatcaactacttgttcatcaataagggaggtgttatccacatagcagcgaaactaaaaagtctacctgaatttaattgagtggccccaagaatggggcaatttgctctcccataaaaaaggaatgaaaataaaacacagacagagacctgttcacttgtatgttgtggacccgtatgtacgacataattaaaagctaaatcgtctttcaaagacatattaatccacaaaatgggtcgtgttccccacataatggtactccgagaaataaaaaaaaaatgcttgaacatttgtttaaatgaggatgggaacaaggggaataaacaaaaatataagaagtctcctccagataatgaaaagccacccaccaatcacatcagagagaaatggaatattgagagtgtgca

SEQ ID NO: 85314 - DNA, 367 bp, Glycine max
  unsure (1)..(367): unsure at all n locations
ttctggaaagcccgagtgggcctggttgctatttgcatactaattattactacatacacgcccttgctcatgttttggtgagtctttttccgtaacgctacaaaactctacgaatcttgtaacgatgtttgctcttattccgaaatgttactaaaccctacggattacgtaatcatcccttctttgccttccggaactttacggattgcgcactaacacttgctttcaatntccggcatgtcacggaacatcaccggttgtgctacaatgctttcttttgacttccggcatgcacagaacttcacgaattgcctaacgatgggtgccaagtaccttcagggtcgcatcccaacaacggatgatccct

SEQ ID NO: 85315 - DNA, 458 bp, Glycine max
agcttatggtgaaatctgcgacctagccatggtataagtctccacacagaggccattgccttccttgcccaggattatgatcagccattgaggtgcttcacctttggggacttccagctatcacctatggtagaagaatttgatgagatcctatgatgcccttcacggggaaggaaaccatacctcttttcagggttctatccctcattagctagaatctccaagatagtccaaatctcggcgcaggaattagaccacaagaagcaagtaaaaaatggggtggttggaataccgagaaaatatttggaggtagaagcaagaatcttggcaggtaaaggcgagttggtcctgttcatagatattctcgcactgctgatcttcgaaggagtcctctttccgaatgtggatgggttggtggacctatcaacgatcgacgcttttctcgcctatcataacca

SEQ ID NO: 85316 - DNA, 340 bp, Glycine max
  unsure (1)..(340): unsure at all n locations
ctaagcttcttgagaaaacttccttgagaagctagagcttatctacacacactcctctataactaagctcaccttcttgagaaagctccttaagaagaatcctaaagaagctagagcttagctacacatacctctctaatagctaagcaataagtgtgaagggnggctatgcttcattggatgatatgtttttgctggccatgcttgatgtatatacatatattacctaattggtgctttatttttcaaatgctttcaattgctactgttcacgttcaaaantaaaaaatcatattatagagagaaaaactctaaaataatagatagaaaaagaataaaa

SEQ ID NO: 85317 - DNA, 462 bp, Glycine max
  unsure (1)..(462): unsure at all n locations
ttaagtcacctgcngcatgcaagctcgagttagcttaaatacaagggtttggtttttatgctcngaagggctatctaaggaactacttaggagtggttcatttggctacatgcttatattaacaacaattacatggggctgttccaagattgcaagtgatcactgaaccatcttcaacattcttccaatgctattgtgctatcgatcaatggggcacaacacaccaatagattatcttgatggatggcttcaaatctcacaaatgggacactttatcacttgtcaatgtcgaagctttcaataattattccatgtacattgtattagggaaatagcactaggactttctaaattcatcaataatcgtcacagtagaactctttatctttcgagaacacattactccattctcttgaacatattcctatatattcataagaaaaaatattgcaaatgttgtac

SEQ ID NO: 85318 - DNA, 252 bp, Glycine max
taaagattccttcatatacctaggtcaatatggacgagatagaaatatggagaccgttctgtgttctcggagaaacactgggaaaggacatgaggtggaatgggtgggatcctattgctcagacgatgactctgaaccgagcggtgcggagaaccttcgctctttgtgattctgccattggggattgtacgatttaatcgggaatcaaagaaaatgaaagaaaagattcattactgagttgatttatgagaa

SEQ ID NO: 85319 - DNA, 485 bp, Glycine max
  unsure (1)..(485): unsure at all n locations
ctctgagtcacctgcngcatgcaagcttattctatattangcaacagagattatgttgtttcaatataccagcaatcatcaaagcaaagttttccttactaaaggttttataaatgctactgtattcaattccatgaataataaaataactcaactaatctaacggntngaatattgtattatattcctcttctctagttctacgttgtgttaagtaatgttttaataattaatacagtagtactgtactatgttggctagactagtcaagtgtactgactatataatcagcacaaccatgaaactattttcagccagttctagtattggcaacagggaaaagaggaaaccaatatggtacctgatcacctcggcaaagttgccttagcatatgcaacaaaatattaaaatccacatatacgctgataaagctataacaggatgaacaattctctatgtgatgacaaatggtgggcactatatat

SEQ ID NO: 85320 - DNA, 367 bp, Glycine max
ctaccctcaacataatccttgaggtaagatggcttcgacaatgccctcttgggctctccttctctttgcaccctagctactactcctatccttgtgtgttctgcttctgtttccttatcaccttgcggcccttgtgaaatcaccttgtcctcaaggtgataatcctgacaaagctgggaccactccttccaagaagtttatctggagtaatccttgcactgactacacctgcatgaacctgagcgttaggatgcttgggaatctaaatcccatgggatatatggctgacattgtgaatttcctggagagcactatttagtgcctctggaacctcaaatggttgacataagcatgaaaaccaatgatc

SEQ ID NO: 85321 - DNA, 451 bp, Glycine max
  unsure (1)..(451): unsure at all n locations
agcttctgaattctgctgagtgtaagatagaacgtggcttctattataaaaggatgttctctttctttttttttttaaaagctatgccacatgtctccttttgagtggagcaaaaaggggcccacctcttccctttgaggtgacttcatactcagccacaaggagagaaaaatttaactttttgaatgctaaaatcctgtctcggtttacatgccgcttctctggttccagctcctcgcgtttctctgcacccgtcggggccctttttcgaaagtaaacaatatatatatatcaaaacgctcagaatgaaaccctaagcgtggttcagaggttgcttctgttaaatatttagttgcatgcaaaacgataattnttagactaattaattgaaaattaacctatactgtccagttatggaatactcttcgttaattagcctaacccgcatatc

SEQ ID NO: 85322 - DNA, 359 bp, Glycine max
  unsure (1)..(359): unsure at all n locations
tctgatcatcatactttgatagatgccaaagaaattatggcacatgaagacggtgagaatgatggacaagcccatgctgtgactagcattcctatacagccaagtntcccaccaacccaacaatgtcattactcagccaataacaaaccttctccttacccaccgcccagttatccacataggcaatccctatatcaaccacaaagtctgtctaccgctacttcaatgacgaacaccacctttagcacaaactagacacaccaaccaagaaattatatttgcagcgagaaagcctgtagaattaccccaattccagtgtcctatgctgacttgctcccatatctatttgataattcatg

SEQ ID NO: 85323 - DNA, 335 bp, Glycine max
cttttactatgtctccaaactctctttataaagttaaacaagcgtgcacatgctttatttatagactggtagcttccttgagaagctctttgaaaaactttcttgagaagcttcttgaaaaacttcttgagaagctgagttagctacacacaccctctcataactaactcactcctgagaagctcttagaagactctaagaactagagctagctcacatactctctatagctaactcactccttggatgagagctagagttagctcacacgcctatatagctagctcaccctctgacaaaaatctgaaatataaaacatctctattatcaaacac

SEQ ID NO: 85324 - DNA, 430 bp, Glycine max
  unsure (1)..(430): unsure at all n locations
agctntaattgctttgagtgtgtgttgtatgacaataggaaggatcaattaatatgcgacagaggaaggatatatctgttggacatgtggccttaataacttaagaggggggtgaattaaatttcaaaatttcccactaacaaacttttaacccctttctaaatgatagtctcataatgcagaagaagtagcaatcaatttaataatgttctttaaaacatgcaagacaaaattgattgcaataacataaatgagataagggaagagagaaatgcaaacttgatttatacgggttcggtcacgccttgtgcctacgtctagtcgtcaaacaacccacttgagattttccattatctttgttaaaatcctttttacaacttctgaacacccaaggaatccttttctcttgtgttcatgagactcacaattc

SEQ ID NO: 85325 - DNA, 389 bp, Glycine max
  unsure (1)..(389): unsure at all n locations
tctggcggaggcgagatgcatcggattcgagagaagagacacggtaggcaatggccatggagggtatcttgcgagccagatccagctgctggtatgggtcccgtggtatcaccgacagaatctcgtcggggaggtcgaaatccaccactgaacctgtgccctgctgcgacatccctatccaccnnctgttggttgtggtgttggctgggttntcttgatgcccagctggttgtggaatcaacgagggaaactaatataaatgtcaatccttggcccanacctcgtcatatgcaatcattttaatataaaacaaattgatacaataaatagagttattacatgtagaggctactagagacaactaaaacattatattatattattaattt

SEQ ID NO: 85326 - DNA, 440 bp, Glycine max
agcttccatcataatatgccaccttttgctttgaagacacaaaaccaaatcattgttgcttgcatggcaatacataacttccttcaaagaaatgacaagagtgacagagaatttgattcacttgatgaagataacgaatatatagatactgatgaggatgaaaataaagttggtcctagtactacaacatgaaagaaccggatgctcaaagtactctacaattggaacgctttagagaatctctaaagaatatgtttccaacacgtatttaatttctatattttttaataatacaagtttgcatgtctatggtatggatacatctgaataattttatattggaagacattattgatcatattattactacggtaatgaaatattatattccgctgtgatttatcattacctagacaactaatgtaaatttaatctataac

SEQ ID NO: 85327 - DNA, 394 bp, Glycine max
  unsure (1)..(394): unsure at all n locations
ctaagctggctatcccgacccacccggcatactcagtccgtgagaacctatgacgtacctaaacaggcgagctcttggcagtcaaccaatataagaacaaagcccacgaagcaaggaggcttgtgtggcgactagccagctatttatcttgggtgttatatgaaaattagtctctggtaatcgattaccattcgtgggtaatcgattacagggtttaaaaatggagacaagatgctaagtagcttctggtaatcgattaccaattgtgtgtaatcaattacacaatgctacctgctactggtaatcgattaccatttatgtgtaatcgattacacaatgcaatctgtagattccacttctgttntctcggtntagagtagtttcatgacaaatg

SEQ ID NO: 85328 - DNA, 324 bp, Glycine max
gcttctacacatgctgtactatagttattcaggccagccctctccaaccgcacttggcatgcagctatgctagctgaatatgatgctcttatcatgaatggcactgggaccactgttgatctgccttcttctaaaactcccattggctggaatggattctttggttaggaaaatctgacgggctagcaataaaataaagcagactagggcctaagttgcatcaaggtctggtatactaaatgaaccatatccgcgtttaaacctgaactgacagattctctatcttgtggacattccagaatcatacaatatatgtgacaccct

SEQ ID NO: 85329 - DNA, 441 bp, Glycine max
  unsure (1)..(441): unsure at all n locations
agctngcctgtctgatgctttattaatgttggcccgagatatgttggggagacggtactaacccggaatgggtttatgcaaagacaacggcggcataactagcttgataaatgccaaaggaaatcgtgggaagtatggtttatgctataaacccactcaggctgatataaagagaagcatcgcgggaagatagagcggtggtcaaagctcgcggttgagacaagaaagtgaaggaagcccgccctgccacataagtagaagctttataagcgcgggtctgggagacgaaggtcaagtggtcgcaatatacgaagatgatgttccgagtacattggatttggtacgaccatgccctccttgatttcagctatgaaattggcaagtggaggaacgccccggcatttacgcaacgagcataatgtatactgaaatcctgatacc

SEQ ID NO: 85330 - DNA, 284 bp, Glycine max
  unsure (1)..(284): unsure at all n locations
gtgtatgaatatctatattctttgcggtgaaatgatggtgggttgaanacatagtctaaaatattttataaaacggattatcacgttatgaaagtggattatggactgacttaataaggcgttgtgtaattgtactaccaaaacaagcaaagcaaagcataatgaactaaaacaatggaagacgaaggaaatntcctgaacaggacggatatagcctcaggatcaccccgaagccaataattgggctcctagaacaacacccaatggcaaattcgtcattgcgt

SEQ ID NO: 85331 - DNA, 437 bp, Glycine max
  unsure (1)..(437): unsure at all n locations
atcctctaagcaccgcggctgcagcttggagtttccagtgtccattccttctcttctntagtccagtcttcttctggcttcaattcatcagtgggctttccttctgtgtccagcatcttgggatgttcccagcctttgatgacagctttccaggttctgctatccagtgatttgaggaaggccaccattcttgctttcagtattcatagttgcctccatcaagaattggtggtctgttcactggtcctccttctttctccatgttcatcagaatttatctccccagatctcactctgtgatttcgagtgttggctctgataccaatagaaattctgataccaggggacagatgtcgtacaggatgtcacgacatcatgcttcataacatgcaagttatgtgtgtccgtatgaacagattatacaagtaataccacat

SEQ ID NO: 85332 - DNA, 391 bp, Glycine max
  unsure (1)..(391): unsure at all n locations
atgctgcanatattacaatagacctcnccaacctcatcagcattatcaaccacaacagaacaattatgacctctccagcaacagatacaaccctagatggaagaatcactctaacctcagatggtccagccctcagcaacaacaacagcctgctccttccttctgaaatgctgctggcccaagcagaccatacattcctncaccaatccaacaacagcaacaaccccagaaacagccaacagttgaggcccctccacaaccttccctcgaagaacttgtgaggcatatgactatgcagaacatgcagtttcagcaagagaccagcagcctcattcagagcttaaccaatcagatgggacaattggctacccaattgaatcaaccaacagtc

SEQ ID NO: 85333 - DNA, 425 bp, Glycine max
tctagagccgaactgaccatgcaagctttgaagatagcatggtccaccactttttaaatctccatgtgcgacccacacaaaagggagtcggattaactcttccaaaattacattgagtccctaccatgaatgcacaaataccaaaatacctttttgcttctttcctgccatattagcacccacctcattctttttgacgaaccaatgaaattatgattccgttgtgtaacaatttatgcaacaaaatcatgttttcattatgctttttgtttaaacaaaaaaggcacaatgtaagtttaatttcatcgtgcattgagcaacaaaagcttactttcattgttctcttttaagtgaccctcacttgtacaacaaaattatgattcttgtatacactttctcacacacccaactacacaataaaaaca

SEQ ID NO: 85334 - DNA, 457 bp, Glycine max
agccttggacaaaacttgttaatggcatatatctttatggagacaatattcttcatacgaagaatgtcagaagggggttcttattcttgttcctctattataaaggccaaataggttatgaaagaggctttcatttacagaattgggtatggtgatgttttcttttggaatgataagtgggttctcaaggggcgtctatgtcataaagtgcctttcattgactaccaagatgttaacatgagggtgaatgatattttttagaatggaaactggaatttgagtcacttggcttctattattcctaatacgcgcacgatatgttgcccaatattttcatccatgaagaagatgaccatgctattatttggagctcgcataatgataaatctgtcgttgtgtggctctcccttgatatgtccactccaactacccatggagagtcctggtgttggatata

SEQ ID NO: 85335 - DNA, 429 bp, Glycine max
  unsure (1)..(429): unsure at all n locations
actagctgaatacagatctctgtgtaaataatggatttgaatattgaattctttctgttgcctgaaactagttccattaggagcctttcatattcctgcatattgcataggtatagtagttgtcttattgtaatacggttatcgtatacatgttatgagcaacttcggcgattttatgtattaaatattggatgtgaggaagacatatgctgggcggatttaagccatatgtcagtggaaaacttntgtaacaatgacaccactatccaaaggatatttgctcatgttactgatggagaggatgattcactcttntgacattacattgtgtataatacccagtcgctaatcactgttcacaacataacactaactgantcagttgctaaaaacagtcgcttaatagggaacgcgactgaatgaataaca

SEQ ID NO: 85336 - DNA, 346 bp, Glycine max
agcttccacatcaagcaagttcacggatttgctcttatgctaacaatgagaatcagaagttggagaatctgcttgaataaccatgcagtctgggccttaattgtcgcgactttgcataaacatccacaaattaatcaattcttataagctatagatcaggagatatgaatttataaattatcctattcagcgatttaactatgatatgatactttacaatgaataaacattcttttaatataagtacctactaatggttctactagcacatatcatcataggacaagcaatctcaactagaggtgagttgaaatttattaactatatatgttgacaattccatttt

SEQ ID NO: 85337 - DNA, 366 bp, Glycine max
  unsure (1)..(366): unsure at all n locations
gtcacctgcngcatgcaagcttatttgactacctggagttgttcatcttctatatgtgatgccaaattgacataactagaanttttctttgagtcttgtttctaatttgtcaatctaatctagtgccattctaggacttcctttgtgttccaccttggcttgtggtgctgtccttttgctttatttttttttcttgaatctcattgaattaatgtcacattaaatttacttttgtgttatctctcatttcatatcttggtttctcgctttgtatttgcgttaagtgttgctactataagattggaaatgaaatggtgcgttcttgaaagatattttgagtctggaggaaaccatccttgagcccat

SEQ ID NO: 85338 - DNA, 322 bp, Glycine max
  unsure (1)..(322): unsure at all n locations
atctagatgacataatatctagatgagatcaaatctaaataatatctagataagataaaatttggtagaataaatagtctgctctcttaagtccaagcccaattgcttataattctcctgaaattaaattaaacacacataattaatctagtaggcctaatgataaactgctaattaatttgataattaagactaatcagtaattaaaatggtgcaaaaagggttaagaaatatgagaaaataatggcacatcagtgagacattgaaaaagatcatggaactcacanagcaagaagggggagaattagttctaaatcaaatc

SEQ ID NO: 85339 - DNA, 315 bp, Glycine max
ttcactcatatatacagtgactactcagaatgaaatgatgagcctacattacgcccatctaatctacctaattaaactaattacacaaggcaaagcctaaattcgtagcccaattgttcaagtacataggttctaactgccaaacttattattgacaaaatagaagctctttttcttagatttctaaggacgtctcatatgcttcatctggatgtctcgagtgtcctatatgccctcgcaaaggcagataggtcaagttagcacaaagattctaaactaagcaataattatcaattaagctcaatcatttgccta

SEQ ID NO: 85340 - DNA, 454 bp, Glycine max
agcttgtgcaaatcaaatcactctctacatctcatctctagcatgcattttctttctttacccactcctcacgtttggttttttagggaaaacaccataactaaacgcgccgcaagggatccctatcgcaccagatccaaatctagaacgatgggtgatcaagaggagacacaggaacagatgaaagccgacatgtcggctctgaaagaacaaatggcctccatgatggaggccatgttatgtatgaagcagctcatggagaaaaacgcggccactgccgccgctgtcagttcggttgccgaagcagacccgactctcttggcaactacgcaccatcctcccccaagcatagtatgacggtgaagggacgcactggggcacgatggcagccctcacctgtgatacaaccgagcggcttacccttatggattgccgcccaactattcaccaccca

SEQ ID NO: 85341 - DNA, 339 bp, Glycine max
  unsure (1)..(339): unsure at all n locations
ctcttgaccctaacttgatagaacctctttntaagtgaaggcatttgactcgatcccatgtgttactaaagtgaacaataatcggcgcgaatcataactccaacatctatcatgggtggaatggatgaatgcatgaagaaatgcatatgacacagatgcaatttacgaatacgggagcccgagaaattgtnttcttctttgataccaacgttagggacctataagggagagagctaactacgcttttagtgataacccccacagtagncatatctctcttgatgggttctagagggatcatccccttcgaagacatactgcagcagtagggactactaa

SEQ ID NO: 85342 - DNA, 434 bp, Glycine max
  unsure (1)..(434): unsure at all n locations
ggatcttaagtcacctgcggcatgcaagctgatctgaattttgggtacttttcattcttaaaacaggatacttgaacttcatgctattctctttgggctcggcgaccgcgaccaacaaagtgatttctgatgtaaatctagcccctaatggcctcgtgtaaatactcatagaagattgtgccaacgatgctagacataggccctaagtgctctcatgagccttatggtagattactggcccatgggctgagtatgaacccactgatttttgcacatattagaataatgtgggattaatagtgggacctgtatcttagacttcataatgtaggttgggtaacctcncaatatatgatttttgagacctgtgattttaaggcgcctagactaatcttggattttcttatgctctaggagaacatgagatgtgtgtg

SEQ ID NO: 85343 - DNA, 453 bp, Glycine max
agcttgtccttggtttagacatgattggttcatgatttgcgacttgtaggattcaatttgggcataattggatgacggaaagagtggttttctaaatctgcactatatgcagaattttgctcgtgaaatgtgcagcagaattttgtataaatgcagaaaaatgctagtgtatggctggctgtgagaaaggtattacatatggggttctggacattttctagcagatcccagcgggcaaaatgtgcacttatgtactatatacttccagtacaattttcgagtctatccaacggataacgaattgtaacgaagaagatgttactgcggtatatcgatgtgacaagctatgattatgagttgtgttatgggcacaattactgcctcttgcctattttgcttgtgtctgttgggccacgatgattggatgtggcactacctggatgttgttgaatc

SEQ ID NO: 85344 - DNA, 300 bp, Glycine max
  unsure (1)..(300): unsure at all n locations
cagctttagccaatggactatcctggataattcctatgatatctcttttcagccttgtgtcactttccttggtatgaagctcactacanaccttatgtgataaaccatgatattaccatatccttaaagaattttggagctttggaattgatttgggaataagtgtggggcgtctgtgtttcattggacaacttgttttgtaggctatgcttcatgatgaattctgggccatacttgatgtacattgtatattggttaaatgctggacatgctgaatgaaatgttgttctcaaatgctat

SEQ ID NO: 85345 - DNA, 198 bp, Glycine max
  unsure (1)..(198): unsure at all n locations
agctttantattngactgaacactctttttctatctgctgtgtccgcgcgttaccatactgtgagagataggatcgcaccagggcagtattctgaacttaacacatcaatagcgtgacgcacagtctaatctgggccaccttctcatcgcactaacgttactctcggtgacctattcaccttagaactcaatttattg

SEQ ID NO: 85346 - DNA, 435 bp, Glycine max
  unsure (1)..(435): unsure at all n locations
tcaagctttccnctatttttctattatagtttgagaagtgaaaggacaaaatgttgagccctcctggtaattcgagatcacttgaaattagtgaaaaaaattgttttcgtgaagaaaatccaagccgaggcacttccgtaacgtttccgtgggtgatttcgcaaagattttcaaccgttcttcgacgttcttcgttcgttcttcggtcttcaaccggtaagttcccgaaatcgaacttttcaattcattctatgtacccttagtggtcctcatttgttntcatgtgcttttattttcatttcatttactttccgtaccccttttgacgtgctttagtcatttacttaagtcattctctcgcctaatcaaaaaataaaataaatttccaccgatcatttgattcgtaatatccgttaattnttgttaaaataaaat

SEQ ID NO: 85347 - DNA, 333 bp, Glycine max
  unsure (1)..(333): unsure at all n locations
ttctggaggaagtntctggaaggcccaagtgggcctggttactatttgccctcccatttttactaagtacaccccttgccttttatggtgattctttttccgtaacgttacgaaactttacgaaattcgtaagaatgcttattttctttccttaatgttacgaaaccttatggaatacctaatcaaaccccttttggtttccgggatgtcatagaactttacagattgcgcactaacactntcttttaatttccggcatgtcacggaacttcacgaattgcctaacgatgggtgccaagtacctcgaagtgtcaatagagggtcgcattcaac

SEQ ID NO: 85348 - DNA, 333 bp, Glycine max
agctacggaccattacacttttactacgtaaagatcacagtctatatgcagatcacgcagtttttccttacctgcttaggcaaataggcatcgtgaggcttacggaaacaacaaaactgtaggcagagcgcacggtgagacccaaattcttacatggatatattaagacgcaatgctataaaatcaattatgttccaatgttaactctctatactacgtacgacccttaaaagcgagaacacccaatctttcacaaaggctacccttaggtatacaacaataaccggtgacctacttactgcacttaacacctactcaaacactatcgaggac

SEQ ID NO: 85349 - DNA, 433 bp, Glycine max
  unsure (1)..(433): unsure at all n locations
agctagtatgcatattgcttacaagcatcttaacactntgacgaactcactgttggtgacctataataagggcatgtttggttgtggtggatgaatcttgaaaaagtaccgtttgtaataagacacttccttcattacatcttttatctcatcttgcttttaggaggtctggatccgcactgacgcgcacatattctcaaacgcattttctttcttgatgattagttgatcaaccttgtccattatacttgatgaaccacgacctttttaaaggagaataaaaagtgtacataaatacattgatattttctttcataatttaattcatttaactagagaaaactgaagaagaagaaaaatacacttttctgctatgataccaccaattgctgccgctcaacaagtttcgtgaattgcgttatatatccactta

SEQ ID NO: 85350 - DNA, 405 bp, Glycine max
  unsure (1)..(405): unsure at all n locations
gctttatggaattataggtttattattcctgctcacttgcagaagttaccaattaggggctggccattaagaaccccatgatgattcatgaagggcacaacaattcgtacgattntaataaggacctttgaactactntgttcgagaatgttgccatataacattggtctctgcactctagcgcattcctgccattaaccatctttcaaacgccgtgctaagttggttacactgttcccctcacaagtattgtaagatcacacctggcatgcagggtcggcgataataaataacagatattgaacaaatgaagttggtgggttgttagtactacgtacttaagtgatatcacttgtttggtcaagcacttatccttagcataaaagttatagttaatgataataa

SEQ ID NO: 85351 - DNA, 232 bp, Glycine max
tatggcgaaattatgtcctaatcctaactccgatatttttattctaatgtggctgaagaagccttttcgtttttatcggagaataaaacaaaatactcattaatgaatgtagagtctaaagtattccaatggcgttcgatcgatgctttattcaaggacgcattattttttaattgcaaaccatgtgtcgaacacttgctattccgcaaaatacaatgcctaaattgatgat

SEQ ID NO: 85352 - DNA, 344 bp, Glycine max
atgctatacatgcatgtgcacaccatatttatttttacttgttcaactgatacaatctatgggattgaaaagataattcatactactcttctcatgtagtggacaactaaaattaaattcatctaatagaatatactgcttaagccattcaaatcaagacatgttgaatctcaccattattatcatgcctgtcaaagataatgagaatcaggcatcgtaatgcataacacaaccaaacattaaaagaaaacatgctttctaaagcctaccaaggtaaaaatgtattcatatttcatgaactttttcaaaattataagacacattttaccatatataaaaacatg

SEQ ID NO: 85353 - DNA, 385 bp, Glycine max
  unsure (1)..(385): unsure at all n locations
ccctctctgctgtgccaccatattactagacnaganatcgngttctatctatangatngaaaagagaatttatactactcttataatgccccgtacaactaanaaaaataatataatagaaaatagtgcttaagccattcaagtcaagtcattntgaatctcatcattagtatcatacatctatatgtgtcacagagaaagagaaacatgcatggtaatgcataacacaccaaaacattataagagaacatgctttctatacccaaccaaggtaaaaatgttttcatatttcatgagatagcatggctttctatggtggaacaatgatattaatttggtgagtaagtcttgagaatgttagttgattgttttctgaattgaaata

SEQ ID NO: 85354 - DNA, 341 bp, Glycine max
  unsure (1)..(341): unsure at all n locations
tctccttcttcactacatcatgatatattcgggttgagtcttctctgggggggtcttactggtttagctccatcctctaaatntattcgatgcatacatgtggatgggctaataccaggaatgtccgccagggtccagcctatagccttcttatgtggatgggctaataccaggaatgtccactctcagcatcaaattcagacatatgatcaagtacaatttcagactcaatgcatgaagagtgagaggcatgcagattagaataaagatcagtcatgtattcatcaacaacatggtcaattatttcagcacataatacagaaagatcttcagatgggtat

SEQ ID NO: 85355 - DNA, 265 bp, Glycine max
  unsure (1)..(265): unsure at all n locations
gaccaatgtatctccgacatgtgtcgctatatatcatgtattcaaaggatgttgttcttctcttatggtcgggcntctttaaacgtataagtattgtattctccaagctagaagagtttttaacacttttcaacttggggggggatattcgacatcagacggaggcatatacctaccaagggtatttgagaaaaaaggtggtcactcaagggatcgttccactagttattggagtaagttcgtgttggttattcaacgtagatat

SEQ ID NO: 85356 - DNA, 431 bp, Glycine max
cgcttctccttccttctcctatatataggggaaggagggaagttctatatttgttctacccacctcgtatctgagatgtacttataattagtgagaaaaattgtttccgtgaagaaaatcctagccgaggcgcttctgtaacgcttccgtgacgtttctgtgggtgatttcgcgaagattttcaaccgatctttgttcattcttcggcgatcttcaggcttcaaccggtaagttcccgatatcgaaaatttcaattcattctatgtacccttagtggtcctcatttgatttacgtgcttctattttcatttcatttactttccctaccccttttgacgtgcttttatcatttatttaagccattttctcgcctaatcaaaatataaataaatttccactgatcattcggatctgtacatccattaatttat

SEQ ID NO: 85357 - DNA, 324 bp, Glycine max
  unsure (1)..(324): unsure at all n locations
gctactttgtgaagcttcctgtattgttttttgagnaactaaaggcttaacgtggcacatccctataataaataaactaacctncttgaaaataaaacatgaataatataatacaacaaatagaatcaaacatcaattataattactaataatatttcagggtgccacaatgttggttgtattatgtcgggaactctataatgtccaatctagttagtggaggagatgttattgtgaaagcatgacttgtgttttcaaatacagcttatgcaaagaataacttcgtgtgtggcttaattgtgtatagatagttagaatgtgttt

SEQ ID NO: 85358 - DNA, 307 bp, Glycine max
  unsure (1)..(307): unsure at all n locations
atttccttatagttgggaatctatcctttctaagatggatccaaacccagncaccctcattaagaactatctcttttcttcctctatcgcctctaantgaatacacttttgtttggctctctatttggttcttaaccctctcatgcaacttcttcacaaactgtgacctatattccccttctttatgtataaaataagtgtctactgggaggggaatgaggtctaatggagttaggggattgaacccatagacaaacataaaaaggggactgcttggtagttctatgaacccctctgttataggcaa

SEQ ID NO: 85359 - DNA, 346 bp, Glycine max
agctttagctcgtccttcaagatcatgcttttgacccgtgatgattcctttcacctcttcggagcttgagctcactattgctgtcctataaagcccctcaaaactttgctttggccgtgttcttcctttcgggccttcttggtttctcgttccaaggcttcagcggtggccatattgacgtcccttagttcatcatactcttttcagactttgatggctatggacttgaacttctcttcgactacccgggctctttcaagctctgcctttagggcttgtacctcatcactttcttccgaagctataacctcatcatctctcatagtctttagatgtgggagccaat

SEQ ID NO: 85360 - DNA, 397 bp, Glycine max
  unsure (1)..(397): unsure at all n locations
ccccgctnccggatggaatacttacttgttggtgataaacattttctcagtttttttcaaaaaatgcgaaaaaggatgaccctatggctgcaaattcgccaatcccgtgggtatggcttttgaaaggggggaaaagaagtttttgaatgtaaaaacgcccccccctttcgtcatttttataatttggtgcaagggtggctcgcccatacgagcccagctcgcccaggcgagctaacctgcacttttgttttttttttttttttttggggggaacattaaccatgtaccctcccttctcacagattagcatnttgcctaacttgaactttcttanggttacaaataggcgttgattacttatatgattattactcttttccttttcagaacaaacaaa

SEQ ID NO: 85361 - DNA, 348 bp, Glycine max
  unsure (1)..(348): unsure at all n locations
agcttgatggtgttgagaagaaatcacttgnttgtcatcatcaaaatgggggagaatgtgaatgtatgtatacatgattctgatgatgtcaaaagaagaatcaaacaaggctcattttgcttcaagattaatacaagattgtttcaacaaacaaagccttgattcaagatttcttcaagatcaagccttgcctcacaatgaaaggtttcaagtcattcaaggcacatgtaatcgattaccaatgatttgaaagtgtgtaatcgattacacatcatatgtaatcgattactagagactctgaatgttgggaattcaaatttgaaatttgaaatttgaaaagttaaattt

SEQ ID NO: 85362 - DNA, 337 bp, Glycine max
agcttctataaaaagtacgttcctattttttctactattgcatcacctctcaatgagctggtgaataagaatgtggccttctacctgtggtgaaaaacaagagcaagcctttgctttgctcccagaaaagcttactaatgcacccgttctaactctctctgatttttctcaaacttttgataatatcatggacttgtttgctttaaatgaacatttctctcccatttaccaaagttgtgggaaacaggcccaaaatggattctatttggctaaggagtatttgttcaaagagggaaagctttgcataccccaatgatccattatgaaatcacttgtt

SEQ ID NO: 85363 - DNA, 465 bp, Glycine max
  unsure (1)..(465): unsure at all n locations
ctttcggaccttgaaactccgctttggacataacctcttgattaaccaagaaatcattatctgcttctaccttcgatgaccccataatgtattgagggggacttggtgatttcttgccgaatgtaattcataaggtgagagtcctatactcgagtgttgggaagtgttgtagaaccattctgcccatatcaagaaccttccccaagaagaaggatgtttatgaacaaatgctcgaagatattgctatacaacgcggttcaccacttcgatctgaccatcggattatgggtggtaggccaactcattctctatttggccctactcatatgaaatagcatctgcaagaagcgactgatgacaaggggtcatgatccgagaccaggctttgtggcatgccatgtantttaccaacaagttccatgaatagaagagcaactgagtgagcagtatagtgagaatgaagca

SEQ ID NO: 85364 - DNA, 442 bp, Glycine max
  unsure (1)..(442): unsure at all n locations
tcaactcttanagtaccaccctaacaccccttccattgttctctccctaactgtaaaccccatgtgtctctcttgacctttttaaacaccccatttttttcttaaaagaaattaaaaaggattatatttaaaaataaatagagttttagaaaaataatgaagattttggaattaaataaataaagaggcaaataaaataaatatatgttcttaaaaaatgttttatttattcatttgataggtagtaaaatagagtttatttttataaaatgataaaatcactaccacaaacatggtcttcaacgatgcaagttttattatggttgtacaaaaactgatgtcataagtaaagtgggtagcattttgtaaataactggaaattttcaaagaggaatttatcataatcttctttgaaaatgaattacgacatcggttctacaat

SEQ ID NO: 85365 - DNA, 349 bp, Glycine max
ccggcgcagcaactttcacagacaccagcagtcttattctcagcaacacacgccatacgacagagagcacagaagttcgcggaccaccctcatctacacgcaccacacacgcaatacgacggcaaagggctactagagaaggcaagggaaggaaacaaactataatcgcaagaaaaaccaagcgcacaccatgaacaacctaataagataaaaaaatcaaaaagaaatatgggaggagagagatacatatacccgggtatataagagcgaaagtatctaagatacgtaggacctacgccaccttccctagacacacccacatactacacaacaaattggatgaaacaca

SEQ ID NO: 85366 - DNA, 441 bp, Glycine max
  unsure (1)..(441): unsure at all n locations
tcaactcttanagtaccaccctaacaccccttcctggtcttctccctaactgtaaaccccatgtgtctctcttgacctttntaaacaccccatttttttcttaaaagaaattaaaaaggattatatttaaaaataaatagagttttagaaaaataatgaagattttggaattaaataaataaagaggcaaataaaataaatatatgttcttaaaaaatggtttatttattcatttgataggtagtaaaatagagtttatttttataaaatgataaaatcactaccacaaacatggtcttcaacgatgcaagttttattatgggttgacaaaaactgatgtcataagtaaagtggtagcatttttgtaataactgngaaatctcaaagaggattttatcataatctttctttgaaatgaattacgacatcgggtctacaatg

SEQ ID NO: 85367 - DNA, 338 bp, Glycine max
  unsure (1)..(338): unsure at all n locations
agctagtggtagagtttgtcttgttcttttatatttggncgtgacacaatactcatagctgtaagaaagttattgaaacttggttgctatataattaagaactgaatgtactcttagcggtagaaacaagccaatataattttgcgtcttatgtactcctacttataacttcgagtttgattttttttaaatctctattaattacaaaaaattgctttcatcgattgatcgcgctttttttttttgacaatctgttatctgacttatgcaagatttcttactataacaaattttgtcttctagaagaaagggctttataatcttataaaacttacctt

SEQ ID NO: 85368 - DNA, 427 bp, Glycine max
  unsure (1)..(427): unsure at all n locations
ntccctctttaaacaaatacccctcagccaaatagtatctatcttgggcctttttcccacaactcttgtaaatgggagagaaatgttcatctaaagcatacaagtccctaatgttatcaaatcctaaaatttgagctcctagggagcaaaacaatgtgtgtctcctagagagggcatcagctaccacatttgtttttccctttttgtatttgataacatatggaaattgctctacgtactctacccattttgcatgccttttgtttaacttgctttgccctctaatgaacttaagtgattgatgatcactatgaatgacaaattccttggaaacaaggtaatgttcccaagttcagagtgctcttattaaggcataaagctctttatcatacggtgggtagttaagggtggcaccatgaagttttca

SEQ ID NO: 85369 - DNA, 104 bp, Glycine max
  unsure (1)..(104): unsure at all n locations
agcatgagaattgtaagccactgctncgcttcttccttacatgctcctaaataagacgcgggcacttctaagtaggaacggcaaatcatgagtagcattaagtc

SEQ ID NO: 85370 - DNA, 413 bp, Glycine max
  unsure (1)..(413): unsure at all n locations
tagtaatgacccactaacctagaattatttacctttgatgccattaacctaggaattaaaaaaaaacttaatggctgactgtaactgaaattgtggcaaccaaaagtcacccccaacagccaacaagtcaaccaccatttggtctcccaaaaggctgatgcctatgttgccaattgggcccttattacaacttgaactaaacctactaaagcccttttagttgattaacccaaaacatatttttggtcagccaactttacaaagattgggacattatttagacaaactaaacactctaaaattgagacaaagtggtgccatttaatcctccttcatttgngccatgatacaactcacaaccttggacttttctccttaaaacctgggcttgtatcaaataatatggacaacac

SEQ ID NO: 85371 - DNA, 370 bp, Glycine max
  unsure (1)..(370): unsure at all n locations
gatcttaagtcacctgcggcatgcaagctngtctaccaggtgtgcttgtattcctattatatcagactttggcaaaacaaaatcaaaattgaatttctcttgctcttcaggcatggtagcagtatcaccattcctatcattaataatggattttgggtccttaacagtttggacaacctcagtgatggaacccaaagctttctccttttgacgagctggtaaatgaaattaaatgattatatgtaaatgcagaatctcacacactactaaaaatggctcaacatattaccatcataacgaattaatgatttaggtaatccatttggtcgtaatgccttttcattcatgccttctgtgtacttgctcacct

SEQ ID NO: 85372 - DNA, 442 bp, Glycine max
  unsure (1)..(442): unsure at all n locations
ctcatcttgatggtgaagctccttcttccatggcttattccttaatggatggcgcctcctctcacctcttttcctttgtcttccgctgcatctccatggtggaaaatcaccattaaaggacctcattgaagctcaaagatccagcctccattgaaaccccaaaagcaagcttccatcaagtggtaatcagagcacaagagcttcaagtaggtgctccttaaacctccattaattttttgctttaccttctcttccattgttgnttcttcattnttttctccatgtatctcctcacatgtcttgtgctaaatttttttaacatgattctttaaagtttccaccgattaaacttgctatagaagctagaattgattttctatggttcaaatttcttggtcttggtcttgaaccatgaattgtgttgagtttaagttcctttgag

SEQ ID NO: 85373 - DNA, 351 bp, Glycine max
ttaagcaccgccgctgcagctttaaattaatacaattcttttgtgttcaacagtaaactttgggatcgatacataccctgtgtaatcgattacaggcttttaaattcaaattcaaaatcttcaaattgttttagaaatcaatttagccactggtaatcgattaccagagaggaaatatcatatttttgaacagataattgttcttaaaaaacttttgtaaaatatttcctttagccaaacctgtgtagcatcaattaaggaattctttctaagatcctaactaagtatatcgctcttcttgtatttctaaattcttgacttgaattgtgctcatttctgccatcatcaaaa

SEQ ID NO: 85374 - DNA, 463 bp, Glycine max
  unsure (1)..(463): unsure at all n locations
cttatatactcacgctcgtcgancacactacggctgcagcattcaatgctgaccttttttctatctctgtcacccttgttgcccaaattcctttgatctctaagtacatcacccaatacacgttccatttccaaattccatgttaaataacttcttgtttcctcattattattttcctaaaacttttcttttgtccatcattttttcattagatgactccattgaagttaatgtcacttattcaacctgcacataacaaatattatatataacctactttattcatttgactagtccactgcacaatcatagaaaatatttcaagcaaagtttttatgtaataggaaagtacataaaagtctatcttcaatagaaaagtacaatagtaacaaagcacacaaagtttgtctgcaatagcaaattacatcntaaaaagaactatccctaagcaaagtttctccta

SEQ ID NO: 85375 - DNA, 369 bp, Glycine max
  unsure (1)..(369): unsure at all n locations
gaccttaagtcacctgcggcatgcaagcttcttatccaagacanctctctggaggttgaacttcttcttccatggcatattccctagtggatggcgcctcctctcacctcttcttctttatctgtcgctgcatctccatggtggaaaatcaccagtgaaagacctcattaaagctcatagatccagcctccatagaatcttcacaagcaagttttcatcaagtggtaatcagagcacaagagcttcatgtaggtgctccttaaaactccattaattttcagctttaccttctcctccattgttgnttcttcatatttatccatgtatctcctcacatgtcttgtgctaaatgttattaacatgattctt

SEQ ID NO: 85376 - DNA, 431 bp, Glycine max
tctgatatctacccattgaattaagctatccgcaacatctttcttttgatcatataaaacttataatatatgcactttgacctggaaaatatgtgtttcctgcttctaaatagctttccttctagttgctttgtttctaattgcagaatctatcccatgaagaagcttccactataggcttatgcttcacacttgtgctatgcttttgattatgtcatgtcttattaagatcacttaaagcaaccattagtagctaagtttaataactttggttttgcttcatagtgggttgtcgtcaataaaacatatagttcctagagcaactttgtctctacaatgggctactcaatggactattttaagtcgttgtacgtcccttatgatacacataccctcaagctcccaacgtgatgtcagatgcgacatttata

SEQ ID NO: 85377 - DNA, 377 bp, Glycine max
  unsure (1)..(377): unsure at all n locations
acccggatccttaagtcacctgatgcatgcaagcttggtgacacaaacttanccattttatacttaactnggccttgttttctttgctagaaaattcaaagatacaacacattattgcctcccatttggtttcttgtttctattccaaagcacctaaggccattttggccaagtgttggtgcttctattccttcacaaaggccaccaacctaataaaacttgtgtataagaaaataatgcactctcttctccattttcttttttcttctccctcacctacttaactcaaacattttctagagtatgttttgtccaacttttcttttacctaaaagctatttttaagttagagcaaaaaataagatctttaaaataaa

SEQ ID NO: 85378 - DNA, 426 bp, Glycine max
tatcggtataattcgctcgttccattattctcttatgtctttagagggtactgcctcgatgacatcttttgtcttgactgacattgccatgacaggtttattgatactgtctttgatatttggtagttgatatcgcgttgcgggaggtaattccgattggattaactcaccatcattcacttgccaatttgtcgacatttgttgttggatcacctatgatgtcttgtttccaagggtaatctatatcctttctgatggcatatgcctgaaaccaatcaaagaaaaggacattaattttgactctttctacaaattcatagaactttgcttggatttgttctctgttcgaccctttaaatgtggaaaaccatcttctttgacgctcattctcccgagaataaaatcttcctaagggtttcctatcaa

SEQ ID NO: 85379 - DNA, 348 bp, Glycine max
agcttggagatgatgcttcaatggatgataatatagagggagagaaatagagagggggagcacgatatcgaaggaagaaaaagggagagaagttgaactttgagttgtgtctcacaagactctcattcatcaaagttacaacaagtgttacacatacttctatatatagactaggtagcttccttgagaagctttcttgagaaaacttccttgagaagcttctttgagaaaacttccttgagaagctagagtttagctacacacacccctctcataactaagctcacctccttgagaagcttccttaagaagattcctaaagaagctagagcttagctacacatacct

SEQ ID NO: 85380 - DNA, 431 bp, Glycine max
  unsure (1)..(431): unsure at all n locations
tcaagaaaaatggcttcagcagagaccttatttccataatgaatttctatcaatagacctccaatctttaatggagagggttaccactactggaaaacccgaatgcaaattattattgacgcaatagacttaagtatttgggaagccatagaaatagggccatatatacccaccacagtagaaagaattacaacagatggtagcacatcaagtgaaagcataacaatatataaacctatagatagatggtctgaagaggatagaagacgagttcaatacaatctaaaagccagaaacataataacatctgccctgngaatggatgaataattcaaggtttcaaattgtaagagtgctaacgaaatgtgggatactctacaattaacacatgaaggaactacagatgtttaaagatctaagataaacacact

SEQ ID NO: 85381 - DNA, 345 bp, Glycine max
agctggcctaattaacctggaaatgtagataatgattattaaacacacacaatggaggtactaagtatttattatctatacttaacagagaatacttataacactacaaaataaccataaattggaagagtttgctacaatttacacaagttgtatacacaaaagttagtcgtattcaccaactaacaactcccccaaatttacagttttgcttgtcctcaagcaaaaatagaacaactcacttgtcctcaagtgacaataacatgcagtggcaatgtacaaaggtgtatgcaacaaaagttattgattgcatgataagagaatgaagcattatgtactcatcac

SEQ ID NO: 85382 - DNA, 300 bp, Glycine max
  unsure (1)..(300): unsure at all n locations
caaattttnttataatctggacgagacatttttttttttgactcacaaaaacgtggaggggtaatttataacatgcaagcccctcccgccttttataagccgagccataaaccctacactaactgctcggctcatactgacccctactcgtgcccctacccatggaccaacttatatctcccttgcaaagttatgatgtgaattcatcttcttcatataagagagaattgtaattctatcatcacattgtgggaaacactaacaatcctcttaaattgacaaatcgacaattaaatccaa

SEQ ID NO: 85383 - DNA, 426 bp, Glycine max
  unsure (1)..(426): unsure at all n locations
cgagaagggtgaacttcatctcataaggtcactcatttattatattctcattactnattatgcagatatccagtaatatctagcatacactgcacaaggatcatatttcacatgctgccaaatgtattcattctaacctcaagaagtatcttgcgttccttttattcaccttgctcaaacttgaatacatctatcaacatcttatgtaaagaatagcttaattactactatttgactacacaactctacaatggcttgtagcttctaaatgacccctgccactgcgagatggaacaactgtctccnaataccactaagaaattatgatagactaaatgtgcaagcttgaaatcggtgaatctggcctccaatatgatgaaagttgattctatgttataaatcatcccctagctatatattattgta

SEQ ID NO: 85384 - DNA, 348 bp, Glycine max
  unsure (1)..(348): unsure at all n locations
agcttcataccaacgcaactcanaattttttgtatcttacnaccctcacttcagtggattgtcatggtttgagaagtgaatatgagaatggggtatatttggagcaaactctcatctcaaaaaagtttataatattaatctaaacttcctcaaattgtgtctacgatgaaaactccaccgaatcaaaatttgactcctgaacacccaatttaccctagaaatggctcttgccttcactttggtcactcattttcctcctttgcactgcccaagcttttccacaagtcctaaatgacatttaaaactatgattaactcattttaacctccaattaccactaaatccaaa

SEQ ID NO: 85385 - DNA, 414 bp, Glycine max
  unsure (1)..(414): unsure at all n locations
tctccttccatggcttattccctagtagatggtgcctctctttacctcttctcctttatctttcgctgcatttccatggttgaaaatcaccattgaaggacctcattgaagctcaaagatctagcctgcatagaagcttctcaagcaagcttatatcagtttgtggatccccactagttatccagtgaggtttcatgtgaacatgattaggatatacaggcctcatccagaatggagtttctagagatacatttgcatgagggaaaagccttgtatgcttttgaaggagaacgtgtatagtcataccttctacaaggagttggatacataatgatgtgatgccttcgtacaggttcttgtgatagtcattcaatgatgtcactntttctgtaaaagttttgcttgttcctattg

SEQ ID NO: 85386 - DNA, 416 bp, Glycine max
  unsure (1)..(416): unsure at all n locations
aaaacacctcttgacaaagcaacatataatttgttgtatttaaaacacgncgcggaagataaatgccaacattggatatggcttgccattgcgacttattaatgctaattgcgcaacttagtttgacaataaactacttcctaagaaaaggtaagggaagtctcacactctctggtgacttatgtctaattctaaccaagaaagtgtttcttccaccatggtggcctgataagaaatcaacatccaacatgttcattaaaaattcatgacataatagccttgctccattacacaggttggattaagggctatgttcataataacatcagggtgcccctttttaacctttaaattggagaggccgccacctaaagcatggatgcacgacttatgtgatatagttgtggtgccccttc

SEQ ID NO: 85387 - DNA, 335 bp, Glycine max
  unsure (1)..(335): unsure at all n locations
aacattggactgttatatcattgatgaacaaaanaataaaataaaaaaataagaaaaagagagagaaagagagaagtcctttgtgaatttcccgagttgggatgtagtaattgtatgtagttgatgtagatgctttgatcatattacaattataataaaataatatgtgtagttgacgtagatgctntgataagataataataaaaaattaatataaaatattaaattctccatttgggcctagcgttcatatatatatgtatatttttccgtcgtctccatcaactgaggaagatttgctntgcattanagcgcaagagaaaaaaaaaaaaaaa

SEQ ID NO: 85388 - DNA, 400 bp, Glycine max
  unsure (1)..(400): unsure at all n locations
ttaagatttttgagtntttttgtgttttcctctttctttnttccctttaattaacaccaaagggtaaagcctacttgaagagagatcttcatgatctctccatagatcttccatagaccatagtgagattggttcttactctactacggcaaagaacatttctatgtgtttttgggttgtctcctccctaaactaactggctttgttctccatctggntgtgcattttttctcagcactatatctaacttgtttcttcttttgggcacgacaattagattctgaggatcataaaagtgtcccaaaaaatttatgatcttggggaagagacctaccactatactaaagggtcataaagtgtcccaaanatttatgatctggtatcgccacgtatatatact

SEQ ID NO: 85389 - DNA, 352 bp, Glycine max
  unsure (1)..(352): unsure at all n locations
agcttgagatgagcaagtgtagaagggtgaatannttctgcttttattcgntgaccacaaagtggtacctggagatatgtcgcgggggtcaggagaccttggggacgtcaggtggggtgctattgcccaaaaccaagcttgaccaatcccgacccaacccgggcatagtcagtcaatgagaacctgtgatgtacctaagcaggcgagctcctggcagtcaacagataaaaggaacaaagaccacaaagcaaggaggcttgtggtggctggccagctgtgaatcttgtgtgatatatgggttatggcctctggtaatcgattaccaagggtgggtaatcgattacaaggctta

SEQ ID NO: 85390 - DNA, 438 bp, Glycine max
  unsure (1)..(438): unsure at all n locations
ctcttgacatttctataaaactagtcacttaatattggtgactttngaanaaatcttcagaaacaagtcacttgtagaattgtgacttttggaaatgtattttttgaaatcagtcactggtaatcgattaccattaaggtgtaatcgattacacatcaacaaatgtgactcttcattttgaattttgaaaattaaaacatttagaagctctggtaatcgattacaagtattgtgtaatcgattacacaagtttaaaatactgtaaaattgtttaaacataagttataactcttgaaatttgaaatcttaatggtttaaaacactggtaatcaattactaccttctggtaatcaattatcagggagtgaaaactcttggtaatgattttgtgaaaacttcttgnctactcaatgttttgaaaacttattaatacttatc

SEQ ID NO: 85391 - DNA, 286 bp, Glycine max
actccaaagcttggagtatcgcaggccacgaagagatgaacccgctgggggtcattcattggtaccaagatagcgctggaccgtccatgtagaatgaaaccacggggataccctcctggtcaggtaagccttggtagtcgaagaattggcagattttaaaaatccaaccaactggatcttggccgtcgaatctaggtacatcgagcttcgtgtgtggtttgtaaatgtgtggagaacggatagggttgtggtgtggggagagttgccgcgaacatggttggatggt

SEQ ID NO: 85392 - DNA, 433 bp, Glycine max
  unsure (1)..(433): unsure at all n locations
gcagtagatagttccttagagactttctcnatttttcttgtctncaagactgaggataattgcactgtgtgccttctgcagtggttctttcttatccccatcaaccatcatcttttcaagtttggcttctccatcaagtgcttccaccaggccctgttgaacaagaagagctctcatcttcaatcgccacagcccaaaatcattttgccctatgaatttttcaacctcatacttggccgagcccatttcttgaatcgaactcaaaaaatctgtccacgttcaccgcaccaatttggtgtgccaagatcagattntacttcacaaaagaatgagcttcttgtatgaacaagaatatgataatgcccaataaanagatgaaccataactggccaacactcacagcaaccacttttattcaatatctgccggtttt

SEQ ID NO: 85393 - DNA, 357 bp, Glycine max
  unsure (1)..(357): unsure at all n locations
gatccttaagtcgaccgnggatgcaacttggcatgactagctgtggactttgtttttggtganaggggagaggatgtgggaagggatggcggtgggtgttgccggatattccacacagggaagaggaaggtctttgataaaacaatgggtaaaaatgcaacacccatttttgtgtagtggcctttatgcctcccctcaagagaaaaaaactttagtataaggttgttttaatatattgacaatgcttattaagaacaaatgaagctcaatttacatacaagataaaaatataatatgttgaaagagataaatggttaagaaaatcatatattcggatagaaataaaacactgaactt

SEQ ID NO: 85394 - DNA, 348 bp, Glycine max
tattttgtggggtcatatcatacacctttgtggagtggttgacaatatttatatcattcataaaccaataattcagatatgcatacattgtttcttatacatgaaaagccacaatctttggatgtgttcaaaacatttacagtttaagttgaaaatcaactcaaacaaagaataaagtgtgtcacatctgaccgtggtggtaaatactatggcagatatgacagttcaggtgaacaatgtctggggccttatgccaggtatctaaaggaatgtggaatcatcccacaatacaccatgtcggggtcacctatcatgattggtgtggctgaaacactaaacataactctt

SEQ ID NO: 85395 - DNA, 259 bp, Glycine max
aaagggcccttgaatatattccttcctcataattgggcataaatagtcatggtaaggacatggggtgaatctatctatcaaccaaatgataacacttcagcataaatagatgttaatccactgtgtttgaattgctggagtaaaagtaggataggttatcagaaaggcatgcacgaggcagtggaactacaacttcttatgctgttagtatggtatttatacgtccgtagtaagataatactactttcgagttgactac

SEQ ID NO: 85396 - DNA, 439 bp, Glycine max
  unsure (1)..(439): unsure at all n locations
tgctncaacattgcaggcagtgcaacctgcccattcttttgttattttctattgagggatgcaacatttgaggtggtggctatgagtcaagcatgtgcatggtacaaaatgatgtacccaaagaagtcaactatatgaccaatccacaccatcaaggattccatcaatgaggacctccatgatacaattatgggggaatttctcttaaggccaaggttggagatcccaccccaggaataacttcaacagaaatcaaggagtttcatctaatcggcctctcaatcaagggcctgagttatatgagaaaaccactaatctagaagacactttgaatcacgttatgtaggtttctctatctaaatccaagagcactgagtctgccatcatgaatctatagggcaagcgggccaattaactaaacagttggctatagcgtcca

SEQ ID NO: 85397 - DNA, 209 bp, Glycine max
accttggggacacctcgtggggtgcggtcgaccacacgcaagatgaccaataccgaaccacccgggcatattcagtcactgagaacccgggaaggacctaagcaggcgagctccgggcattcaacagattacaggaacaaagaccacaaaacatggacgcccgcggaggactggcaacggtgaatcatgagtgatgtacgggcaatgga

SEQ ID NO: 85398 - DNA, 344 bp, Glycine max
agcttgtataattcaccccaattcctaatcctatatgttgacatactcccctatctactcaataatgcaatagcagttatcagcccaacaaagatttctcaacctccgtttcccagaggatacaatccctacaagacatgtgcttatcatgggggagtttccgggcattccattgagcattgtatgaccctgaaacataaggtgcaaagtctgattgatgtacgctggctgagattcaacgaggaaaatcgctcgtgagttctgatgtcgtcaagcaatagtttggatgatgcttggagcaatctgaaggttgttgttagatgtctccaatgactcattaagat

SEQ ID NO: 85399 - DNA, 420 bp, Glycine max
tctatggaggctggatctttgaacatcaatgaggttcttcttttttgattttcagccatggagttggagcacaatataaaggagaagaggtgaaaggaggcgtcatccactagggaataagtcatggaagaagaagcttcaccactaagagagtgtcttggataagaagcttacagaggaagcttaaatggaggaagagaatgagagagaacgagagagaaagtggcatgggaatgaaggaaagagaggggagaagttgaactttgaagtgtgtctcacaagactctcattcattaaagttaccacaagtgttacacatgcttctatttatagcctaggtaacttccctgagaagctttcttgtagaagctagtgtacaccccttccataactaagctcacccccatgcccaaatacatg

SEQ ID NO: 85400 - DNA, 70 bp, Glycine max
cccccagcaaacagaaaaagaagaacctccccccaggctgagcgagaccgcaaaaacacgagagagaaaa

SEQ ID NO: 85401 - DNA, 413 bp, Glycine max
taataagctaaataatatcctgaaaaattgtttttcttaataataaaacgcgcaatggcgtgtaatacactctttattatcagccaacagaacgcatattataagtggggggtacaaggacatgtttacttacacagttacactgaggttaaaagatcaatattatcaaaattgaagtgcgtgtgtctaatgcgaaatgataatttgcgatcactattatcaatttgtacagggagatagaaagcgtttgggtattatttgagtgtaccaaaattaattcaatgctcggtggaattaattttataaagcttttcttaataaatcataatctaatatttactaatggaaacaaagtatgaaacttggtgataatttgaatgagtcataatgaatggccatctgaggatagaatt

SEQ ID NO: 85402 - DNA, 356 bp, Glycine max
  unsure (1)..(356): unsure at all n locations
gatactctaagtcacctgcngcatgaagcttatgctgcnacattactttttatttctgacctcacagctaaaggaccacaacagaacattatgaccttctccgcgacagattcaaccctggatggaggaatcaccctcatctcagatggtctagccgttaacaacaacgacaacagcctcctcctctcttccaaaatgctgatagccctagcagaccatacattctctcccaatacaaccacatcaacagcccccgaaatagcatacaggagaggctcctccgcaaccttccctagaataacttgtgaggccaatgactatgcagaacatgcagtttctaccagagaccatagcct

SEQ ID NO: 85403 - DNA, 200 bp, Glycine max
tatagactacgtgtaccttaggtggagagactgaatcaatcagtcacacataatcttaacaataaagaaagaagtagcgccttatcagataattcgcagatatatgaaatctatttagtataaagtgatgaaatactggatagttcattggattaatctagccaactcgtatgaaaagagacatctattgctcgatctaa

SEQ ID NO: 85404 - DNA, 432 bp, Glycine max
  unsure (1)..(432): unsure at all n locations
accctctacgaggaagtcatccatatggtttctctgcctatgtattggatcatccattgcggattagggtcttttgtgctgaagtccatgccggaatgtggcgtaaaaatggagatgctgctttattatcttgtgaattgtatagatcagtacgctggtaagtaaattttgtattactatatactatttctgaggactgaaactcatccatgttagaggtatttctctctctgcttaaatctcaataatccattacattatactatatcagttcattatttcgacaggtctgaaaaatgtctggagcttgatctatttcttcttcagtgttgtgctgcactagctccagaggatctatttgtcagtagacttctgngagcgcttgggtgtcaaactacttatgtctaaatcttgaacggtctagcgagtatg

SEQ ID NO: 85405 - DNA, 349 bp, Glycine max
agcttaggaagggcattccttccacccttttattatcttgtcacgggcagctaataagacaactagtacagcttcacttgcagttccctgtataactccaccacctttccctgcaataaaatcacatccaatgttgcaaaggtttacatgtagtatttgagtttttctatcaaataaattattcatatgccatttaggttcaaatttttattatctatgaaattcatctcaagcaagagcttacaagcttaaaaaaaacaaaactctgacttagtagtgcgtatggtatctttacacacaattaattcagagaaatgaagcagctccaagaccttaccactagaataga

SEQ ID NO: 85406 - DNA, 354 bp, Glycine max
tagccagatcagctcctgacttgcagtggtccaccttgatggtttctgattcagttttggctggagaatctttgatggcatcagaagacactccagattgactctcgatgacagatgatgatgccttaaatgtttcaatgccaggtttgcactgcttctcaaacatcatctgaaggtaccttccttgttcttctattcgcaactgtagatttctttgaatctaacatagaaaataggagagaactgtatcagatcatacccatgaaaaaggaacaacaaccataagagacaagtgggcgtgccttggaaatttcatgcatgggatataacaaaagtcccataccccaaaattct

SEQ ID NO: 85407 - DNA, 349 bp, Glycine max
  unsure (1)..(349): unsure at all n locations
agctatgattctcattntgttcgcgcgtatatatttaaggncnntatgnacaaatcatgctatntgtctaaaggctgtatttaattactgatcgaatattgtattcgaagcgtgtgtgcgcaaaatagattcggagaaattaaaagcctttctatagatgttttattttacattattatcagtacataactctctaataagtactttcataatacctttttatgttcttaacaaacacttacagaaagcgtgactaataataagtactttcatactgacagaactaccaaaaatctgcattcagaatttaagtaaagctgtgtgcctaaaattatcaagactttaagca

SEQ ID NO: 85408 - DNA, 438 bp, Glycine max
  unsure (1)..(438): unsure at all n locations
tgactttgactatatctattcttgatgtgggatctcaactatcttcctttaacttttcagtaacagcttttttgactaattttcctaacagcaataaggatgccacaagctgtgcttgctagctgttatcaaaggtcaatcccatacctcaacaagaaatagtgaaaaaagacgatggaaagaagaggagggtaagtgacattgctaataataataataataataatgttaagcaatttagttagtcaatctaacacaaaaataagaatcttcctaagcttctatacaaataaagtgacaactgattatactaggagatctattacatttagtaagctaattagtagcaaaagtctctttttttttttgcctatacaaagtaactgctgagactaacagaaaaanaatcttcttggggaggcagcgcataccaaagca

SEQ ID NO: 85409 - DNA, 348 bp, Glycine max
  unsure (1)..(348): unsure at all n locations
agcttcttgaacccatggtactcaaggagnnctggttataanaatccttgagacttcaaccattgttaacttaagtacttgggttgaatcaactccttcttaacatagttgaacttgtaggattcctcataatgttcctaaaaaaaccacggagttacctttgaagagggtagtggtgatggagactttgttatcctcttgcccttgctggaagagtgactctttattgtttccttctccttcttcaagcttggttttagggttataggtttgtgcccaatgctcttcatcctcttgcttttggtttctgccattgatggaggttgaggataagaaaagaaagagaga

SEQ ID NO: 85410 - DNA, 95 bp, Glycine max
ccgctatatttttatctatttcctatgtttgaaaccttgcaccttactaggcaagtttcttttgcgaagcacatatttggtggcgaagctccttc

SEQ ID NO: 85411 - DNA, 311 bp, Glycine max
  unsure (1)..(311): unsure at all n locations
tactaccataagaattttcattaattgataatgtcaatntataatgtatacanaattgctaaagaacaaaaaaaaaagtgtcgttaaatgaagaaaattctgggcaacagtaaggccaagagttatatagnctttctcttttcaattatgaatatttaatattatgtagtcaaaagagttccattgcatggtcaaaatcatgtgcgtaaaataaaacaaattaaacgttcaaactgttctaaattcaaaaggtcaaaactgaaaaacgctccgttgccgagtaaatggatcaagtctagacgactttaaaa

SEQ ID NO: 85412 - DNA, 389 bp, Glycine max
cttagagaataagtaatagaatacctattatgtcaaccacattagaatctattacatcgcttagatttttgctagttactctatgattgttgtacttaacaaaaaaagatagtttttgaatcaattatggttatgcatgtgacgtgctaggagaaatgaaacagtttgaataatgctttactttggatattgaatcatttaactactactagatcaattatatatatgtttgatatcttacaaaggctttaggtattaaggtgaagcagctgtagaggccactgaaaattatgtcttatttttttttggaaatgaatattatatctgtcagtgtctcacttaagagtgattgtttttaacctgtttaacttccaagtttttttttatca

SEQ ID NO: 85413 - DNA, 346 bp, Glycine max
  unsure (1)..(346): unsure at all n locations
ctgcagctttaaattatatgtactaataatcatttatgtaatgcatctgtaagcatggttatgcacccttaagcaccttaattattgtgaataaagggttatcaatagggcagaaaggatctttttgtcttttgtgtctaacagatcataaatatgtcttgtgctattatgtgggtctggatagattattngatccttcgatactatggtcgaatagctgtttggtatgctattaattattattttgacggccaacaaaatttgagaatttgatcctagatatcacctattcttctattatagaccaagtgaactttgtatgaagaaacacgttagaccttgacaa

SEQ ID NO: 85414 - DNA, 427 bp, Glycine max
tgaaagactcgagaaacttcttcacaatagtttctttcatactttacaccagtttgtctcaaacatggaatatatttttacctaaaattagtcttgcttttgcttattttaattgttgaaatatgttttgcttatgaggtgtttaacaaaatgtttccaatagaatcaaggtttttttttgcttaattttttagtttcagtttttgtatattgttccctttttttgtacaaggcttgactgggttgtatatctgtgtttcatttgaacaagatcttattaagcttgaaggacccgagaagcttcttcatagtagtttctttcaaacttcacaccggtttgttttaaacatgacatttatttttatctaaaattagtcttgcttttgcttattataattgttgaaacttgctctgcttttgcttattt

SEQ ID NO: 85415 - DNA, 297 bp, Glycine max
cgttaccactatccctttcttttatctgtcgcgctcatacccatccaccaatattactgcggctcccatcaaggacgcaccaaataaatgccattgcatcggaagagcttccctatcaacgttgcccacgattactagtgctagaaaagatgttttctatgactctttcgtaacttccacattaggtgtagatgatggacaactcactaatatcttttattccccaaacactataaccagaagaccctccgccatagactacaatttgctaatggacattgatggcaccaccccatc

SEQ ID NO: 85416 - DNA, 129 bp, Glycine max
gagtctgtgtggagaatgactaattgcgtcaaaagactatccggagtgacccccactgacataagatgacgccctaaatatatgggtgccgaagttgctctgaaacaaatgcaaggtcttattgctcct

SEQ ID NO: 85417 - DNA, 348 bp, Glycine max
tagcttctacagaagggtcagtccatatttttttatttgtcctcacctctcaatgagctggtgaagaagaatgtggcatttactttgggtgaaagacaagagcaagtctttgtttttcttaaagaagagctcaccaaggcacctgtcgtagctcttactgactattctaaaacatttgagctacaatgtgatgcctctaaagcgtgagttggagcagtattgttacatggtgggcaccctattgcttattttagtgaaaaaattcatggtgccacccttaactaccccacctatgataaagcactttacgccttaataagagccctccaaacttgggaacattacctt

SEQ ID NO: 85418 - DNA, 382 bp, Glycine max
  unsure (1)..(382): unsure at all n locations
ttgatgatgtcgaanagatatcacatgtttgtcatcttttttttatggagaatgngaacgcatgtgtacatgattttgatgaggcccaataaaaatcccacgaggctgcttcaaatgataagcatttgctgtcagaattattcaagattgcttcatcatacaaagccttgttttaagaatcactagagaccaagtcttgccttaaaacaaaatgctttcaaaacatgcaaggctctggtaatcgattcccaaagacagggttgtagaactgctcgttgaaaaagttttggatctgaattttcaacatgtaatcgattaccgtatgtctggattcattaccagccacggaactttggaaatgtcagatccaaagtcataaccc

SEQ ID NO: 85419 - DNA, 330 bp, Glycine max
  unsure (1)..(330): unsure at all n locations
agcttgtcangttcagnnncaagnattttgtttttgtcatccacacggaccgagagaaaaggctcgggtccttaaagactacgcatcttctaaggctcaaaacgaggatcagaacaaagaatcccctagcctatgttctttaaaagactacgatgagaaaattacagaggacaggaatccctgcgggaaaccacataatatataaaacgtgcagagacttccttattggccccatatcttaagcgtagtatcgcttgacaacgtttaagttcacgggtgaaggaatttacaacgaaaggccctttgtatttcgaggcccactgttgacta

SEQ ID NO: 85420 - DNA, 461 bp, Glycine max
  unsure (1)..(461): unsure at all n locations
atagaataatcacgctctcaacgccagttntctaaataccgcccttgaaagttatattttaaacacggnttttaagaaccggcgttgtctttagatattttcccattttatattaagctgaaaacaaacacaaaacctcatccatgttttctctcctcaacccacacacagacccatcctgcccaaattccttctctcccaatccccaaatactaaatcgtcacgcctcgtaacagtgtgcgcggaggtgaaacagacctccaccgtcgccaccaccaccactttctccgactacaagatctgcgaaatcctcggcaaccacaactacaacaagctcggcctgcctttcaacaagcagaagtaccttgccaacgtcataatcgacaaccatccttgacaatgtctgcatcgccacaacgcactggcaaaccctataagagtcagcgtcattttctaagtta

SEQ ID NO: 85421 - DNA, 347 bp, Glycine max
  unsure (1)..(347): unsure at all n locations
agcttcaaggtgtgataaaantncatattttgtttttctgcacatcangaacatgttggcaccactctcatggttatagcattcatgtcgatctccttcgcaatgatattgagtgagagctagttaaaattgaacctcatccattcttaccaaggttttatgtcgccactagaggtggagatgaatgtggccttgatggagacagcggatgtacccgatgaagacgaaaagcaagaacaattcacttacatgaggaaaacatggaaaaacataatatgataacatgagaaaaaaaataaaaactcatctattagattaaaaataaaaatatctaatggcaaacaaat

SEQ ID NO: 85422 - DNA, 439 bp, Glycine max
  unsure (1)..(439): unsure at all n locations
ctgtgaaaggcatgtgatgactntaatcacaatcctgtgtggttaggaaggagatattagatatataatttagaaagaacagacaagctagctgtgacaacaatatataaatgtgctgagtattttaatatatttttttagataatatttcatggtatatactcatttgatgagttgtttattatatatctcattcaaataaatttacattatgtcttaaattgttaaaagaaacatatacttactacattgttgatcataagaatctttttaaaatttatttgtgatnttttataagatattttttaactttagatacattaattatttttttctacatatttttacttaattattttttttttataattagagatggagtataaagagttgtgtattataaaatgatttaaatatatttttatctctataatttaac

SEQ ID NO: 85423 - DNA, 348 bp, Glycine max
  unsure (1)..(348): unsure at all n locations
catgcaagctataaggtggtncaccaaagattttgttataactttgtaaaccacattacacatggatatatgacaaaactgactcacccactctagttgctccaccttgggaatcagacaaatgtttgcggccttaaattccataatctccctcggactatcccaccactcttgaattaagatgccaatgatcctcaccacaatagaccacgcattttggaaaaaacccactggaaagccatcaagaccaggggttttccacgagttcatgtcaaacaaagcctctttaatttcctcatgttgcagaggggccgtaagcatagtcaaatcctcaagctcaataaaggg

SEQ ID NO: 85424 - DNA, 420 bp, Glycine max
  unsure (1)..(420): unsure at all n locations
cgttgtcagtctaaacagtacctgtcacggnggcgttaactgctccggtggccatgctaactcggctgccggcgtatgtggtgacgctgagttggagccttggggagccatcgccggcttgggtctgaacggggttggtgagactgttgaagttggagatggagagatgaaataagagagagtgtggaactgaagaagctccactttttgtctatcgctaagagagtttaaaaaacctgggttttgctttgagaatgcactgtcttctggagcgaacagggttagtcctgaagaacatgaagtgatgagttgtgagttgagttgggtggttttttaacaaaccggtgagtacggagaatctcttggcttttggaaatgtctatggtgggaggtttcggagtggcggagacaggagaaccc

SEQ ID NO: 85425 - DNA, 330 bp, Glycine max
  unsure (1)..(330): unsure at all n locations
agctcgttaagtagcaacaaccaaaatcacttnttggcccaaccaaangcgaaccaatttcctaattaactaactgctgttgagaaataaaatggccacattaagtatatccatccgccccacatatatttattctcatatcttgaaagcagatcgaacgtgtcaaatcgtttcaatggctaattagtgcaatgtattgagtcgatcagtgtcttcttagcttgttggatgcaacttgcatagcaacaatatatgcaaatcgatggagaggcacaactaggcatttggtgtgcttgctgccaagtggaagtggggttcatgaaatgtaca

SEQ ID NO: 85426 - DNA, 163 bp, Glycine max
  unsure (1)..(163): unsure at all n locations
ctatctactaatactatgttatttctttatgctatgatccaagaaaaatgtgcatacttttgtgctgatggccganaatgacaatcattgcccctttttttcttttcccaaaagaatgtgaactgatttaattaacatatctaatgcagattcaatgcaaata

SEQ ID NO: 85427 - DNA, 430 bp, Glycine max
  unsure (1)..(430): unsure at all n locations
actaccctcctcttcacccatttcttcttcattatgcacgatttttccttttcngcaccacanctcgctattttcttctatcattctttggccaagaagcgctgatggtgatttgatagccttttttgtgtttaaataatgctttctcaaccttgtcttcatattaccagagtcgttcatggttgacgaaagcctatactagttttctcttgctttcttttatccttctactgcccagctttttactatgttcccctgtgtattaaaacggtttcccaatcatttttgtaaaaacaactctgttgaaaaacataacatttatgtcggtgatccttatatcttataaccttcggttatgaacattttccttttaagaagaaacacaatattcctcgtgatctatgaacttacacaccctaatatgtcatat

SEQ ID NO: 85428 - DNA, 400 bp, Glycine max
gcacacttagatactaagctctccatagctaagttgcttaacgtataacatttttttgaaaagctatttcaatttactctatttttttctcataaaggctatggaaagtttatcaaacatgatctatgcctaataatattttgtaatgatgcttctggggataacattccaaatatgataagtatatatcgctttttgttgacactatgttattcaacttacattatcctacggtgtgttcttttgaacaatgtgataatgcacgtgcatttgaaatttatgcttaaataatttttccccctagttaaatgatgatcatggtgatatgattccacaagtcctgtagatttggttgagattctgagatcattgttatgtcacaaacagcatatcttttgag

SEQ ID NO: 85429 - DNA, 360 bp, Glycine max
  unsure (1)..(360): unsure at all n locations
agtcacgcggctgcaagcttaccnagagtttactctctggaatagattaccagnnnacngcaancgattaccagtagcaaaatttgttttcaaaagctttcaaattgaatttacaacgttccaattaatttcaaaatggtgtaatcgattacaagattttggtaatcgattaccagtgtgtttgaacgttgaaattcaaattcaattgtgaagagtcacatcctttcacaaaaatgctttgtgtaatcgattacaatgatttggtaatcgattaccagtgataagttttgaataaaaatcaaaagatgtaactcttccaatgtgtttcaagattttctaaaggttataactcttctaatg

SEQ ID NO: 85430 - DNA, 71 bp, Glycine max
cagaacgcccaaccacagggggcaccagccaaaacccaccacaaacgacaaaaagcacaacgccaagggcc

SEQ ID NO: 85431 - DNA, 368 bp, Glycine max
  unsure (1)..(368): unsure at all n locations
cagagtcacctgccgcatgcaagcttatggataatctgggacttanccatggttgtattcttcacagaggccattgcctccctcgcctattattatgatcagccgatcatgcgcttcatccttggggacttccagctatcacctatggtagaagaatttgatgagatcctacgatgtcctctatggggaaggaaaccctacctcttcttctggttctaatcttcattagctaaaatttccatgatagtcctaatttttgcgcgggatttagaccacaggaagcaagtcgaaaatggggtgcgtggaatacccaaaaaatatttggaggcataagctagaatcttggcaggttaatgctcagtgggccc

SEQ ID NO: 85432 - DNA, 271 bp, Glycine max
  unsure (1)..(271): unsure at all n locations
attccatgngaatccaccacaacgtccngtncctactctaattaaaccatccgagtcatatatgtcaaataataagcgatttatttatgtattcctaaatcctctttccgcatttctggaagttctagtcgcgcatcgctccatcatgaacaaagaaaggatgcgccagaaatgagtgaccatgcgtttataggcacatgaagcgtaaaaagctttgccatatactcacggtggagtacgaatggaaataattgctgcaatatctagccac

SEQ ID NO: 85433 - DNA, 215 bp, Glycine max
  unsure (1)..(215): unsure at all n locations
caaccncagcagacaaagcaaccacagcagagcaaagangacccccccagcaacagacacaacccnggaaggaggaancacccnaaccccagaaggggcagcccacagcaacaacaacagcagcccgccccagcccaccaaaggcagcaggcccaagcagaccatacatgccgccaccaagccaacaacagcaacaaccccaaaaacaaccaaca

SEQ ID NO: 85434 - DNA, 349 bp, Glycine max
  unsure (1)..(349): unsure at all n locations
agcttataaaaacacaacngccntatttattancntatatgcatgcgaannaggacgcatcaacaagaatcaagcccacgctattgtgcaagcaactaatggggcaaaacacaccatatgactataatgatggatggctcaaattctcacaaacgtaaaatcatcactttctaattgagcattcaaaactatcatgacttgtatatgaacaatcatagatttcaagtcacaaaatgtcatgaactttgattatcaaaacaactacccatttcttgaacatatcctataattcaaagagaaacatgcaaagtcgtacgtgcacacgaaattgacccaaaatattacactg

SEQ ID NO: 85435 - DNA, 360 bp, Glycine max
  unsure (1)..(360): unsure at all n locations
ntgcganaagcttgccactggagctgacccatcaactgttctatctcttttaggctggtgattcctaggctcttgaccttgacttgatggaacctctttttaagtgaaggcttttgacttgatcccatgtattactaaagtgaaacaaaacccagcccgaatcataactccgacatctatcatgggtggaatgaatgagtgcatgaagaaatgcatatgatatagatgcaatttatgaacacgggagcccgggaaattgtctccttcttagatacaacgttttggggtaacacagcgcccaacgtatgtatataagaaggtgacacagaccttccgttggtttgccaaagagaggggaat

SEQ ID NO: 85436 - DNA, 435 bp, Glycine max
  unsure (1)..(435): unsure at all n locations
tactcacgcttgtgaatgaagtctatgttatacagtgcttgatatttagatancttgcgagctcatatatcatagtgtggatgtttacatatattctccatacctttgaaacatgttttggcactaccattgatacatagaccacttttcccacaccagtctttgttcaagcatggctaagtgttaggataaatgagttaaatatccttctttgctcattacctgcttttggcttcaacttatgcaaattgtcatctatgatcaatgcatgtatgtgactacgaccacagaatgtgacttgacactcgaaagcactgatactgaattttgcatgagtatttttctatgcatctaggatcccaaattattaacaactttacaacccagttgagaactaaaagccccacatgttgatcctaatgtcgtatctagcta

SEQ ID NO: 85437 - DNA, 433 bp, Glycine max
tcggctgtagtagaattggggcggacatgacctcatggtttcttattgtgaaccgcgacatgtagacgtgggatattatgatgacatatgctcctatatctagaattctttttaccaggacatagaaagaacgataaagatatacctaaaagttggacgtgtcttccaaagtacaggtcattctaccctacccatctgtttattttaagatcttattaatgactagcttaagaatatattaattaaaaatatgtaatgtattttcatttttaattgcgttaaaatagaatattgaacatttgtttttgaatataaaaaacatttgattacatatgtgttaatcttatttgttagtgaattttttaaatgatcaaagaacacttattcatttttatttaacattcttctaatctgggcaaattcatcacattca

SEQ ID NO: 85438 - DNA, 411 bp, Glycine max
tttgagtgaaaggatgtgactcttcatatattaatttgttatttaacggtcaagggcactggtaatcgattaccaaaatattgtgatcgattatagtcttttgaaaatatttggaacgatgcaaattcagtttgaaaacattttcaaactcattctgctactggtaatcgattacaacaatatggtaatcaattaccacagagtaaaaattctttggtaaaggttttgtcaaagattcatgtgctattcaaagttgtgaaaaaactatataatacttatcttgattgagtcttttcttcattcttgaatcttgagtcttgaatcttgatcttgattcttgacatcttgaatcttgattcttgattgtagactctcttcttgagtctagaagtccttctgaatcttgaactc

SEQ ID NO: 85439 - DNA, 343 bp, Glycine max
  unsure (1)..(343): unsure at all n locations
ttaaaccttttcatcttaagttcattcttcttagcnacttaaatatngatntatggtgattgtactgtacaatgagactngtatttcaatggtttatttaattgactattgactattgatgaatgatgaccggcttttcatttaaatattattgtagaggatcgtgatccggtttattttatgttaataaattcaaaatgaatccaacgtaagacttcatgtatctagcctaactctntatatatcactaggcttgtaaagtctagtgggggtgagtattacaagacaatttaacaattgatgcaatgaaaaacattaaaaaatgaagataaaatactgtatc

SEQ ID NO: 85440 - DNA, 409 bp, Glycine max
  unsure (1)..(409): unsure at all n locations
aatattgggcccagacacagtatacacaccctgttccaccacataaaaaggtccaaagaggaaagccaaagaaaaataggaggagatctgtagatgaggacaatgtcacaggacataagctaaagaggaaattggctgagtttacatgtggaaggtgtggccaaaccaatcataacattagaagttgtaaaaatattggagttcctgttaggccaaagaaatatgttgcaccatcaacttcaaatgaggatgaccacctattatctcaagatgaacaagctntgaatgaggctgaagaagctgctgctcatgttcaacaagatccggtggagattaatttatctcaacctcatttgtcacaagatagtgacatggagttgatggtaaatatttgtcacaacaaagtacg

SEQ ID NO: 85441 - DNA, 325 bp, Glycine max
  unsure (1)..(325): unsure at all n locations
agcttaagctcattgttgctaccccataattcttttttactngnnnnggccatgtgcttcctttcgggtcctctttgtttcctattccaaagcttcagtggtggccacattgatgtctcagtttgtcgcactctttccggaccttgatggtcgttgtcttgaacttttccttgattgcttgtgccctttcaggtttgcacctcctcactctcctgacgggattcattctcttacttccttgaaacctttagctttgggaaccaatactaatcttgcgttcgagccttcaaccacttatgatagtcgtngatgatcccattgttgc

SEQ ID NO: 85442 - DNA, 430 bp, Glycine max
tcttatgcaaagcacattcttggtggcgaagctccatctttttggtcttattccctaaggatggggccgtcccttctttacttctcctttgccttacgatgcattatcatggtggaaaaacaccattaaatgaccttattgaatctcaaagatccaccctctatagaagctacacaaacaagctgtcttcacaagggggaaaatctagtgatgaaatatacccccctaaacaaggacaccccttaatggttaatgtggaatagtaggaggtaagtgtctcctctataaagttagctcataaggaaagacattttgaattaaagaaaaatcttatagaaatttcccctgcttaacaacctccacatttacttctttgtaaaaatacacctcgtaaacatttgcacaccctcttgggcttaaatatattcct

SEQ ID NO: 85443 - DNA, 375 bp, Glycine max
  unsure (1)..(375): unsure at all n locations
atcctctgagtcacctgcggcattgcaagctaagtagacatctcatgtctatagatctctttcttattcgtctaaaaggagtgacttcacgttgatttagatntttttatttaaaaaatcaaacaaattcaaccaaatcaacccggaaacccttatattatataaacgtcttgctatttgccaactaattgccctttaattaagaaatactattaaaaacattctattaaccactcctagtcttctactgcgagttttaaatactttntatactcatcgtaataaatacctttttaataatcaacaaagttgaatttagaagaagttagatttgaatcttcgtaaaaaatgtctatatttaacattgaccacgaa

SEQ ID NO: 85444 - DNA, 447 bp, Glycine max
  unsure (1)..(447): unsure at all n locations
cgcctaccaggtatatatgccactctcacactctctaacaagctttattttatacgatgtctattattggttcanattntttgaaactcatgtaatcttatgagtcttactccttatttaatgagtcaacatcttatcactttgtgtttccaataaattttaaatacagtgtaataaatagagagtgtgttgtaacactactcctctttaatctttgcatcatttacttagtcttaccgaatttattgttgttcgtatttgattaacttaaaacatgaaattgttaaatgtaaggatattcgttctntaaaatgtgagatgttaataaatttatttataaaagataaaaaatctaaaattagtttatgaatatgtaaaaaatgtgataaattaatcatacagacaatttaatgaccatattactcttaaattttataaattaatatc

SEQ ID NO: 85445 - DNA, 346 bp, Glycine max
cttaagcacctgcagctgcagctaacaatgaaacacgccagctttattttttctgtctcaccgccttcgctcgaggccagagaacggaatgagcctaaatgtggaataacctgtgatcaaaaacactaacattagcacactttttgaatctttaacagggatagccgaactcgtacttatcgtatcatcttctattctttaagacacattttggacatggctctctatgagtggatggcacaataaaactccttatatacaggcgagtgtttttgtgacttgtagcccctccaagaagctaagagactgcataactgttttaagtcttgaaccactggcccaatgc

SEQ ID NO: 85446 - DNA, 419 bp, Glycine max
tgcatggaagcattcttactattaagaaacaatacaattctatttttgttctacgaagccatattctgagggctgattctagtgcgtcatcaaacatgcttaatcacgatagcatctcgcatacattgaagaatgtgtaaatctttcacattaacaagctgacacctattgtattagcaccatacccaccgttccgtgaataatctctaatgcacactactctctatgtcgtgcgcgacacggattagaatcatacaaaggtggagattcatatttcttttcaatttgtaacactcaacatgcttattcaatattgaaattcccatatttcatcaatcattagcaacgcaaccgtgttattcactcatacaaacctacacccgagacctttatgttatcaaactcacctgcatattatc

SEQ ID NO: 85447 - DNA, 286 bp, Glycine max
  unsure (1)..(286): unsure at all n locations
ggaaagttgnacaacgnncatgacattctctccctattntgtgattttgattttgatttaattttttttggaaaacacagattgactgtccttttgaaagaggtgataattcatgcaacctcatcctacctttatgcagatctctccaggaactccctcagagtgcatgttctttttgatttagtcacttgaccattttggagtgacggcaatggagccatttgatgtttaaccaatccattgaaattccagggtttgtcccctttttttattattattattatta

SEQ ID NO: 85448 - DNA, 436 bp, Glycine max
cgtgtgacattatccactgctgtgtagaaacattgctttgtaagttgttgcgctctaagtatgtggataaatgaacaacttcaagactttggggtaactcttgatcatattccattgaaatgttatcacactagtgctataaatctatctaacaatctaattatgcattctagaatgaagcatatagaaggcatcattttctaagagatcatgtatctaaaggtgattgttgcattgaatttattgatagtgaacacccactagttgatatctttacaaaacctcttgctaaagataggaacttctctataaaaaaatgagctaggaatccaagatgaatctagcattgaatgatgttatgttatggggtgtgcatcttgatatgtgctctttgaatctatcaattcctgtcttgattgccactgtatgtcacaat

SEQ ID NO: 85449 - DNA, 343 bp, Glycine max
  unsure (1)..(343): unsure at all n locations
agctngcatgtcatgtactacacatgttattattctctatggctaaaatataggagggccttctttaaatgttatgaaaaagacattgcagtgattgaaggagccgatagcaaagccaataaaatatgactgattacgcaataggcatgaagctcaagtccacatcaaagggtttatggggagtgtgactactcccaaaacgctngcaatgaatgaaatagttaggggggaaatattcttgttcacgtgtaacaaaagtggttgctgctagctcatatattttgatgcataagtataacttggtggccctctcacttgtggtaaatcacaccctgcttcgatt

SEQ ID NO: 85450 - DNA, 452 bp, Glycine max
ctccgcttgaggctttatttatgcttgtaaccaactttagtgttctatttctttgcctttaagaaagatatgggtggcatttcctatgatccttacgtggggaatacgaccagttgactgtcattaattggaagaaaaaaacaactggggattactgaacttgctttggttgatttcatattataacaagaaactcatgtcaatgcttgcaagtatatctttctccaaggctttgctaaaatggacagggatgagtacagcctacctctgggtacgtctgctatcagacatgccacccaggtatgctgacgcataattgacaatggtacattgcctccagctactgcttgttataaattctctactactacagattcagaggtatacctatatgctgaatatggcgctccaggaaactataaagctactgcctttggaagcactaatgtgta

SEQ ID NO: 85451 - DNA, 230 bp, Glycine max
aaaacgcttcacaaaccacacaaaagccagcacacgggcctaaaagagatgctttaacctagcaaggatacgacatataccagtattcgatttacccaacagcacaagatgacaaaagcacaatgcataacagcggggtcaccccaagggctgaatctcaactcttactcagcgtgaatgactccaaaacaagttgagcttccatcccttacttagggttcatttgtgaa

SEQ ID NO: 85452 - DNA, 433 bp, Glycine max
  unsure (1)..(433): unsure at all n locations
cttcgattcattctatgcacccatggtggtccacattgttgtttgtgcatttttattctcgttgtggttactttttatacccctgttgacgtgcttaagccattntacttaagtcatttctcgcttaacttaaaaataaaatcaatttccaccgaacgtttgaattgtattatccgataacttcggttaaaatgaattccgaccgttcggtcgtgccgtaaccacattggaaatcaaaaaagaggttaaaataatataataatcaaaaaaacatcttttaataaaataaagcggaaaatcaatcggacgttcttctctttgggatttctcattcttaatcgaattgattaataactaaagtgaaaccaatgctaaaatcaacttcgctagtcaagctcgtccacaaaaataagcttttgaagtttgtcatttc

SEQ ID NO: 85453 - DNA, 409 bp, Glycine max
tcagatacgtggtctcttgtaaaaacccaacaagattttttgtcttgtaatatgcatacactgtgtattatgctattgtttacatggcgacacagcacagtcatataatttactctaccaaagaaatcttttctgagctatatacagaaccggatacttatttttagcaacaatgaaaaaagaactagtaatatttaccactccttaatttcacaatcttatatactggccaagtgctacagtgtagaattgtttgacaatgaatctatttatctgcaatggaacttcaaactcatgctatacctattggacgtggctgctcaaatcagactggtcaattgatgaaggaagccagagttccacacgagtttccccagctgcagaggagcatctttaatccaaagaaaac

SEQ ID NO: 85454 - DNA, 437 bp, Glycine max
  unsure (1)..(437): unsure at all n locations
tactctgctagaattcaggaaaacaacaagtgagtaagtgactaattgtttctgtgatcaatggngaaatatatgtgtatttagatgtgtatattaatttgtgagccatgaactgtgcaatcacacaactgtaagaccctttaagggtgatgagtttttgcgcaattagtattgtgatgggatccactatggggacccgacgagtttaatcacaagtgcgacgagataaaatcattgtgagaacaattgagaaatcgggtgtattgcatagttcataggtaaagtgtatatgattcatgaggtgtgataacatactactttgagattataccattgtgattgagatcaaatatatgtgataaattgagtatgcatngactcgtatacatatgtgcattgggatattgtgtgcattgagttgtgaactatgaatcgta

SEQ ID NO: 85455 - DNA, 349 bp, Glycine max
  unsure (1)..(349): unsure at all n locations
ctcataacggntacaaatgcctttttcttactggcaagctctttctctctaaagatgttagttttaatgaaatcaaatttccttattcaaatctcgatttgacttcctctaaatctgattcacatcctaataaccccatcttttttattccctccatccctattgttcctcaacctagttctcctctttccccctctaacaattctgttgctagtcctacttatgttaatcctacagctgattgaaattctggttctagttcttccgtccatgctgagtctagtcctattgtcgcatctgacgttcttagtcctactaatgatgctggatcacatctgtgcaaacaatc

SEQ ID NO: 85456 - DNA, 347 bp, Glycine max
agcttgtaatcgattacacacattctgtattctattaccagaggagaaaagcagaagatattctcaacaggcacatctttttgtgaggatctcgaatggctatcaaaggcctatatatatgtgacttgagacacgaatttgctaagagtttttcataacaaaaaggtcttatcctcttaaaaagcaaaatcgtttcatccttttacaaattccttggccaaaacacttgtgattcaataaggaattatttgagtgctcaaattgttcaatctatctctttcaagagagatttcttcttctcttcttcttcattctgaaaagggattaagagaccgagggtctcttgt

SEQ ID NO: 85457 - DNA, 386 bp, Glycine max
  unsure (1)..(386): unsure at all n locations
tggtccaatttggcttctattgtgattggcaagaccagtcttgacgggtcctgtgtcaaacgagggaacagaattttttttacacaattgtttaaatattgaactctaataaatacttattgaataaataaaacaatatttattgttaattttaagtgtaaaactaaggataagttccattagtagaagaaaattaagtaaatattaactaaaaaatctgagatgagtcattaattgtaaaacaaaaaaagagagtaaactggtagtaaagatggaaaatgtgagaaaatattacgtataaagaaaagtatacatatagtgttccaaatttgtccttatctctattaataactgtatnnttcgtaggggaaaataacttttttctt

SEQ ID NO: 85458 - DNA, 307 bp, Glycine max
  unsure (1)..(307): unsure at all n locations
tctaaagaaaacttctcaaggaagctacctagtctataaatagaagcatgtgtaacacttgttgtaactttgatgaatgagagtcttgtgagacacaacacanagttcaacttctctccctttntcttccttcaatntcgtgctcccccctctctctntctctccctctntcttttcctccattgaagcatcctctccaagcttcttatctaaggctcatcttggtggtgaagctcttcttccaaggcttattccctagtggatgacgcctcctctctccttttctcctttgtcttccactgcatcg

SEQ ID NO: 85459 - DNA, 336 bp, Glycine max
tagtttttgactttttccaaatggtttttaaggttttctaaaagtcctaactcttctaatggctgtctcgacccaaaatgaagaagtctataaagccaaggctttgtttgcatttaataatcttgaatacttttccaatcaatctcttacaatcctttacaagccttgaatctctttgaacttcttcttcttcttttgaccaaaagctttctaaagttttctggttttctaaaccttgaaaacttgtgctattcatcttttcattctcttctccctttgccaaaaagaattcgccaaggactaacccgctgaatctttttgggtctctttctcctt

SEQ ID NO: 85460 - DNA, 348 bp, Glycine max
  unsure (1)..(348): unsure at all n locations
agcttgtaaagaactgagggaaaancagattaagtntttacgcacatcgnncgcgtggatgatatccactccacaaggtttgaagtagaggagagcttcaaccctataacgcaacgtggcggacaaaagtgggcagtaaacttgaatgatcgtcattgtcaatgcggaaggtattttgcgcttcactatccatgttcacacattattgcagcttgtggttacgtgagcatgaactactactaatatatagatgttgtttatacaaacgagcacatcttanaagcttactccgcacaatggtggcctcttgggaatgaagcggctattcctccttctgatgacgcatgg

SEQ ID NO: 85461 - DNA, 377 bp, Glycine max
  unsure (1)..(377): unsure at all n locations
ctaacttttaatataataacttcatcntttattttctcattctttcacttgcaataacccccataattcttccccgaagctccctttaaaccttccttgaatcgctgattatgcttccttttctcacttgtacatttctatctatcttccagctgcaagaaatgtcgtgagggcagtttatgagacccantaagggccattcagccgcctggactcgaagtccagcctcgagcgcttcacacgcgccaccatccgcatcgacgcctcgggctcccctaacctcttcatccatctcctcgccgcgcggttctccaacatcatcaccgttcacatcgatgagcgcctctcntgttcaatccctgctcacctcgtaagct

SEQ ID NO: 85462 - DNA, 352 bp, Glycine max
  unsure (1)..(352): unsure at all n locations
agctntagtttcactgacaaaacttaaaaatatttattttaatcgtctttagataaaacaattgcatattcgagttttataaccttataagaggagattaacttctattaaaaaaaggagattaacttaagttttacgtttaaaaagtaaataactaattgttaataagctaaggaaaaagatttagacttaaaagaagcttaggtgattaatgattaagataattaattttaatataacttgctcattctggtcaaatttaaatgaataaactttgaacttaaattatgttaattatgaagttaaatgatcctaagacaaaattgtccttttataactatcgatggaaaca

SEQ ID NO: 85463 - DNA, 350 bp, Glycine max
  unsure (1)..(350): unsure at all n locations
agcttgaatngcactngggcacccatntttgtcatttatgctgtccccatatatataaaacagttccacaatcctaattttacaaaaatcacattcatatgtcattggggcatttcaccgagcacttggtgggcgcatgtttagacataaattgcaagagaacgggggcaatgtggcatgcctcattgcttcagaatacaacacaggcctaaggccttcccctacaaaccctcaactcaacaaaacaagcatggattcagacgtgaattgcttcacgaatttcgcataaaatgagcaatttaaagcaccaaaacacatcaatggagagccaaataaccaaaggaaattgt

SEQ ID NO: 85464 - DNA, 394 bp, Glycine max
  unsure (1)..(394): unsure at all n locations
gaagtactatttccgctcctgagtatgacagtcaccgctttatgagcgctgtacaccagccagcgcttcgaggccattcaaaggatggtcgtttcttcgggagcgacgcgtccagctcanggacaacgagtatactgatttccaggatgagatatggcgccggcggtggacatcactggttacccccatggccaagttcgatccagaaatagtccttgagttttatgccaatgcttggccaacagaggagggcgtgcgtgacatgaggtcctgngtaaggggtcagtggatcccgtttgatgttgacgctatcggccagctcctgggatatccattggttgtggaagagggccaggagtgtgagtatggccaaggaagaaaccgtctgatgggt

SEQ ID NO: 85465 - DNA, 347 bp, Glycine max
  unsure (1)..(347): unsure at all n locations
agctnttgccttctcctccaatcacttccnttggnattccagnccaccccattcctattttggttcactcggactaactcttgcaccgagatcttgaccacttttgccactctttccattgttgggtataagtcgaaaaatagatgcggcttccttcctcctagtaggcatcccaagattgcttcaaactcctctatggttggtactaactgaaagtccccaaatatgaagcatctgagtgactggtcgtagtattgagcgagggatgcgatggcttcaacaaatacttctatcatggctaaatcccaaattttcccgtatgctttgtgaaaagcttgacgttgaac

SEQ ID NO: 85466 - DNA, 437 bp, Glycine max
gctctgtatgctgatgccaaactcctttgcatagggattattcattttattgtcatgtggaattgtctgcgcgttaatagggaagttctagataaataaaacagggcccacacaaatttttgtttgatgaggaaaagcttatatgactattataggatgaaatcaccatgattgcgatttaatacatggccacgacctatttaaactatataatgtccaatccactgaaaaaaaaaaaaggatcagtaatggaaggatggacggtgagaccaacaacccatgataatatgacctgcaaaatgtctgtctcttgttcgcggggcctttgacatgagatcttcaacagagaaagtatctgcttctcatttagcccttctgtatatctctggcctccgactatcttgcatgcctgggacaagactcacactgattctcga

SEQ ID NO: 85467 - DNA, 283 bp, Glycine max
tctttctttgtttatgtaaaagctatgccacatgtctccttttgagtggagcaaaaaggggcccacctcttccctttgaggtgactatatactcagccacaaggagagaaaaatttaactttttgaatgctaaaatcctgtctcggtttacatgccgcttctctggttccagctcctcgcgtttctctgcacccgtcggggccctttttcgaaagtaaacaatatatatatatcaaaacgctcagaatgaaaccctaagcgcggttcagaggttgcttttgtt

SEQ ID NO: 85468 - DNA, 419 bp, Glycine max
tggatgatatggtcttcaccgacgagaggatcgaatgttgatgtttaagaagcaaatctgaactgagactttgataaatgccaaacaaattagggcaaatgaagagggtgagaatgagggacaagcccatgctgtgactgccattcctatacaaccaagttttctaccaacccaacaatgtcattactcatccaataacaaaccttatccttacccaccgcccagttatccacaaaggcaatccctaaatcaaccacaaagtgtgtctaccgcacttccaatgacgaacaccacctttagcacatactataaacaccaaccaagaaattaatttttgcgcgagagagcctgtagaattcacacccatttcagtgcactatgctgacttgctcccatatctatttgataatcaatggtag

SEQ ID NO: 85469 - DNA, 174 bp, Glycine max
agtacaggaactctgaagtgagtcttacatgactgttattcagcaaagtaacaactggtgcgacaccggctgactctttcttgaataagtggctatgctgtaaagtgtcactgagagaactatcttgataatgctctttgagaaaacgtcattcagaagcttgagcatatctac

SEQ ID NO: 85470 - DNA, 347 bp, Glycine max
  unsure (1)..(347): unsure at all n locations
agctntcatcatcagataagggactgtgagtgataccagagactgcaattgaggatctcgtgtcttaccactcanagtctatcaatacatcacttcatggagataattagcagcaaattataataaagagtctaacgataataactagcagcaaattatcccagaatctggacaaatacaaagcaaaagtccttcttataatctaaattcccaaaagaacacgacatttcatcgaagaactaatgttacaagaaatttaagcaggatttcctaatgtataaaaaaaaaacttcgtaccccattgtccagaggctcttcgctatgcgaaggtatggaggagggatgtt

SEQ ID NO: 85471 - DNA, 440 bp, Glycine max
  unsure (1)..(440): unsure at all n locations
tctagatatgaactaactacattttcatagggaaataatttttataatagcatgtgattctcctaatatcaatactaatccatcaattttgctaatatgagaaatcataacccaggtgttattgtaaccacaaaaacataccttcatcttctggttcttcacagccaggagcaacttcaaccatatttgatggattaatgcgactattcaagttgccatggacttgacaattctgagcccgtgatccttttggtcttccccgtccctttttcctaggcaaaatgctacctgaatcacanagttgatatataataacaacagttagcatatgattctcacaacanaaacataaactgcaaaaaacaaataanaaaggaatataagatgtcaatctatgtgtacctccctcctgttcctcaataaagtcaggatcagctttc

SEQ ID NO: 85472 - DNA, 379 bp, Glycine max
caccttctattaatgaccatgcattgttacatcccttccacacagaatgaatatctaatcttattggaaacgatatctatagatgacaagataaacatctctatgttaaccttatacatcattcaaataaatattctatgtatcatgtgtaacactacttaaatccaatgtatattgacctcttcataaatataaagccatgtacccccattaacaaagttcatcttgtatacagctaccttcaaaaaaaactgttgtaacaacatattctacacattaataatcttaatctgttctctcaaacaaagctcaatcagtttgtcaaataaaaattaattctaacttgtaatctgaattctcaatatcaaacaatcacatc

SEQ ID NO: 85473 - DNA, 336 bp, Glycine max
  unsure (1)..(336): unsure at all n locations
agctttgatctaccaccaccgccgcctncttcatcttatattatnannaanagcagtaggactttgatttctagccgtgtatttggctatattattatgacatttgaacaatttagtatgtcttctaatatttgcttagtatgactgaattgttatgaattatgttatatgactatgtgatttatatttggtctattcatgttttttgcttcatgattggtttagatttttcaaatgaatgacttgtgtatgattagtcatttgtgaatgttttatattttttatgcactttggctttttgttgatgccaaagggggaaagaaaaaaatgattaaa

SEQ ID NO: 85474 - DNA, 323 bp, Glycine max
gaactatgaaactcagcttgacaacacacacaaaagttcatgcttctttctctgtaagtctacgaaatgctgctagatagatattctcaaacactctgctatctagatatatctaggagtgagcggatatctctcataagatattttaaattattgaacaatctaacataaatcggagactgttaaacattatacctgggggacaaaatcttaaccttttaaatgcaaacttgggggtgtagactaatgacctagggcaaacaataaataatatgtggttttcatctgttccctcttaactgcgatataaaattgtctagact

SEQ ID NO: 85475 - DNA, 343 bp, Glycine max
  unsure (1)..(343): unsure at all n locations
agcttaagctccttcaactgcacattttcttatatattgaagagnatcctngnggaaccttcacccgacgaagacactgacaaaaacttatcttctccttcttggacaaagtatggcaggctgggggtaagtaaattttcttcccatcagaccttggatgcaactgtgatcatatacccatatcagctagatcttgacgggtattcaagccatccttcgtcttgccttgaatgtttaggagcgtcccaatcacactgtcacaaacatttttctccacatgcataacatccatacaaagtctaacgttaagatcacaccagtacgaaagatcaaagaaaatgga

SEQ ID NO: 85476 - DNA, 340 bp, Glycine max
  unsure (1)..(340): unsure at all n locations
agctttgtagtntacaagcgcctttttttctcttcnttagaccaccacggcgcaggctgcaattcataagtgggctttccctatgggaacagcatattgggatgttcccagcctttgatgacagcctctccaaggttctgctatccagtgatctgaggaaagccaccattcttgctatccaggatctcttagcctgctacacattcacaaaaaggcggtctgtgcactggtcctccatctttctcgcatgttcatcagaacatatctccccagatctcactctgtgaattcgagtgttggctctgctaccacttgaaattctgataccatgggacagatg

SEQ ID NO: 85477 - DNA, 431 bp, Glycine max
tatgctgcacatatttacactagacctccccatccttttttgtaaaatcaaccacatcagatcaattatgacctcttcacacagatcaaccctagatggaagatacacccttacctcagatggtccatccctcatcaacaacaacagcctgctcctctcttctgaaatgcgtgctggcccaagcagaccatacatttctccaccaatccaacaacagcaacaaccccagaaacagccaacatgtgaggcccctccacaaccttccctcgaagaacttgtgaggcaaatgactatgcagaacatgcagtctcagcaagagaccagagcctccattcagagcttaaccaatcagatgggacaattggctatccaattgatcaacaacatgctcataattctgacgagcttgcttttcaagctgtccaaatccc

SEQ ID NO: 85478 - DNA, 365 bp, Glycine max
  unsure (1)..(365): unsure at all n locations
gtcacctgccgcatgccaagctttcatgaatcttgagtcttgaatcttgatttctntaatctcganncttgatctctggaatcttgattcttgattcttgaaatcaactttcctcttgaatcttgaactcattctttgattgacctttgagctttttgtcatcacctttgtcatcatctttgaatcactcttgattcatcatgaagctttgcttctacatcgttgtcagtgacaatggcataaggaagaccatatctgcatatgaggtgtttccaggtgaacttccctacttcgcttgtggaaatttctcgtaatggccttgcctcaatccacttagtgaaataatcaatgttgacccataagaa

SEQ ID NO: 85479 - DNA, 335 bp, Glycine max
  unsure (1)..(335): unsure at all n locations
tgactccatctcattgaatcgcatgtccacttgtaactccaaagtatcaaacctttcaccaacaaaggtttgaagaccatcgaacctatccaaaatcttttgaagaagagaggaatcttctccaccatgtaaatgtccttcttcatcaacgggtcgagcaccctttttcacccaagagccatcatgctctttttgttaaccaaaggatgcaattacaacagcgcctattagaaaggatctcttgattggaacataaggttcanaatcaagagggatgttgaagtgttgaagaaagagggtcattaggtgtggatatggcaatggagcatttaatc

SEQ ID NO: 85480 - DNA, 242 bp, Glycine max
aacccgacacaaaacatgtacagccaggggagcccaaagaacgacacgacggacaataatgacgacagcctcgcagaccgcaacacccccaagaaacccagacggccgaacagcacaatgaatgcggcgacgccaaccaccgacggacgcccgggccatagacacaagggcatgcaagacagaccaccaccggaagtacggcaacgcacacgggaagaggacacaaacaagcgaagccacca

SEQ ID NO: 85481 - DNA, 351 bp, Glycine max
  unsure (1)..(351): unsure at all n locations
agcttctgatcatttcctctacaagggttatatatttgttcatatttnnagaaggatccaaaatataaagcatcaattctttatgttcaatccgaatntgcagaaacatgtatttaaattgcaaaaacaacatccagtttggttctcaaggatcttaaccgttagaggacattctcagtggatataagtacctatacatacagattttccaaacaagtaggatggtccagtataccctcgcagtcatcacttttatcttaccatagacacaaaattacaagatattattggatcaccatgtacagtctcgatcaatccctacctaaaacatacttaagtttcttaatttac

SEQ ID NO: 85482 - DNA, 346 bp, Glycine max
  unsure (1)..(346): unsure at all n locations
agcttctagccaaatggactntaccttgaattatatttctttgatangccctttgagccttgtttccctttccttggtttgaagctcactacaagccttaagtgaaaaaccatgatattaccatatccttaaggaattttggagctttggaattgttttgggaataagtgtggcgggtttttgtttcattggacaacttgttttgttggctatgcttcatgatgtattttgggccatacttgatgtacattgtatattggttaaatgttggacatgctgaatgaaatgttgtttctcaaaggctaaaaaaaaaaaaaaaaaaaaaaaaaattcgaaaaaaaaattc

SEQ ID NO: 85483 - DNA, 413 bp, Glycine max
  unsure (1)..(413): unsure at all n locations
gcgtgagcttccataactgcctaactcttctattttgactctagctttgactgactgatgaactattttaacgaagtgcctgactcgatcccatgttttactaaagtgaaacaaaacccaatgcgaatcaagacttccacatctatcatgggtggaatggataaatgcatgaagaaatgcatatgacacagatgcattttatgaatatgggagcccaagaaactgtccccctcttagatacaatgttcgggtagcatggcgcccgacgtatgcatttaagaaggcgacatggaccctctgttggtttgacaaagtgaggggatcaagacgcaacccgtgcatgatgctgatgcggantagaaaggcacaacacggtgatgtacatagtatgactatatccacaaataatcata

SEQ ID NO: 85484 - DNA, 347 bp, Glycine max
  unsure (1)..(347): unsure at all n locations
agcttgtgcatatcaaatcactcctatantttatctctagcatgcattntctttctttacccactcctcacgtntggttttttagggaaaacaccataactaaacgcgccgcaagggatccctatcgcaccagatccaaatctagaacgatgggtgatcaagaggagacacaggaacagatgaaagccgacatgtcggctctgaaagaacaaatggcctccatgatggaggccatgttatgtatgaagcagctcatggagaaaaacgcggccactgccgccgctgtcagttcggctgccgaagcagacccgactctcttggcaactacgcaccatcctcccccaagc

SEQ ID NO: 85485 - DNA, 415 bp, Glycine max
cgccgttggagctgacccattatctgctctaactcttttatactggtggtccctatgctcttgaccttaacttgataaaacctctttttaagtgaaggcatttgacttgatcccatgttttactaaagtgaacaaaaatcggtgcgaatcaaaactccaacatctatcatgggtggaatggatgaatgcatgaagaaatgcatatgacacagatgctatttacgaatactggagcccgagaaattgattccttcttggatacaacgtttagggacctataatggagagagctaactaagctgttagtgataacccccaaggtagacatatctctcttgatggattctagaggtatcatccccttctaagaacatactgcagcagtatggactactagcaacaatatgtgttcaac

SEQ ID NO: 85486 - DNA, 342 bp, Glycine max
  unsure (1)..(342): unsure at all n locations
agcttaccaagccatnatggcctaatacatgnattctagagctggnnngaaaaatctaaggctactcttctttaatacaatttcaggtccagcagatgtgatacttcattattcatctacgctgaatccaccactgtgatctacatgttggtgtatgttgatgacattattgtcataggcaacaatcctaatttcattaaatccttgattactaaacttaattctgagttttctttgaaggatttaggcaagctagattattttttgggtattcaagttagacctcaaccttaagtatgtcaaggtcatttggtagagtacacaaaccattaagtatgtgaa

SEQ ID NO: 85487 - DNA, 438 bp, Glycine max
  unsure (1)..(438): unsure at all n locations
cgcgttgatgcaacatttggagaggttaatgaaacaactatattatgcgttccatgagaggttggatcaaatagagaatatagatcataatgaagaagacaggaggagaagagggaatgatggtgttcctagacaaaaccgaattgatggtattaaactcaacattcctccatttataggaaagaatgatctggaggcctactcggagtgggagatgaaaatagagcatgtnttcttatgcaacaactatgacgaagaccaaaaggtgaagcttgccgccacggagttttccgactatgctcttgtgtggtggaacaagctacaaaaggagagagcatgatatgaagagccaatgagtgatacatgcgcggagatgaacaagatcatgaggaagcaatatgtgccggctagttactcaagggactcgacattcaagct

SEQ ID NO: 85488 - DNA, 359 bp, Glycine max
tgtagccgaatggacttaccttgaattagtacctttgatattctttttcatccttgagtcccttggcttgttttgaaactcactacacacccttaatgaaaaagcatggtaataccatatacttaaggaatattggagctttggaatcgttttgggaataagagtgggggggtttcgttgtataggacaacttgtttagatggctatgcttcatgatgcattctgggccatacttgatgtacattgaatataggctaaaagtgggacatgctgaatgaaacgtcgctcctcacaggctatagagtgaaaaagaaaacccttcgatgaacgaacatgaaaagcaatgaggtgcagtgaat

SEQ ID NO: 85489 - DNA, 345 bp, Glycine max
  unsure (1)..(345): unsure at all n locations
agcttaacatcagaaatgggcaattatcttgcttttgctgacngggcaggagaccctgcaataaaactatcagcaacacaggagagttttttcatatccgggctttcagaattactgcacgtaacagaatatggagggcggatcatctgtactggtgtattaataaagctaggctgcaaagacatagaaaatgattccttctggtgctctctttcagtaataggattagccaccccatcaaataatggtacacattctttctgcagtgttttttcactttcttcattatccatacaatcagatgcatgagatgatggagaagctcttgcgggtaaaaagcattga

SEQ ID NO: 85490 - DNA, 436 bp, Glycine max
tgatgagtgtaatattgttcttagtctggaaatttgattctttatatttacacaggtgttacatttggaatatggttttccgatcctattaacttataaagagattatttatccaaatgcaatacaagaattttataacttattcatttgccccttttcatagtttgggaaagctatatttaatgggtgcggtaaactattcctgatacaattgcttgggcttaagttgtatgtattcttctgtttccccttaaccaatgaatacagagctgcaagtttatcagattcttcacctgcatcagtaccactggcatttcgggttgagccatagtccacaagcgggatcaggtaaatcattcaataactcttatccttctatgcattaccttgtctttatctggctgggatgctcatagtattcgtctttttgtgatat

SEQ ID NO: 85491 - DNA, 404 bp, Glycine max
  unsure (1)..(404): unsure at all n locations
agcttangcatttgaaaaggacattttaatgctcattacttatgatactttgcacattatataggcaaaacacaatcactactttcctaaaataaggctagattcatggtacctaatagtctgtgccttgattgtaaactaaattacaataatcacaatatgaccaatgtgagaccgttacgacatttttcaatttccactccatctttaaaacttacagcgcaatcaaaattggtggtaaaagaaaaagaagaaagaaaccaatctaaaggaaacatcttacctggatgtcaaacattgcatcaggactgacaaaataccctgctttttctctgatgaatgctgcaactttaactttgttacttctctttgcttccctccactgcacttgtagatcctcattg

SEQ ID NO: 85492 - DNA, 324 bp, Glycine max
  unsure (1)..(324): unsure at all n locations
ctaagcttgaagaatgtgcctggatacagcatgatgctcaactggtctctataatgttgttttgaggcatcaagacatgcacganaaaaaagatgcacanggattattaaataatgtaattgaggaaacagcaagtaaactggttgaagctcgcaagagcaaggttaaagcattggttggtgcctctgaaaccgtgatctctcttcatgagaaaaaaccttctgcagacacagtcagttgatggaatctggatagacattttctagctttttcatttgttttgtaaagaaatggtagganaataaaactgagctctggtagtag

SEQ ID NO: 85493 - DNA, 333 bp, Glycine max
agcttgcatgatttatattctccctctttctttgcaaattcttcttgagatcatcaaaatcttcatgatttacattctccccctctttgatgatgacaaccacctatagtttaagagcaacaacaaagaaaatatctacttgcatataggttactcccccttggctttacaatgattgcttatatgagacaattgaagatttccaacttttcatatataaaaagttgtctcataaagaatagagaaattttccttactattttatcttttatctttttctccccctttgtcaacatcaaaaacaaatcatcaatatagaggaaaaaaaaggtt

SEQ ID NO: 85494 - DNA, 435 bp, Glycine max
  unsure (1)..(435): unsure at all n locations
acgatgttattctcctgttctagcagccggaagaattgtggtttttgatttagngaactgnngctccagngaagtcacctgctgcatgagttcatctattctcctgtcttttcctttcacaatctggataagattatctttctcatgctcaaaggttctttccattgtgcctgtctcaatcacagcactttcaaattcttttctatatgattcttgtttcatccatacaaagtatttntgaagctcttctagaatcttgtgcttctccgctatgatcccgagatatctgacattatctgactcagatgacaccgctgatctccccttctattagctcatgttccatagccaacatgtcgctgccataatctaggctctctctctctcttcacttataaccaactatcttctcatcttgagccttaccaaatctac

SEQ ID NO: 85495 - DNA, 385 bp, Glycine max
agcttcttatccaaggctcatcttggtggtgaagctctttcttccatggcttattccctagtggatggcgcctcctctcacctcttctcctttgtcttccgctgcatctccatggtggaaaatcaccattaaaggacctcattgaagctccaagatccagcctccatagaagccccacaagcaagcttcaatcatcttgcaagggtcatgactactgtaggagacatgtttttcttttcttaattcttttaatattttccttttttcttcttcccttatttgttccctctcaccttgatttattcctaccctctcctttcccttttcttttctttctaagtttcctttccataacttgagggaactcaactcatttaagattcta

SEQ ID NO: 85496 - DNA, 218 bp, Glycine max
  unsure (1)..(218): unsure at all n locations
gtttcggaagcgcctctgctcatattttcttacggagacaatgttttcaagcaaattcgaaagagagagaagtgcctaatgcgctggaccctttactacttcacttctccgcctattnatagagaatcgggtgagaagcttgccgcccagctcgcccatgcgagctcatctctgccaggcgagcatggttgctttcttctaaacaactcgcttctgga

SEQ ID NO: 85497 - DNA, 370 bp, Glycine max
agcttgcatgatttacatctccctttttctttgcaaattcttcttgatatcatcaaaatcttcatgatttacattctccccctttttgatgatgacaaccacctgtaggttaggagcaacaacaaagaaaatatctatttgcatatagtttactcccccttggttttacattgattgcttatatgagacaattgaagattttatatttttcatatataaaaagttgtctcataaaacaatagataatttttcttactattttatcttttaatcttgtctcccccttggcaacatctaaaacaaatcttgaatagagaggagaaagatggttccacttgttgcattgtttgagaatcaagtgatacccaaa

SEQ ID NO: 85498 - DNA, 74 bp, Glycine max
tggatacacgagattaggatacgcgccagcaagactgacccttcgagcgaatcctatgacaaccaaccaagtct

SEQ ID NO: 85499 - DNA, 398 bp, Glycine max
agcttctgaagggcctcgtcctctttctggctccacgggcccttgatccggtccatgtcctttcgggccacggctatcatgataatactattattatgcgatggttgatgaaattgatggttgtgttgatgaaattgaagaaaggaatgagggagggaggaaggaaaggaagggtctgtgtttgtgtttgcggttgttggtgagttattttgtggtggagcattgggtcgttcgagcgtgcttgcgtttccttatatctgccagggatagggggtaagggaaccgggtaacgtggtttcgcttttgcaagtttcagcgtcggttggagtgatgatggtaccggttgtatctgggaagcggttgcctctggagttgggatacagctgtaattggacacg

SEQ ID NO: 85500 - DNA, 261 bp, Glycine max
  unsure (1)..(261): unsure at all n locations
cctgaacagagggtggataggctcttgattaacttgcagtggagaataaaattccaagaggctgtgatgctgcatcttccccctcttaaattggatcatagaccccttttggttagattagaggtggaaaggaatcatcactctcaaacaagaccttttaggctgcatggattactcatgatgatttcaagaggtttgtgcattcccattggaactctnttttgtcttgggtngatattgtatgtttggttcaaaaagatg

SEQ ID NO: 85501 - DNA, 338 bp, Glycine max
agcatgaaattgaacattgtattctctatgaaaataaatgggcgaacttgcacacggaagtcaattctgacgcataatataccgagacgctcgaaattgaacaacggaagctgccgagaaattcaaatggtcataactaatcacaccgaagtccaattccggcgcataatatatcgagacgctcgaaattgaacaacgaacgctctccagaaaataaaattggcataacttgtcacacggaagtccaattcaggcgcataatatatccagaagcttggaattgaaccacggaagctctcgaaaaatcaaaaggtcataacttttcatacggaaggctg

SEQ ID NO: 85502 - DNA, 491 bp, Glycine max
  unsure (1)..(491): unsure at all n locations
tctcatatattatgcaccttaatcggacttccgngtgacaagttatgtctcatttaatntctcaagagctntcgntgttcaattccgagcttctcgatatattatgcacctgaatcggacttccgtttgagaagatttgaccatttgaatttctcgagagctttcgttggtcaatttcgagggtctcgatatattatgcgcctgaatcggacttccgtgtgataagttatgaccatttgaatttctcgagagcttccgatgtttaatttcaagcttctcgatatattattgcacctaatcggactttcgttagataagtatgaccatttgaantctcgagagcttccgtagtcaattcaagcttctcgtatatatgcacctgatcagacttcctttgaaagtatgaccattaattctcagagcttcgtgtcaattcaacgcttattatatgccctaacgactcgtggaaagttgacattgattctcagact

SEQ ID NO: 85503 - DNA, 396 bp, Glycine max
agcttgaaccttgaattctgattcttgattcttgaaatcaaatttcctcttgaaccttgaagtgttcctgatttaatcttaagcatcttgaacttattctttgattcttgagatcatcatctttgttatcatgaagtattcttgacctttgagctttttttcatcacctttgttatcatcaaaacttctttgaatcaatcttgattcatcatgaagcttgcttctacacgttcaacctcaatccctctagctgagatcttatggcccaggactatgcccttccgaaccatgaaatgacatttttcccagtttagtaccaagttagtctctacacacctttatagtaccatctctaaagttcttaagcaagctgtcaaatgagggtccaaaaaatga

SEQ ID NO: 85504 - DNA, 427 bp, Glycine max
  unsure (1)..(427): unsure at all n locations
aaagaacatagaccacagactctngcaacaggtgcaaatntctgattcatggcaagctgagttactaggttgaccaaggcatcaagttntccctcaagctttttattttccatagatgaagatgaatccgtggccacctcatggactcctctaaggacaatagcaccatttcttgcattgaattgttgggagttggaagccatcttctcaatcaaattcctagcctcaacaggagtcatatcaccaagggctccaccactggcagcatcaatcatactcctctccatgtggctaagtccctcatagaaatattgaagaaggagttgctcanaaatctggtggtgaggacagctngcacacnaattcttgaatctttccagtactcatacaagctctctcactaagtgcctgatgctgaaatgctttt

SEQ ID NO: 85505 - DNA, 368 bp, Glycine max
  unsure (1)..(368): unsure at all n locations
agcttcttatccaaggctattcttgtgtggtgaagctccttcttccttggcttattccctagtggatggtgcctcccctatcctcttctcctttgcctttcgctgcatctccatggtgaaaaatcaccattgaaggacctcattgaagctcaaagatccagcctccatagaagctccacaagcaagcttccatcaagttatgctcgagatcttccgtggttcaatttcgggcgtctccatatgtgatgtgcttgaatcggacctccgtgtgaaaagttatgacacattgaatntctccagatcttcgtggttcaattacgggcgtcttcatatgtgatgtgtttgatcggacatttgattaaaagtaa

SEQ ID NO: 85506 - DNA, 439 bp, Glycine max
  unsure (1)..(439): unsure at all n locations
tcctcgtggcttctttgagaagttntctcaagaggcttctttgagaatctacattcttatctatccacccctctanttaactaaataacttccttaaaaataattacggatgaaaataacgcaacanataatcaaacatcaaacataattactaataatatatagatatatatatcagggtgttacacatcatatattgagacgctcganattgaacaatggaagctctcgataaattaaaatngtcaataaatttcacacggatgtccgatcangcacatcatatatcgagacgctcgaaattaaaaaaacggaacctctcgagaaattcaaatggtcataacttntcacacggaggtccgattgaagcacatcacatatggagatgctcgatatngaaccacggaagatctcgagaattcaattggcatacttttac

SEQ ID NO: 85507 - DNA, 367 bp, Glycine max
agctgggtataattattattatattcactttggggaatttgatgttgtcagtaagctaatctatggaactgacaaaatcaatcatagtttttctgcaaggacctttcctcgaatgaagtgacaatcaatctctatgtcaggaagggtggggggaatcagaaaggctgaacctcaagtgggtatggagggatagtgataggtgcaagagcaattggtggtgacaaagatgagccctaaaagaaggattcaattggtagacaattagcagaaaaaagggaagggcaggtcttatagaaagtgacatcaattgagacaaaataatgctagagatcagaagaataacgcccaataacctttttgcaatggg

SEQ ID NO: 85508 - DNA, 481 bp, Glycine max
  unsure (1)..(481): unsure at all n locations
ttctaggtgtgcgagatgttctgngaatgactgattgtagatcagaatgtcatcaaagaaaatgatgatgatgaacttgcgcaagtaaggaccgaatatgctattcatggtcgcctggaaagatgatagggcattgcacagaccanatggcataacacanaactcataatggttgtggtgagttcgaaaattcattntgctcatatcttcttcttttcatcagtattggtggtatccctgcaaaaggcaagctnttngaaccaacacacacctnnctaatcgtccaataattcatcaatcgtcngaatangaaactggtccttngacagtgatggcgttagagctcgatagtaaacacaaaagcgccaagacctatcatgcttttaaccaatagaactggtgaagagaattgacttatgttgngcanatgatccactctaacattgacttacctgactcaattctgctttgtatatggaac

SEQ ID NO: 85509 - DNA, 296 bp, Glycine max
  unsure (1)..(296): unsure at all n locations
caagctcgaggtttttgttaagtatgttgnatgactctnttcgattaccatataccttctcgaggacccattggtttgctagccatggttttcgatatgtgatggtgtatccgaactcttgtctaaccaatgcgatgaatgtaggaacggatatgtgcttgttttcttgaaccatcacaaggatatttttgccaacgagttttgaatccatattattatgatcttgtaatggtaggaatgaccaatgtgtgaagcctttcaatcattctaatttcccaaaactttagatttttttg

SEQ ID NO: 85510 - DNA, 448 bp, Glycine max
  unsure (1)..(448): unsure at all n locations
tagcgcctaaaactcgctcacatatgtagaatatggcaatctacgttgtatagtggagcaacttgtggcataattatttttaaccgacacgagcttaaaacttacccggtattcnaccctgacagcaaagtantagctagactatggngatgacattgattagtatcgtctggaacacntaattagtagcagatgctttatctcnaanaatggaagcaacagagagtactctgttattattatcagtcccttgccttaacattttggaagactaaagaacaattgaataggaaccctctttgtggaatcagagacaacatcaaactaatccaccanattcctgatatcagttttatgattagtntgcaggaatcgattggcttcacaggcatccctttgcagtgtntccagagatactcactcgacagggccatggagctcaaacgta

SEQ ID NO: 85511 - DNA, 389 bp, Glycine max
agcttggagctaaaatccgtgtcttacaacacattagctgacttaatatccctatgaagaacactctgctccgcatcctcatgaagataacgaagggccaaagccacccctaatgctaccttgtacctgtgaagagaagagagaattaagaataatggtgacaaatgattaatttcaatagcataagctagcttactccattacaagagacaaaatagaaatgctcatacaaagtaaaaagactaagaagaaaataatggcgacccatttggataagctttcgtataagcacttaaatgaataaaaaaataagagaaaaataaattaagcttctcccatatgatcaaattaggttatgcataaattaaaattcgttttggatatgcatc

SEQ ID NO: 85512 - DNA, 440 bp, Glycine max
  unsure (1)..(440): unsure at all n locations
gcatcatctagctccttaatatctctgcttcggggagaccaaatcaacccttctatcttaccattaaacttgtntatcttatcacccaaaactgctaattccctccaccctctttgaccacgcatcatctcgtccattctgcaataatcaaccaaatgctagttcattactcatgtnntttaatttctttttcatctggtgtttcagattgggcagtgngagaaaacaatgaatggataaggaacaagtgaacacttttttgtctataatatcaattntaatgccatacttcatatgtgatctttaattctgtaatcttaatgaagtgcaataaactaatcattatgctaaacttagatagtgcanacataaaaccagcttcggcactatattctggaatacataacagagggaaccactgttagtaataattatgttct

SEQ ID NO: 85513 - DNA, 402 bp, Glycine max
  unsure (1)..(402): unsure at all n locations
agcttgtattcagtaatacaatgttcctatctttaaagnttaactgtataaatattcatcttattgaatttaatttaagtaagtgctttcaagcttaaaaactgtaatttaaagtgttttgctattgtaatactttgcttgtaagttttaatggcttgtgaactgaataaactactaggctcttttggagttgctaactggttgtttatgttgttttacctcctctgcagccgcctttctgtggcggaaaccgtgacaaaattcagcagaagatagttaaagacaagattaagctgccagcatttttgtcaagtgaagcacattcactgttgaaaggggtaatcactagtccacaaagaagatatttccattgattattctagaacagttcatataaatctc

SEQ ID NO: 85514 - DNA, 258 bp, Glycine max
  unsure (1)..(258): unsure at all n locations
ttcaactagctataacttataagggggaggtgggggtaaaaactgtttgtttgtgttaccaccattaaaaaagggatagtgttaacacacccaccactcttatccttgaaatngaaccatgaagtgtgtgactggtgtatgctgaatgtctttngaatgctagaatatatgaaaacatcttatcatatattagactatcctttacattacgtatgctatttnctattgtaattaggagccatagttctttatatcatg

SEQ ID NO: 85515 - DNA, 397 bp, Glycine max
agcttccattggtgtcttgaaattatggctgacgaaggacatctattaatcaaatatgtcgttgtgtttggagcttctccccaaaaggtctttggcagtcctacacttagaagcatgcacctcactctttccaaaagggtcctattcattctttctgccaagccattctgatgtggagtgtgagggactattttatgccttgtgatgcctattttcctgtaaaactcattgaactgctctgaaaaaaactctaggccattgtcagttcttaaaacttttaattttgtaccaagttgatttccaactagagtatgccattctctgaatttttgaaaaactgttgacttatttttcaaaacatacaaccatactcttcttgagaaatcatctatgatag

SEQ ID NO: 85516 - DNA, 59 bp, Glycine max
caataaagacacactcatccaagatatatatatggtccaaaagggtcttgccacactta

SEQ ID NO: 85517 - DNA, 388 bp, Glycine max
agcttttacatgcatgttcacaccatatttactatacttcgatcaactgatgcaatctatttgattgaaaagataatttatattactcttctaatgtagtcgacaacaaaaaaaaaatataacaaaaaatattgttgttcttttaaagggaagtcaaatggcagatgcacaaaaaataataaatttaaatgtcttttatttaataattatttattttatagaaaaattatttcaaatcaaatatataatgtatggaattttaatacttagttggccttcagccaacagtgcctaattctaagagtcatttcaagcacaggttacaggtctttgcttttaaaagaacatggggatcaatgcttttcaccaaaaacattattgcaaaata

SEQ ID NO: 85518 - DNA, 247 bp, Glycine max
  unsure (1)..(247): unsure at all n locations
gtgttttgaggtttgtgtttggaagaaaaactcgaagaannaagtttgggtttaggtgtatgtttctcttcatagagnttggccaacgaaattgttctgaggagtcatgtangtgaatgtgcaacgacatcccttctgatatcangttntaatccctccacaaagcaatccaatagagcttcttgtgtaattccttgtactcgattagctaaagccgtgaactgcacgtaatatgactgaactgaac

SEQ ID NO: 85519 - DNA, 379 bp, Glycine max
agcttagaactcacatgtacgagggaagctcttaaagaaatctacaaacttttctacgaatgtgcctccacttgagaaaattcatgttacctcaatgtggctcatttttttttttatagaaacagggtatctctaaaagcacaataattcaatcacagagaaattttcatgaatcacacatcttaagaatcaaaacaatgcacaaggtcatatcatattggcttaagtaggggaagtaacaatggtacccttctcgacacttatataatgtagtgtcctctctgcattgattttgtttattaatctctcaactgggttttgttaattattaaagtcaagaaaatctttcatagatacatctaaaattgaactctttcat

SEQ ID NO: 85520 - DNA, 245 bp, Glycine max
  unsure (1)..(245): unsure at all n locations
tctccctcatatcaactntctggacttttactctnttcttataacggatgaagtactatctgatgtcaatgtgcttagtcctttcatgatagacttgatccttggctaaacagatngcattcagattgtcacagaanatgatagccttttcttgtgaaaacccaagaatgctaataagacctttaagctatattccttcctttactgcttctaccagagccatgtactcttcctgtgtagtggat

SEQ ID NO: 85521 - DNA, 401 bp, Glycine max
agcttcctcagggccatttcctgcgaaggcttacatttagagagttagttttaccaagaaatgctattcttaaaacgaaaatggcatacgacctcccccaataacacaaacatcaatgtaaatttagagcgaactcatgcacatacttcctttcgaacattcactcgcaccagatattcttctaactaagaaaaatgcacccaggcacaatcaaggcaccttcgttacctagatcacttatatgtacttccaaggtgtatttgctacctacatcacatgcacttcctttgctaaatttacatacatgcatactcaaagaattttggctaccaaaaattgcatacgtgcacattctggtatttctaatacctatacatatacaaactttgtgatgaatcttg

SEQ ID NO: 85522 - DNA, 472 bp, Glycine max
  unsure (1)..(472): unsure at all n locations
tacatgttgagtaatattaaatctaaggcatttcatcacacacttgtagctagctagctattccctgtntacaaagaacattggaagttggaaattaaactagttntaatcttttgtgtctggctttaactcgtaaaggttcagaanacgttgcatgtatacagagcaagtggccgctactataccatacggaactttatgcatacgtggactgctctctatgnngtgaaagtaaataaagaagcagtctacttaaggaaatagaaaacagctctatcacggctatgtagatataaaaacaacaccgtggcnacagcttaccanaacaaacaaatataatgcaaagaaaccaagatnaaatattanggtggctttaaatactnacctgttatagtgtcaaccaatattaatggttatataagctatattcaaattttattattattaaaaataatactaacaatatgtgcat

SEQ ID NO: 85523 - DNA, 374 bp, Glycine max
  unsure (1)..(374): unsure at all n locations
agctntaaaaaaagcttcntatttcccgcgngnaagngcacttgtcgcttctgagtttataggttgctcaccatctcttagtggggcaataagggtaaacccatgggatattgatgcagtagctgaagcacttaatttggcaatcacaatgcctgatggagagaagcagcttcgacatgaaaagcactatcgatatgttagttctcatgatgtggcatactgggctcgaagctttgagcaagatctagtgttctcgtgcaaggatcactatagtaaccgatgctggggcattggctttggcctgaatttcagaaatttgtccctctctcctaggttcaggaggctatccatagaccacattgtccctgcatatg

SEQ ID NO: 85524 - DNA, 469 bp, Glycine max
  unsure (1)..(469): unsure at all n locations
cgaacgcantaaaacactgaaattcagaggaaagccagaggtttagttgacacatggaagaaacgtgttgaagctganatgaatataaaagatgcaaagtctggttcaggtcccactgtccactggtctgccaaatcgcgttcttctgttgttggtcaaggtgggaatagacattcangtgcattatctgatgttgccatgaagagttcagttacacagctntctgcatccaaaactgcctctgtgaagatggtccagngagagaatactactagatctgcatcgacatccgcatttcctgggcctgcanaatcagtgccatcacctgcatctgcgactacaaacctaaaagatggacagccccgtattgccgctgccaatggaggttctgatcttcccatggtgaatgcangggatgagaaaagtagtagttctagtcaatctcacaacaacagtcaaatcgtgtcta

SEQ ID NO: 85525 - DNA, 375 bp, Glycine max
  unsure (1)..(375): unsure at all n locations
agcttcttcttcaaaatcttaatctttctttttgccnnagcacttaaatatatctcttctttaagcttcttttccagctcaacaaactgcaaaccacccaataatttttttctcttcaatttaagggagtgaaataaaatctaataaaaaagttttctagcaaaaactaaaatgcttcagaaaacacaatagcaatgccattttctttccttaatctaaattgtctcttgaatgaaacaactagcaatgtatgaaattaccttgttgcccaatgattctgcttcttcttttgccacccttgaagcatgtctctctgctagtaatctccctctgaggcactctagagtatccaaaccattatgtccttccatgttc

SEQ ID NO: 85526 - DNA, 491 bp, Glycine max
  unsure (1)..(491): unsure at all n locations
ctcaagctggcttnctttgacacatccatcatcttaatacttccttcacagttttggcanatgtataanagaancntatcctacacaccgaaattaccgtgtggacttcaactccgcttattatctgatgccatgtgtntatttattttgntaggttggactatntcctttntagttcaattattttcccttttgatttgattgagattntcttctggtttggatgaaattgttctgtccttttgttaaatggtgagatgcatgtattctgatatgatgagttgntcacatacgtctgcaaatacgagatgcttcgatgaagtttgtatgctctctctgatcagaatgcgcatctcttgttcacaccaatttcatcccttttatcgcaccttntcatctcttgttcacaccagtattgcctattctacatgataanntattntcttggctntntatatatnnnttcctagaattcatnatcttaatgacat

SEQ ID NO: 85527 - DNA, 390 bp, Glycine max
  unsure (1)..(390): unsure at all n locations
agctttctacatcggtcgtaaaattatcgatgtagaacatgtgataaacaaagtcgtttctttgaaggtagcgatgtagaaatcataactttctacatcggtcataaaaggaccatcgtagaacacatcataaaagaagtcgtgtctacaacaccatcgatgtagaaaatcacgtgtttctaagacggtccttttacgaccgtcgtagaaatctgccctctacaacgacactcgtttcaaagacgggcgtccacccgtctttgaaatacgttttccaccgatgtaaaatgagatttttctagtaatgcaggcttgtggtgcatgatatactgcccattctcggaagctcttgtgagagcttangagattggaaaagttgtatataagttt

SEQ ID NO: 85528 - DNA, 412 bp, Glycine max
  unsure (1)..(412): unsure at all n locations
agacaacaagacaggtggtagaaaactaaagtcaaagctggaggagtaaaatgaccaaaagatcaacaaaagtgtcagatgtcaaactttcagccatgagcagaataaccatttcattggtcttctcctttattatatnggatgtngataatcttaaaccacaatntaaagtattaattataaatttaaaatataatttatatatttaaatatatntatttatcgngaatttaagaacaatatagttaatttattaaaatattacttattatgaatttatatatagaatataatctatatattatactagtaatgtattcttataaatcttggtcaataacgaaaactttgtactaagactacatatctttaaggtgatgctgaaaataagaaataactgcaattgatttac

SEQ ID NO: 85529 - DNA, 393 bp, Glycine max
agcttggtgataagatctcgagttttttattctacctcagatataattgagattgtttattttctttgtgaaaaataagaaccttaagattattaatatattatgctgctatgtaagtagaaatagccatttcacatatactgcacctttttcttcaagagaaattcaggcaatgttgcattttactgatattcttaatacagtaagttaatactcgaaacaggtaaatatttgtagagtttcccttcaaagacccgttgaaaatggtcatgcatagatagacaatgccagctgagcatagtacaggacattttttgattttgttggtctcgggactcataattcatgagccaatcacttaatccaaatatggaaataaaatatggaactggc

SEQ ID NO: 85530 - DNA, 222 bp, Glycine max
ttgaagcaacataatattaagcatagaatcgtctgataccgcacgatatttgagtaacactattaatatgaacttcatagaaatagacaacccagaggctatgtgtatggcgtctgcacattatcttcagcgcgaaaggtcctcatcatcccatataacttcctttctaaatacaacttcccatacatgtttgcaaatctgaagaaaacattaccgtatctc

SEQ ID NO: 85531 - DNA, 394 bp, Glycine max
  unsure (1)..(394): unsure at all n locations
agcttgaaggataagtatagtagctttgaacatgtaattcagcagtacatgtacataaccaggtcgatatctacttgcaatttgattatttaactttgaacttgttaagtcggggttccgaacacgaagaaatgaatgttaagtaaatggtttattttctctccttgcgtgcgtatcttttgcaccttctggtttttacaccgtccggttagatgatctcaaatttaagaaaaaaaaaagacttaattagcaagttggttcctaaattatttaaaatgcatcattttggtccccaaattttagaacactccaattaggtccttcaattcttagaanagattattaagaacctaaaacaaaattcactaatttatcaggtcataaaacatatttt

SEQ ID NO: 85532 - DNA, 408 bp, Glycine max
  unsure (1)..(408): unsure at all n locations
atatttccatgccaaanaacccgtaacaagaagttcactgcaagcttgaaccaattgactattcgaagttgagctaagaacaacgtagatccataagtatagttcacttatgggacaantttatacgatattaaatatattacctgtaagttaactacacctccagacagagagataaaaaaaataatataaaaaggtacaagtaaacaactagaatatataaagcttcaaactcgagactaanaaacagaaagacanagtatagaaagatacaagtaaactcggtagccaataaatgggtaccatcttttctagtaattagagcagcttntactatgcctcatctganaagaaataaataattaattatgtaccgaatataactntacataagaaagtttttggttt

SEQ ID NO: 85533 - DNA, 362 bp, Glycine max
  unsure (1)..(362): unsure at all n locations
agctggcnnattattgnatattgtatttctttaanncgcacaccatgtgtttctgtccttctactgagaaccccattgactaatccatataaacattctcatctaaatatccattaagaaagagagttttcacatccatctgatgtagctccaagtcataataggctactaatgtcatgataatcctgaaagaatcctttcgtgaaaccagggaaaatgtctctttataatcaatgttatctttctaagtaaacctcttaacaacaagtctagcctttgtacgttcgaagttggcatgagagtcacatttagtctttgagacccacttacaaccaactctcttacaaccctttagcaattct

SEQ ID NO: 85534 - DNA, 408 bp, Glycine max
  unsure (1)..(408): unsure at all n locations
ctttaccttctcttccattggtgtttcttcatttntctccatggatctcctcacatgtcttgtgctaaatgttttaacatgattctttagaatttccaccaattaaacttgctatagaagctagattngattttctatgggtcannattcttgttcttggtcttgaaccatgaattgtgttgagtttaggttcccctttgagtttgtcttggtttgtttttgtgggctgaatcctaaaccatanaattcttacaaaaacattaaagtagaagaaaacctcannaatctagaatgacttgntcacctattgtagttntgtcatagaagtcatgtctagtcatgaaacttngcacataagaattctttatgtgngctgacctttattnnntctttgttcttatctaactc

SEQ ID NO: 85535 - DNA, 329 bp, Glycine max
  unsure (1)..(329): unsure at all n locations
agctttctagcttttcattggtgtattttgatctccttttggtgctctaaaatgtgggaatgtgctcaaatatgtggggcaattttggtttgttttcttgcttgattgggttggattgggggtttgtatgggatggccctaggcctataatgcattttgaagcaatgggacatgccacattgtccccgttctcttgctattgatacctaaacgcgcgcccaccaagtgttcggtgaaatgcctcaatggcattaacgcgtgacctttgtaaagaaacaacccatggggcattttggtttgcacatattttctattntttgggacatgcg

SEQ ID NO: 85536 - DNA, 402 bp, Glycine max
agcttatcaactagttatactaattatatcaataaatacttattctagatcactgttaaatgaaattaaggatttgtttattttaaattttaaacagtcaaatgtattaatttaagatttgtatctaaattgttttcaactatatataattatatacatttgtattaacatgtataattttagcataaaggtagtttttagaaatataccatgtgactcgatcatgtttatgtttgagttgataatcttcttggaggagtgttaagattcaaacacatttgtattaatatgatgtgagagtcacaaatttttatcattttcaatatatttcaatcaataacaaagaatatatttaaagagactcaacaaatatgtttctactggttttcacattattattat

SEQ ID NO: 85537 - DNA, 178 bp, Glycine max
aatctccatgttgtcctactctttgatacagcccactctccaatttacaaatcatattctattcatgggcattcccgaccttgtggccatgtggacttattgagaaatgggaatgtgctgcccattgttaaatcaacacacgcttaagcttctacaaaattctcactaacaattagct

SEQ ID NO: 85538 - DNA, 401 bp, Glycine max
agcttgtccataagctccattttatttatgagggaatgtgcctcttcctaagggcactcttaagatcattccaattctctactggaggatccccatgaatccttcgttccctaacaagggaagtccaccgatagagggcatacccttgaaagctatgggtagccaatggaacttttctctctttgctaataagatggcaagcagagagttgttcaaccttcatttctcaatctaagtaggccttaacattatcttttccattgaaatatgggaggctaatgttaacctcttgacgccttctatccttttctcttctttgggagtgatgtttagtatgtgaactatggtgccctctataatagtcactatgttcttcacttaaactcttgccagagtcatga

SEQ ID NO: 85539 - DNA, 221 bp, Glycine max
  unsure (1)..(221): unsure at all n locations
tagctcactatgggagcggcttcctacttcttgctncatgctagctttaccactgctcttcctttccgcgatgcttcttttatatccgctgaggggctatagccaaaccatattccacaattctttgcattatagctgtatgcgcgtgtctgctaaccattcggtcgaacgtcctacatatgggcatatatgtgatcgaagcagtgccaaaagagcacgag

SEQ ID NO: 85540 - DNA, 402 bp, Glycine max
  unsure (1)..(402): unsure at all n locations
agcttgcataactganacccattttttggtgttacattanatcgaaaaacagcagcgcctttaacaaaagttattgaataaccacatggttcaaaagtcaagtcacaaatctcggaatttgggaaaatttttctaatgccggaattaacagtcatcatggcagctgaagcagaatgttctttgtagaanacctgtgctttctctctatccaggccagtcatgcacatctcaagagtgtaaacattgtcacattgagttacagaatctgcagaagcagagtagacatgccagttctgtgctttgtcttggccacccaaaatataagcattgctttctgcaccaagtttgccanagtagccatcaagaatagcaactttctcagaaaagttgcgatggggatat

SEQ ID NO: 85541 - DNA, 101 bp, Glycine max
  unsure (1)..(101): unsure at all n locations
tacatatgcatcaaaggtgaaacacctactctttgagtaatcaccactaaactcaaccatgtcngtctgactaaatcaagtgacatatgatgatactggag

SEQ ID NO: 85542 - DNA, 378 bp, Glycine max
  unsure (1)..(378): unsure at all n locations
agctttaacaaccccatatgtctatgcaaaacatgttgngacttactcaggcaatcataaacaagttgatcctaactatatgcaatgattaatgaaaaataaagaaaaagatatgggtttcctcccaggaagtgcttctttaacgtcactagcttgacgtttgttacctcatgggttctgtaattgcatgaagaaggtcaacctcttaatgttccaccatgggactgttttaatctctgaccatttactatccatttttttgcctgagtttctaattgaggatcaaataattccaccactccatatggcttgacatccttgatgatgaacggccctgaccatctagaatttagcttacccggaacaaatttcatcttg

SEQ ID NO: 85543 - DNA, 398 bp, Glycine max
  unsure (1)..(398): unsure at all n locations
gtggattccttgttcttcattttaattacaaacagtttgtgcctcccgtgactttggataaatttanagttggttcaaccganatttagaataanaacagagggttgagggggccgaaattgaaagcanaaataaaanaggatcacaattcacgaagtagttagaactgcaagagaatacgataaaattaattatgcaagttgtccactagcccatcttgtccaatcaaataaacctaaacttttctcatgggaggtgccatgtgagggctctatctctnncatatttattaatatcatattcanaccacatncttngttggtaaatctttcatttcggntaatagtcaaacttaacttccttttctttcatttaccctcaaaataatacgccactta

SEQ ID NO: 85544 - DNA, 381 bp, Glycine max
  unsure (1)..(381): unsure at all n locations
agcttttatgtgaaaggatgngattcttacattngaatntgaatttcaacgttcaaaggcactggtaatcgattaccaaaacattgtaatcgattacaactttttgaaattaattggaatgttgtaaattcaatttgaaaactttttcaaaacaattttgctactggtaatcgattacaacaatttggtacatgtttaccagagagtgaaaactctttggtaaacatgttttgagaaaaatcatgtgctactcaatttttgagaaaaacttttcataattatcttgattaagccttctcttgattcttgaatcttgagtcttgaatcttgatcttgattcttgagatcttgagccttgaatcttgattcttgactctaaac

SEQ ID NO: 85545 - DNA, 355 bp, Glycine max
agcttgagatgaggaattgttgttggtgaaacttcctgcttttattgttgaccacagagtggtacctggagatatgtcgcgggggtcaggagaccttggggacgtcaggtggggtgctattgcccaaaaccaagcttgaccaatcccgacccaacccgggcatagtcggtcagtgagaacctgtgatgtacctaaacaagcgagctcctggcagtcaacagataaaaggaaaacaagaccacaaagcaaggaggcttgtggtggctggccaactgtgaattatgtgtaatatgtggattgtggcctctggtaatccattaccaagggtgggtaatcgattacaacgcttaaaaat

SEQ ID NO: 85546 - DNA, 396 bp, Glycine max
agcttccacaacatccattcaaaataacattcaacccgcacaagctatcacagccaagcaaaacagagcataggcagaaactctgccaaaacaccaaccaaaacacagcttttcccacttaaagaccccagtaacaattccttcgttccaatttgttaaccgtgggatcgactcgaaaattttactggaagtctctagtacttaagcctacattttgaccgttgggatctactagcaaacatccagaactcattctacattactctttccacaaccagcaaatacatggatttttctgcacttgtgcaaaattctgctgcacaattttacagcaaaatctgggcaaagagcatatatcgaaaatcacactttctctcattcaatcttggccaatca

SEQ ID NO: 85547 - DNA, 429 bp, Glycine max
  unsure (1)..(429): unsure at all n locations
agctcgccccgggatcctctaagtcaccgcggctgcagcttatagaacaaaatgccttttcatttccaaatatgcatgtgaattaggaagcatcaacaagaatcaagccaaggctattgtgcaagcaatcaatggggcaaaatacaccaaatgattatgatgatggatagttcaaattctcacaaaggtaaagtcatcactttcaaattgagctttcaaaactatcatgacatgtaaagaagaatcaaggatttcaagtcacaaaatgtcaagaacttttatttttnaaacaattacccctttcttgaacatattctataattcaaagaaaaacatgcaaaggtgtacctgcacaccaaattgacccaaaatattaactaataatctgacgaaactaacaacattaacaatttacacaactaactaatt

SEQ ID NO: 85548 - DNA, 315 bp, Glycine max
  unsure (1)..(315): unsure at all n locations
acaacaattgcttcaaggacaaagactatgaagacgttgctggacaacacgatcaacanatgactctttttngttataatatacacacttgagaccctcttgatgaatgaaggggacaactgatttatacagcagaccacactactgatgaatagaaggatacgagacaatgaagcttcacaaccacggcgtaagcagagacaatatgatggagggaataatctcaaacatcttgcaagcatggtagaaacttcaaccctaactgacacactcatattttcttcaagaggaaataacaaaaacctggacactttt

SEQ ID NO: 85549 - DNA, 391 bp, Glycine max
agcttgtccttcagaatagagagattgaagaggagggaactagagtgtgaagtacctgagcctgattccacagagggtgacacaaaatcttccgcgtcagggaacatctgaagcccttgatgatgaacactttgaaagctagatgtggcccttgaaatcattgcttctttaaattatcttcttccaatagctgttttctaaagattggttctgatgagtttcttgattgaaagaaagatactacatattgagagcatatatatatatatatatatatatatgcttgatttgtttccttaatatgaagttgcagaagcaaattaagcaccataacatatatgtatatatcatggtattatgatagggtgaaaaataagagaaagagagagag

SEQ ID NO: 85550 - DNA, 444 bp, Glycine max
  unsure (1)..(444): unsure at all n locations
taaccaatntctgatattctctagcacanatatacanattctgttattgtgaaattagtataaataagactatgtaaaaagtagcatcatcaatgaaaatacaattactttcctttccttctctctttctggaggcactggtcctcgaaaccagtttttcttttctttccctatcattttccttgttcaaaatgaaaattactcttcttgaacatcanaactgcaatgaaaaccctcatttggatattacatacaggtaaatntcataanatcagacttgtgaattcctaaaatcaaaatctctaaattcaatctacagaagaaaaaaaatagcaaccaatacaactgcataanatatctaatnctacatanntattgatgggataatacaaacttctttcaaatcagtaaaagtttgtagaagtgaacaagtgatatatcttt

SEQ ID NO: 85551 - DNA, 308 bp, Glycine max
  unsure (1)..(308): unsure at all n locations
agcttgtggttcaacatccacnctatgtgtgataatcaacaactcaacaatgtggaaggtgggctgtggggacaggtttaaattttgggaagatgcatggatgggtggggaagaatcgctgctagcaaggtaccccaggttgtatagtatatcttcacagcaaaatcaatacatacagcaaatgggggccttcagagataatggatgggagtgggatttcagatggaagagacctatgttcgataatgaagtagatatggcggcctctttcctaagggaggtcgagtgtctcaggattcangctcaac

SEQ ID NO: 85552 - DNA, 447 bp, Glycine max
  unsure (1)..(447): unsure at all n locations
actatcatctaagcttctgccaatggactaccttgaataattcctttgtagccctttgagccttgtttccctttccttgntntgaagctcactacaagccttaagtgaaanaccatgatattaccatatccttaaggaattttggagctctggaattgttntgggaataagtgtggagggtttntgtttcattggacaactagttnntgtggctatgcttcatgatgtantttgggccatacttgatgtacattgtatattggntaaatgttggacatgctgaantgaaatagtgttctcaaaggcaaanaaaaaaaaaaatcgaanaaaaaaaagaaagcataagttgatgaataacttaatggacaagatgagaactctggtctacttcatgtaattttatcttactctttatttctatttttctatatgcactatcccttgtct

SEQ ID NO: 85553 - DNA, 392 bp, Glycine max
agctttgatggagaatatacaaatttactatcttagccactacctaaaaagttggctggagactgcggcctcaagaataaggtacctataaacaaatgccagtggtatagtgccatgtcatttaaacataaagaaactatcattccaaattcttttagaacaaaacaaagtctaacattttttctgttgatttaaacataaagctactataaacaaatgccagtggtatagtgtggatttcaatgtaatgcattcagtcctttttctgttagctatcatttatttctcatcacattgtcatctgttatatttatcaattctttttctctttttttttttggtatagttctcccttactttcatgatcaatatatatactccagatttaatta

SEQ ID NO: 85554 - DNA, 176 bp, Glycine max
  unsure (1)..(176): unsure at all n locations
actggaactacttcacatggacttgttggtgtctatgcaagtngaaagccttggaggaaagaagtatgcctatgttgntgtggatgatttcttcagatttacctgggtcaactttatcagagagaaatcagacaccttttgagtattcanagaagtgagtctaagacttcaaagag

SEQ ID NO: 85555 - DNA, 399 bp, Glycine max
  unsure (1)..(399): unsure at all n locations
agcttaccccgcatgtcactcgagttcacggtttattacgacaaaaggtgcagaagacgatgttagtcttcgcgcgtcnncnnnatcattttccccttgtttacgaaaggtgtgggtaaccataatgtaatctcgcatgtcacctgacttcacgggtcatgatgacaaaaggtgcaaaagacgatgttagtctctgggcctcaatgggctcctttgcccctggttgacgaaaggtgcgggtaaccataacgtaaccccgcatgtcacttgacttcacgggtcagacgaaaaaaggtgcagaatacgatgttagtctccgcgcattaaccggcttgtttgcccctggtcgacgaaaggtgcgggtaaccattaggtaaccccgcatgtcatgtgacttca

SEQ ID NO: 85556 - DNA, 200 bp, Glycine max
atgcgcacatagcatagagtgcgcgtttctacgactctgtaaaatcactgcctcgcggggagcaaagaatctacagagctaggtttgatgccccgctcttgcgaaacaacgttacgtactgagatgggctgagagccatgacttaaagctgccccccgagctgccctgcttctgggaaagatggctaccactagctgttc

SEQ ID NO: 85557 - DNA, 391 bp, Glycine max
  unsure (1)..(391): unsure at all n locations
agctntggaactagcttagtcacttattgcattttttcaagnctttttcttctgctatgaacctgtttcatacttgctgcaattcaattagctcataagtcaaggatgtgcacgtttctttagttgtacacatcatttagcttatttggtataataggaaccaagctaggtgtgaaagtggcccttttcagtatgagcacattgtccacaaagttatctcaaaagggatggattaagtgcaacattgatggtgcaacaaatagttgtctggggccttgagctagcaagggaatttttcgtaattctaggggtgcttttttgggttggttctcgcactctttggatattttcaatgcttttcatgctgangtgcaagtttcatttttagcta

SEQ ID NO: 85558 - DNA, 421 bp, Glycine max
  unsure (1)..(421): unsure at all n locations
catctcagctgcacacatggaactccttcgagcttctacgttaaaatgatcttattagtgtagagaaagagaaagttgtagtggagacccttaccatgttaaagggtcaacttacttttgctatggtattgttgctcctatgtagtgtgaactttctcaaggaaaatgtttactggtaaacattatctaatttctataaatatgataagatcgtaagccttaaaaacattgtctttntatggtagtagtcctcattagtatgcacttatgaactattgctacaaanggtttctaaagatattttgttggatgaaacttgatatttttatatattttattaaattttttgtaaatgatattatgtgtggatgcttttaaaatatataacttctatttatatatttatagaaaattaataaac

SEQ ID NO: 85559 - DNA, 405 bp, Glycine max
agctttaggcaatatacattaagcataactatttgcttatttttatataaagctgcttgtggcgtcaaagcctcaaatgcattaacacttggcaaagtaagcacgacttacctcaatcaaaattagaccctgtgagcacgaatgagcaccctaaacggactgcaaagtgaaatgtacctagataaggtccttgcagaagaaacaaacaaagagtctttatagtgagcataagttcgtacctaggtatttagaagaaagactcatgaaacatacctaggtagggtggcaagctgtcacggtctcgagtgcgatgaagaagaataagcttagacagataagaagagagcttatatggagatcgaagaaaagagcacgagccatatagggctcgcgcctgaatatttt

SEQ ID NO: 85560 - DNA, 238 bp, Glycine max
agcttgaaataccaattatatttttttacccataccttaacaattcacgcttaaatgagaacttaatagcacaatacatacatgaaaaaatatttggctagagaatacgatattgaaacgtaataacacaacacttacgaattaatccaagccattaatatattatcctcatttaaatagtacttggcattgaggagatgaaaaaattatatattgttatattgataagatggaatgt

SEQ ID NO: 85561 - DNA, 368 bp, Glycine max
  unsure (1)..(368): unsure at all n locations
ttaagcacttctctctctctctcgaatagctgaagaaaatagttccgtgaagaanatccaagccgaggcgcttccgtaacattttcatgaataattacgcgaagattctcgaccgttcttcaagactcatncgtcgttcttctgtttcttcagtcttcaacgggtaagtacctcaaaccaaggttntcaattcattctatgtacccgtggtggttcacattttgtttcacgtanttttattggtggtttcattatatttctaccccctttgacgtgctaagccattctctaagcatttctcgttaatctaaacataaataaatttcaccgatcgtttgaatcgatcatcctgtaatttcgggtaaaat

SEQ ID NO: 85562 - DNA, 394 bp, Glycine max
  unsure (1)..(394): unsure at all n locations
agcttgttaatcatgttacaccctctacccctcacatgtacactaataaaggaataaaattcaaatattaattaaaagtatttttaaaacatttttttttccgaaacaagtctttcaaaggggaaaaaagctcacattcattntcttctacatcatattcaaacttgtccaaataaataataaagtaatctcgtctcaaacaaggtcgtctaaacttcatacaattaatatagaacttatatcctaatgtcacatcctatcatagtgttgtgttcctgtgtcctctaacatgaggttcttcatagtcatccacctattcatctgtttcccccaacacaagttcaagatcatcacaggatccaaacacaacaacacacagggagtgagtcatcac

SEQ ID NO: 85563 - DNA, 467 bp, Glycine max
  unsure (1)..(467): unsure at all n locations
atcacatgtggactangtgtgtggcgttctatggtgcacaacaagttgtccacatccacaatgcgcgcataaacccaccatacnctggtgcccacctccatctgagctcacgtattcccacgtagcccatattctcgtttctctcaacaccggagccccatcaatcctcccaagcttgcacaacatccaatcagaacaacattcaaacagcacaagctatcacagccaagcaaaacaggacaaaggcaganaactctgctcaacacaccaaccaaaatcacagcttttctcactcanagaccccagtaacaattccttcgatccaattcgttaaccggtggatcgactccaaaagtttactggaagtctatagtgcataagcctacattgtgaccgttgtgatctactagcanacatccagaactcattctgcactactctngtcacaacccagcaaaacatagcat

SEQ ID NO: 85564 - DNA, 372 bp, Glycine max
  unsure (1)..(372): unsure at all n locations
agctttatgcttattcatttnggtttattctataaaggaagtacatggtcataacttagttaaaggatactctatcctttatgagttatttcttttctaaggatactctatcctttatggtcataacttagttaaaggaagaaatggaagcaactactcatttggttcaacctatactggcagtgaagtgcattcctatgagccccaagcaatattaattgaaatattaactactaagtagtttaccaagtgtttttatgattcattctaatatctcatgcaagttgtgataaaataatgtttagtgtagcccaaagtcaattcaaggatctcgaggttgtgattaaatttaaagttncttttattaattga

SEQ ID NO: 85565 - DNA, 462 bp, Glycine max
  unsure (1)..(462): unsure at all n locations
cggcacacgattgtgtgagtcctatataatntatgaaaataacaattaagctaatttgatgaanaacagtttaacaatgtcacatttattcatgacatacagagggaaacaaaatacctcatcagatacagctnttacaagatgggtcagccattcaatgaatgtgttaacaacctccctcacaaacctaatcttagacgttggaaaagggatctgagcgtcaccatcataaactattacaacactcaccctaaccacattatctgcataagagacattgtgtatcatggtgtcatacacattacgcaaggccactagccgtgtacactactcaacaactatgtacaagcccatagtagccacatcanatgcagaaggctcttcacctaatggatttgcagcagcttcaacacaacttcccttggtgtcacncgtgcagtatacatgacatctgcaccttac

SEQ ID NO: 85566 - DNA, 397 bp, Glycine max
agcttccacatcaagcttgttcatttcaaagctcttatacaaacaatagaattcaaaagttggagaatttgcttggaaaccttgtatctgtgcttaaagtacgatttgcagaagatccacaaattaatcaagtcttagaagctatagatcaagaggcatgaatttataattctacttattcaacgatttaactatgatatgatactttacaaagaaaaaacattcttttaatttaggtacctacaaatgattctaccaataaagatcatcaaactacaaacaatcttatctagaggtgagttgaaatatagtactatattctaactatttatatatagatatatagaatatatcatcattatggtattttaataaccgcgtgaatggtattatttat

SEQ ID NO: 85567 - DNA, 160 bp, Glycine max
acattgtgcgagactaaacttggcttgtttctgaattggaacgagagatgctgagcaccttttcattgtacatctactctataacttcattgatatatgcttctatgagacacgcctagaaactcttgtgatctatgtttgagatgtctatccctatcac

SEQ ID NO: 85568 - DNA, 396 bp, Glycine max
agctttatcaccaaacagatttattattctgaatgatgaggaaccagttgcccaatatattgacatcactgcagttgactcacaagagcatgtgggccaacatgatatggttctaaagacacctcttgagggtcaacccactgcaacatagcccttgtagcttatgggcctctcgtttttattgccttttcttatggatttattctttgatttttcaatcatttcatggaatgtccgtggggccttagggcaaagtacgaggcgccatcttagggatgttatttctcaacaccatccctctctctttctcttgtatgaaactcatggtttgttcgtgaaaggtagatccttttggaagaaattgtgttataaccctttatttcttaagaaactaat

SEQ ID NO: 85569 - DNA, 426 bp, Glycine max
  unsure (1)..(426): unsure at all n locations
ctcagctgaggcaactgatgcatnggtaactnggaacccagctggccttgaatcagatatctgtacctgtcacaagggtttgtggtttgtgctcctctgctgaccaccatacagaccttngtccttccatgcagcaacctggagcaattgagcagcctgaagcttatcctgcanatatttacaatagacctcctcaacctcagcagcaaaatcaaccacagcagaacaattatgacctctccagcaacagatacaaccctggatggaggaatcaccctaacctcagatggtccagccctcangaacaacaacaacagcctggctctnntcttcaaatgctgctggccaagcagacatacattcctcaccaatccacaatncaacaaccncagaaacagccaacagtgaggcccctcacaaccttcc

SEQ ID NO: 85570 - DNA, 519 bp, Glycine max
  unsure (1)..(519): unsure at all n locations
ncaaggaagctcattcaaccncacatgcatatacaaaacttatngataattgttccatacaaccacgaataagcaagctctagctaaatgcaatgaanacagaattaanagggaactgggttgcctcccaggaagcgctcgtttaatgtcattagcttgatgcatagttcttcaagggtctgggtcaaacttggttcctaccttcagaacctcttcagcaaactccttcacctgcaaacaaacattctggtccaacaattgcttttcttcatcanatagatcaaaactgatcttttgatcttcaatgcccatctctaacttccactttccaatgtccacaatgcagcttggcagtaacatgaatagatgtcccaggatcaangngatctcagcatcttattcaatgtccatgacaacaaaatcagctatgaaagtgaagttcttaactcggaccanaacatccttttataactcatacgacctggtgatggagcagtctgctaactgcagcatcattct

SEQ ID NO: 85571 - DNA, 388 bp, Glycine max
agcttcatcctcagatccctcttgttggactaggctcaatttagacagccttcctaggtttagactaactaaaactaagcttcatactcagatccctcttgttggactaaactcagcttaaatagcttaagaaagtttagactaatttagcctaagctttatcctcagatccctcttgttggactagacttagaccaaacaacattattgtaacaacatatttaaaagaaaaacttaatccgcaaatccctcttgtatgactaagtttcaattctgcttcattcaagttctaaggcaacaatacatttcccaatgttaaaatcacctagctaggcacacaaatggttgatcagaccaagagcatacataatttatgtactgaaagaag

SEQ ID NO: 85572 - DNA, 347 bp, Glycine max
  unsure (1)..(347): unsure at all n locations
tatttanggttaactaatgtttaaaaattggactgacaattgaatcgggagaaaatatttgatcaaggtttattgattcaacnncgcagtaaatgtgattgaactagtaattgaatctgtacttttaatttatttaataaattaagtaataaagtataaatttatgagaaatcgggatatnaaaattataaattaatataaatgtttatgtattttataagataaatattaataatcgacaatgatttatatttatgnagaaatcttaaacgtttatatttatcttaanacttttagaataagttaaaaatgaaaggaaatgttttttttattaaaaaatacacgta

SEQ ID NO: 85573 - DNA, 377 bp, Glycine max
agcttctcgataagtgaagcgccagaatcggacttccgtgtgacaagttatgaccatttgaatttctcgagagctttcgttgttcaatttcaagcgtctcgatatattatgcacctgaatcggacttccgtgtgacaagttatgaccatttgaatttctcgagagcattcattgttcaatatcgagcgtctcgatatattatgcgcctgaatcagacttccgtgtgacaagttatgaccatttgaatttctcgagagcatctggtgttcaattcagagcatttctataagtgatgcgcccgaatcggaccttcgtgggaaaaggtatgacaactagaatttcttgagagcgttccgatgttcaatttcgaagcgtct

SEQ ID NO: 85574 - DNA, 268 bp, Glycine max
  unsure (1)..(268): unsure at all n locations
actatcatactaagcttctcgatatatatgcgcctgaatcagactntcgtntcacaagttatgacgatatgaatntctccactgcattccgtgtgacangttatgaccatatgaatntctcgatagcattcgttgctcaatttcgagcgtctcgatatattatgcgcctgaatcggacttccgtgtgacaagttatgaccacttgaatatctcgagggcgtccggtgttcaatctaaagcttctagatatattatgcgcctgaatcag

SEQ ID NO: 85575 - DNA, 368 bp, Glycine max
agcttgtttcagagaagctgtcttaactcctacatatctgataaacatgttacctagtcatgtcttaaagggtccttttgatttgctaaaaagtgtggtacagaacaggacaactacaattgttccatgtttgttttgaaaaagatcatgggacagaacaacttagatggtgatgaatcatgggacaaaaagttgtcccaagtacaaaacattaaaaagttcaaaaatacccataatctttttctcctctctccccactctctcgttgtctcatgtaaaactgtttcgctgcgttctaaaacctctcttgtgcagtttcgtattttgaacggatgctaataatattaaaagcttttacaaacttttat

SEQ ID NO: 85576 - DNA, 418 bp, Glycine max
  unsure (1)..(418): unsure at all n locations
agctcagtctccatntattttctaanaactaaaagttntacagtattcagttgtatgtattcacatatatatgtatgacantttgtgttataagtttgaatctacattctattaatagatttgaatctataggaattggtggtcgtatatcccctacaacctacgctgctatggaagtcttcttaggaccactgctatngaagattatgcctcaatgacatcttccttaattgaaatgggtgctacaaatcaggatggtcatgctaagggcattgtcacagatttggaanaaagtattttcatcaattaaggcangtcttgtaacgcacatatactcacttgttcatcatgtgtgactacgtangtgaatgcgtatgggtgcttatatttntgcactacttgtgcgtactatgcaaca

SEQ ID NO: 85577 - DNA, 400 bp, Glycine max
agcttggaccgataaccacggattacacaacttttgttatgaatttcaatcatttaggccaggactatttgttgattgcggatgtaacaattgggcctgaaccaacctcatcaacccaattaaaacgcctcatccagacgggttcaacctcggcgttttatcaattgagcgtcctacccgaaaactgacctgaaccaaccacggcccaacaccccattcctttcatccaacattttcttctccaatacgatcatctctttcagaccccctcacggctgccgccaccacgccaggtggtacatcgcattactctcactccgtccacagtcccggtgaacgtccgaccctatcgctacccgcatttccaaaagagcgagattgataggcaagtttctgatct

SEQ ID NO: 85578 - DNA, 198 bp, Glycine max
aattctaatatgacatgagaatctatcctagatataatattagactaccctgcattgtcctgctccatgctctatgcccataaccctaaacatgagatagtgtgttgggacatcgactcttaagaggttgataccttacattgacttaagatatgacttattaatgttagtcctataaagttgggattgtccctaatc

SEQ ID NO: 85579 - DNA, 244 bp, Glycine max
  unsure (1)..(244): unsure at all n locations
tgttcacatgctctctattatagactaggtagcttccctgagaagctttcttgagaaaacttccttgagaagcttctttgagaaaaccttcttgagaagctagagcttatctacacacacgcctctcataacttaactcacctccttgagagctttcttaagaagattcctaatgagctagagcttactacacatacctctctgatagctaagctcaccntcttgagatgagaagctagagctt

SEQ ID NO: 85580 - DNA, 362 bp, Glycine max
  unsure (1)..(362): unsure at all n locations
gcttgcggattggactcgtttctaattgatcgaagngggtctaaacagaggcaaatctgatcatcatgctctgataaatgcaaaaaaaaaaattgtggcaagtgaatagggtgagaataatggacaaacccatgctgtgactgccattcctatacatccaagttttccaccaacccaacaatgtcattactcatccaataacaaaccttcttcttacccaccacccaattattcataaaggccatccctaaatcaaccacaaagcctgtctatcggactttcaatgatgaacaccacctttagcacaaatcaaaacaccaaccaatatatgatttttgtagtgaaaaaacctgtataaatca

SEQ ID NO: 85581 - DNA, 194 bp, Glycine max
  unsure (1)..(194): unsure at all n locations
tccaaggcgcgccacatggatcgagcccatgcatggtagatagtcccattaagcacatgagtgaccatgacagacgaatgtccatctnccgcatacacataatacatactggatggatcttgcgaagaatctataagacctccaccattgttgttcgctgttggaacatccacctctcacctattatggttgcg

SEQ ID NO: 85582 - DNA, 268 bp, Glycine max
agaactagttgttgaaagatgaaatatagtggattgtatttatcgttccatccttacaaaccgagaattaattgacaaaagggaccaccttcatcagatatgttttacactatttgcgacatattgaaaccaaagagacaaaacttacctggtcgagggtggatatctattatgagaatcctaaactcttaacatcaaagaccatttctaagaaatgccattttaaggcaaccgagcatttacatgacttaataatcataattataag

SEQ ID NO: 85583 - DNA, 356 bp, Glycine max
  unsure (1)..(356): unsure at all n locations
agcttaaaggaagtgatagaattttcatgggcagaaatgtctccgcattgattggtaaatatgtgccccaaatccctgaaaaatgtaaagatccaggtacattcaacataccttgtattatagggaacaataagtttgacaatgccatgctacatttaagagcttctgttagtgttatgcctctatctatttttaattctctatctcttggtcctttgtagtcaactgatgtggtgattcatntagctaataaaagtgttgccttttctgctggtttcatagaggatgtcttaatttgagttgtgaactgattttccctgttgagttttatattttgaatatggaggaaaggattt

SEQ ID NO: 85584 - DNA, 380 bp, Glycine max
  unsure (1)..(380): unsure at all n locations
cattctcttctccctttgccatatagaantctccaagtactaaccgcctgaattctttntgtgtctctcttctcctttttccaaaagaacgaaggactaaccgcctaaattcttttgtgtctccgttctcccttgtcaaagaattcaaaaagacacagtctgagaattcttttgattcttccctttccctaatacaaaagtattcaaaggactaactgcctgagaattctnttgtatccccattcacaaagtatcaaaggtttaacagcctaagatctttgtgcaacacattggagggacatccttcgtggacaagtagtgggacatctacttgggtttgctgagaacaagagagggacatctcttgtggtcagtttagt

SEQ ID NO: 85585 - DNA, 395 bp, Glycine max
agcttgatgtggcttctgtgatattcttaaatcgcgggcagaaaaggaaattgaagcatcaaactcaaagatgctatcatgtttaacaggaaattgaagggagattgaggaggccaatgaggagcaagtacttggtgaagtggccaggattgatgctttgaaagaattgacagatattgagaccatgagaaaataggaagcaaatgaattttcattcaaattggaaagcgtgtttagaaagttgaaggaggccattaaagagattgatgagtcaaaggagcttgaaatgaaattggttgtgacaatattatatgttgatttcttgcagaataagttaaagtcagttaaggaaatggataaaaggtgtcaaggagatgggagtgcaaagcaattgg

SEQ ID NO: 85586 - DNA, 345 bp, Glycine max
  unsure (1)..(345): unsure at all n locations
tctccaagtggccttcggcattacattaagctcgatctattgtctatatgtaccttttgcgacaacgnggtccatacatctcactgacacatgtagagccttgttgtgtcctctcccctcaacgggaatctcttcttccgcanacgcgatataattgttggtggttatatgaataacgatgccnttgaaacccctcactgagatatcatgcgctacatgggcattngtaaagaccttcatcaacagcgcacgatgaggctcggagtntatgagtagttcaagcaaagagatccttgctagaagtttatttcagtgctcgattaccttaaactcgcttttgtggat

SEQ ID NO: 85587 - DNA, 360 bp, Glycine max
agctttgtgtaatcgattacactattttggtaattgattaccagcgtttgtttctgaataaatcaaaagatgtaactcttcaaaaaggtcttttgactttttcaaattggttttaagtttttctaaaagctataactcttctaaatggttgtcttgcccagacctgaatagtctataaaagcaaggctttgttttgcatttcaagcatcttgaatatctttctaatcatttcattacaatcctttacaagcctttgatctctttgaaacttttctttttctctgtaccaaaagctttctgaaattttttggttattcaaaacttgaaaacttgggcaattcatcttttactctttctccc

SEQ ID NO: 85588 - DNA, 439 bp, Glycine max
  unsure (1)..(439): unsure at all n locations
atagcaccttaaactagctggacttggcattcttaaactagcactaattttgttctttgatataacttagaaacaagcacttgagaatttgactttnnggaaatatattttcgaaatcattcactggaaatcgagtaccattaaggtgtaatcgattaacacatttagaagctctggtaattgaatacaagtattgtgtaatcgattacacaagtttataatgatctaaaactggttaaacataagttatgactcttcgaaattgacatctaacgttctatanaactctctgataatgaataccagagagtanaactctttgataatgattntgtgaaaacttcttgtgctactcactatattgaanaaacttnttaagacttatcttgatngagtcttctcttgactctcgaatcttgatcttgattatccttgaatc

SEQ ID NO: 85589 - DNA, 386 bp, Glycine max
agcttgcttctacacatacaagatgaaaatttttagataaaacttgttctcttattgtggatagtgggtcttgttgcaattgttgtagcacaagattagtttccaagttgaacctaactatcattacccacccaaaaccttataagcttcaatggctcaatgagcaaggggaaatgatagttaaccaacaagtgaaggtacctttctccattgggacatataaggatgaagttaattgtgatatagttcccatggaggcaggacatattcttttaggaaggctgtggcaatttgataggaagatcatttacaatggcctaactaatgagattaccctcacccatcttggcactaaatttgtgttgcatactcaaacacctttacag

SEQ ID NO: 85590 - DNA, 357 bp, Glycine max
  unsure (1)..(357): unsure at all n locations
gagggagataaagagagaggggggagtatgatattgaaggaagaaaaagggagagaagttaaactttgaggtgtgtctcacaagactctcattcatcgaagttacaacaagtgttacacatgctcctatntatagactangtagcttccttgagaagctntcttgagaaaacttccttgagaagcttctttgagaaaacttccttaagaagctagagcttagcaacacacacccctatcataactaagctcaccttcttgagaaacttccttaagaagattctaaagaagctagagcttagctacacatacctctctaatagctaagctcaccttcttgagatgagaagctagagct

SEQ ID NO: 85591 - DNA, 325 bp, Glycine max
agcttgaaggcttactggatgcgttggtcaacttggtaacccagctggccttgaatcagaaatctgtacctgtcgcaagggattgtggtttgtgttcctctgctgaccaccatacagacctttgcccttccatgcagcaaactggagcaattgagcagcctgaagcttatgctgcaaatatttacaatagacctcctcaacctcagcagcaaaatcaaccacagcagaacaattatgacctttccagcaacagatacaaccctggatggaagaatcaccctaacctcagatggtctagcccttaacaacaacagcagcctgcttc

SEQ ID NO: 85592 - DNA, 295 bp, Glycine max
aagctatctagtctatatatagaagcatgtgtaacactcgctgtaactctgatgaatgagagtctcgtgagacatacttcatagttccacttctctccctcttttattccttcaatttcgagctcccaccctctctctgtctctccctctgtcttttcctccattgaagcatccttccaagcttcttatccaaggctcatcttggtggtgaagctccttcttccatggcttattccctagtggatggggccttctctcacctattctcctttgtcttccgctgcatctccatggt

SEQ ID NO: 85593 - DNA, 385 bp, Glycine max
agcttcacatggagctacattagtaagtgtcgagggcacattgtcatgcacaggtaactcccccccatggtgatcaccctgagtcttaagggagttccaaaaccgagtgacatacccccaagtacaagtattttcccttatgagaaacttcaagtacttactcgcaaagtttatactatttccatgcaacatgaagtatgaaacatgggtaccatcaatgcacaaactgtggataattaaagattctaaatcatcccccttcatagatgcttaaaactttctaaccactctttcctccaccagggatatccatcatggtaactgaaccccccatgtacatacacaacatacatcatcacaatgacattttcaacatcaacaacat

SEQ ID NO: 85594 - DNA, 464 bp, Glycine max
  unsure (1)..(464): unsure at all n locations
gacccagaggaataccgaataagtagtaacaagcaatattcacgntagcaaccacagnctgccaccctgcgccaacagcaacacctgagagaacgggtngcacgttgttgatgacaatgcanatggccaacatgggcgtgagctctaccacaatctttctcacttctgaatcatctganaacaagaaagggtactggttcccgaagaatatcagcaccatcgagagcatgacaccgatcagaagtgaagtantcacagcaacaagaagtgaaaactttgctggtcttgggtgacatgctcctagttcatttgacaccctcacactgcanatgtaatnnttgtcactgactgattacggaaatcattcaagtttaatggtatgccaataacgacacagtcatactattgtaactaatatnatcattgatatataatttaaaaattatatnnaaataataattata

SEQ ID NO: 85595 - DNA, 345 bp, Glycine max
agcttttaacataaatttatctcttatatgcttgcatgaaatcactttggatatatatatgatcatatttataaccaacagacatgaagtgcatgaagttaaatcagtcaaatagaatagagtttcctataaattaattgctctagtacaatgggatttttttcggttggcactgatataatttccttttcccacagagacatttggagacagagtagatcggcaatgagtaacgcgaaattggatatccatggtagactgatgaaagcttataagcaagtacctgaatggtggttcctcagtatattggttgggagcatggcgctatccctgctaatggctttt

SEQ ID NO: 85596 - DNA, 353 bp, Glycine max
  unsure (1)..(353): unsure at all n locations
aaccactttgacaaaaagcaacaaggcttggccatcaagagcaaaagccaaaacaatgcttaaccactcaagatagaagcanaacaacaatccaatgcttaaccatctatgggaanaactcanacaatgcttaatcaccatggacaaaaacttacataaacataaagcatcaacaaattgaacaacacanaatctgtcttcaatgagggattttcacaaacacatactttgtgaaccaacagcaaccaagggttaaccacccatggcanangtaaaataatacttaaccaccatggacataagtaaataaatgaacaatacttaattaccacacatgacagaagctgaaatca

SEQ ID NO: 85597 - DNA, 397 bp, Glycine max
  unsure (1)..(397): unsure at all n locations
agcttctacaactattattttttgtcttaaccctccagnacatcaggggaatgaaaagacctaactaatccagagttcggataggaactgtttctgcaactaactntttgttctttgattttccatagattaaatgtgtaaccatagattacattcttatccaaactttggtttttagtttttggtcggagcaagctaattgaaatttcttaaaaaagactcaaagatggagtaccttcaatactttaacacaaattaaatgcatctctaaataagctacaggacgcaaagaaggaaaatgcatatatgagattcaaacatgcatctctaatgtatattnttatatactatattntatagntttagaagttcattgcatgaaaanatgagtttgaca

SEQ ID NO: 85598 - DNA, 441 bp, Glycine max
  unsure (1)..(441): unsure at all n locations
cactatcacactcaagcttctaacttgtcaagaatgaagctctgataccactngttagacaagtggcctcttatatcttatagaaggggggttgaattaagatattccaaactgtttcccctaattaaaaaaaactatttcactttntactcaagttatgaattcccttaatgacaatcttcttaaatattaattcanatgaagcaacttgaattatgaatataaagcaataataaataaaggagattaacggaagagaaaatgccaaactcagtttatactggttcggccacacccttgtgcctacgtncagtccccaacaacccgcttgagagtcccctatcttgtaaatcctttacaagttctaacacacaaggacaatccttctttgtgttagagatcctttcaacaagagactacagtctctaatcccttaagaat

SEQ ID NO: 85599 - DNA, 398 bp, Glycine max
  unsure (1)..(398): unsure at all n locations
agcttctacaaaaggttnttcctaatttctttacactttcctcacctctcaatgagccagtgaaaaagaatgtggcattcacttgagatgaaagacaagagcaagcctttactttgctcaaagaaaagctcaccaaggcacctgctctagctcttttaacttttctaaaacttttgagctagaatgtgatgcctctagagtgggagtgggagttgtattgttacaagatggacaccctatttattattttaatgaaaaacttcatggtgccacccctcaactaccccacctatgataaagagctttatgccttaataaaagccctccaaacttgtgaacattgccttggttcaaggaatttttcattcatagtgatcatgaatcacataagtacatta

SEQ ID NO: 85600 - DNA, 483 bp, Glycine max
  unsure (1)..(483): unsure at all n locations
tctccatatctgcaacatcttcctgagaatgactntcctccncaatatttcgaagtctataatctgcatcaacgagtcccggatgcacttggatcttgcttgtatctgcaccgtccctccaccctgagatcagatcangtgagattcgtcccctactctgcanagcccggtttaaatttgattattagggtgcttntgaccaaatcatttntctgctgntattntatcgaaaaaatagtgatntgactctgntattatatgtggntaactgagttgttcggtctctgatnggggtttgaagaagctgattaatggatgagtntgtgttagatttagtgtgctnggcttgataatttgttggtagtattaatttttacgcgataagtcgaatgaattctagtaactggtttattattatttgtgatcataatttgcttaagataaaaacatgcgttatgtctggtgtctatgactagaattgtg

SEQ ID NO: 85601 - DNA, 398 bp, Glycine max
agcttatagacgtccatagaccttctctgtggtacggtcaaacaaacgttgcatctgtgcattcatcgcatccactaacagacgttgagcgccgtccaactgaaggtactcgtcaccaccaccacctgctccagccataatataacaggaaaaaaaaaatgtgcaataaaaattattaaggtttcaggatcttttaacactctactcacgcctcttacatggcagcccacccgcgcgttatggcctcaatacgctttctgggtaacgaattccttttgccctttaccacctcggtttctcttaagctcgtggtggacccaattagacacacaaggaaatataaaataaaatgaaagacaatataatgatcacaaacagatttgatttgggcaaacaac

SEQ ID NO: 85602 - DNA, 385 bp, Glycine max
  unsure (1)..(385): unsure at all n locations
gagggagagacagagagatgtgggagctctatnatgaaggaataaaagagggggagaagtagaactttgaagtgtgtctcataagactctcattcatcacagttacaacaagtggtacacatgcttctatntatagactatgtagcttccttgagaagctntcttgagaaaacattcttgagaagcttctttgagaaaactttcttgagaagctagagcttagctacacacacccctctcataacttagctcacctccttgagaagccttcttaagaagattctaaagaactagagctagctaccaccatcttaatagctagctacctcttggatgaaactagacttactaccacccctatatactaactcacccctgacaaaag

SEQ ID NO: 85603 - DNA, 310 bp, Glycine max
  unsure (1)..(310): unsure at all n locations
agaaaagacatattaatatttataatatntgaatntatgtttaataacttatnatctttaatagtaggacaatgattntatattgaaaagaatactaacaaagtggagattttactcatattatntatagataaaaatttaatanactaatatttgtataaaatatatatttatttgtgacataagacaatcacacctatcatactatatttgcaaatcaataattatattaattctactgatatattatttaaacaaccaaatatccattttacctgttgttagacataaatatttaactaaatacacc

SEQ ID NO: 85604 - DNA, 413 bp, Glycine max
  unsure (1)..(413): unsure at all n locations
actctaagcacctgcggctgcagcttgaaaggaagaatagtattttgtttaaagatattcagagagcaattggcgaaagtttgttgtctaaagaatgaatgaatattttttaaataaaatgcaaatcaaagccttgantttatagactcttcaagtctagtcacgagaccattataagagttataacctttagaaaaacttaaaaaccatttggaaaagttatgactttaagagaaacttgaaaactattgcgagagttacatcttttgattttgtgcagaaactatcactggtaattgattaccagatcagtgtaatcgattacacaaagcattnttgtgaaaggatgtgactcttcacagctagattgaatttccacggtcgaacatactgggaatccattaccaaatcat

SEQ ID NO: 85605 - DNA, 391 bp, Glycine max
cttgcgggattggtcttcgccgacgaaggatacagaggtctgattttgtaatttaccatctgcttgatgaatgcgaaattgggcaatgaagagggtgagaatgaaggagaaacccatgttgcgactaccattcctatacgggcaagtttcccgccaacccaacgatgtcattacttagccaataacaaaccttcttcttacccaccactcagttatccacaaaggccatccctaaattaaccacgaaacccacctaccacgcaaccaatgctaaacaccacctttagcacagaccataacaccaaccaacgaaggagtgtgcagcaaaagcctgtggatcaccccaattcagtgcatatgctaactgtccatatctactcgacattaatgg

SEQ ID NO: 85606 - DNA, 324 bp, Glycine max
  unsure (1)..(324): unsure at all n locations
agctntaaaattngaattattacttttagaaactgctggnaatcgattgccatatatgtgtaatcgattacacagtgcaaattgtgaattcaaattttaatagctgttgtgaatcaattttggccactggtaatcgaatacatcctctagttatcgattagcagagagtaaatttgttgaaaaagactttttaacttaaatttcttggccaaaccttttgctacttcaattggaatacccctcctatttaatataccctttttaaaactaaaaacttggcctgaaaatgcatcttggatatactttaattctttggcttgaata

SEQ ID NO: 85607 - DNA, 438 bp, Glycine max
  unsure (1)..(438): unsure at all n locations
ctctttgaagatcttagtcttaccttgttgcatttgcattaagaaggccttacatagaatntatcaaaggctacaatgggcatataacatcagaatgaagtggtaccaaagtcaacatcagaatggtgtatttgaggactctaagaatgataacatcaaaatgatattctcgtgataaatcaaaatcatgtgatgactacattagaatggtgtatcanagtcaatatcatgtagtatctatgcatcagaatgatcaagcaactacatgtngtccaaatgaagtcccanaagatagttcactcatcaaaagactagaatnggcatatgaatgagatataaagtaacatcatgtattccatatgctaccacacatgccaagttcacatcagaagaatganggtggtagcatnccacttttcatatgatgccacacacact

SEQ ID NO: 85608 - DNA, 277 bp, Glycine max
agcttatcccagactctttcaactttgttgcagaccttagcacacactccttttgaggatagattctctgactgctcattttcttagggagataggcatttctaattaaatcaatgaaatgctgcgattcttcccactttgtagctcatacttgttttttgaagattggtgatgaggataatatgatccactgttctcatgagcaaggttaagtaatctggtgttgtttttggcatctgcttggaacaactctatcatatatactttccaaccctac

SEQ ID NO: 85609 - DNA, 406 bp, Glycine max
  unsure (1)..(406): unsure at all n locations
cttctatcatgtgaaacanatctttcatttggtgtcggtgttgcgtgtgtaagtccctgtattgaccagttcatatttcttgttaattattcttcttcacaaaggttatagtttcccatcttttctcaaatataagcgctatgcagatcattgtgaaaggcgagaagagccaacgcttatacaaaaacagtctataaaaggctctgaacgtttttgcaaccacaagtaatagcctttgagctgatcatcacattacctgcaatttgacaatattaacatttgtgatgcattttcttcaaaattatgttctcattttttcaccaggtttaaaacagtaagtttggagttttgcacacaatatacactgactgattgactatatcgcattttttaatggcacattaaa

SEQ ID NO: 85610 - DNA, 390 bp, Glycine max
agctttaattatcacatcctatattatcgatacatcacatattcaaggattcccacacaaggaactgcgacaacctctatcttactcgttggaataattataaatctataagaggttgaatagattctttgaaattttacaaattatttcttcgattcaattaaaatccatacccttttacaaatcaaggttttgacaaaagacttattgaataaagatcaaattcatataaaaccaatatattcaaaaaccttagaaaatatagttttgtggccctttcacatcaattttattgacaagatttattcacaaaagtaatgattaaagaaagaaagaatcacccacaaaaattatattgggttatgttttaagagtacctacatcttaccc

SEQ ID NO: 85611 - DNA, 189 bp, Glycine max
  unsure (1)..(189): unsure at all n locations
tctcagctggtcaggactacacgtgagatcgaaaacgatttgaacttttgatatcttnnaaaaacggncganaccttcgcgaaattcttcacggaanacgttacggaaatgtttcggaagcgcctcggcttagattttcttcacggagacaanttttccaagcatattcgaaagagagagaagtgccta

SEQ ID NO: 85612 - DNA, 388 bp, Glycine max
  unsure (1)..(388): unsure at all n locations
agctttntgtacaagattacaaacaactactttactgaaatttaaatgctgaaatttaaagaactgaaacataaaagctgaaatttaaatgacataaatcataaaataactaaaaataaacttaagtgttcaaaattcaaaaatttaaacgtcctgttattcctgtggctggtcttcattcaaatctagtgatggagttgctgatgaatcctgtataagctgttcaggcttcgcaactagtgcaacatccttaggtatatgtggaggggctagagatggctgtggagtctgatctggagtaatctcctcctcctgaaccatgtgtgtacctgcatcaaaataaaaaggtttatgaggagtgagctcatcctcatcctctgctaatgct

SEQ ID NO: 85613 - DNA, 341 bp, Glycine max
  unsure (1)..(341): unsure at all n locations
tctgactcaccatataccttgacccagtgtgagaatgccaatccttaccctcggaagcaaanaaaaggagaagagaaggaatatntccaatcaaagaggaagcatattaaggagagaatggagaattccaatcaaagagaaagaagagaagaggaaaggatattcccaatcaaagagtgggagaaagaaaaaagaanagaaaagaaagaaaactcccaatcaaagaatgggagaaggaaaaaaagaagtaanaaagaagaaagctcctggtcaaagaaactagaagaaatgtgcagaaaggtcttttgaccggacgatatctgaacaatacagaattgtca

SEQ ID NO: 85614 - DNA, 393 bp, Glycine max
agctttgcaacttatgtctctctactcgaaatttctaaaagatatgttgacaaggaaaaacagatacatccaccaggagaatattgttgtggaaggcaactgcagtgctgtaatacagaaaattcttccaccaaaacataaagaccctggaagtgttactattccttgctcaatcggagaagtcactgtgggaaaggctctcattgatttgggagccagtatcaacctaatgccgctctccatgtgtagaaggttagaagagttggaaatcatgctcacgagaatgactttacaacttgctagccgatccatcacaagaccttatggggtaattaaggatgttctgataagtgtgaaacatatggtctttccagctgattttgtggtcatgga

SEQ ID NO: 85615 - DNA, 442 bp, Glycine max
  unsure (1)..(442): unsure at all n locations
ttccttcttttatcattcttctcatggtggatcaagttgtctcggaataaataagaagcggggggtggaataattattaatgtgtcttgactaattaaacatttatccttcttaatattactagattcaattaggctttactactaagttatgagaaagtaaagaacagaaacaataacttagacaaaagtaaagcggaaataaaaagtacatagcggaaaagtaaagagtgtagggaagaagaanacaaacacaagtttttatactgggtcgggcaacacccgtgcctacatncagtccccaaagcaaccaccagtctggagattnncttaaccttgtaaatccttacaaaaaagagcccaaggatgaccctccttgtcttttgaacaccagggatgacgctcacttgactgatcacagaatgaccctctttgtctaatat

SEQ ID NO: 85616 - DNA, 378 bp, Glycine max
agcttgtgcaaatcaaatcactcttacatttcatctctagcatgcatcttctttctttacccactcctcacgtttggttttttagggaaaaacaccataactaaacgcgccgcaagggatccctatcgcaccagatccaaatctaaaacgatgggtgatcaagaggagacgcaagaacagatgaaagccgacatgtcggctctgaaagaacacatggcctccatgatggaggccatgttaagtatgaagcaactcatagagaagaatgcggccaccgccgctgctgccagttcggctgccgaagcagacccgactctcttgcaactacgcaccatcctccctcaaacttagcatgaccgggaaaggacacactggggc

SEQ ID NO: 85617 - DNA, 377 bp, Glycine max
  unsure (1)..(377): unsure at all n locations
tactcaagctcacgcantggttcggatgtggntctcgttgatacagctggtcgtatgcttgtattaatgtagntactattctggataagagnttgatatatttggcagatgttttgagtcatatatatatgaagtacanatggaggcaactccaatcaatgacacatntgttttggtcttctcttttattgcacaacactgaaagtcatgaatcatacatattagtgggatggagaaccatatgcataatggtagaaggtgggttattatttgaatgcttttcttttcatctgatatgtggctgctgggtttcaggataatgaaccacttatgagagcactgtcaaaactcatctacnctaacaatccagatctagt

SEQ ID NO: 85618 - DNA, 396 bp, Glycine max
agcttgatgacttgttgcaacgtgtagtcacgctaaaatgcccatcaatcgcctacacattcttccttttctaccggacctaacccaaacccaccacctattcatccccataaactaaaactcgaatgttctaaatttgacggcttagaccccctcggctgggcatttcaaatcactcaattctttgaataccatgcaacaccagagtttgaaaggcttaacatagcttttttttatatggaggggtcggccttagcgtggttccaatggatgatgagaaatcatcaactcaccacctggcctagttttctacaagctattgaagctcgttttgcccactcaccatatgaggatcctactggtcttttgttcaaactcacacagaagggatcagtg

SEQ ID NO: 85619 - DNA, 398 bp, Glycine max
  unsure (1)..(398): unsure at all n locations
aagctgattcttacgctacatntctccttaccttactgagttctcntctgttttntcttcttgagtgtgagagttatngngcttgtgttgggcttgctgtgctcgtggttcaaatttgttcaaatttggtgcttgctgtgcttccatccttcaagtgtgtgcccttacccttatcctggacataaattcttggtaagtatttctaaagtaaatctgttaataaatattataagtttaagttagttagtattaacaaatattctaaaagtagtagtatgtaaatagtacgatagttagtattaacccaaaatctaaagttaagttagctagtatcagtacgtatggtcttggtattctttacgtattaatagatattccaatggtacggtagttagtat

SEQ ID NO: 85620 - DNA, 386 bp, Glycine max
agcttgaaatccctatgtaggttgtttgtttttttttccaggctaaataatgacaccctgatatttattttcacgtttaaatttgtttgattgtcagtatttgcttaactttatattgtcttagcaattttggtggaaagaaattaaacaactttataacttactggtataggagatacaagggatggtaaaaatttggctggatttaattatttttaagggaaaagagagaaactacatattcttttggtttgaaattaaagtaaaaactgaggacattgcatttaggacttcatcattacccgtgcatgtaattcttaggtacacattattttatgaaaggattgtgcattttctgttaacctacaacctaagaaggatacagt

SEQ ID NO: 85621 - DNA, 399 bp, Glycine max
  unsure (1)..(399): unsure at all n locations
gctcttctagatcgcttttagtgttatgatgtgatngatcctatngctntanatgataatgatgatagcaatgagtggttattgggagaatcggaaggagaagaagctggtaatgatttggattttgatgatgatgatgatttgaattggttagatgtngctgaggcaactggngctggtgaacctttacaaaacacaaggagtcaaacacatataaacaaggcagcagctgcactttgcacctacaatgaaaanggaaaaaggtggtggaagtggaagaagagaatgaagaaagggggaaaagagtacaattctaatgctagtgagagtgatggatttaacaacacaatggattagatcttgaagaggataaagaatctgatttagtaattagtatta

SEQ ID NO: 85622 - DNA, 353 bp, Glycine max
agcttgacttaactcaatattctttgtcttgttaaactattgctagctttaaacaaataaacaagatttattgaaagtgtgcacaatgctaatatgaaatcgtcttacaaacggatatatctttcaacacttagtcttttctcaagtttacaaagtgttttaagaaattaatttctatatagaaatttatagaaaactttataaaaaataatgaaagaatgttatcgtgcaagatgggttcatgtcttgtttcttcaaaactttttctatttatagctttcatctttaaatatacgtcgtctgaccagtcacaatggatgaatttttcactttggtcttcgcctaaaatcttg

SEQ ID NO: 85623 - DNA, 414 bp, Glycine max
  unsure (1)..(414): unsure at all n locations
ttcttattntcaacagaagccgagttgatcaaattnttcaaacttctaggtggaatttgtgagaagacaagcaaattatattgctcanattcttgtaaggacatgaagattaatgcttgtaaacatgaattttattatatcccatcatgtattcactctttttatatgcaatgaaatgacagtcttatttccncttaaataaaatggaaaaaaaaacaaactgaggccgagtttgatgtatttgcagtgtagcagccaattgacattntcttagacgataaaattggagaatatataataatatttacaannttgaatcatcattnaaaaataattaatggaaaaaattccatgcaaataaattgagatatgaatactattaatcataatactttaaatttctttgatgatttt

SEQ ID NO: 85624 - DNA, 401 bp, Glycine max
agcttggacttttgagtctatagtttattacattttaacgatggaaaaatgaattcaaaagccaaacttaatcggattttgccaaaagagaagatagaagaaaaataatcatgatagtaatcaagctgaggtggaatgtggatttcagaatatggattttatgattattgtatcgttatgaatcattgaactagtaaggaccaaaagtggaattgttggttggtaaaaagtctttattggcattactatgttaacacttgacattattggagaatagagacaatattcttgaaccattagtattagagacacggggtattttagattcttcatcttaattcctaagattaaaatgggaccttgtatacaagggttgagcctgaagcattcatgtgatcact

SEQ ID NO: 85625 - DNA, 448 bp, Glycine max
  unsure (1)..(448): unsure at all n locations
agtgaggatagctaagttgattaatggtgatctagattctatggactcagaanagaagtaattaagtcataagaagttaaagtggagggcactttcataaatgactatataactagtttaannaatagaatttagtttaattagtgggtgactagttaaagtgtctaattatatgatgtagaataattaanataagttagagttgtaacaccctgaanaattacaactcagactaacaaagganactctgtngtgtgcatttggcatgatgaattaattcattaatatatgttttaatcagaaatttcatggtgtgtgtgtgatgcatgtgattgatttagtaaagctcganagagaaaataaaactatctaacctagattttcctctgtgcaataattgcactacgcatttgatccccagcataattgtctctacgtgagtggactt

SEQ ID NO: 85626 - DNA, 403 bp, Glycine max
agcttggtgtccctttcattagttacattggctttcactaggttaattactatataccctgcattcattgggtctgaaataccaaaaataccaactcaatgttcagcaatgccttctttatgtcatcaaataccaatggaagtaatggaagaggcttacaactacatcacttttatatgattcaatgttttccaagcttatgacaattaactaacctacacttatgtataatgagaagttctattataatgtgtatttaatataagcttctggaacagtatatgaaaattggatatgtcaaaatctccgacttaatggccacaaagaagaaggaaatatatttactggtagtaaataccagcctagtgcaaaatgagctactgtaattacttatacctatttt

SEQ ID NO: 85627 - DNA, 116 bp, Glycine max
tgtagatatggtggagaaaagtatcgaggtattcatggatgatttctcggtatatgggccttcttttgaatcctgctcgaagaacttggagatggtgctacaaagatgcatggaaa

SEQ ID NO: 85628 - DNA, 351 bp, Glycine max
cccgggatctctaagcaccgcggctgcagcttgcccagagaaggttcttttttggaaatgcttaccacctcaaaagactggaaagcggtttctaatgactcctctgcggcctccacataaggcatagaggatgggcagctcaccaagatgtcttcctcacctgacacgatgaccaaatgcccctccactacgaatttcaacttttggtggagtgtagagggcacaactcccactgagtggatccacggatgccccaacagacagctgtagggggggttaatatccattatttggaaggtgacttgacaggtgtgagggcctatttgtactgggagaacgatcttttcccta

SEQ ID NO: 85629 - DNA, 357 bp, Glycine max
  unsure (1)..(357): unsure at all n locations
aagcatagnaaaacaacttcagctggtgataccgtcaaaacaaccaattctctcatgtgaagaatatggaggcaaccaccatgcctgttactatatggaggaagtagccaaggaaaccaaattcatgagagaatgcactacaaagttagaagaaattgtaatcaaccttagcatcacatcttactccaacctcgagaacaccgtgaaggtaataaattttttaaaagatcaagtannagagttagcagtgcannaaaagaaattgccaacaaggttgactggtatatcgtaacaacaagaagcatgttagcaactaaagagccagtaagaaaagacatgganggtaatgatggagtg

SEQ ID NO: 85630 - DNA, 392 bp, Glycine max
  unsure (1)..(392): unsure at all n locations
agcttagcaaatggacttgtgtgttacccaccttcatcatatctttcgtaatactcaccacctctatcatatctaataattttcatatttctgtctaattgcctttttacttcattctagtaaatttctaaggcatccattgcctgagaaatctcaggcagtaagtagacataactgtaacgtgaataatcattaataatagtgataaagtatccttcctttcctaaagaactaaaatcaaaaggtccacaaatatcagtatgcacaatttcaagaagctaagtgcttcttgtagcttctttctttgtatgtcttgcttgtttccctttaatacaacccacacaaatatttagatccatanaatctagataaggaagaatttcattctttat

SEQ ID NO: 85631 - DNA, 343 bp, Glycine max
  unsure (1)..(343): unsure at all n locations
cacgagaaacaaagcttgcaacactcaagtgtttctgctctctggagaagaagcggttctcacacactatatgacatatcgcagattgcaacggtcagatcgtgggaatctgtcctttgaacctctacaccaaatttcgagaagatccaatggttaacgaatgcctgagggcactcttaccgagacagctcagacaacttccttgagaagctntctcatgaggcttncttgagaagcttcctcatgaggcttcttgggaagctagagttttaactacccacacccttctaatatctaaattcacctccttgaaataaaatatgaataatacaacacaataaat

SEQ ID NO: 85632 - DNA, 360 bp, Glycine max
agcttgtctaaggccttattgtgttttgttgagcctgcaaacaagatttttatcaactgaagtgtacccttttggaagttccatataaacttccttaaatagatcaccattcaagaaagcattatctacatcaagttgtaagattggccagtttttaacagttgcaacagccaaaaggactctaattgatgtaagtttagcaactggagagaaagtatcaaaaaaatcaataccagcttgttgtgtgtaacccttaactaccaatctagctttgtggcgatccacagcgccatcaggcttgaatttcactttgtacacgcacttgccaccaatgcattgtttaccaattggaaaaagaac

SEQ ID NO: 85633 - DNA, 391 bp, Glycine max
  unsure (1)..(391): unsure at all n locations
tattttaatgctcattataacttcatgacattggatgtgctaaatgcnttcttagcatatcaaaattcgaaaaataattccttcattgaggcatgcatgacacacnaacctcgtcttgaagcttggacacttgcaagttgcagcctaacctcatcacaactacttgtcccacacaatcctcacttgtcacacttcacttgaagaaacattgccttttttagcgggtatagccatatatcgaccaattatatggtccctctttcgttcgttaaggcttcgatatgttgaatcatcattcggctacaacaagaaaagaatgccttcctntattgcaaccctatantataaaatcatcaatatttaataataatgtcgcggtggaatgagtaac

SEQ ID NO: 85634 - DNA, 380 bp, Glycine max
agcttgatgaagagcttatcaatgtcaatgcattttacaaggatcaggtggaagcagcccatcatgaagtaacccttttgagtaaacaaatggaggccttggttgcactaagggtaaaggtgaaaagtccatatacatgtaaatacaaaattcaaacaatagttttatagttatttaagcacatagttctactattgggaggacttgcaagcttttaaaggcaaaatttgagaaatgtgcatcaactaaatgctttttatgttgggaggattgagaaaaaaagatatatgaataggatcacaatggatttgaggccacactaagtcaaataaatgtaccctcattatatgtttctctatgttgccatgcacatgtgaata

SEQ ID NO: 85635 - DNA, 373 bp, Glycine max
  unsure (1)..(373): unsure at all n locations
catctgagaaatttttgtgctatctgctacatacacattcctgaccagttgagatagaaatnggatgacaaaggtgaactgatggtatttcttggataccacgagacaggagggtacaggctgtntgatccaatgaccaagcaaattgcaattagcacggatgtggaatctgatgagtctaataaatgaaggctggaacctgagtctacaagcacgaatgcaatattcctgattgaagcagattatagtggtaataatgttgttgtaacaactgccacatttgaccaagctaatctgagaaagtaacangagtgacataagttccctatgaattgagagattgtaaagnttgtaaagatgatcaaatcactga

SEQ ID NO: 85636 - DNA, 279 bp, Glycine max
agcttgtagagtgttctgtgaattcttggctgggaaaagctaacacaaccaagttcagtgatgcttacaaaaccactaatggttcattgttgtcgtcaacaaaattgttaaacacaaaggcatccataaactcaccaccttactatataatacacggcatccataaactcaccatatttgccaaacatatggccaatatgacattgcaataaacttgagagacacaaaggcagatataacattgcgataaacacagccaaaataacattgtctgaaatt

SEQ ID NO: 85637 - DNA, 430 bp, Glycine max
  unsure (1)..(430): unsure at all n locations
catgctcatctctaaataccatttcccatgtccaccacacattntgtagtgagcatgaatggtcgcccagaatcaangggatctcagcatcttcttcaatgtccatgattaccaagtccacttgaaaggtgaagtggtggactntgaccaggacatcttcaaccacctcgaacggtcttgtgatagaacaatctactagttggagtgtcatcctcgtangatngatcttcangntcccgattcttcgacacatggaaagaggcatcaagttgatgcttgctcctaagtcaatgaaagtcttccctatggacacatnttccatanagcatgggatggtcacacttcttggatctttgacttggtggtacttcangacactacactgcattgccctctactactatgctcccgtgtgatgaccttccatttt

SEQ ID NO: 85638 - DNA, 373 bp, Glycine max
  unsure (1)..(373): unsure at all n locations
agctggcacgattttaagtgtaaatgagnnggcagactttgcttatgcaggcaacacccagatagtactaagtacgaaaaccgtaagtggaaccattaaaattccttgaacctacgtgagagttatgagccaactatgccaaagtgaagaaagtcgcgttgaagtaagagacctacgtcgcaaaataggtaaatcatgtatcctcgagagtcaagtgtggattatgattggcagagcgttgaagtctagaaacttatacctcttttcttgaatcgccccatgtttaaaataggagtcagacttgtggccaaaccgggttccttgggtctgttagctccgttctgaatctcataagtgtcttctatgatattac

SEQ ID NO: 85639 - DNA, 526 bp, Glycine max
  unsure (1)..(526): unsure at all n locations
ntatggaacaattcctcaatatggctaagttgtctctcttaagctatattcattaagntatatggggaatcctgaatatggagcatcacagaagaagataatcctatcaaagcaaagggaacatgtaaggaatgaggatggtgaccctgacataaagtcattattattntgggataagagttggataaataatgagctcttggagaaatctgtagtctctattcctcatttangaatggaggcacacacactatcaattctttgatcaaatgactgaccaactgtatgttactttgaagaataatcctcacaacttttataatactaaagcatctggtagttgaggtcatcaaaantcattntatacttttagttatatggttaatttctcngaatattattatcaatctactcatatataatanatcagaatacacaacttanaatgtgagactntcattcttgatagtcgattctcactttcttaantanataaacattctaaatgggtataaataataatcac

SEQ ID NO: 85640 - DNA, 378 bp, Glycine max
  unsure (1)..(378): unsure at all n locations
agctttgntcattcccttatctttttccatttcacctacatcttgctccatattctcagattgctccaggtgactattctcatttgatacagctacacttccttccattgcaaatgtttggcttgatgtgctctcagtgacttttttcctttgagcctcattcaacatcccattaatctgttgcattggagtttgattcataactttctgaatccctttgttgtcacctgcttcttgaagtctatttccttctccataaacatctttaaatttctttctattttgatctttttcatatgcctcattttccctctgcttggaagcctctttcagtcttatctcatttacttccagatcaaagtcttctttaagttgctt

SEQ ID NO: 85641 - DNA, 457 bp, Glycine max
  unsure (1)..(457): unsure at all n locations
gtacaaaaatattattgactctttagantaaaatggtttatggataataaaacttaaatggaactacgtttttgtatttaattcaattaaaaattaaagttaatcttagtaactcatttaataaaaagttttcaatgtgattcagcatataaaataaaataaaagtctttcttaacanccaaagtcaaatttagttaaagaaaccataatttttttagttaactacaatgataagtttctatggggatattgtatattaattnttggtanatatcacatgtattttttatgaagagataatatgttngagcttaatacttatgaatcanacttgagaataataagttagaacaacatttatanaaaaatatatatatataaaagtatatactatgaagatcacatctacccactttcctatttctcttatttctcatatccttctggttatacaact

SEQ ID NO: 85642 - DNA, 390 bp, Glycine max
agctttcttgagttgatgacatactacacatgtcattcaattttcagatttagcactacttggagttgtggatcatccttattgacttcattttatgttggtcaactcataatgttggatccacgtttattatgaaggtgattctatattaattttcactaatcgctcttaacctactgttatacggtgttctatttctcatcaaatattcaaaaggtaagtttaaattgatttaaggcagcattaactcattccaagacataatattcagcctttacactaaaaaatctagactataattatgaaaactactatagtaaaagaataattctaataatctagcttctaaaacttcttacaaagtttcatactaattgttctggaggaatg

SEQ ID NO: 85643 - DNA, 377 bp, Glycine max
  unsure (1)..(377): unsure at all n locations
ctaagctgaattgcctctagcagaggtgcctagcctgatatcctgggactgccattttcacttcttatggttttttcagttgctaatnttttaacctgaatttttttgacttgtataaaatgaaagatgtattcttgtatttattaaaacaatataaggaaaaatgcatatgtggcaaatgatgcaatactaattacatatactcccaataaaattgttgcctaacaaaacaagttgatgaccatcataaatactggaatcttcaactttaatgactgacctgattgcattgctgctctggaaaagataagaagccataaatganatgtaaaataaactatcagcgatacacactatctacagtaggttttacgaca

SEQ ID NO: 85644 - DNA, 381 bp, Glycine max
agctttcgtgtgggatgtccagtgttagcatattttccaaacccttgaggaaaatttgacgactgctccatgttagttttgcctaacccaagaaaaccattttgaggtgtattgtgatgcatcaaaaatgggtttaggaggattgttgatgcagaatggtcaggtagtggcctatgcttctagacaactcaagactaatgagagaaattatcttacccatgatctggagttaactgctgtagttttttctattatgatatggaagaattacctattcggttctaagtttgaagtgtttagcgatcataaaagccttaagtatctgtttagtcagaaaaagcaaaacatgcgtcagaggactatgattttgagcttagttat

SEQ ID NO: 85645 - DNA, 514 bp, Glycine max
  unsure (1)..(514): unsure at all n locations
gcttagacgtatggcggaaggcactagatcanaagctctatcatcaganaattatggatgtattgtnntgcgaaattgcagcaatagtcgaggcgaagatggngaccttatcagagaggttagcacatctcgaagctaacagatataatccacaacaagcacaaccagaagcgacttcattntcggcatcaggatcacacacagcgtcgcatcggatgaagcttgatgtgccgagattcaatggctctgacgccacaggctggatcttcaagataacgcagttcttcgagtatcacacaacaccagatcatgagagactcacgatcgcatcattctatatggaanggtaggcattagcatggtttcaatggatgcaccggaatggcaattatcgtcttgcccggatttcttcatgctctccattcgcgattcgcatcaaccacatacgaggatcccactggactgctatgtanactgcagcagcgaaccatggtaaacaactacctctctgaat

SEQ ID NO: 85646 - DNA, 403 bp, Glycine max
agcttgaaagggggggccttaactttgaagaatgtataccaatcaaagagcaaacagtgaagaacagtggcctagtaaccagaagaagtaaatcaatggcagaagaagattctgacaagctgttgaaagaggcattggggtaaataattgaagggaaaaatggaaagaaggggttgggagtgatagataaatcaagagggaccgtaccggcatgggaaagaaagagtgggaagaagaaaagacaacactggcactgccaaagggaaaggaaaggctcttcctacacacagccagactgccactgaacacctcttctcttttcttttcttttttgacagatttttgtaaattgtaatcacccctcacgaaatagtgagcagattaatttagttgagttttttta

SEQ ID NO: 85647 - DNA, 401 bp, Glycine max
  unsure (1)..(401): unsure at all n locations
atattcttctcatttaactcttaacccatcccaacttttatatcacaccaccaggcccacaaaacaaaaatacaatctttnttaatttttattnagtaaatataatttttataattatcatgataaacttgtcagttaaaaaacaaaaaactaaaccaatcatataattaaaatatttatntaaaattaattcaatttatggtgtaatgtgcaagtacaagtatacaaaacatcagaaaatgccaaanaaatggagacacacattccanaaaanaagacacattcttaaatttataatactaacaaacanaaataaacttacttggtggttngagctgtgacatgctcagatagtatccgaatttctagagtgngaccattactagagctttcaccatttt

SEQ ID NO: 85648 - DNA, 394 bp, Glycine max
agcttatcaaacaaaggtgctgctttgtcttggggaagacccttctccagatatcccaacttgctgtcagtagattctagattagttggcactaggatagaagtgcagaagtctaaaatggtagagtttggtagcagtacatactagttatatgcatattgaaacaatgtactttgcagtgctcctccagatgaaattttgctactgataccttcaggcacaaagcttatagtcaatgcttattggacaatatagttagtagttacaacttacaagagtacatgcagcttaaattcaatacttagagcactatagcacacaccaagataagagtgctagtacccaaaacatatagccttaccagcataaacacgatcataaactctatgaacac

SEQ ID NO: 85649 - DNA, 319 bp, Glycine max
  unsure (1)..(319): unsure at all n locations
tgtaccttgnntggntgaacagtgagaatatatatgtaggagttatacgtaaggtctagaatagattgtgggcagtgttctgcaataatagtaccctcttctactctcaactggtgatgtgtcaagctgaacaaaaataaagcacatgtttgtgaatgaaaaaagcttcataatgtgtganactacgaaggttgccacctgcttttacggtaccggntntttgaatatcaaagaagtttcccttttgtcaagacgctcttatataaactcggtacgcgtttaaacttttaataatacaaaagagttcggcataaacaac

SEQ ID NO: 85650 - DNA, 365 bp, Glycine max
ggcagcaagctttaaaagtccttaatattttatgagaagggtgtcaaagagtgcatcagatctaatgcctacttaattcctattttcctaaaacatgacaaggaaaatttcaaactaattgaaaatgtaactacaaaaaaggcaagttaaaaaattataaaataaaacatgtactgatgaggtaatttactgcagcacctcataggttaaggttcccccagaagaatcaggctggcgaagtgtaacatttgaaattacaccactatcagataggatgcatattgcacggggtccttgttgggaaaaaaatataacctttattgtaatgtcctgaaacaagtgttcacaaaaataacagtatttaa

SEQ ID NO: 85651 - DNA, 418 bp, Glycine max
  unsure (1)..(418): unsure at all n locations
aatcatatttttgcttgatatctaatctgaaataaattctaactcatggagcagaaagtagaacttgaacaacaggaaacaagaagataaggaaagagctgagagcgaaaggtagatatgagaatctcatgtcattgaatacaaacattgtnttgatacaaaagtggtnttatggggaatttgtctgctttacatncatgtgccatgctaatgttatttngacaagactgcagaagaaagtattgatatgacanatgccatgactttaactgactaatgctcttggccanagaatgaagaaaaactataattatatgctgcttgcttctaatagatattcttctcttttgtctaatcttatctcattnttaactcctttcctggggcaagttcctattgaaccgaatattgtgatgtg

SEQ ID NO: 85652 - DNA, 398 bp, Glycine max
agcttttactttggtatctctacttttattttcaagcgttagagagaaggagaaaggattggagcctcaatttcactatctttgtgtgagtggaatttgtctctgaccaacattatttcataaatccaaacagtgggaatgtgtgaaattgagttctgaagatggtgtccaaatttctggatgatcccacagttaatgagtctgggattattgttttactgagataggtttgaatgtatgtgagaaaaagagagggttttggtagatgaagaagggagaacaaatttgagaggaagagaaagcatacaaacatattgtaaatgtaaaaaatgacctaatatgtctctatctatagttaaggcactctgagcttattatttattttatttttattttat

SEQ ID NO: 85653 - DNA, 484 bp, Glycine max
  unsure (1)..(484): unsure at all n locations
gctgggtctacctttcggcttctatcgcccctgggttatgcgtcattgacctgtgtggtctatataccagacatccatccactgngaataatccgacttgagcaaacctcggtaacatcaatggttggtgaggcgagggtctcctggataaacgtccgatgctgacctggtctcttagtgctcgccaggtaggataaagcatcaactcaatcgttctgttccctgtcaacgcggaccaattctttctgttcaaaatgctccaagagttgnttgaccaggtggtagtacttctacattngtgtctctctagcttgaaatacctcattaacctgctcaatgatgatcttggagtcgctctagcaccttaacttctttatgtcaacctcgatcngtagcttcagtcctacgatgagagcttcacactctgcttanngtgttgaagcctttagtcaaacttactgactattcgatggaaacgtatttg

SEQ ID NO: 85654 - DNA, 394 bp, Glycine max
agcttcttgaacatgaataatacatggctactcttgggtttgtacacaccaagtaagaaacatcattctgcctcaacatcattctgaactgtttggcttttgtatttaattaattaagcaaaggaggattcttgaaaagacaagcccagccaagacctggaggtaactagtgaataagaactgacaaatggttaacttggttggcttgattagctgcttgctactaacaacattccatcttggctggactttttttcttctataaattttccttcagatatcctttaaaattaaggtctctgtcacctaccatgtgtcactgattggttgaaaatatataagaaaatcaagaaccatagatgaagggctataagcataagtaaaatgaattgta

SEQ ID NO: 85655 - DNA, 201 bp, Glycine max
tcatggccttgcaagtgaagacctgcacaaacatttgaaagaattccatattgtctgctccaccatgaaaccccagatgttcaggaggatcacatatttctgaaggcttttcctcattctttagagggagtggcaaaggactggctatattaccttgctccaaggtccataacgagctgggatgacctcaagagagtattc

SEQ ID NO: 85656 - DNA, 379 bp, Glycine max
agcttttaagaagactgtttccaatcatgctatcttatgcaatgacgattaacaagtgtcagggccaatcactttctatggttggactttatttgccaaaaccagtttttagccatggacaattatacgttgcattatcgagggtcaattcaaggcaaggattaaaagttattattcatgataaagaccaaaaaaatatgacttctactactaatgtagtcttcaaagaggttttcaaaaatcttacaaggtaactctaaattttcaaacaagaaattgtactatctattggcaatattcccaactattatcttacttatatacattctaacatacaccgcaagatgatatcatattatacaatgttaaatttaacatt

SEQ ID NO: 85657 - DNA, 422 bp, Glycine max
  unsure (1)..(422): unsure at all n locations
atgaggggaagtggtgatttcgaaatctgcacttatgcagaattttgctgtcaaaataagtgcagcaggattttagcttggtgcagaaaatgcttgtgtgtggttggttgtggaaagagtagtacagaatgagttcttgatgttttctagtagatcccaacggtcaaaatgtaggcttatgcactatagacttccaagtaaaatttggagtcgatccaacggttaacgaattgggatcgaggaattgtactgtggtctttaagtgagaaaaagctgtgattttggntggtgtttggcagagtntctgccttgctttgtttgcttgctgtgatactgtgctgatgaatgttgttgcttggatgtgggagcttggaggatgatggnacccgtgtgaagaacgagatatgctcgtggagacgtac

SEQ ID NO: 85658 - DNA, 341 bp, Glycine max
agcttcttatttcttgcacattcttggtggtgaagctccttcttccatggcttattccctagtggatggtgcctcccctctccttttctcctttgacttccgctgcatctccatcgtggaaaatcaccattgaagcttaaagataaaacctccatagaagcttcacaagcaagcttacatcatatgttccaagagaatatcaaaggagacatatagaagaagagagaataagaagagctaatgagagagatgaaaggttaggttggaggaccaaacaaaagagggaaggtatctctactagtgcaaaactcactacatctattcatcctactagaagtatg

SEQ ID NO: 85659 - DNA, 386 bp, Glycine max
agcttgtagaattcaccccaattctcttgtcctatgctaacttgctcccatatctacttgataattcaatggtagccataaccctagccaaggttcatcaacctccatttctccgagaatacgactcgaacgcaacgtgtgcttgtcacggagaagccctggggcattccattgagaactgaaagaccctgaagcataaggtgcaaagtctaattgatgtgggctggctgaaatttgaggagaatcgcttgttgaatcctaacactgacaagcgacaccacacatggggcaattttgaggctgatattagtgtctctaatgactcatcatgatttccaagttatgccattattgaaaccacaggtacaatgctaaaatgaatgaat

SEQ ID NO: 85660 - DNA, 308 bp, Glycine max
  unsure (1)..(308): unsure at all n locations
acgcgtcttcaaaattgcttcagtggtttgataactngctaaaacttgcttttcagtgtttgaaaacttgctgaaactcctcaaaattgccttcttgaagtntaaatatgtcagccctcaacgttcgaaattcccaatcaaacaattatgtggcatcaaatacttctttgaagtaattntttatgctggaatacagtttgaatgtgaagctcttattattttttttaattaaattagctttatattcgagatgcttgttcgcgtgtgttaaaaatttgtgagggttgaagtaaaagtgtgtctaaaaa

SEQ ID NO: 85661 - DNA, 385 bp, Glycine max
agcttaacgattgttggtccaagttatttttctaataaccattgttttctctaaggatatattctaaaggtcatctttgattcacatttttaactaactgttcacagacgtgggaactgtggcttcaaccatcatgtattccttctacctacatgtaacttcagaaagcaatcaattctgcacagttccaattattaacattaaccgggcaaatcttggctcacatgttgaactcaagtggctgcttgattcgcgtcatattgatcagtcatccttatattttgcagatgaggttagtttgactgactgttctaaaatttataatttgaaaagaagttctggtttacatccaaatagggcccgttattactttgaaacctattca

SEQ ID NO: 85662 - DNA, 382 bp, Glycine max
  unsure (1)..(382): unsure at all n locations
ttctcgatacaagtttaaggccacatcactgcactcattntgaatatgtccttgaaataaagcggtccacattacaatgcttntaaggctagaanactccgagaaaagaatggttgcatctgcaagcctttgtgagtccatatacatgcccaacaaagaggtccctaagaattcactaccacataaaagacccctcttcactatagcacaatggatctgcangcctaanattaccttggcagaacccttacaaacatctatgaggctngcaaatgtaatctcagatggcttcagtcccaatatctgcatctcatgaagaagaataatagattcttttgtggttttagagcatantctgaatcagagcattacagagacacac

SEQ ID NO: 85663 - DNA, 269 bp, Glycine max
  unsure (1)..(269): unsure at all n locations
accaattaaaaaatattatttttttaaacatgaatattgaccgtgttatgcctgggtgtggcaccgttaacttaccttaaagaaatggaagactgatttttggaaaagaatttaaaaaatgataagaaagaagcagctatggatcaaaaactccaatgganggcttgcttataagctccttacaaagggttaaaagctactctagagcctttgggagtcatagttatggaatttcttaaaaatcnagacttttattagtactatgtgac

SEQ ID NO: 85664 - DNA, 356 bp, Glycine max
  unsure (1)..(356): unsure at all n locations
tcaatggggccaaacacacccaatgattattatgattgatggctcaaattctcacaaagggtaaaatcatcactttcaaattgagctttcaaaactatcatgacatgtagagaagaatcaangatttcaagtcacaaaatgtcaagaacttttattttcaaaacaattacccatttcttgaacatatcctataattcaaagaanaacatgcaaagtcgtacgtgcacacganatttgacccaaatattaaactgaagatccgacgaaactaacaacattaacaaattaacaaaaccaacaaaactagcanaaccaaagaacactcctccccccccccatacttaaacaacacattg

SEQ ID NO: 85665 - DNA, 423 bp, Glycine max
  unsure (1)..(423): unsure at all n locations
tgaacatntcttttggcaaaaatgaaacatgatgttatcaagtttttttctaattgcattgtgtgtcataaggcaaagttcaaagtcatgcatcattggttgcatactccattgtcaattcctacctccccttggacctacatttccataaattntgtgcttgctcttccaacgtccaagagggacaacgattncgattttttggttgttgataagttttccaagatggcacacttcattccatgtcataaggtggatgatgcttgtcatgtggcggatctgttcttcaaagaggtaatgtgtcttcatggattgcctacgagcattgtgttggataaggaattcaacgttttgaggcatttttggaaaacattgtggggaaaacttgtcaccaagcttcttttctccatcacttgccattct

SEQ ID NO: 85666 - DNA, 374 bp, Glycine max
  unsure (1)..(374): unsure at all n locations
tgaaatatttttcattaccacttatccaccacaataagtcaccacccgaaacctatcaaccaacagaacaacctttaaacccccaagcactttcataaacccccatgggtgctctataaagcaaaatgaaaatggtacttcaaatggaaggtgaagaggattcttaccattgtacacaaccccagacaacaaaaaggagtaagaaaggttctctcttgaacaaggtaaatcagggatccaagcttccaaagagagatccttctttgtgaagaaagaagaagcaagaatgtgtgttngtgacgtttgttcanaatatacaanggttttgggaagttctatgactcttctcatttcctttttctgtaccacacaac

SEQ ID NO: 85667 - DNA, 467 bp, Glycine max
  unsure (1)..(467): unsure at all n locations
tgaggcatgcaagcttgagctggtgtgggagcatgagttttggtttatcactgngccttcaacaatgcctgagtttggtgatggaatatcaagccctttagctatggtgtcaccttcaagtactagaccaaccacaacagcaacaacaacattggtgactccttcttctggctttgacacagatcaattgagaggtctattgtccttgaacttgctttggcttgcaaggatgagttggtgaagatggctcagactgatgagcctctttggatcacaagcttggaaggtggaagagaaattctcaaccatgacgagtacacaacgactatcactccttgcattggcttgagacccaatggcttatcactgaggcctctagacaaactgggaatggcatcatatacagcttggccctggtgaacatatatggactcaactagcatctcaactaccttcacactttttta

SEQ ID NO: 85668 - DNA, 359 bp, Glycine max
  unsure (1)..(359): unsure at all n locations
tgatagcgttcgtatgtgagagttaatgcagcccaaacccttttcaattagatattgagcaactcttgatggactataattttctacacctaccgtgattccgggaatgaaacggagctatgatgtcaatcatagacaaacggtatgtcttaatcaaaatttaagttagcctttttctccttctcatcatgaactaatngatgtggaacaatgaaatgatgttttaagttaaaaaagtcgtaagtaataacttgagaccgctgaactatanaaggcctattagatggcttgataacaaagccttggccctttagtcggaagttgactaaactaaacctttgtatgggccaagccttgtg

SEQ ID NO: 85669 - DNA, 403 bp, Glycine max
ctgaggctgcagcttgatgattgcttaccgacaaagattttttgggtttttaagagcaaatctgatcatcttgctttgataaatgcaaaaaaaaaaaaaaagctggggcgaataaagaaggtgaggatgaagggagaacccgtgctgtgactgccattcctatacagcccagtttcccaccgacccaacaatgtcattattcaggcaataaccaacccttctcctacccaccgcccagttatccacataggccatccctaaaacaaccacaaagtctgtctaccgcacttccaatgacaaacaccaaccaagatattgaatttgcagcgagaaagccttagaattcaccccacattcagtgtcctatgctgacttgctcccatatctatttgataattcaatg

SEQ ID NO: 85670 - DNA, 395 bp, Glycine max
  unsure (1)..(395): unsure at all n locations
ttcttatgggtttaatgtttggaccttggtatttcacgcctttcatatggagttgatgatcagtctcttaaggatgtattttctgactttggagatatggntgatagtaaaattggctcactttcatttgctgtacatggtgtcctatttcaaccaccccgccggcctcactttaccatatgttcttcagtttcctttggtgtcattataattnttccatggcattataatcacagcaagcgtagcattntatgtcattcctaaantaactataattgttttgtgctggtgtattcaatggaaaatatcttggttttctcatttatattgtngcttttttacgttcttcatattatgaacccaacctcaattngacactctgttattgtcgtcta

SEQ ID NO: 85671 - DNA, 357 bp, Glycine max
  unsure (1)..(357): unsure at all n locations
ttttgacttcctangaacatcatcttgaataatcattatgttggtgactcctttccatcggtcaccaaagaagaaagatagtatagtagtaccttttatttttttttaatccatcttttcattcttttgtacatcaatttcgaacgttgtttcggaccattctgctaccccaactagattattatttttctcgtcttatccatgtgaacaatgatacttagatgtggattgggtaggcgtgaattggaatctctgaaccgccacctcaaacttatttgatattttttaatatttgacagagaaagtgtatcananaaacaatatttgcagaacagaacacnngataaaaaatatgtg

SEQ ID NO: 85672 - DNA, 298 bp, Glycine max
  unsure (1)..(298): unsure at all n locations
atatgtcgtgagtatgatngtggacactcttttcacggctcataatcatatatagctagtgtagaaaggacataaccctatcattactagccaactgttcctaagaaaaattcaaatctttgtacatagtcgaaaagatcataatggtacaacanaatgatntctactttagtcttacactatgcactangagaggagtttgtgctaactctgatactaatgccaaacaaattgatattgattcgaatactagattgtggacgggattcatatactgttaggaaactacataccgcat

SEQ ID NO: 85673 - DNA, 386 bp, Glycine max
tttctcatgccctttcatctactttatttatcccaaaagttacaattaaaatatattatcccattaaccaattggttttttttgaaggaatcgatcaattggtaatttgtggtcacgcatttgaaaatattgacatacgttgcagagaaagtattgatggtcgtataggacttcattacattcatattgaaagtggatcttctttccttctatgtctttcaacctctccaatcctaaaaaatatttcacgtggtcttaattatacatattttaaaaaaattgtctgtaattataagatattttaaaaaatattcacgtgtcttattatagatattttaaaaatcacaaattattaacttaatataataatctattaatttgtatat

SEQ ID NO: 85674 - DNA, 283 bp, Glycine max
taatcgtctcttcccaaaatctccatgcatgaacacaccccacctgcaaccaccatcacaaccaccgaaacgccaccttacaccataccgtataggttcatattgagtaatccataataattctatgtgttaccatatgtgtcaaaatcaaagtacttaagcatacaacttttcaacgcaaattaattgcgaataatatctgtctgacgcacagttcttctactatatattaacaacatatcattactagtgtgcttgaatcctgccaatcttaaagacttaa

SEQ ID NO: 85675 - DNA, 256 bp, Glycine max
cattaatcctatacttagaaagacctaaaagaacgagaaaaaaaggtaaacttgcatatccaagaagacgtcgatattggttgatcttccatattgggtcgatctagatgtcaaacattgtattgatgttatgcatgccgagaaaatatgtgtgatagtgtaattgacatgcttcttaacttccaaggccagacaaaggatggtgtgaatactcgtcaagatctacctgagattggtatatgagacaagttaaatc

SEQ ID NO: 85676 - DNA, 320 bp, Glycine max
ctcctctgctgaccaccatacagaccttttgccttccatgcagcaacctggagcgatggagcagcctgaagcttatgctgcaaatatttacaatagacctcctcaacctcagcagcaaaatcaaccacaacagaacaattatgacctctccagcaatagatacaaccctggatggaggaatcaccctaacctcagatggtccagccctcagcaacaacaacagcagcctgctccttccttccaaaatgctgctggcccaagcagaccatacattcctccaccaatccaacaacaacaacaaccccagaaacaaccaacag

SEQ ID NO: 85677 - DNA, 408 bp, Glycine max
  unsure (1)..(408): unsure at all n locations
acactccacatgggtgctgtcaattcatgttttgagcctggtctttctaattttttattgtaggttctttacccaatcatggagtgggaagcaactgcctttggccgtccagttcttgcccttgtacttgttgcttctctggctttattcccagtatttntatcccttctggcccttccatgtggttggctgggatgaattttggttatggccttggctttgttattataatggttggaacaaccattggaatggtcctcccttnacttaatggactaattttccgtgaccgcattcatgtaagtcaatttgtttctcatatgaataaatggcttgaaattgtgttgttttctttttcatttaaaagtgttgactttgagtttctggctatgctctntatatatatat

SEQ ID NO: 85678 - DNA, 428 bp, Glycine max
  unsure (1)..(428): unsure at all n locations
attttgaaattgaaaaaattatcaaaatactgataatataatcttataagaattatatatgtaggaaaattttcagtttttttttcttttaaattttataatcacagcgatatatcaataaatcttactgatctatgtattggaattgagttacgtaatgaaaantttctcttcctttcttatgtaaccagtaaattgtgctctggtcacatgtcgtcattaattaatggcagttatacttattaatatttgaacaaaatactattagatttataaaattataatttttatcaaatatatttgactttntttntacctctcacttcanacactaataatataatgtggcatggatgacaaggggatctatttatgantctngtgtgtganaaaccatctcttaagaaaagtagtctataataaatctc

SEQ ID NO: 85679 - DNA, 455 bp, Glycine max
  unsure (1)..(455): unsure at all n locations
agcttgagtgatangaattaagtgtttgtgtttattatgcacgtaaaaaaaatgtctttgttgatggttntttttttgggaatcggaagaattcaccagaaatgtatttcatttctggtgacttattatgactgccacaaatggttcctctttatttaaagcttttgcatgcataagttttacatcttattttaggatatatcatgtttgagacgagaatgcaagactccttgaggaaattgagtttggaggaaaaggaaacacaatgagtgttgtctttaaagaataacatgttattgataatagataagtctttgtacttaccattgttcaaaaaatagatatgataattaaataatgatgttactcctaacattattaanagataagacaacactaagattctcaagtattacttaaagttcaaactcaataacctcaagaggtgtcatcaa

SEQ ID NO: 85680 - DNA, 444 bp, Glycine max
  unsure (1)..(444): unsure at all n locations
attctttgaaataatacaagtgcgcacatgcatgactatccacacaacttcatccaatttctaattggtgcaacctctaacaatcgtctagaatggaagttgaattaccttcagggcatgtttgatatatcacaaacatatgccttagtagtctttctccatatatggaaacataagtacactaggatctcttgtgcagtttcttgaagttgcatccctttatattgccatcatgaagagggcagcaggtcagcgggtacagcttcacaaagttgaagaagcacaaatcattccttacattctgaagcgtaacaaagaanaatttacgttaatcccaagtgtattgagtgtatttggataagctaattcaataagtttattaatttagtcatcgcaaaaataacatantatatattggccgtacaaggtatcttaacccttcta

SEQ ID NO: 85681 - DNA, 435 bp, Glycine max
  unsure (1)..(435): unsure at all n locations
aatacatgacttctactatcaatgtagttttcaaagaggtcttcagaaatgtcacaaaggaaattttacctctgcaaaagaccgattcttatccttgatttgacattttactaaattgataacttactcatatgcatcttaatatgcagctaaatacaacatcatatgagcaatagttaaactctctattgtgaggcacatcatgtcacttcctatatcagaatcttccaatagaaattgataatactctgttgctgatataaattccatctatttctgaactccatcattgccatcataaaccgtaacagcagtcactctgtcataccctntgtttatatatttaaatatatactngattaaagtacttaattacaccattcaatatttacgtgcacttgatattntcccagtaatttacgaatataacataca

SEQ ID NO: 85682 - DNA, 322 bp, Glycine max
  unsure (1)..(322): unsure at all n locations
gcacaagaattcccatgccaaccacccgtacctattacaaaatgaaggccaaggtggttaagtaaattatgccacttccaaccattgaattgttgcttaatgattatgaaaaataatcattttttaagttcctttcaaatcaagaaaaaaatacaaaatttaattagaatctaccaagagtgttaagtactatcatccattcacatatttgtatatgntaataagttatagacttatataatatttatcttannagtcatacctaanattacttttgatgagtaactatattaaaaactttatataatatcatgagattacc

SEQ ID NO: 85683 - DNA, 410 bp, Glycine max
  unsure (1)..(410): unsure at all n locations
agaatcctcataacattaaatacaacggaacagtacaaggcctaaaatatatatggaggactgaaagatttcgtggacttttcaaaggaatggtactaattgtgctagaattgtccctaattctgctgttaagttcttcagttatgagcaagcttctaagtaaagttttctatagatacaaaacaatgtgaggactgccttattgtttaagtatcttttggttgttttcattcggnggactattataccaaatgccaatcatcttatgcaatcctctcttaatattttccttttcctacatcggtttatttaaatagggttactccagcagctaacattttttcttaatatttcagtgtatcccacttcatatcttttaaactctgtctgctgcttcttttattcttcct

SEQ ID NO: 85684 - DNA, 417 bp, Glycine max
  unsure (1)..(417): unsure at all n locations
ctgaacgtaccatttagtcattggaggaccttttgagggtatgtgtcttaaagcaaaaggggagttgggagagntttctgccattgatagagttcacttataacaatagttttcactctaccattggcatggctccctatgaagctctgcatggtagatggtgtangacacctctatgttggctagagcccagagaagagctcatcttatgacctgaagtggtacaacaaaccaccaagaaggtaaagttgatccaagaaaggatgggaactgctcatagtaggcaaaaaagttatcatgacaagaggaggagaggcctggaattcgagggtggtgatcatgtgttcttgagagtcactccatggactgtggttggtcgagcattgaaatctcgaaaactcacaccttgctttatcg

SEQ ID NO: 85685 - DNA, 404 bp, Glycine max
  unsure (1)..(404): unsure at all n locations
tacccatacatgtttacttgtggcggtcgggcgatggtgcacaacaagttttccacatccacaaagtgcgcataaacccaccatccctgttgcccacctncatctgagctcacgtactcccacgtagcccatatcctcgtttctctcaacaacgggtccccatcaatcctcccaagcttccacaacatccaaacaaaacgaacattcaaaccgtacaagctatcacagccaagcaaaacagagcataggcagaaaattctgccaaaacaccaaccaaatcacagcttttctcacttaaagaccccagtaacaattccttcgttccggttcatntaaccgtggatcgactcgaaaatttactggagtctctgatactaagccacatttgaccgtgggatcactac

SEQ ID NO: 85686 - DNA, 460 bp, Glycine max
  unsure (1)..(460): unsure at all n locations
agcttcataaatagcacaagagatactcgttggtagtatagctgtcaacacaagctggnccagttcgttgggtctgacccacatcaatccaccccttatatgagttagcccaacccggttcacttaannagttatttaagaaaaaagtgacttagtctggcccatcacgagttgtgagttaaatgggttggtccaccaatccacctaaaataaaaaaaaaaaatacatttctttaaaaaaattaacaacaaaataatttttagaaaaataaatttgaatacattaaaaaaatattagttgaattaaatcttccattatccacacaccaaaagacattatcacaagctagaagtctattactataataacaaaaactttaataataatcttgaacaaaacaataaataaaataatgttgaatatattacatactaaaagttatttaggtgagtttaatcta

SEQ ID NO: 85687 - DNA, 300 bp, Glycine max
  unsure (1)..(300): unsure at all n locations
ttttggtatggaattattatctttatttttcattttacttgttttccccacatattttagtccgaaacaatgatactaatcaagcatttaccctaaatatatactggataatggatacatcaggataacatcaatttatgaaatacaattgaatgtgcgatctttctatttanaatgttctaaccatgtattggtgcatatattaacagtgtgtcgtgttntaagaattctttgaatgaattattgttattcatacttgagatgtcttgactggtaacctataaattagaagtctaatta

SEQ ID NO: 85688 - DNA, 337 bp, Glycine max
  unsure (1)..(337): unsure at all n locations
gatatcaattataacaaaccactccacctctgcagccaatttgtgattctaaacttcacttctttgtatcctctcaagacctatgcaccttattatttctttctatgcatcgaagccaactacacccatattggggctcttctcctatctcaatccaaatatatcactgatcttntagccaaagtcaatatgcataatgccaaacccataaagactcctctggcccttggttcanaattgcatatggatggtacatatgccttttctgacccaactctctacagatcttgtagtggagccctgaatatgccacatcactcgttcaaaatatcttatg

SEQ ID NO: 85689 - DNA, 376 bp, Glycine max
  unsure (1)..(376): unsure at all n locations
catatgaccataatatctacgaataatgttaagntcgtatacgtacgtaattgtgacctggtcataaatgatgcagaaatcatgcttgtagggtaatcacaaaaacaacttttttccaacaaaagtggagaaatgttgaaaaaatatataattaaggtggacataataacaaaatggtgtaaacatgtaatatttaatttatatgtactatcatcgcgacaataaagatcattggtatatatttgttgtacaccaaaaggtcaaaacatcttgttgctctttaccaaattctcataaaatctacagaaaaatggagcctaatttgcaattgcagtcatggaatgatctattatatgttctacatattttgtgattt

SEQ ID NO: 85690 - DNA, 384 bp, Glycine max
  unsure (1)..(384): unsure at all n locations
tctattccagagagaaaaactctttggtaaatgaatttatgaaaaattcatgtgctattcaatatttntgaaaaactttttaatacttatcttgattgtgccttttcttgattcttgaatcttcaacttgattattcttgattcttgattcttgaatcttgattcttgaaacttgaatcttgaaacttgattcttgaatcttgaaatcaaatttctcttgattcttgaagtgttcttgactcaatcttgaactcatccttttgagctttntgttatcatctntgntatcatgaagtgttcttgactcaatctttgttatcatcaaaactccttgaatcaatcttgattcatcaccatgaagcttgcttctacatatattttatg

SEQ ID NO: 85691 - DNA, 387 bp, Glycine max
tcgtttgcgcgtttaaattaagaaaatcaccaaaaaatcaattagttgtcaatattaaaatttgtaattgttctctgtttgatgaagaatattaatatcgtgcttcttaatttgcagtgtttactatagcacatgaactgggaacttcatattgaagaggaagctcacaagttgtgaagttctctataaatttgacagtgttagccatagtccctcaaaggtggttcccatgctgccctgaccgtagatacctcactaacatcatgccatgacttagatcgtaccctagcttgactgtgtcacctcggcgttgaaggttgtgtccccctcttcattttttccctttaactttgtaccttcatggaatgttcacaagtttttgactat

SEQ ID NO: 85692 - DNA, 380 bp, Glycine max
ctttccagggggggacttgatttgcatagaccctttgcttgttaaggctgaaatccatggctggagtgatggagaagagttggagcaagttttattgcatttaatcaacaaaatttcaatggaggaaaatggtcatgagcagttaattgcatctgattgcaagttacagactctgtctgtctctgcttaaagtcctccaagttcaaccataatttcttagtttatagtatctttcaaaatgtatcataactcaacgggttttttcttatttcgttgataagccatcatcaaatcttcaccaaaattgctaatgttggaagtgtccaaggtggacatctatcaaaaacaaatacataccgagttgccctataaatcttcac

SEQ ID NO: 85693 - DNA, 341 bp, Glycine max
  unsure (1)..(341): unsure at all n locations
ctgatacacttgttgtccaagattcatggttttgcaggtgaagaccctcataagcatctaaaagaattccatattgtctgctccaccatgaaacctccagacgtccaagaaggtcacatctttctgaaagcctttcctcattctttagagggagtggcaaaggactggctatattaccttgctctaaggtccatcacgagctgggatgacctcaaaagagtattcttagaaataaatttccctgcctccaggaccacgaccatcagaaaggatatttcaggcattatgcaacttagtggagagagcttatatgaatactgtgagagaattaaaanactatg

SEQ ID NO: 85694 - DNA, 446 bp, Glycine max
  unsure (1)..(446): unsure at all n locations
caacaaggctgncttcccattttggaactttcaccttaatttgccaaatcaagaaattattatcccttgagagttaacaaagtgtgacaacataaaaaaggagctatttaaagttgaagcaaagatgctgccagttcattcagacatttaaaaaaagcaaggtgtcctatgataaaggtgataaatgaatggatagaaagcactctagttgaaagctatgaaagcaagaaggggttgtcattataaaatgatggtcaccaccaccaacaccacattgagntccaccttgtggaaaaacttcattatatggtgccaaaatcttctcttgttgatagcattccttgtaaaatattgagtttgatgggaatccttggtcccaaaatggctggcacgctntgtcgttgtaggctacactattgagatgccttcactattattatgtcatg

SEQ ID NO: 85695 - DNA, 467 bp, Glycine max
  unsure (1)..(467): unsure at all n locations
agctttgtactagttcacaatcatactctttactttattactanaaaataaaaagaattaagntgataccactctcattgcataatgctttgcatatagaattcatgtctggaacacccacatatctcttgcttagtcctttctaataaatattccagtagaaacaactgttcaaataaaagcaatctatgatacaaaaggttttgtaacaaatcttttgttagtaaatattttttaatttaaaatttataaaaatgttacttatattaattttgtttttataaaatatactatttgttttaaaatatgttatgtaaaattagattttctatcttttctaagattttgttttaatgggtcaatgccaattgttacgtgttaggtttgttttgatatttngtaaatggtttctaacgattcatgttttgttattgcataagagggtctatgcctatatatatctcttt

SEQ ID NO: 85696 - DNA, 389 bp, Glycine max
  unsure (1)..(389): unsure at all n locations
ggttggtggtcaattctctgccgccattattggtatgcttaaatggctttatctgaaaaagagttctaacttcattctttgcacaatagatttcccaatcacaaaatgccttcttgcattntgctctagccctctgnttatcattcttcttccacctgaactccctgcctatcaatatgctatactccctcaagggcagattaaattgatcttgagtaccaaactccatccctaattccaacttctgttcaccaactccactactttgactatattgaggataaacttcaacatcctcatcttcatcatcactactaatggngatattacgctcctctgaatgataaccatctgtctcaacttcagcttcaacttcattcatcatacaa

SEQ ID NO: 85697 - DNA, 261 bp, Glycine max
cttgagaatataacagaaacacttggtaagttgcccactaaattgtcaattggtcaacctacacattctttcgttttgcaaggtacaaagtgtaccatctgtggtgaggctcatgaaacaggccaatgtattcccattgaagaaaacacttaagaagttcactatatgggaaatcaacagagtcaaggatatactcaaggagggatttcacgcttccagcagggtccttaataaccaacaggacagtggagatcacaccct

SEQ ID NO: 85698 - DNA, 439 bp, Glycine max
  unsure (1)..(439): unsure at all n locations
gctatncttatggcctgcctccggacttcactcctcttgccatcccagaagatttaagtcaagcccctacttttgaggggcaactcccaccttatgaagactatcccgggcaagacgatggggaaggagatacccatcttggccccctcctccacctcaaagatccatccccgcatgaactaccccagccgaacatagtccgccatattccggcctcacccacgcctgtgaaagaatctgttccctttgcggaaggtaagggaaagattgaggcgcttgaagaaagggtgagggcagtcaagggcctcggcaattacccattctcggatttggcagaattatgtcttgtacccaacatcgtcatccctcccaaattcaaggtaccagactttgataaatacaaagggacaacatgttcaaaagggcatctctggatgta

SEQ ID NO: 85699 - DNA, 360 bp, Glycine max
  unsure (1)..(360): unsure at all n locations
atttacctaaaaaggggtgaattaagggtctgatatgaatgatgcaatgcacatgcctgaaatgaaaagaagaaaaacaagtggtaatttacatatacgaaaccgacaaagatccatctttttaatactacgctctatgcattgcggcgccccaacgtatgcattaaaaagtgacacgttacactaaagagacaagatatcactagatatacagcanaaccataatttatgtgctattcacagaagaatgcatgagaacanatggtacagagcgtgcttgctccatgcccctanttgggaacctataggataatatctaggggtatctaataactactcccaacgatccatatttcacat

SEQ ID NO: 85700 - DNA, 411 bp, Glycine max
  unsure (1)..(411): unsure at all n locations
cgacaagnnttcgttgattaacaatttttctttaagtctaatacgcagacaaattaatttagttgttcactctttacctagaacgtctagatgttatgctagcccacaagtattttttagcattctttagtttatcaatgttattgttattaatgaaatgagatgatactcgtattcattttaatatgtacaataagtaaaaaatataaaaatactgattcgctttttcagtttatgattctggtaattgaaaacgatctccaaccgttaactntgttagagtgatatttgtaatattntntaatattncccgtttgatatactttttgctattggacaaaacgcatgtagaatntattaaatagtctcatcatgtatttnnnttttattggtggagtctatttctatact

SEQ ID NO: 85701 - DNA, 404 bp, Glycine max
  unsure (1)..(404): unsure at all n locations
gttgagagacagactaagtaacaacgagttagtgatatacaaatgctaatatatcaattatggtcaattaattgtctttagtcctttaaaagtgaaaatactataatatagtagatgtatcttgacactcttcgaatccctcgcatatataaaagaaaaaaaatagtagatgtatcctagtttggtttctggttgacacccacattgaggaaatataagattagtgagtcaataaagcttaaatgtatccatatgtaatattttgttgtgttgtcccttaaatttatacaaatcaaatggatcctaattgtcttattcttgctggtttctaaactatatataagtttgtggttgcactcaaagaggaattctataagctatacttgccgactntgggtgacatc

SEQ ID NO: 85702 - DNA, 416 bp, Glycine max
  unsure (1)..(416): unsure at all n locations
atttggttatcctactttgatgaataggaagccctaggccaatggagagaataagaaggagggaggaacccatgttgtgacttgccgtcctacatggcccaatttcccaccagctcaacaatatcaacctcttctcattacccaccaccctatcatccacaaaggccacccctaaattagtcacaaaactcgcctgctacacatccgataccaaacaccacccttaacacgaaccgaaacaccaaccagggaaggaattntccataaaagaaacttgtagaattcaccccaatttcggtgtcgtatgctaacttactcctatatctactcaataatgcaatggtagccataacccaacaaaggttcatcaaccttcattttctcgaggatacaactcgaatgcaacatgtgcttat

SEQ ID NO: 85703 - DNA, 289 bp, Glycine max
  unsure (1)..(289): unsure at all n locations
accctcattaagaactagctcttttcttcctctattgcccttaattgaatacacctttggttgaatctctatttgggtcttaaccctctcatgcatcttctttacaaattctgacctagattccccttctttatgtataaaagaagtgtccaatgggaggggaatgaggtctaacggtgttaggggattgaacccatagacaacctcaaaaggggactgctttgtggntctatgaacccccctgttgtggcaaagtctacatgaagaagatactcatcccaagacttat

SEQ ID NO: 85704 - DNA, 306 bp, Glycine max
  unsure (1)..(306): unsure at all n locations
caccaccaagagagttccttggataagaagcttagagaggaagcttcaatggaggaaaagaaagagagaaagagggagcacgaaatataatgaggaaaagagggagagaagttgaactttgaagtgtgtctcacaagactctcattcatcaaagttacaacaagtgttacacatgcttctatntatagctaaggtagcttccttgagaagctagagcttagctacacacacccctttaataactaagctcacctccttgagaagcttccttgggaagcttccctaagaagaattctagagaagcta

SEQ ID NO: 85705 - DNA, 378 bp, Glycine max
  unsure (1)..(378): unsure at all n locations
gtttggcttttacatgcccaactcctttgagtgacatttgtattggttgttaacttgattgttgcatcttagtatatccgatatttngtttgctttgtgtatcattatagtgtgagtgaagaagattttcttgttgcatcgagtggcctcagaataattaagaagggggggttgaattaattattcctaaacctttactaattaaaaaattactcttctaaggcttttacttatgttgttaagagaatatggagtagaagagaaacttaacagatagttaaagcgataattaaatgcacagcggatagtaaaagagtacggaagaacgaaacaagcacacacgacgttttatgctagttcggccacaacccgtgccta

SEQ ID NO: 85706 - DNA, 430 bp, Glycine max
atacttactcctcataaccatcaaagaagaaactcaacaggtcaagcgacctaccccaaactagttggtaagaccttcaaccagtggcaagtcaagcatactcctcacaagcatcaaaggagaagctccacagagcaaaaggaagtcccaccaaatgggtgacaagacctttaaccaggttgaaattaaacctgagatgatttcatgtcatttactttttacaagaccaccacggtcctagctctacatcaacaaggtcttgcttcctgtgccctcaaagattccacacttaccatcatgacggcctattgatactaccataagtacgaagcattgcatagacatatggcacaaacatgacatacacacgagacataaatagtgcaaaatttgtcataaatggaaagataaagacataaataattgtcat

SEQ ID NO: 85707 - DNA, 345 bp, Glycine max
aaagatcaatctcacttatcgagttatcatttatatatgtagcgtctggagtatcttggatgatgtacactcgttgtataggaacgaaactcaacttatagaagaaactactcaaataggacaactgtaagtttgtgctgtgtttatttgttttgcatgtttggtgattgagggatagaaagtgtattctggctttttttttatcgttatgtataatggtctgtgactggatattacattatgccaactgctttgcttatcttggcctatcaattgtggttttagttccaattaatgggaatggcctctacctgaatggatattgtgatcagtcataatggcttt

SEQ ID NO: 85708 - DNA, 328 bp, Glycine max
  unsure (1)..(328): unsure at all n locations
cctctcatggagacaataaaagtgaggctcccaactcttctattttctctaatgcttggaaaccctataaaaacaaccagaagtaaagcttcacgaagcttatggaaccactagagacaccgctttcactgttagactacgcacatgagcccgcttagaggtaagggatgagatactcatgcttggcgataanatgaacattgtgatggatctctagatgatacatatcgcgctaatgtgcggtgctttatgaaaattcattatggtcttatttattattcatgaattgactgtgtttgacggatcaatatgcgtcccaatgtgaaat

SEQ ID NO: 85709 - DNA, 436 bp, Glycine max
  unsure (1)..(436): unsure at all n locations
gctntctcttttcttcagttgacattntttttgtatacaatnnttctaaaattaactttctggagcgaccaanggtgatatgaaaggaataattatttgacaaataagttaattgtgtttagccatgctatcaaatttctatagttctggaaaccccttttgtgacgaaagagtgcctctaatgatgagacatcaaattgctctgacattcaatataatattatttctatcaaattggttctttaaataccttanactctngaaggaccaatgtgatgtagcgcatatctttggagaaccaaaatgggtgctttttctggttntttatacaatttagcanatgcaacatttttaatgtttttatgaatttggtatatactntntctgctntatctctaaacccaattttctgttttcagtcacctgtagcccacct

SEQ ID NO: 85710 - DNA, 411 bp, Glycine max
  unsure (1)..(411): unsure at all n locations
aatatatttccatgcctaagcttgggtgtagaaagacccaataattctacctaattgtggcattttatttaccatgccttttatagtttttagcataaaaggttagtttaaattctttttgaaattatcacttatacatgttatctcaacaatgcttcaattctgaacttaattcaggctaacattaaccttccatacttccatgggaaggataatgtagaggcttatttagaatggcaaatgaaggttgagcaaggaaggttcctttagctacccttagcttccaagggtatgctctctattggtggacttcactttgtagggaaagaaacattcattgggatcctctaatagagtattggaatgactngaanagtgcccttangaaaaggcacatccnctcttactatg

SEQ ID NO: 85711 - DNA, 459 bp, Glycine max
  unsure (1)..(459): unsure at all n locations
agctngtgtactgctgcattctacaaatatatgttattgatcactactttacctaaggataagaattgcttgaccacaacaacgctagaggcggtaaaggacaacggtctttcaaataaacctgttgtatgtgaacaaaaattattaactcaaatgaacttgggaaagttagactaactatcttcaatgtacttgaacaaaatgatttccaaacacgtgaccgacacatatcatgcggtgcacaaaagaatcgagtggtggttgacttctaagaggaaaaaatgtcaagctntgttgtcgggacaacgatacaaggattatgttataccttgatgcaatgacatatcccatctctattatatccatccacttgtccacactaacctaaatcaaacaaacatacacatctaagttatttaaagtntgttcttaaaaaaataacctaaacaacataccttg

SEQ ID NO: 85712 - DNA, 319 bp, Glycine max
  unsure (1)..(319): unsure at all n locations
gaatatgacagccaccgtcttaagagcgctgagcaccagcagcgcttctaggccatcaanggatggtcatttctccgggagcgacgcgtacagctcatggacgacgagtataccgacttccaggaggaggtagttcgccggcggtgggcatcactggttacccccatggccaagttcgacccatacatagtcctcgaattttatgctaatgcgtggcctacaaaggagggcgtgcgagatatgtgatcctgggtgaggggtcagtggatcccgtttgatgcggatgctcttagccagttcctgggataccctttaatgc

SEQ ID NO: 85713 - DNA, 370 bp, Glycine max
acatcatcatcacatttgcacttgcaaaaccctcactgtcacaacttctccgcttcctccaggagccaatcacagcacctccatgttgttaggatctttgtctttcgatctcctgtctaacaaaataaatgactcaataaatagatttttccatggcttctccgcaccaacaagtctcagtgctcatcatcttcgaggatcgttgctgcgagcttcacaccacgcactcccctcaattcgttggtctcagaaaccagtgcgaagatgggtggaaatgaagaagccttggtcggtggcagcggcatagtggatatgtggtggcgacaacacggtgcagttgcgtgcggtggagatatggtggtacacgatg

SEQ ID NO: 85714 - DNA, 350 bp, Glycine max
  unsure (1)..(350): unsure at all n locations
actaaataacactaatatatagagtgactactcaaaaggaagagatgggtctcgattatacctttccaatctacctaattaaagtaattacacaaaacaaagcctaaacttgcaacccaattattcaagtgtagaggttctgacttccaagnctcaattgacccttgaaattgaagaaatggcaaagcttaattgtgacaagaatgaagttatttaacttagctttctgaagactactcacatgctccatttggagttctgtagtgtcctatggaccctgcacaagacagataggtcaagtaaacataaaatctaaaaattagctacaattctcaattaagttcaatcat

SEQ ID NO: 85715 - DNA, 353 bp, Glycine max
  unsure (1)..(353): unsure at all n locations
gggtgggtgctaacactgacactccactacgctgaccgaatgccctaccgaagacatttttaaaaaaaaaagtttctaagttttttcagccttttccaataaaatgaaacccttttgcttaacattcaaagataggctaatatactcctatgtacagatcatacaacaagttccaaatgattaaatgcatganaaaaaataacaaanattaaaactgggttgcctcccaagaagcgcttctttaacatcatttagcttgatgctttacctcactgggtgatcttattatgttnttggtcttactttcnnaaacctcctgacctcttccattacctgtaagcaacattgtgtct

SEQ ID NO: 85716 - DNA, 428 bp, Glycine max
  unsure (1)..(428): unsure at all n locations
atgtaatggtttaatacttttattacttatatatgcatattaatatttataatacatctgatttcttattaaattaaataatggtctttatgcaccgatatgcacatagtatttatctagtgatatatatatatatagtattgcatgtaattgtatgcgggtgtgttatatatatttgttacatgtaaatatatttataagccttgaagttagatgtcgtatcgttttattattatacattttttttatcgtaatgntaaatatagtttgtaattagttaaatcgtagatatgacatatgcgtgtgaatgagtgtgtgattaatacttgaagtgatattgcttgtgttatgagctatgagttatacaataatccaactagtgtttaccttgagaaaaagttttatgcgcaacattaaaggaaaaatat

SEQ ID NO: 85717 - DNA, 441 bp, Glycine max
  unsure (1)..(441): unsure at all n locations
agctntgatggtgtcgagaagaaatttatgctttgtttcatcaaaaagggggagaatgtgaatgtatgtatacatgattttgatgatgtcaaaagaggaatcaaacaaagttgcttcaaaagataagcatggcttcaagattaatacaagattgcttcaacaaacaaagccttgcttcaagattaactcaagatcaagccttgccttatagcaaagtgctttcaagacattcaaggctttggtaatcgattaccggaagatagggttgagaaatagttgttgaanagagttttgaatttgaattttcaacatgtaatcgattaccatatgtctgtaatcgattaccagcaacgaaactcttgaaattcanattcaaaagtcatgacccttcanattataactgtgtaatcgattacacaaacattgtaatcgattaccagt

SEQ ID NO: 85718 - DNA, 454 bp, Glycine max
  unsure (1)..(454): unsure at all n locations
cttctcatagtataacaccggtttcgtgtctactatcattgtgatcatccccctttccatcattaagggcgctacttgagctgccagatcccttcacctttgggtgtattctttgaaagaatcatgctccttcttacacatattctgtagttgcattctatcctgagccatatcagaattgtactgatactacctaatgaaagcgaacattatgtccttccaagaatggacttgggaaggttgaaaattagtataccaggtgacagttgtgatgcaatcctccctaggaagggaccagtcactagagccatgagcaagaggctctaagaggattgtgctatagctgctgaagaaggcctanggttctcatgaacctcanggtagatttctgagcccatgggacaagggtgggtccaattatctttgtacatattagactaggatgtcattatat

SEQ ID NO: 85719 - DNA, 396 bp, Glycine max
  unsure (1)..(396): unsure at all n locations
ttatcaaaatttgaatgattcatcatgaattctaacagagggcattggtggttctatctattgtctganattaaaaagataggtggaattgaacatcgatgaatacaatatcaatgtcaaaactaaactcaccgtcaaaacataataacgaagataggagcgttacctgaggtcgtctatctgttgtttgaagatacaaagtgaaaacaaccttttgctagggtttgtgaataagatcaggagacaaaccaattttaaagaaagaaaaagattaaaaaataattaatggatacggataatacgaataaatacaatattatcaaagagctggtggttgccatataatggactcgntagtgatttgaccaattaatcctaggtgtcatcatattattg

SEQ ID NO: 85720 - DNA, 438 bp, Glycine max
tgcagctatgccatattttacaacgtcactttttctgacatcctattaaccgaaaaaatgcacccatataccatcaaggcagccttgttacctagattatttacacgtacttccaaggtgtatttgttacttacatcacacacatctccttggctaaattcacatacatgcatactccaagcattttggggtaccaaaaattgcacatgtgcacatcttggtatttctaatacctatacatacacaaacttcatgatgaatcttgactatctacacaataaggtgctacatttcatgccctgtttcaagtttttgctacctaaagccgcatgcaaattcaagcatattttcctttgctgaactaaaatgtattcaaattatatatatattttttggaatatgtttttttcatacaacattcaacatatttatatatat

SEQ ID NO: 85721 - DNA, 406 bp, Glycine max
  unsure (1)..(406): unsure at all n locations
agcttacttgtaggggtcaagttttgtgtgggatgttttatgttatagtagttttcgtacccttaaggaaaggttaaccactgcaccagttntagtgttacctgacccgagtgaaccttttgtggtgtactgtgatgcgtccaagatgggtttgggtggagtgcttatgcaacggggacaggtagtggcctatgcttctcgacaacttaagatacatgaaaggaattatcccacacatgatcttgagttagcagccgtagtttttgctcttaagctttggaggcattacctttattggatctaaattgaggtgtttagtgatcataagagccttagatatttgtttgatcaaaaagagcttaacatgaggcagaggagatggttagagttccttaaggattacgat

SEQ ID NO: 85722 - DNA, 328 bp, Glycine max
  unsure (1)..(328): unsure at all n locations
gtggtacttgaacccggtgatgattctggacatttgagggcaaatgttttccaagaagggaggaatgatgagaatccagaanatggccaaatacaggctaaagggctcaattggagaaggacaaagcccccgagtggaaaaggatgaaggtccagaggcagagacattatcaagactattatattgtgctaaaggcccagattaatttgaaggccataataaatatgttctatttttataataatttntatttatggtaattttgcccaaactggttagaaggctatgtctatttntatcttttgttagatcactataagtttggttt

SEQ ID NO: 85723 - DNA, 404 bp, Glycine max
  unsure (1)..(404): unsure at all n locations
tcagatatcttaagaagggggggctgaagtaaaatattccgaactggttcccctaattaaaaaactatttcactttttactcaagttatgaaatcccttaacgaccatcttcttaaatgttaattcaaacgacacaactttgatatgaatataaagcaataataaacagaggagactaagggaagagaaaatgctaactcagctttatactggttcggccacacccttgtgcctacgtncagtccccgagcaacccgcttgagagttccactatcttgtgaataccttntacaagttcgtaacacacaaggacaattcttcctttgtgtntagagattctttacaacaagagactcacagtctcttactcccttagagaatgacaggaagaagacgaacaattc

SEQ ID NO: 85724 - DNA, 313 bp, Glycine max
  unsure (1)..(313): unsure at all n locations
tggggatcacagccttgaacttttatgtttagacatagagtttttttgcttcttatgtgtgatgtgtggtatttatactatgttttttgcatattaattcattaggtttgcattcattttttgtncgttaagactatttgcatgactatttcctttactttttattacctaagactttttgaggtttgttttgtgtttttggttntagaaaggaggattcttgagaaaatngacacggatgcttgaagttctattcttggagttattgtgatttaaagatagagcactngagaacttttgtgaagcttggatc

SEQ ID NO: 85725 - DNA, 366 bp, Glycine max
  unsure (1)..(366): unsure at all n locations
ctctgatttccagctggggaaatggcgagtggaggaacgcccccgcatttacgcaacgagcataatggtaacctttacggtttaaaagctctatagttgggcctaggctttagagttttattttgtaaggctttgtgtcttttgcttttgaattataatacaaggatctttcttcatctgttcctggtctctacccattctcattcatttgcatgtntacttcttttctgaaacggcagattcgatgacgagtcccccgaaggtactaatacctgggacccgtctatcaacttcgagcaagaaatgaatcatacggangatgaaggagatgaggatgtggaacttccttcggaactagaaagaatg

SEQ ID NO: 85726 - DNA, 408 bp, Glycine max
  unsure (1)..(408): unsure at all n locations
ttctgggtagaacatgccccatttttttggacaacacattactcgttttcatcttcaagtagcgttccgcatcagtctgcgaaaaattaaagcaccgcacccacgtgttgatgaggtgagcacacgtggccgttgttgtatatgttatggatgatggagaacccgtaggagcggtaatggacctctctggagtgtgggtagggtaatcgtgagggaatgcgacgttgaaaaagaagagtccatcgtggtagggactgcccgcggcgcctacgatcactgccctcggcgcanatcgatgcggttctcgtatatggattcaggaagggtgttgttggccaggattctccactgcttcatgatcctcttgtgcacgtcgctccttgctttggtgaagcaatatggattggg

SEQ ID NO: 85727 - DNA, 390 bp, Glycine max
  unsure (1)..(390): unsure at all n locations
agagcatctatccaaatcgaagccctagcttggtttcttccgatagaaagagacgcgctctgaatctgncatttcaatggcgtttggggccgttgtcgtttacattccttacggatttgtaggtccttctcatgctcattccttctaaagttccttccatcgacgttgacacttccgatggtactctatctctctctacatatctatctatatattgtacacacactcaaggaggtttgtcgtgacgggtgaaatgtgataatgacagtgttggacgatggaaaccaagcgcatgagaacnagttcatatatgtgagttctctctttctctgctntgatntacgaatcgcatatgaaagaatctngcacatcgttgcatgatatggtact

SEQ ID NO: 85728 - DNA, 487 bp, Glycine max
  unsure (1)..(487): unsure at all n locations
tcggatccttaagcacctgggctgcagctgtaagttaagttcggggctttctatctatcttatatacgnnccctattcttgagaaatgcgtaatttctggatttatttcttaataaatgtttgtcttatgttaagcccctaataagataatacttttgttttagcctcgttgtatcttaataaattagcgaatcttatgcttgtatcttaataaattagcaaactttattttaggttctacttattactaatgagaaaagtttatcaaagagaatacatataattcgcttatgagggactaaaaacaagtgtcaaagaccataaataaaatttttgttttattagaaacttcatataaaacaaaaatttattatagagtaaataaaacaattagaatatttactaggcattaaaacatatttaagcctatggtgtaatatctattattatagatatttcttattgacggcggatgaggaagattgag

SEQ ID NO: 85729 - DNA, 266 bp, Glycine max
  unsure (1)..(266): unsure at all n locations
gctttttttaatattataaaanaaaagtaccacgagggttattcatcgcaacccattggttacacttttttttattatccattcacacatgtttcatggaaaatgtcggattctccgacatcaccgccctctgcagatccttcatgcacacactaccgncgcaaaacaccatcctcgcaccgcatttaacggcggcgttccgtacactccgtcactcgcacccaaccccattcaaatgattcaatacttcacacaacaccagcttc

SEQ ID NO: 85730 - DNA, 475 bp, Glycine max
  unsure (1)..(475): unsure at all n locations
agcttctgcanaatctacagaatggcatatatactttgttgactctcctgaattgcaataacagcaccaagaatattccaagtgcatactgccaagaaagaacatgaatatcacaaattacacatatagatactttacgtaaagaaaggtaatgcaattcaagaaaacctgaaatataacaggggattgtgaaactgaagctcgtaacaatgcatatgaaagatatgccttcactgaatcaataaaatggaagttctttgtaaatgagtggctgactccctccagcaaaccctgaaaaataacataacaagcatgtgactgaacagtcaaaatagtaactgtcaaagaatgaaaagcttgaatatcaaatgtgaagaacaaggatggaatatatgctcctatcctatctattcccacttaatgatatagtctagccttataatgggcagaactganaattatattaatcaacaat

SEQ ID NO: 85731 - DNA, 467 bp, Glycine max
  unsure (1)..(467): unsure at all n locations
agcttataagttgtagcatntgcaaatcattaattttntgtgattcaacatcaaanatnntagnttagtaatcaacggaaccagaaatgtaaaataagttttaccttggttgtcactgcaacaaggttttgcgttctggtactgtaagttagccttgaaatggtacttatttatgctaatagtatgttagacaagagtttatgttgtgattaaattgtaaagcccctttacaagtaacattatggacacttaagcaccaagtttttaattttatttttaattttttattattaaatcgtttcatatttatgacatttatttggaagctnttaattcacgcacctcgtattatgggtgaaaacttttactgttatggttaggcattgtanaatangtacagccttccttattgattacattctttcatatgactgaagtctgtgttgcagngacaacactctgtcaca

SEQ ID NO: 85732 - DNA, 454 bp, Glycine max
  unsure (1)..(454): unsure at all n locations
agctttctattctaatntagaaatccatgtttgttttcttatgtctgangtttatgggattaagatggtcattgaccaatccctattttatgatttaacaaaattgcctagtgaaggtgtgccttttgcactgattgatgattggaaatttgatttttctgtgcatgatgcccaccggttggtttgcaccaaccaagaggatatgaccgaaaggcttcttgccggttcattggcttttgaaagccgcatcctccattatcttattgntcgcattttgcttcctagatcttcaaaccttgcccaggtttntgaagaagatctcattgtcatgtgggcctttcataaaggtttacaaattgattgggcacaccttgttagatatcgcatgcatatagcattgcgattgatgccccattgcctatcctcatctgttaccttttccttaacatcctct

SEQ ID NO: 85733 - DNA, 367 bp, Glycine max
  unsure (1)..(367): unsure at all n locations
cacgaatcaaagagtcgttcaatcaagaatcaagattcaagtgaagattcaagacaagactcaagatatgcaagaacttcaagaaaagcatcaagataagtataaacagattttttcaaaagaaaagattgaatagcacaatttgtccaaatgaatttttcatagagaaatcgtttaccagagtttttactctctggtaatcgattaccagaaggcagttatcgattactagaagcccaaacagttttataactattttacaaagtagtaatcgattaccaagggcatgtnatcaattaccaatggttttaaacgctggatttcaaatttcaagagtcacaacttgtgataaaacaatttcaaactt

SEQ ID NO: 85734 - DNA, 373 bp, Glycine max
aactcgtcctcaagtttggcttgtggaatacagttcgttttatcgatcacaatatacaacgggccgaattaattattatgttttttgtgaaataattaattataacttttatgttaattaagcaacaatatttactctttaacatataaattacacaaataattaacgtgtttataaattcatatattttgaaactatgttatcaagatcctaagtttagaacgttatttaaaaaaaaaaagttaagcagttagatttaatactcgagaggtatgttcaagttcaacatgcttaggatcctaaaaaccacgcttataacttaatggaattattacactaaatatttcttataatttaaaagttaatttatttt

SEQ ID NO: 85735 - DNA, 443 bp, Glycine max
  unsure (1)..(443): unsure at all n locations
gttaatgagttcatgagcaacttaggattcaacagatgtgacatggaccattgttgctatggtaagaaatatactaatagttatgttatccttgtcgtgtatgtcgatgttaattgcaggatctagtatggtagaaattaatatgttgaagcaatggttggcagaaaactttgaaatgaaggatctttggtccggctaaacaaattcttggtatgagaattcttagaaacagataagaaggaattntgaagctatcttatgagaaatatatacacaagttgtttgacaggtcttaccttgaagattctaagaccaggaatacccctttgggatctcatttgaagtcttcanagaagcaatctttgcaggcagatgaagaataatgttacatgtcaagagtatcatatgcatcagcagtcgggagttcgatgtatgctatggcg

SEQ ID NO: 85736 - DNA, 414 bp, Glycine max
  unsure (1)..(414): unsure at all n locations
agcttcaacattcaatntcgagcgtctccatatattactggactcaatcagacatccgagtaaaaagttattgtcgtttgaatttgctcaaagcttcaacattcaaattcgagcgtctcgttatattataggactcagtcagacatccgataaaaagtattgacgtttgaatttgctcagagcttcaacattcaatttcgagcgtgtcgctatattacgggactatatcagacatccgagtaaaaagttattgtcgtttgaatttgctcagagcttcaacattcaatttcgagcgtctccatatattacgggactcaatcagacatccgagtaanaagttattgtcgtttgaattgctcaaagcttcaacattcatattcgagcggtctcgtatattataggactcaatcagac

SEQ ID NO: 85737 - DNA, 383 bp, Glycine max
  unsure (1)..(383): unsure at all n locations
tatatcgagacgctaaaaattgaatggtgaagctctgagccaattcaaacgacaataactttttactcggatgattgattgagtcccgtattatatcgtgaccctcgaaattgaatgttgaagctctgagccaattcaaacgacaataactttttactcagatggcctattcaatgacgtattataatgggacgcttgaaattgaatgttgagcctctgagccaattcaaacgacaataactttttactcggatggcctattgagtgacgtattatattgcgacgcttgaaattgaatgttgaacctctgagcaaatacaaacgacaatnaacttttaatcggatgtctaattgagtcccgtaatataacgagacgctcgaaa

SEQ ID NO: 85738 - DNA, 329 bp, Glycine max
  unsure (1)..(329): unsure at all n locations
aatgaatttctccgtgggaggaatgacaacttccacccctgctcaatcacatgttgaagaacacatcacacncttgctgtgtcagtgccacacataacagccacgaggaatgttgcacaggcactgaaacatcaagttttagaattaagaanatatcattcagacagtaaacaagcatgtgaagatcattaaagacatactcagagctttgagcatctggataaaagccacagaaatatgcaaataagctgtgttaccaaacctgtaaaaaccaaaaacataattggttcttcataagtactgatattacatgaggtgtaacatgttaa

SEQ ID NO: 85739 - DNA, 348 bp, Glycine max
cttttttctagatttacgctacatgatgagggcttctactaaaaactaccatcctctggttgtgtgatttaataattgctccatatttggctttgacctcacgaatcttgcagtggagggattaatgctctgcaagataatgacttcataccacctttaatgtcagggcaatatactatgttcaaatgtctcaaagacacaatggaaatcacacaggccacagaatacgtctgaatgcctgaagatagatagatatttctgcgtgtgtgtgggccccatatactttttttctcaaaaatctacagagatcttttgttcactccaaatattgacaatatattctaccca

SEQ ID NO: 85740 - DNA, 430 bp, Glycine max
  unsure (1)..(430): unsure at all n locations
tcattcanatcattctcaaacactcatttcatgcaaaacaatccactacatatcattttcattcattcactgttcanacacanctttatacaagcaaacaactcanagtgctgaaatttaaataactgaaattaaagaactgaaatataaaaactgaaattaaaatgactgaacaaaaatcataaaataactgaaaataaactaaaatgttcaagatgcacaaatttaaatgtcctgctcctgtggttgctcctatgcatgctcattaagggccaacacctgagtatctggtgaatcttgagagataagttgctctaatatagatgctgctgcagatggtgtggcatcatcacgtatgggtgcttgggatggctctgggaattggtatataaaagcatcatcctcctgagccatatgtatacctgcatca

SEQ ID NO: 85741 - DNA, 363 bp, Glycine max
  unsure (1)..(363): unsure at all n locations
tcagtgaagttatccatgccactcacacaattcgcatacttaaatcttgccttcctcttaacaagaacactgtcatctctcaaacagagcatggcatggtctgagatccccggtatcatgttaataagggctgaaattcaagttcttgctaaaccactccgtattaccaaggattctgtcaatcctagaatagataatgttctcactttgcttattactccaggtgtagtaatcccctttactatccatttcagcaagcccagtgttgtccatcatggtacgcaaatctttgtactctttctcacacaccatttttgcccctaccctgtcattagttntaagggacattgtgaagtccccaat

SEQ ID NO: 85742 - DNA, 435 bp, Glycine max
  unsure (1)..(435): unsure at all n locations
cgagctgcagctgcactacatanattctgccaatattattcattgtcaaccctgctatntntgnataaccctttggtacatcactattcatttcttcatcgctcccaagatcattatcataatcatgattattagtatcaacttcattcatctttgtatcctcattccaattcatgcacacttcttaggtgtcagtttccatcttgaacaatgtaacaaaagaattgaatacattacaaatgtacttaacaagaataaaaaattaataataatagaaaatattaaataaacaccatatagtagacatgcatgatcaaacaaactctcgtagtgcctactcacgaaaataacccaactagatggacaagtatttacagttaatagatagatatggcatgcatagttttcaataataaaataatntttcctatgact

SEQ ID NO: 85743 - DNA, 99 bp, Glycine max
gaaaaagacccttagaaatactaactacactggctgtaactggaagaaatagaagaaaaccaatggtcaactaatgatattagaagtcaaagccctatt

SEQ ID NO: 85744 - DNA, 418 bp, Glycine max
  unsure (1)..(418): unsure at all n locations
agcttgtgcgaatctttccttttgttcgagtgatcttatggttaagatagaattcattagtcaaggcaagggtgtttggttttgtctttatcgggtacccaaattgtcgtcgagcgagaagtgggttgtagctaattccgccacgcatacccaaaagaggtacgttgggatattcaccacaactcacaataatctctccaacgtcactagctgcttggtaccaaacgatgtcagatgggtcaagagtcatgattcggtgaggcccaagaaagttgtcatcattggtcttgaaggcacgggattgaggtaagtgggaggtaaaccacagatagagtaaggtgcacaacaagaaatggttccacggccagcctgngtacggtcatggatagagtggtaggtatcggcgagtagagtgggt

SEQ ID NO: 85745 - DNA, 418 bp, Glycine max
  unsure (1)..(418): unsure at all n locations
cactcatgcattaatctctctggcaacattttcttcttggataagtctccaatccatctgatggttcccaacatgcctcttctaaccttaactcttctttcttctctttcctcaacagactgcttaacctcaccctcatcaaccctatttgcttcttcttcttctctttcacccctctcaaattccctctggcacttgtttaataataaccttttaaaggtatcttttcattgtcctcactaaaatcaggcaactcagaagccagatgaaaacaaaagttggcatacatttcacaaaaggtatgttccatcagagccttctcaaagaattgtgagatgacaccagtgagggtgactgcattgtcaatattaactgctntcacctgttcaaaaagtctatcaaaaattctgcggagtag

SEQ ID NO: 85746 - DNA, 327 bp, Glycine max
tttttttgcatacttcatgccaattcataacacttatccatctttccaaccgatgaagaagcctgccataacatgacatgatcattacaaccattagtacaaagctccacatatcggacagatctattgacaaatgcatagctaaaaaacaccctgtatatacccggacaagtttgtataccagaagaccctatatgaccggactgcatcagatgactgctgttgtaggatcacacctcacttagccacaatgacacaaagaactgcaacatataattagtttcactctaacttactcttaatcgactcgtgagtattttaccagta

SEQ ID NO: 85747 - DNA, 384 bp, Glycine max
ggatcgcaactgtgtagcaatatctatgtacataaagaggctcacccaccgcatttgtctcccataacaactttacaacggtatcatatggtggccatggagacaggtggcatcacatacgcttggtttactagtacttgcattctaccatgcatcatggacaccaatgtatattgtctatgggatccacaacgcgattgtttactaagctgatataccacaatctaacacaactgtggcagtgaacaaatagttgtgaacatgaaactgatcattgatgtaccgaagcaataattgacctatgatggagaagtgaatgtcttacggaggctaatgcatcggaacatctttagactattaggatttattcacactgacatagat

SEQ ID NO: 85748 - DNA, 454 bp, Glycine max
  unsure (1)..(454): unsure at all n locations
atccttanatcacctgcggcatgcaagcttanacggactagctcatcntagtctctttgctactttaccaaagggttgaagcagcttcatactttactatgactaggactgcggngattagattcatcaaaaaggagataatttgccattatgggttgccaaggaaaattatcactgataatgccaccaattcgaacaacaagatgatgaaggagatatgtgaggatttcaagatccaacaccataattccatgccttataggcctaagatgaatagggcagttgaggctgctaataaaaatatcaagaagatagttcagaagatgaccgtgtcatacaaggattggcacgagatgctcccctttgcattgcatggttatcgaacttcggtgcgcacatatactgtggcaacttctttctctttggtgtacgggacagangctgtgctcccgtt

SEQ ID NO: 85749 - DNA, 411 bp, Glycine max
gagagaagtggaactctgaagtatgtctcacaagactctcattcatcatagttacaacaagtgttacacatgcttctatttatagactaggtagctccttgagaagctttcttgagaaaacttctttgagaagcttctctgagaaaactttcttgagaagctagagcttagctacacatacccctctaataactaagctcacctccttgagaagcttccttgagaagattcctaaagaagctagagcttagctacacacacctctctaatagctaagctcacctccttgagatgagaagctagaacttatctacacacgcgctataatagctaagctcaccctcatgacaaaatacatgaaaatacataaaaagtccctactacagagactactcaaaatgcctcgaatac

SEQ ID NO: 85750 - DNA, 417 bp, Glycine max
  unsure (1)..(417): unsure at all n locations
agcttatgaatgatataagtcgaacccatttgttatatttttattttaatnataatnatgatacatactgtatctattaatttattttatataaaaaaatctaatgtgaatctaattaatctaaacacatcacttaataaatcattaaaatgtatagattaattatatttttgtattaaattaaataatataataatgaaggaaaaatccctcaagctaaacataatttatagaaatgaaccactcctctcacattaaagttctaccaacacatgtatggggcatgttcaaatattgtttttatcggcgtatgagaatggtactatagtaccctttngagaccctatccatagttatgtgggaaatatttgtgtttaatttaaaatatataaatatatattaattctatcttataaa

SEQ ID NO: 85751 - DNA, 406 bp, Glycine max
  unsure (1)..(406): unsure at all n locations
gacaaatgtactgtttccttggaacttgatagagtaaggctagataattgtagtgctagacaaagtgtgcaaggatctagtttttattatgttgtgcttataatgcgtgttaaatcaagctaagttcaacaagatacatcagcgaatgaagcttagtttaaattaatccacactcacaagacattggtgttggtatttttgtctcagcatagaacacatgaataatttcaaatagagaaaatccctaattgcatcaagtatcccggtggaaggacccaatgcttatacttatntgttttcacactcaattgttcacgtgtactgtttctttgaatacaataaaatatacctcttgtttcagatcatgatacttaattctttatacacacatctgtattttgaatga

SEQ ID NO: 85752 - DNA, 429 bp, Glycine max
  unsure (1)..(429): unsure at all n locations
gtgaattangacgcatcaacaagaatcaagccaatgctattgtgcaagcaatcaatggggcaaaacacaccaaatgattataatgatggatggctcanattctcacaaaggtaaaatcatcactttcaaattgagctttcaaaactatcatgacatgtagagaagaatcaaggatttcaagtcacaaaatgtcaagaacttttattttaaagcaattacccatttcttgaacatatcctataattcaaagaanaacatgcaaagtcgtacgtgcacacaaaattgacccaaaatattaaacttgaaatccgacgaaactaacaacattaacaaattaacacaactaacaaattaacaaaaccaacaaaactagccaaacccaagaacaactccnctcccatacttaaacacacattgtcctcaatgtac

SEQ ID NO: 85753 - DNA, 461 bp, Glycine max
  unsure (1)..(461): unsure at all n locations
agctngctatactagacactntttattctcaagaaaggtttanaacttgatggctctgatgataatggtgatgtgccttccatggatatgcgattgaagtataaatcagtttcctattntttttctttttcattcgtggctgttgtcattgagtttttgacaatttctctgttatggcagtttactgagtcctaagattatcaaactcaagaatttacgcagactcgtgagaatttcatagacttgactcgtgactcaactcgtaaactcgtacgagtctacttcatataaaaataataacaaaatatgtataaataatatactaattaaacattttaacaatataataaaataaaatagtaaatcgtaatggtcagaatatntaaataaccaagtctagtaataatacatcactaccagataataacttgcagaaggtatagtagtggtaaatcattctc

SEQ ID NO: 85754 - DNA, 376 bp, Glycine max
tcttggcccaatcctttttttcttttagaattttctttaaaattctctatcgaccaaagatcttcaacaaacccggtaattctctttctctttctccgattcgtttccgagaattttcagattcacagatctgtgttatttctggcttcgttcgatctgcattttccatccgttaaacgttttctggttctgtgaatgattgcatgttcgtctttggtattgaattctcgcgtgcgttgtgttcgaacgaacatgtcgtgtgcgaattgtcgattgatggcgtgcgattagggttttgaattcgtgatcctgttccgaattgtgtatttcacggtttgtcctttaatgcgttgattcagatctagtttgatcgagt

SEQ ID NO: 85755 - DNA, 458 bp, Glycine max
  unsure (1)..(458): unsure at all n locations
agctnttctcactaagaggcccttgtttgtcaatttatatgatttngatcagngtatcactggacctttaccagcttgtttaaaatgctctaaacatatatttatttataagcacttaaaattaaagtaaatattgtaagacataaatcttttgaaatactctcatataatcatatagcagacatcatgaattagttcagaatggaattacttaccgtgacactgttattttgaactcctctggtcttccaagataaaaagcaacctgcaaagagtgtaaaatatgttcagaagtcaaagcaaaagcttataatttcttatttctctaataacaaggggcaattagacatgcaatttatctgttaggccttcatttggaaagaatagaaatccanaaaataaaaacaaatggctggtttttgtaatgcatgataannaaaattggcaagtcttggtca

SEQ ID NO: 85756 - DNA, 420 bp, Glycine max
  unsure (1)..(420): unsure at all n locations
tcgaagcttcgtgaagacagagaatggttagtcagttactaacttttgtaggttaagcttattttaacctctgtttaggttaattggttcctgtactggtgaagaaaggtcacgggttccatgtaatttcttttaatggtgttgtaatggtggtgtaaagataagtttttggctgaaatatagtttgctttcatctgaaagctgaaaaataaggtaattcggaaaggacataagaagtgttataaattattgtttaacaatcaagagagattgaagatactgtaatcctatttggagttgggaattatatgctnttgtgggatttaagaactctgttttgtactctctggtttaaaaaanaaaaaagagttaaataaccccaaattcatgcttaattgcccctcagtttgtttggataat

SEQ ID NO: 85757 - DNA, 275 bp, Glycine max
  unsure (1)..(275): unsure at all n locations
aatctttgtttgtccctttcttcatgttccagttccttttttttatttgaccgactttaactcatttttgaaaattntcctgtatggttattngtagccccatctggtacttggtttgatttccaagtaatcaaggtaaactactgaaactcccacccttttccttgcttaatatggaactcagatgacgaggttgagaccattntcattggtaagacatgtaaacttatgctgtctttttttgttgttngacttttcattatgggggcaacatt

SEQ ID NO: 85758 - DNA, 360 bp, Glycine max
  unsure (1)..(360): unsure at all n locations
gagccaaagctaattggtttttcttcagtgaactaagacacacttaaactctactttttcaatccgcataaaacaattaaaatgacacctgaagaccatgagtgtctgaagatatcaataccaacaatccattgccaataaaacaaacaaatacaaaattagaatatattntccctaatttgtgcagaccaactttttatattattctataagtgcctaacctgcaaaccaagctcatgagccttttttgcaacaagaccagcaccaaccattacacttgggtttgatgtatttgtacaacttgtgattgtacaatcacaacactaccatgcttgagctctgctagctgcccatggaaat

SEQ ID NO: 85759 - DNA, 244 bp, Glycine max
  unsure (1)..(244): unsure at all n locations
catgggatggtgctaaatttgggatcaataatgtcaaagatggcttcttcatcacacacgctgatgtgagcgagataatattaggagacaagtgttaaacatnctcattctacagctatggcttatgtaagtgtatacccatattagctcanacatttgtacactggtagaatgagttagctaccttaaataacctattaactgtatttttatgacaccgtgaatttacatacgtttattcatg

SEQ ID NO: 85760 - DNA, 423 bp, Glycine max
  unsure (1)..(423): unsure at all n locations
ctgcagcttgaacattactggcctcattaacttctttgcgcttggcggncacgctcaacaaagtactttcgacacctactgtacgttgatttgaccaatgctgttatgggaatgtntcgacaatccttcaaaaccttattgatacattctgaaaggttggttgtcatgtggccatatcgacgtccttctctatcataagccatcgtccatttttcctttgaaattcgatcaacccatgtggctatggctggactcagttcacgaaatttttgtaattctgatcaaaaatgtgcttagcaggagtgtacgctgcataaaaatagttatgaataacaatcttaagtatataggaaacttaaataaacgtcaccaacaaataggaaatcttacccaattctttcacatttctttttgttggcatta

SEQ ID NO: 85761 - DNA, 327 bp, Glycine max
agaagctggagcttagctacacatacccctctcataactaagctcacctccttgagaagctgcattaagaagattcctagggaagctaaagcttagctacacacacctctctaaaagctaagatcacctccttgagatgagaagctagagcttagctacccaccccctattatagctaagctcacccccatgacaaataacatgaaaatacagaagagaaagtctttactacatagactactcgaaatgccccgaaatacaaggctgaaaccctatactactagaatggccaaaatacaacgcccaaacgaaggaaggacctattct

SEQ ID NO: 85762 - DNA, 354 bp, Glycine max
gtagtcgaagagaagttcaagtccatagccatcaaagtttgaaaagagtatgatgaactaagggacgtcaatatagccaccgctgaagccttggaacgagaaaccaagaaggcccgaaaggaagaacacgaccaaagcaaagttttgaggggctttatatggcagcaatagtgagctcaagatccgaagaggtgaaaggaatcatcacgggtgaaaggcatgatcttgaaggacgagctaaaggtttgccttatgtcgaaaagaaatttgtcccaacagttaagcgagactgaagggaatatgtgggccatcatcgatgagtgcaaagagaagcttaatctagcggcgactcac

SEQ ID NO: 85763 - DNA, 199 bp, Glycine max
tcccccttctttctcaagacatcctcacctttatcagctatctggggagctctttcatgttatcctgggaggccctcctttctctttcttgcttcctgatctcatggaaaacacttgagactcattgactcaaatcgctcataaactccagcacttctatgacccgcagccttgaggctagttgcccaccacacctgtg

SEQ ID NO: 85764 - DNA, 404 bp, Glycine max
  unsure (1)..(404): unsure at all n locations
agctngcaaaccaaatgctcaccactgntttattttatgtcttcaagcngnncatataaacctcttcctctaaatcaccattaagaaaggttgcttttacatccaattgttgcaactcaaggtcaaaatgagcaactaatgtcaagataatacaaagaatttttcttagataaaggagaaaaagtctatgtgtaatcaattcctttttttcccttagtagagagtctagccttgtaactctcaatgctgactaatgaatccttcttggtcttaaagacccatttacagccaatggcctttgccccattaagcaactctaccaggttccaaactctgttactctgcatggaaattcattcatccttcatggcatcattaccataaattgactctttacaactcat

SEQ ID NO: 85765 - DNA, 439 bp, Glycine max
  unsure (1)..(439): unsure at all n locations
tttcttttcttagacattatatatatatatatatatatatataagnnntaacatctcaacagaaggaaataagagaaattgaagttaaattatttgtaaaatgatatgttacggatatatgtacactcgaccaaagattaaggtatattttcaatttaaaattaggagctaaaagatggctcaatattcgagatntatagagctagtaacccatagttgaaagatgactcatgattgaaatttattaaagctagttgtgatagctcaaggctgaaaaatggctcaactattgagattacatagagtttaatagccaaagctgaaagatggctcgactgttgagatttatatatagtttaatagttgtgagctgaaagatggctcagctcatatagggttataatagcttagagctgaaagatggctcaatcctcgaaat

SEQ ID NO: 85766 - DNA, 394 bp, Glycine max
  unsure (1)..(394): unsure at all n locations
gatgagaaaaagcccaaaagaatgatttctagattgagtcaacaagttccagatcaagattaatttcaagattcgttagaagaaattcagaagattccagattccagagaagaaattcagaagcaacaagtcaagacttcacaagggaagtattggaaagggatttttcaaaaccaaacatagcacaattttggtttacaaaagaggtttctcanatttttctaagttaccagagtatttactctctggtaatcgattggccagttcctgtaatcgattaccaatgantaaatttggatttcaaaaagttttactggatttgctcattccanatgttttttaatggtgtatcgatacatatattggtatcgataccaggttctgacgttgaatc

SEQ ID NO: 85767 - DNA, 347 bp, Glycine max
tggtgctgatcttcgtaatgttttcactgaagctggtttgttcgccattcgggcacaacgtgattatgtgattgatggagatttcgtgaggtaatgtgtcccaatttgatacggaatttttggggggaagggcatgcacttattataaattcttaattgccttggccttttgtgtttctgatccttctggctgtgcgcaaattgaatgaaacaaaaaaactggaatcaagcgcccattataatgtaaatttcacgatataacaatcaaattgttgtagcacttggcacagatgtttgtctggttcaacacaaaggactactgcacccttcatttgttgacttcttct

SEQ ID NO: 85768 - DNA, 405 bp, Glycine max
gtttgttaattggtaaaactttgtttctaaataaagagaatcatgtagtaagactgaattgctgcatgtgctcctcaaaagaacaatgtatgaaatacctatgctatgctatatgctatgatacctttattacatgcatattggtgtcatcgcatttaattttatttaagttctatcacacgaatcattggtggagtaattacgttacataatgtgtcagatcaagctgaacaaaatattagaaaagtaaacttttactagtgaaaaaaaaaaattcatgttgaccaattattaaaatgaataatatatgacagttaaaacttgtttaaaatatgaaatattgttaaatttatttaatgtccttggtttttttttatcaaatatttgctcggattatttcactct

SEQ ID NO: 85769 - DNA, 457 bp, Glycine max
  unsure (1)..(457): unsure at all n locations
agcttagaccttngccactaatatgctctacatttttgcagagccaataatcacattaatagaacatgtgggttgacttcttatcaccaaaaatactttcaagtttccacacaagacatccccatacatccatctcntaattcacgtaactgttctccgtgaaattaaacatcctcaagaagacataaaaaacacaactcgtaagaatctatcataattcagaagaatttggctacaataacaacaatcaagccttttctcagtagataggatcaactacatgaatcaaaagctaggaattaactattgaattggtagcagttcaagaaagaaataataataaaaaagctaggttggttaccaagcaccaatggagaatactactcttgntntgataaataactagtaacacattntctaacacgatctttttatcacattctatcacaactttctt

SEQ ID NO: 85770 - DNA, 416 bp, Glycine max
  unsure (1)..(416): unsure at all n locations
atatcttcatttttaattttatattctatcaaaccatgcctttttatggagattttggatcaattcattcttgttttggttggggaaaaaatcttgcagagttcgcatgcactatggacacccagatgtatttgaccgaatatttcacataactcgaggaggcattagtaaggcatcacgtgttattaatattagtgaggatatatacgctggtaagaatgatatctgtaatatacgttcatttgagattacccttgatcttctagcttaattcatgtcacgtactttntaaattgaagtgatattatgatatagtattacagaaacaactgaatatcttgagttatttaaattcattttataatctggttgagaactagcctatgatgatgatgatgtctgtcttattattgatg

SEQ ID NO: 85771 - DNA, 385 bp, Glycine max
  unsure (1)..(385): unsure at all n locations
atcttggaaaagtgggataaattatgtggctaagcttcaaaaccaatctataccctgcttcacttgcaaaacccactgaggtctgctgatggagttagctcatgcatttaggtaccatcaaaatatttaaagggaacgggcaagaaaaaataatagcaactgtgtgtacattctctcaagccttctgaaatgcgcgggaagaaaccccatgcagaagcctgacaaatcccaagaaactaagctntccatctgagtgccttatccaatcctgaagtactacatgaacaggtactgatggactaagcccaagttcctgaaacgtgtcaattntaaagagctcagtaccattatacatgtgatgaanggatatactatatgcatctga

SEQ ID NO: 85772 - DNA, 294 bp, Glycine max
atctttacgcgctaaaccgagcttggttgcgctaaacgcatagacccctgaatggttggctgaaaaggtcaactaagcgcatatcactgcgttaagccccacatcggtgcggtaattgaactttaaccagtgggcttagcgtggatgatgcgctaagtgccacttcatctcgggaaaaattttattgtaacagcgctaagcgcgctatcctacgctaagccccatatccattctataacttgagtttttaagatgggcttagcaggccaggaagcactaagcgccaatctctta

SEQ ID NO: 85773 - DNA, 193 bp, Glycine max
ttcaatttccagtagaatctcacaagaatgaatgaatagtatatacccattggcgtggcggtaagcgtactgatcgtgagctggcttcatgaaatctgcaattcaaattaattaattaattaatatatctcatcagaaataagtgttaaccgaactagattctgcaattcaaattattataataataataata

SEQ ID NO: 85774 - DNA, 424 bp, Glycine max
  unsure (1)..(424): unsure at all n locations
agctagcatgatnntacattctcccctntctcattcttattttatttcttctngacatcatcaaaatcttcatgatttacattctcctcctcttttatgatgacaatcgcctgtaggttaggagcaacaacaaagaaaaaatatctatttgcatatagtttactcccctatggttttgcaatgattgcttatatgagacagttgaagatttcatatttttcatatgtaaacaaattgtctcataaactatagataatttttcttactattntatcttttaatcatgtatacatacattcacaatacgtgtctataccccacacaaaccttttacaacaagacacttatatactgaaccatagctttaccaagtaaaacaagttccccgagtgttcgataatnggttcttaccggtttatactat

SEQ ID NO: 85775 - DNA, 195 bp, Glycine max
ttctttatgttggcttattgtaaatgagtttccttcttactaaactcttggggagaccttactcttacctcttttaccactatggtgtcttcttttggggagattcttactagatctccctttgcttttacttcactaagaaggagtagacctatttggtctataatgctggcttatacaggtttggggggatga

SEQ ID NO: 85776 - DNA, 421 bp, Glycine max
  unsure (1)..(421): unsure at all n locations
gcttntacttatgtggcatggcgggcttccttcttcttcttgttccaacgcgaactttgaccattgttcttccttcccgcgatgcttcttttcatgtctgcctgagagggcttatagcctaaaccatacttcccacgattaccttgggtatatatcagtctaagtatgccgccgttgttatttcctaaacccatcccgggctcataaccgttccccaacataactcgggccatcattaccgctgcatcggacagactaggctgcccaaagagggagtccacggaggaaatgctgaccacctcaaaagactggaaagcagtttctaacgattcttctgcggcttccacataaggcatggaggatgggcagcttaccaagatatcttcctcgcctgacacgatgaccaagtgcccttctacta

SEQ ID NO: 85777 - DNA, 403 bp, Glycine max
  unsure (1)..(403): unsure at all n locations
acacttggtttatactgattcactcaaatagagctacgtctagttctcttttatagaagagtaaagggttccattaatctaaaaatttgattaccaaacaagtattctatcctttcactcctggctatacaagtattcttctagccacttttggcactaccttagagttcccctgaatctaagaacacctaagtatattttaacaataagccacttctagctctcacaaacaaaattatgaatgaatacaatgattcgataacactcaatgagtggatgaacaataaagcttaagtaaagagtaagtttgcttagcanaggataaacaatgaaagatcaatcgtatcgtccaatgatttctgcatagtttcacttcagagatggtttggttctttatgatatt

SEQ ID NO: 85778 - DNA, 378 bp, Glycine max
  unsure (1)..(378): unsure at all n locations
agcttgagctggattgtactgacattacttttnatactntttantgtngcatttggcttattatggcattaattacaggccgtaaccagtttatattctgtaagcttagtgagttatacatttatttaaccttcaataaatcaaatcaaatactacttgacagagaaatctccagcagccgatgcatttattggggctaatggagacgtgccccangaataattttcaatattatgccccatgaaagatttctaagtatttattataatgatacccttaaaatttgctggatctacgtaatatatagtcatttgtataatatctatgtatgtatactcccatgcattcgtagatatataaaagctgatagtgtaatat

SEQ ID NO: 85779 - DNA, 183 bp, Glycine max
ttgggttatattgtggtttttccatatttttaaaaaatttttctactagaattcaatgtgagtttttctctttcacattgaatattgctggatgactatagcttctagaatttttaaggaacatatgaaatcttcatattatcgtttaaaaacatttctaaaatgtttttattattaaatatt

SEQ ID NO: 85780 - DNA, 465 bp, Glycine max
  unsure (1)..(465): unsure at all n locations
agctntcattaanagtctctgaatagcctgtggtaaatataacccaangcgatntangtaatggagagaatangatacatatggcgcccaaatcacaaatagtaaatcttaatgtaatttcaacttgatcattgagaagtatacaaagaaagaattcagtgcctgattaacaagtacaactcgttgatcatgaagctgctgaataatcatatcacaaactgttgtcttgccagatgctgcacccccagcaacacctgcatcatatgacaaaaaataagtgagtaagaatcattaagataaaagaaaagttgtaagaattgaaaacaaggtaaccaaacttaggacctcatgaagtatgaagtaagctctactctattaatataacatgctattttaattgacagaaattgcaaagcataaaatgatcgtgtacatttcatattaggtgagatgatattttgatgc

SEQ ID NO: 85781 - DNA, 342 bp, Glycine max
  unsure (1)..(342): unsure at all n locations
tgttatattcctctttcaaaccctcattcacttcaacagtttctcaattgtcgaaatcctaattttttttcttatagatttgaatgtgactaacttatattaaatcctcattgtttttatacgattgaatgttacttaattgttatgactctatctctcttttggcaggtattaacttatgactatcttatattaagaagataaagataatgtagttacgttactctntataataaactctttacattatgacacaacatttttcaaatgggagaaaagtgcatgctctagttagcgtaagactttttatgttgaaaggagctctgggatttatgcactaat

SEQ ID NO: 85782 - DNA, 457 bp, Glycine max
  unsure (1)..(457): unsure at all n locations
agcttgtgaggagcacatgtgcatgaagctttcttggtctcttctaaccaccactngggggatcatgagttcctgcagggctcttggttctagatcctgggacaatttgagatgtcgaatganaacatggacaattgttaacttgcttcagcttcttacttatgaaatcaattgaaacagattggctttccatatcattaaatttagcaagaaaacccaagttactgccattttgccctggaaaatgaagagttcactatattagaaaaggtatactagtacaagacatgtattataataactacaatgcaacttcggagataagctctcaccagcatgagtacctgagggcagccatccatgtttctgcccttgatttggtagtgggagatctgggtaagcttcatgatcctgtcttcttttcanattcggggatgacatcattgggaaattatga

SEQ ID NO: 85783 - DNA, 433 bp, Glycine max
  unsure (1)..(433): unsure at all n locations
cgctaagcgcatgatcgcctcgctaagcccagatgtgccatgctcagcgtgtgaacagccgctaagccctgaaggggcgcacttagctcaaaggcaatgtaaaaattaagctaccttgggcctatgaaaggagtangaagcagaacgaaaaaacaagtctcacaactctctattgaagatatccatattagtccctgaagtgtaaagcttctcatggctatgagaggctaaaccccctctngtgggagcctagtagccaacacccttgtaatgtaacttcttttattatctattaaatacaatttttgttttcattatctcttttcttctcttcatcatgaatgaatggtatgatcatccatgcatttgttttaagagttatacattgggaaacggtaatttccaagaattgtaaatgacatctaacaattat

SEQ ID NO: 85784 - DNA, 456 bp, Glycine max
agcttacttgaaataagtatttaatatattttgttttgatttaatccctattatctctccccctttggcatcatcaaaaagccaaagtacgtaagatatattaaaccatacataaatgactaatcatacaagagaatagaaaacaatcaaacaagataactgaaccattcatcaaacttagaaagataatacttcataaaatgtcatataatccagaaagtcattcataataaccaaataaaactactaatgcaggaagaaaaatactagtaagtgtttttaagacatagccaaatacacggcttgagatcaaaatactaataatactaaaaaataataaaatctaagatgatggtggtggtggtggtggtagatcaaagcatgtgcggatgtaactgacatctccttcaacctgggtgatccttgagtccatctcgtcgaatcagcatgtcactt

SEQ ID NO: 85785 - DNA, 397 bp, Glycine max
  unsure (1)..(397): unsure at all n locations
attggctgagtaatgacatttgtgggttggtgggaaacttggccgtataggaatggcagtcacagcatgggtttctccctctttctcaccctcttcatttgccccagttntctcagtcgtcctagtaggatgatcaaatttgcctcttttcggacctacatcgatcctttcactggcgaagaccaaatccgcaaagcttttgagggtgcatagcccaccatcttttcatagtagagtaccgataatgtgtctaccatcacgattatncgtctcctttttgcacatgttctgtagttgcatcctatccggaaccatatcagaatagtactgatactgnctaacgaaggcaaccattangtccttccaagtatgggactcggaagggtcnncagtagtg

SEQ ID NO: 85786 - DNA, 411 bp, Glycine max
  unsure (1)..(411): unsure at all n locations
aaaaaagaagagaggaaaatttccatcaaggaaaaacgagaaggaaaatttccaatcaaagaggaagcaaaaaaggagagaacaaaatttccatcaaggaaaaagagaggaaaggaaattcccaatcaaagagtgggagaaagcaaaaagaaaagaaagaaaattcccaatcaaagactgggagaaagaaaaaaagagagaatgtaaaaagaagaaagctcctggtcaaagaaaccaaaagaaatgtgccgagaggtccttggaccagacgatatctgaacaatacagaattgtcaccaaatgaacaaaagaaagaaaaggaaaccatgacctanaagtggttttctccctttgattaccaaccaaaatcctgtgcgctagcgactntttcgccccgcactaaacaaaaac

SEQ ID NO: 85787 - DNA, 292 bp, Glycine max
gtttccatcattgcaataaaactttgacctatagtctccacaaatcgaacaagcactaaagggtgatgcattgattactagaccaagactagttagtagaaagagtagaaaggctaccatctctgtttgaatatggaactaactaagaagaattagttcacatttacataaatgttcaaacttactattttttacaaaaaaaaaaatcaacatagttaatcagatatatgatgcatcaaataaaaatagtggctgggacgataaaaagtattaagttcattcttataataat

SEQ ID NO: 85788 - DNA, 332 bp, Glycine max
  unsure (1)..(332): unsure at all n locations
aacggagagtgataacggcgaaggtaaagacatgaacagaaacgataatggcatatacacgaatgaaagaaagaaagcttgcgtgttgggcgcaagattttatattttggaaggaaagagggaggaatacactctgacgaagtttgggcatctttagagcacaacacacaagagttccaagcccgacagatgcacaccctgtttctgtttgttttatttactcttacacataacacacttatcatgtatgttgttgcattccataattcctatgnatgatttcgagaattcaatgcttcttcaaccagaatatgctcccctttatcatgaat

SEQ ID NO: 85789 - DNA, 218 bp, Glycine max
  unsure (1)..(218): unsure at all n locations
aatgcattatattgaaggtgcaaccagagaaagcattcattaatatgaaatatttattaattttattaattaaataatattgttaaaaaatttaactgacatgcatatagtaatntaaattaagaatgaatctcanaaatattgtgcaactntntttcatgctctaaacaaaatatacattgactccagaaagttaataataatctccacaataaaca

SEQ ID NO: 85790 - DNA, 361 bp, Glycine max
tttattgaagttcatttaaatgaagagtaagctttttaaatttaatatctagagtaaactacacatatcatttctggaagttgcctttattatatctaatatctctccatttttgaactttacaaacaaaatcctctaattgtttagatttgggtactcctcttagacgtaagaaaagaatgttacaccaactcttctataattacgagtgtttaaagtaacgtcaaacaatgaagaaatatccggttataaaagataaatgagcagacaatgagatagatgacgaagtgtaaattcctatatttttcatgaaaaacaacatctagtgtgaacacatattattgaagtactctgttctgga

SEQ ID NO: 85791 - DNA, 442 bp, Glycine max
  unsure (1)..(442): unsure at all n locations
ttggcctcttttatatataatattatataattaacaaaattgaattgaaaaaatgagtgttgaaatttcttgtgcccaatccaagtttcattataaaaaaaaaatagcttttgatataatttaatttataatgatggtatatgagaatgaaaaaattttgatggaatttggaatacttgtgaatggtgatgtccgttgaccatatttttgagtatagattagcagataaagtaccaaattgcaaaggaagttttgccaaaagtgagagtagtggaagctgttagcatatttttttcaaaaaagaatctaatcattcatgagaccatngtttgctatgaagctntcatctcttcagttntaccgtctgataaggttgtgccttgaanaacgatcccacttcttttttttagggtatgctcccctctaataataccataattat

SEQ ID NO: 85792 - DNA, 375 bp, Glycine max
  unsure (1)..(375): unsure at all n locations
agtggcatcttcaacattgttgatggcgaggatgctaaaggacccgttcttccttagaggtgcattgttcacaaagagaatttgaaaagaaagaaaattttcaagttttatgagttttcagaagatgattttgcacaagcacaaatacttctgagagctaaaaatttcaagaacttctacaagtgctcgcgtttttccttttatagtttttcaaaaagaagagcaagaaagaatgacataacaactcanatctcattaaatatattttgaaaattgtttctcaatcatggccacaatggtgcacatttctcaatanaaggctgaaaacgtttttgtctttgtgaacatgtnntcatcttcctttgtacactttac

SEQ ID NO: 85793 - DNA, 421 bp, Glycine max
  unsure (1)..(421): unsure at all n locations
aaaacttattctcttctttttataccaagtattgacagctgggggccagtaaattttcttcccatcaaaccttggatgccactgtgatcgtatcttcctctcaactagaacttgacgggtattcaagtcatccttcatcttgccttgaatgttaaggagcgtcccaatcacactatcacaaacatttttctccacatacataacatcagtacaatgtctaacgtctagatcagaccaatatggaagatcaaagaaaatggacctcttcttccatatgtaagtcttacttttatccttctttttggtctttccaaatacagtattcangtgttgaacccactggtatacctgctaaccagtcaacggtatccgtgcaatatcgtcctcttgacttccattaaaagacttttgcagtcgtcta

SEQ ID NO: 85794 - DNA, 249 bp, Glycine max
aatatgtgcgcgcgagacaagcttaaattttcttttctcaagtcacaggatattactaaatatggcgtaagcctttcttctgcagattggggatcacggtggttctaatctgtaaacaaaccttcaaagttctttttttcagagaagccactgtgatggggtatttgggcattagctatggtagttcgactaaaatttttttgctacaagcggataaaccctttggtacaagttggaatagctatgggt

SEQ ID NO: 85795 - DNA, 460 bp, Glycine max
  unsure (1)..(460): unsure at all n locations
atcttaagcgactgggctgcagcttattcagacaagaaataaagatttttttatggatgatcaagacagtctctagagtcttagaaagggtatattaaataggaagggaattcgaattgaagtaacaaaaggtttggccaagaaatttaagttaaaaagtctttttcaacaaatctactctctggtaatcgattaccagaggatgtaatcgattaccagtgatcaaaactgatttacaacagctattaaaatttgaattcaaagtttgcactgagtaatcgattacacatatatagtaatcgattaccagtagtttctgaacgttttaattcaaaatttaaagcttgtaatcgattacacacatacntgtaatcgataccagaagaagttttcagaaacattctaacagtcacatctttttgtgggttcttgaatgagtatatcgcctataatatgtgac

SEQ ID NO: 85796 - DNA, 354 bp, Glycine max
catctccaaacttacagatattatccacaacaagcacaacccgaagcgacttcattttccgcatcaggaacacacacaacgtcgcatcggatgaagcttgatgtgccgagattcaatggctctgacgccacacgctggatcttcaagataacgcaattcttcgagtatcacacaacaccagatcatgagagactcacgatcgcatcattctatatggaaggttaggcattagcatggtttcaatggatgcaccggaatggtcaattatcgtcttgcccggcatttcttcatgctctccattcgcgattcgcatcaaccacatacgaagatcccactggactgctatgtaaactg

SEQ ID NO: 85797 - DNA, 309 bp, Glycine max
  unsure (1)..(309): unsure at all n locations
gatccttgagtcaccgcggctgcagctccacgtttgtagacttgaagtgttctttacttcaatccatggataaagaggtcataaccaccttctatatgtgtcatttgattaacaacttgtagggacggtatagggaatttaaaaataatgtgaaatagatttaaaaattcttatttaaataagatacctgacactcatgttacaattgaactttntttgaaggtcacatactaatngaaacttgaaagagaaagcatagaagaattaaaaatataattgaaatgcaaatatagtctattttaatatctc

SEQ ID NO: 85798 - DNA, 395 bp, Glycine max
  unsure (1)..(395): unsure at all n locations
agcttgagatgaggaagtgtagaagggtgtatctttcttgcttttattcgtgaccacagagtggtacctggagatatgtcgcgggggtcaagagaccttcgggacgtcaggtggggtgctattgcccaaaaccaagcttgaccaatcccgacccaacccgagcatagtcagtcagtgagaacctgtgatgtacctaaacaggcgagctcctagcagtcaacagataaaaggaacaaggaccacaaagcaaggagacttgtgtggtggctggccagctgtgaacttaattgatatatgggatatggcctctagtaatcgattaccaagggtgggtaatcgattacaaggcttanaaatgaagacaggaggctaagatggtctctgggtatcgatac

SEQ ID NO: 85799 - DNA, 168 bp, Glycine max
  unsure (1)..(168): unsure at all n locations
tcttaacatttaaaatactggaatcgatactccttctggtatcgataccagagagtaaactctttggtatgatttgtgaaacttctttgctactcaatgttgaaaactttnttagtcttatctgatgagcttctctgatcttgatctaagctgaacttgactgatatc

SEQ ID NO: 85800 - DNA, 448 bp, Glycine max
  unsure (1)..(448): unsure at all n locations
agctatgcatatgttactataatatngngaatctcttgtgtccacatcacatgtatcgnggctctaaagtgatttaagttatnttcatttcttttccatgtagacgttctggtatacttttgagggatcagcgacttacgttttaagattaaagatgtcttgtcttgtgttggcaattttattgagagaaaggagggaaaatgctaattcactattcggatgttgcattgctatatcttttttctggctattgttcatcgttttataactgttcgctgcttctgtatatgttgtccttgccaatnttcgngttctgattggagagatcagcgcggaaaccaaggatgaatggattaaaaaatagctataattaaaatatgtaataaataattatctctaataaagaaattatattttagatttaccaatgaataattataatgtatta

SEQ ID NO: 85801 - DNA, 490 bp, Glycine max
  unsure (1)..(490): unsure at all n locations
gcttctcatgcacacgcttcttccgtgccttggcctctgtcattcttttcttatgtcgagcatcaatttctttaaactgtgctttcattgcagcaatttcctctttggtaataggctttattggttggcgatgtctcctctcctcatctagaaaccacttgggcagtccttcatcatcaaacatgtacttggtgtatgcatcatccagcatctgctcccgttgctttttcctcatcatcttcttagcataagccaatatctcagcttttgcttcagtatcttcttcccattcatcagaggatgaatcatcacttgaatcagtatcaggtgcaggaactatttcanagtcatccgctgctttggatggttgaggctganggtgagctaccactgctggagctgctcgtttattttctttgacctttttggcaatggatatcttctccttaggctcatctatatccatntcatctttactctcatccttctc

SEQ ID NO: 85802 - DNA, 361 bp, Glycine max
  unsure (1)..(361): unsure at all n locations
ctcagtggtagagacaaaccaatataatttccagtgtctgatatttgcttatttcttttttgctttaactgacttatggtttgaatttgattntgtcattcgaaaatttcttctgatttacaaanaaatntttatcgtctaaacgagttnttgaaaatctattatctgtcttacgaagttttccttcagccgataactttgtttgcttaagaaaaggatttgaaaatttctaanatcataattcaacccctttntgtaatatttgcctttnaccattggtatcagagctcaacctctaagggttgagcactggaaaatgtctagaggaaaggatcctaatggcagataataatagtcaatt

SEQ ID NO: 85803 - DNA, 441 bp, Glycine max
  unsure (1)..(441): unsure at all n locations
agctaagagtcagatataatgtgctttttgttaataacatctgcgaactaaacacatccattaagtaaagcagtcaaaaattttcgcacttatgattaaacaaataaatcctgtacaatgtataactgtatatcaatatcatataagaatatctaactttggaaaattacatgtgcatatgtaacttttagatgaataagctaactaactaacaaactatatgttaaataaagatcattatgcatntatataaacatgcagtcacttgtaccaatttgcatggccaatatatagctcgatcatgcacctaaccattaaccatatgtctccacttaatcacatggtagggatatattnagcattaattgaaatataataggtcggggtgaagtggcanatgctcagtgaataatgattcaagaaacccannaaataaaatat

SEQ ID NO: 85804 - DNA, 458 bp, Glycine max
  unsure (1)..(458): unsure at all n locations
agctntanatangaacctatctgccatattattttttcccaanaagaaaaatatcttaagtgtgcttctattatctgaaatctacaaaaaaaaaaattaaattaaattaatgtcactataacagccttgcatgttcatcattattcattgcagatgcccataaaaaacttgtaaattcatttaagttctatgttttccttttctggttaaatgggtttcatttctatacagtcaatataaagcatctccatgctctctctattccctgttcatgtataagtttggtggttagattctgttattntggcagcaatggcgaaagcatgcaagtcgcaagaagaaattgcgagtgaagctaccaaacatgatttgaaggctctaaagaagcgccatttgcttgangaagctgctcatgctcccgttgtactagctctttctagaccccatcgttctcaagt

SEQ ID NO: 85805 - DNA, 385 bp, Glycine max
  unsure (1)..(385): unsure at all n locations
caaaacacggcccttaatgagcctatatctattgcatgcaagaggagagaggatgcaaaagacaatctaaagtctcattagcttcactcttaaatagaaaataaagaaaactaacggtgatgtagaagggtcttcctacaaaaagatgaaataattatttgctactactattgcaagaaatggagacatgaagaaagagtgtccaaagtgcgctacatggcgtgtaaagacaggtaaatcttttgctcttgtttggtctaaagttaatttatcttttgtacctaaatatacttggtgggtgaattntgatgctactactcacataagtgtgaccatgcanggttgcctgtggagccaatggccaaatgatgatgaaagaatcata

SEQ ID NO: 85806 - DNA, 489 bp, Glycine max
  unsure (1)..(489): unsure at all n locations
tgcagctanacagataaggaaaaggagatatctcgtcacacctcatcaatctcttcttctactcattgttccaccatggcccctctcgatttaatattggccatgggaaacagcttatttgaaacaaatctcgaanaactatatcacgttatttaaagattttatgataataaagtaatgcctcgaaaattaaaacaacgctatatttgcattgaaaaataatttcttaacattggctatattgatggttattattataatattttaaattacataaaatattttaatacataaaaatcaaattaaaaacaattattatatataaaacaacataatgttcttttatataaaatactagtattattagttcttacttaaatcgaaataagcacatatataaaatctaaacatcttttattagactcacactagtgtcatgatgaagaacaaatagtacatctaatatacttgtgacgtacgacntaatat

SEQ ID NO: 85807 - DNA, 309 bp, Glycine max
  unsure (1)..(309): unsure at all n locations
gataatnatttatgaaattattttttatattataaaaatataaagggtaattttttattnataattaaaaaattcacaattgaaaataaaaagtcacggtctaaattaataatacccncaattagactgaatagggaacggtaatgaacagtgatagattgaatagacttctaaatgattggattaatggattccaattatattaaatgctaactgatttttcttttttgagacgatatctagttcttgtactacatttatacaatacaacctatgcacttgcagattgacaatacttggcgagtattt

SEQ ID NO: 85808 - DNA, 316 bp, Glycine max
  unsure (1)..(316): unsure at all n locations
acgagcttgctaagccaagaaggtacgcttagcggtcgaaaccaagctagagaatcacagntcccatgaagacaacaacaaaactacaaagcctaggtgagtagaacaaaaacagactaaatgaaaaacaaaataaatgcacaaaacacaatgcacacatgcaaaatgaatgctaaactcaatagaagcaaaacatcctaagaactatgctcacatagacagtacgctatgaagaggaaaagatgtggaagagaaatgcacgaatgtgacgcggtgtacgatagatagatagacatggagggaatggcgaaacaag

SEQ ID NO: 85809 - DNA, 227 bp, Glycine max
ggtcaagtcataattctgatcataaaaattattgaaacaaacctaaaaaatctttatctatctatctatatgacggtttaacgtgattttttttatattaacatgttaataaaagatgtcaaaacgcaaaacaatgaactcaagttcccacttcccatgtgctaaacattagtagtttcttttgccgcaaactttgtcggggtaggacttgcttgctagttaattcc

SEQ ID NO: 85810 - DNA, 478 bp, Glycine max
  unsure (1)..(478): unsure at all n locations
cctcatcgnctctcacagnncttagttttgtgagccaatccaancctttgtgttggactctcagccacttatgatagccgccgatgatcccattactgcttcccctaagctctctgtcctttcttcacgccgcatcccatgccttgcgaactccttggagtaccctcgcgttgtggtcattgaaaccccgtgcgatgaaaggcgtgatgctttcgtctgatggcacttctctcatggggtagccaagctgtcttatggcgaggacgggattataattaatacaaccccttgttcccatcaagagaacatttggacatccttcgcatgaagatagaatcctgattcttccttccttctagcgagggaagccaataacagacgcccctccatgctagccaagagttggtcccaattcgcctttcctttttctacgcacgagcggtgaccttgtagcggatagacgggcctaccttcttgg

SEQ ID NO: 85811 - DNA, 285 bp, Glycine max
  unsure (1)..(285): unsure at all n locations
gggtgctttctccaaaattttttaccttntggaggaaactttgggaaggcccaagttggcctggttgctatttgcacccccatttttactaagtacacccccctaccttttttttggtgattctttttttcgtaaagttacggaaacttacgaatttcgtaacgatacttgttttctttccgtaatgttacggaaccttgcggattacataatcatcccctttttgacttacggaatgttacggaacctcactaattgtgcaacgatgcttccattttgatttcc

SEQ ID NO: 85812 - DNA, 369 bp, Glycine max
  unsure (1)..(369): unsure at all n locations
atttcggctaggctatgtttcttcgtgcgaactgaaccgaagttgtgtttctttcgactggcatgttctcantttgtcggccaggaaaacattagcccacctcggcataaaaaacatgattcaccgatatttgacaggaaaagaaaaatgctagccgacgtcggccaggatagatgaccgaccgatgtctgaaagagaagcatgaccggatgactccggtcgaacatttcctaacagatatcatccaagtattattcagggattgaatagaaaaaacaatagccgacatcggtagttaaatagccgtgactggatattctcggccgacattgcgcatattcttttacaaacgctggccgttaatatttc

SEQ ID NO: 85813 - DNA, 251 bp, Glycine max
cccactaactcctcttatcctttgcctatgcctaaatgtttatgtttttaagcataaagaaagtcaagccaaaggcggactatgtgaagaacctcatgagagagtcaaagatcaaagcgagagaaaaaataaaagctatgctaaacaagccaacaaagggagaaagaaggttgtcttcgaacccagagatagggtttgggtgcacatgagaaaagaaagggttcgaaacaaaggaaatcaaagcttcaacc

SEQ ID NO: 85814 - DNA, 300 bp, Glycine max
ctcaatgaagctacctatgctataaacagaaacatgtgtaacactttgtgcaactgtgatgaatgataatcttgagagacacacgtccaaagtcaacttctctccctctattcctccatcaattttgtgctcccccctctctctttctctctctctttcttatactacattgaagcattctctctaagcttcttatgcaaagcactctcttgagggtgaagcatgctcttccatagtatatcccctagtggatgacgcctcttctcacctattgtcctttatcttctgatgcatctgtat

SEQ ID NO: 85815 - DNA, 296 bp, Glycine max
  unsure (1)..(296): unsure at all n locations
agaacttcaaaaaatcatgaagaattcttttcccacatcgnnctcgtgggtgatatccactccacaaggtttgcaataaaagagaccttcaattctattacacaacgcggcggacaaaagtgggcagttaacttgaatggtcattattgtcaatgcacaaggtattttgcgcttcactatccatgttaacacattattgcaacttgtggttacgtgagcatgaactattaccaaaatatagatgttgtttacacaaatgagcacattttaaaagcttacttcgcacaatggtggcc

SEQ ID NO: 85816 - DNA, 260 bp, Glycine max
aaagaatttgggccgaattaaaaaagggggggcactaaatttaaagaagaaaaaaggagaaaaattgaacttttaattgtgttttacaagaattttattcctcaaaattaccaccagtggtacacctgcttctatttatagactaggtagcttcctttaaaagctttcttgaaaaaactttcttgaaaagcttttttgagaaaacttccttgagaagctagagcttagctacacacacccctctcattaactaagctcac

SEQ ID NO: 85817 - DNA, 416 bp, Glycine max
  unsure (1)..(416): unsure at all n locations
gtggtacctggagatatgtcgcgggggtcaggatatccttgtggacgtcaggtggggtgctatngcccaaaaccaagcttgaccaatcccgacccaacccgggcatattcgtgcagtgagaacctgtgatgtacctaaacaggcgagctcctggcagtcaacagattaaaggaacaaagaccacaaagcaaggacgcttgtggtggctggccaactgtgaattttgtgaatatgtggattatggcctctggtaatcgattaccaagggtgggtaatcgattacaaggcttaataatgaagacaggaggctaagatggtctctggtaatcgattaccaaggggtgtgatcgattaccatgctctaaaacgaagtcaggaaacttatggagcctctggaatcgactaccacctgtgta

SEQ ID NO: 85818 - DNA, 235 bp, Glycine max
  unsure (1)..(235): unsure at all n locations
ggatgggggaaanatgggtgatttgtgaatatggatagtcgacttgcaccattgcccgaccgccacctaataccacatgtgacgggtaccccataatcctacaagcttgaaatgaggaagtgtggaagggtgaaacttcctacttttattcaatgaccacagagtggtacctggaaaaatgtcgcgggggtcacgagaccttggggacgtcaagtggggtgctattgcccaaaac

SEQ ID NO: 85819 - DNA, 448 bp, Glycine max
  unsure (1)..(448): unsure at all n locations
gcgtgggtctgggagacgatatgtcttgtggtcgcgatatacgaatattatgttccgagtacattggatntggtacgaccatgccctccttatttccagctgggaaattggcgagtggaggaatgccccggcatttacgcaacgagcataatgtaaacctttacggttttaaaagctctatagttgggcctatgctttagagttttccttttgtaaggctntgtgtctcttgttttgaatacaggatctttcttatctgtcctacgtctctacccattctcatcattgcatgttacttctttattttgaaacggagatcgatgacagtcccgaagtctaatacctagacccgttatcacttcagcagtacaatcaacgaaagaaggaagagatgggactccccaaataaaagaggcgcctgagacagaatgggctataaaaacaacta

SEQ ID NO: 85820 - DNA, 264 bp, Glycine max
tctatatttcaaacttcgctcaacatcattcaatatctttccactctttctatagaaatttctgattcttttactcttcatctttctaaaagtgtgggttcaaaactttctcttcctagaaaactcctttgttcaaaaacttgtgctattcatctttttcattctcttctccctttgccaaaagaatgaaggactaaccgcctgagatagcttttgcttcccccttacgaagattcaaaggactagccacctgaaaattctttg

SEQ ID NO: 85821 - DNA, 331 bp, Glycine max
  unsure (1)..(331): unsure at all n locations
atatttggtggtttcttactgagaaaaataatgaatttgcctactctaaatgtggaaaacatctctcaatctttatttcatgtagacattgcgataatatgtnttttccttctttgttgcatttatacgtaaccaattaattaaatctgaatatacaatatgaaacttgaagctatatatttatgttagcaaatactgtgagaatctataattattatactcaattgattagtgaaagaatgagttgagaatnttttggtgcccaacataagttatctctatatgaatagtcggcaacttacgttttttttgtttattattagtcaacaat

SEQ ID NO: 85822 - DNA, 143 bp, Glycine max
ttcttcaatcctccattttctctcctttgttgaaaggaagccccccacttatggagagctaaatcctctgttggttcttccttgtaggtacttgatgtaaatacctatatatccatttaatgatgttttgtgtgttcactgcg

SEQ ID NO: 85823 - DNA, 457 bp, Glycine max
  unsure (1)..(457): unsure at all n locations
accccaagaaaacgtctcattcttcttcgccagctcattgagaggtgatgttattgtagagaaatacaaacaaaccttctatagaagcttgctaacccatggaagctcctaatatctcccacactngttggggtgggccattcttggatggccttgattttctcaaggtccacttggaccccatntttaccaactacaaaccctaagaaaactatagtatctacacaaaaggtacacttntctatatttgcatagaggttgtttttcccaagtactgaaagaacttgcctgagatatcctaagtgatcatctaggctcctactggacactaaaatatcatcaaaataaacaactacaaatctacctatgaaatcccttaagacaagatgcataagcctcatataggtgttgggtgcattaatgagcncaaatagcatcactagccattcatacaaac

SEQ ID NO: 85824 - DNA, 225 bp, Glycine max
cacccccattttacggctacacccccttgccctttttctggagaagcctcttttcccaagtaacggacactcagggacctctaaacgaaactggcctcctttcaaaatgttagagaacgttcgcagacacatcatggtcataccctaatcacgacggggacctacgctagacgacatgcgacctttgaatgggccctgtcaggtgcctgtcacccatcattacgc

SEQ ID NO: 85825 - DNA, 278 bp, Glycine max
tatcaatgttattccaacaatgccttatttctgaataaaactctatctaataagcaagttccctgagttcgatactcggatcatttccgtttaattgtaaatacttgacgacccgacgaatcggaatttccttgataatatttgtataaaggaaaataggaccataaagtaactgcaggggaaattcaacaaagtatttatggcgccgttgccggggaatttaatgccttatatctttctctctgattcactgattctctctgttcataatttagtta

SEQ ID NO: 85826 - DNA, 462 bp, Glycine max
  unsure (1)..(462): unsure at all n locations
cacatctcaaaacttattaattctattcagnnnttctttctattaagatctggtaccatttggaaagcatcttgtaaaattttaataggctcgtgtttttcctaccctttagccattcaagtttagatctcttaagttttatttccattaagatctgtaccccttttaattattaggatggtaactaaaataataagactagtcagatctcagttaagaattcggaataaagtaatgggacacaggaaaacaataaccatacataattctagtttaaatttgtctggcaacattgaagcattttatatatatagaaagatgcacaatatataaaaagacaactaagcacaggaatggtgacgtagtcattatttccgattaatgctccactaacatgctccattgagatgccaacaatctccaaaaccttntgttgtatatcacatttataaattcttagac

SEQ ID NO: 85827 - DNA, 265 bp, Glycine max
gaaaaaaaaactttgctgaaagaggaaaggcaagggggaactttttgtgataacgggaacacaaaggggacccggaaaaaaggcgcggggggaaagaaaactggggaacgaaagagggggggcaatcgcccaaaaacaaagaaagaacaaacccgaaccaaacaccgggaaaagacgggcaatgaaaaacctgtgatgtaaccaaagcaagcgaagctccccgcaaggcaaaagaagaaaggaaagaaagaccacaaagcaagga

SEQ ID NO: 85828 - DNA, 443 bp, Glycine max
  unsure (1)..(443): unsure at all n locations
gtgcatttgtgtgcaaattacatttccggtacaccacaacanaatggtgtatcatataggcggaatanaactctaatggatatggttaggagtatgttaatcaattagactttatccgtatccttgtggatgtataccttgaaaactaccatgtagttgttgaacagggttcctagtaaggtagttccaaagacaccttttaaactgtggacaaataggatacctantataaggcacctgcatgtttggggttgtcaggcagaaataatggattataatccgcaagatagataattggatgcaagaacaatcagtggatatttcattggtatccaaaaaagtaaaagggatatgtatattgtctaatatagatgaaattgcaaactggaatganaggtattggaatgataaatcaggggagatagtccacgagaatgaaataa

SEQ ID NO: 85829 - DNA, 415 bp, Glycine max
  unsure (1)..(415): unsure at all n locations
tcaatgcaaaacgatattgggtgttaacacatggtcaaggtaggtggctgtttttgcatgaaccttctcccttaaggttataaattcattatgcgactgcaattcctcagacagatcctcaagaaacagaaagtgaggcattgagaggatgaaaagcgaggcacttggtacatctaaacatcgtgataacgcgtctgcaaccacgttagttntgctcgttctatattgtatagagtaatcaaaacccaacaaatgtgccaaatatcggtgttgctccggcgtttgaacaacctggttcattaattcttttaagcttctatgatccgtcaaaattacaaagtggtgccccataaggtattgcctncaattcttaacagcagtggtaatggcagctagttcacgaacatatgtggag

SEQ ID NO: 85830 - DNA, 293 bp, Glycine max
  unsure (1)..(293): unsure at all n locations
actctctcgggggtgaaagcaaaatttttacttatctctaatctatgtttcattttatagntcattgatttgtgtttaggttttgattttttttattaagggttatactatacaagtgagaaacaaagattcatttatattttgagaataatattcaagttggggaggtatcatcttttcctgatttttgttatcttcatgaacttgtaatacttttttgttgtcttcttgatctaaaattttatttttaatctcttggcctgtttttctttcttttcaatattttaaataag

SEQ ID NO: 85831 - DNA, 377 bp, Glycine max
aaacaaacatcagagaaatgataagcgagcacgaaaagaatgaacttaagtgataacagacattttaaatacaaattataggtataccataacaaataagattaaaaatagatttgaaggaccatcataagaaccatgaatgaaatctgtatgcatcgaatctaagggactcataaaccatgttaaacttgattgttgattgtgaacaagtagaaattatggttgtgtgaaaaattttagagcaaattacagcaacacccgctgagctgttatcatattacacataaccgcaccctttgtgatttactataaaacagcccgtaagtttgaaacaccacttagctaccttatatgttgaaacatacagtgccctcctc

SEQ ID NO: 85832 - DNA, 350 bp, Glycine max
  unsure (1)..(350): unsure at all n locations
tggcaacaatagagacaaatggaatgtttatgatgtgtggagagtcatctcacagaacattgatgacgttgataaaaatcatgatcatctcatcttgagggatgaggcacctgctcatggggtaacttttcctcgcccaatgtggtggccatacgatgataagttcgaaccttaaagattagtatgaagagattgatggactttngtgctgcttgttccatcatggaggagaaagcgaagggaagtctcattctaaggcggattcgtattctgttgttaagacaccttctgttgatagcacctagtctatttgaaaagtgatctgctttctacctcttgtccttggaata

SEQ ID NO: 85833 - DNA, 329 bp, Glycine max
gcttgtgagtaaactctactgctatttatatatcatctgccttttgaaacaggatgaaattctgatccaatacaagtttatatatatatatatatatatatatatatacatgtatatgtatatatatatgttgccggcatgagaatacaccttttttataaaaagaccactcatctttggcccccgatgttgattagagaacacggattactaccatgaacaatcgcctatctccatcagaaattatatgaaatacccactttaatatatgttcttgaatgtcagtctctatatctggtatatatattaaagaccgcgcttaagtgaca

SEQ ID NO: 85834 - DNA, 379 bp, Glycine max
  unsure (1)..(379): unsure at all n locations
tagacaagtggcctcagatatcttaagaagtggnggttgaattaagatattctaaactgtttcccctaattaaaaatctatttcactttttactcaagttatgaattcccttaatgacaatcttcttaaatattaattcaaatgaaacaatttgaatatgaatataaagcaataataaataaaggagattaagggaagagaaaatgcaaactcagttttatactggttcggccacacccttgtgcctacgtccagtccccaagcaacccgcttgagagttccactatcttgtaaattccttttacaagttctaaacacacaaggacaatccttcctttgtgtttagagatcctttacaacaagagactcacattctctt

SEQ ID NO: 85835 - DNA, 288 bp, Glycine max
tgaatgccatgtccttcttcacatcacccctttctacaactaattctcaattctcattccttatcccaaatcatcctaataatacaaaccccaaacccatgattggtcccactaattgccccccgacaagcaccatggatggtcccatatgactacccatcatctaatgtgtgtccaacttcatggaacaccggggcccatctttgtttcaagtgttaattagatttgggagacatgtggtccccaccatgccctaagctgcgagacagtggcattagttggcaaggc

SEQ ID NO: 85836 - DNA, 456 bp, Glycine max
  unsure (1)..(456): unsure at all n locations
aagcgactaacanactccctcaaatntacatgttttcttgtcctcaagcaaagaaagaatagttcacttgtcctcaagtgacaaagacagtggccaatcaaaagaaaatagtgtttgattcatcaaggacatcaaccatatgaaatgaatatcatggaatgcttaaatcaattacttctcacaagcatgccaattttcaaagattctcacaagcattagagtcacagctgatataagctagtaagcatgacaaaaattaaggaaggatcatcaaccaaaacctcacagtcattgtttcacacaaactcaagtgtttaggcttattccatcataaacaaccaacacaagttccaacctttgcatttcatctcctatcatatagcaatgaacacacaaaaatgaatccgaaggactttcttggcttgtaatgggtaggctgcaacaatcatgggtttc

SEQ ID NO: 85837 - DNA, 292 bp, Glycine max
agtgaaagaatgctgaaaaccctaacttttgcacaagttctaaggttgtagacacggagatggacaagaaaatccgcggtattgtgagtagcattttgaaagaagcttctgtgcctgatgctgaaaaagatgttccaacatcttccaccccgaatgtttctgtgcctgatgttgagaaagatgttccaacatcttccggcccaaatgctgaagccctcccttcacccagtgaagaggaatcaacagaagaagaggatcaagcctcaaaggagactcctgcaccacgggcacc

SEQ ID NO: 85838 - DNA, 460 bp, Glycine max
  unsure (1)..(460): unsure at all n locations
tgcaagctttgtgactntgtgcgagtgagcatcactattttcttanggagatggaatgttcttacttttgcaagtaagttaagttatgtgtatattaccatggtggatggttgtggtccctttgtggggttgtttggttgatgtggtccacggtttgttttccacgtgagtgttgattttttatttatgttntgcactccacggngtgtgtgttggtttttgttgtcttgttcaatgttttttatttattggattcacatataaagtgggttgtattgtgtaaaggaaaatttgttttcttattatctatcattttttaggccaactgaagaacgaacaatgaggttaaaaattcaccatggtgggatgttcatttattatccctttactttgtatatcaatggtcagatcgaagaagaataatgggggtgggatgtggatactatgtcctatattgact

SEQ ID NO: 85839 - DNA, 222 bp, Glycine max
agggcaaaactagaaactggtcaaggaaccaatgtgagccaactcattagaccaccaaacattggggacaaccaaatcaatgtcccttcatgggtctacaacaacctcaaccacaaccaattcatgggagcaagcatcaaggaccccacactaatatacgggtagggatgagtttataaaaatatcttataaatatttcataagaacattagagcttaattt

SEQ ID NO: 85840 - DNA, 316 bp, Glycine max
  unsure (1)..(316): unsure at all n locations
cccccctttnngaagatgatttcttctgaaatcaagaaacacacacacactttttctctntntcctaatcgatcactcacataaaagtccattctccccctttgtttttgaatttatgcttctcttaaaattaagttgattacttatgcgagttcttgatttgatccctatttctctccccctttggcatcaacaaaaagccaaagtatgtaacaagtttgaatcatacaaatacaactaagcatccacacaatcattcataaaaatatttcttaaatcatgaagcaagaaccatgaatagatcaaatataaaatc

SEQ ID NO: 85841 - DNA, 212 bp, Glycine max
ttttaacttttaaaatgttcaagaaactagtgcaatagtttcaattgatgatttgggtgtaagtttcaccatatgacaatcatgtcacaactccacatgacacgataatattaatatttaatgatttatgcgtatgcttacccacatggcattcatgtcgcaagtatgtatcttaccttgtaattatttttatcttttaaaatgtttatgga

SEQ ID NO: 85842 - DNA, 426 bp, Glycine max
  unsure (1)..(426): unsure at all n locations
agcttcgcacttgataatggagaacacatgatctgcgctaggcaatgacattcatggtgctccgaacaaaggtggagtatggaggatngccttgagggtcctctcttatgcaatcatggaacacagccccatactcgaaagtggaggacacatgaacagccctaagcaagaacattcatgcagctccggaaaaggatgagaatggaggatngccttgagggtcctctcttatgcaatcatggaacacaactccaaactcaaaagtggaggacacatgaacagccctaagcaataacattcatgtggctccggaaaaggacgagaatggaggaattgcttgagggtcctctcttaggcaatcatggaacacaactccaaactcaaaagtggatgacacatgaacagccctaagcaataacattcata

SEQ ID NO: 85843 - DNA, 325 bp, Glycine max
tgccaaatgggcggaattcctaaaacaattcccttatgttatcaaacataaaaagggaaaaggtaatattgtttccgatgctctttctcggcgtcatgcattactttctatgcttgaaacaaaatggattggtcttgaatgtttgaaaagcatgtatgaaaatgatgaaacttttggagaaatttttaaaaattgtgaaaaattttcagaaaatggtttctttagacatgaaggctttcttttcaaagaaaacaaattgtgtgtgcctaaatgttctactagaaatttgcttgtttgtgaagcacatgaaggaggtttaatgggg

SEQ ID NO: 85844 - DNA, 418 bp, Glycine max
  unsure (1)..(418): unsure at all n locations
gatcatcaanattcaatggataataacataatgaatacaacccataaaaagtgcgagaagaataaataataaacatattctaagagtaacttgaaagtatctgaaatttgatatgtaccatggtgcatgtataatcctctatgcattggatacaaacatgaaaaacgtgaggacacagcagatcatagaaagagtgatagatgactgatttttcacaagcctaaattgaaaaaagctaactaatggtcctaattgtggtcattattcaattgattccaattccagtatgttttacagaaaaggtttatgatatcactccgttgcgttccacattttttctttatactacattcatgaaggtgtcgtaaatttacagttcacaactgttcaagataactaagaatacctaacaagtcag

SEQ ID NO: 85845 - DNA, 235 bp, Glycine max
ggagaaaaagaaagaacgcacccgagaaggaacgaagaccctggaaggcacgcccgttacctgggagaaagagaaagaaaaaaggttgctgaaaaaggaaaagggacaaatggtagatagacaagggggtatagcaggaagaaaaagagaaggggctgaggctgagaggaagaaagctactgaagctcgcaagttactagaagaagagaagaataaggctgccgcaaagggggag

SEQ ID NO: 85846 - DNA, 327 bp, Glycine max
ttcaccttcactccttatgctcccatgaacccgggtataggggcctctttcactcacagtgcgtgcaaatagtgttggtgcttgtgtgcatcatatgaatatatatttacttcatgcatacatttaaaacgcactataagcaacaaagagtttatatacactagaacataatgaaaggaaaccaactaaggggtaagtcacggtaaaacattgcacaatattaaatggcctaactctctataaacagtccccagtggagtcgccaactgtcgcaacctacccttcggcgggagggcgacgcgtgactcgcggagtcaccaccaacgt

SEQ ID NO: 85847 - DNA, 369 bp, Glycine max
  unsure (1)..(369): unsure at all n locations
caactcctcatatactagaagatgctcaactcagaatttcatctgctgaaaccacagctgctgaagcagctcatctgattgaaaaccaaattagagatgcgattgagggtacactatcgtccatagtgaaaaatcaaatcatgctatanaaagggctctatttgtggcagagaaagcataggaacttgcaaagaatgtcacggcaacatttatagatggtacatccccatatactgaaatatctgctgtcgaggcagacaatatcaagttacacggaataataattgatatacaatctgagttgatgatggcaagacgtcatgctgataaactgaagttagaatcggagaacaccagacaacacctaca

SEQ ID NO: 85848 - DNA, 447 bp, Glycine max
  unsure (1)..(447): unsure at all n locations
atgggggacccatcacatgatgtactatgtggcggtcgggcgatggtgcanaacgtttctccacatccacaaatgacgtataacccaccatcccctgttgcccacctccaactgagctcacgtactcccacgtagcccttatcctcgttcctctcaacgccgggtccccatcaatcctcccaagcgttcacaacatccaggtaattccacatccaatcatcatggactcacaaaaccaagcaaaacagggcaaaggcagaaaactctgcccataacacaaaccaatatcacagcttttcacatacaaataccccagtaacatttccttcgntccaattcgttaaccgttggaatcgactcgaatatttactggaagtctctagtacataagtctacatntntaaccgtgggatctgctagcanatgttcataaccncatatgtacta

SEQ ID NO: 85849 - DNA, 324 bp, Glycine max
  unsure (1)..(324): unsure at all n locations
actccttattactctcgcttctatataagctgaaccattttatcaataattttatgttgaggnctattcttaaaaggagagtttatctcttttatcttagtgagagtgattctcctaaattcttgagtgattcaagaacaccctggctgtatcaaaggactgtcacaacctttgtgtgttgccctcgctggaaagagtgattctttccttcctttcatcttcacccttgttctttcaaaccacaattccagaaaatccacctctgcccagaattatctcgtggccataactcccattntacgcactcaaattaagtgattcttg

SEQ ID NO: 85850 - DNA, 264 bp, Glycine max
aaaaaagagccaaaaaggcagtataataaaggaaacaagccagggggaaaagaagagtaatccagggaagaaaaataatggagggaaggcagaccaaacaaagaaagcacaaaaaataaagaaaaaaggggaaataaaaaaaaaaagacccactaaagaaatcagaccaaatcaaaagcccggccaactgcaccagtaaagaagaagaaagaagaaggggaagaaacaccgaaattccaaaagaaaaacatcgcccaaaaaaag

SEQ ID NO: 85851 - DNA, 187 bp, Glycine max
ccttcctttatttataatatcccaaccaactctgtgctgttcctcaatctttctacatatctatctatctttctatcatcattacattttttaacatccttaataaatgagaacttttgtactactttttcctattactttgtgcaaagatattctaagggaaaaattaccgaagaactattaaaaa

SEQ ID NO: 85852 - DNA, 434 bp, Glycine max
  unsure (1)..(434): unsure at all n locations
ttcctattatttactttgtgttctggagacagganaaattattttgacattcattgagctccttattggggttgtggttattgtgggtgtagctcgctacatcattaaagggtattccgccactggtgtgttatttgtcggtggcctgttattgctgattatcagtgccattatggggcacaaagtgttaccgtccagccaggcttcaacaggctacagcgccacggatatcgttgaatacgttaaaatattactaatgagccgcggcggcgacctcggcatgatgattatgatgctgtgtggatntgccgcttacatgacccatatcggcgcgaatgatatggtggtcaagctggcgtcaaaaccattgcagtatattaactccncttacctgctgatgaattgccgcctatttgtcacctgtctgatgtctc

SEQ ID NO: 85853 - DNA, 127 bp, Glycine max
  unsure (1)..(127): unsure at all n locations
aggtaaggggagttaatatantggaatggttttgacgccagcttgaccaccatatcattcgcgccgatatgggtcatgtaagcggcaaatccacacagcatcataatcatcatgccgaagtcgccgc

SEQ ID NO: 85854 - DNA, 449 bp, Glycine max
  unsure (1)..(449): unsure at all n locations
actacaataactnttatctcggatatccganggagtctctgtatatatcaagacgctcganatggaatacagattctcttagcaaattaaaacgacaataactttctacacggatgtccgattgggtcacgtaatatatcgagtcactcgaaactcaatacagaagctgagagcaaattataacgacaatgacttntaactcggatatcccattgagtcccgtaatatatcgagacgttcgaaattgaaaacagaagctgggggaaaattctatcggcaataactttttactcggatgttcgattgagtcccgtcatatatcgagacgctcgtaaattaaaacgaaagctcgtagataattcatacgacaaanactntgaacttggattttcgattgagtcccgtaatatatcgagaccctcgaaattgaatatagaagctctgagtga

SEQ ID NO: 85855 - DNA, 191 bp, Glycine max
ggggggcaggagaccctggggacgacagggggggtgccattgccccaaaccaagcctgagcaaacccgaaccaaccccggcataaacggacagagagaacccgggaagtacccaaacaggcgagcccccggcagccaacagaaaaaaggaaccaagacccacaaccaaggaagcccgggcggcggccggcc

SEQ ID NO: 85856 - DNA, 358 bp, Glycine max
  unsure (1)..(358): unsure at all n locations
ctagtcaaagtctgagagaccatacaagcttcctatcgatttctaaatatgcgggccattaagtctatcatatgctgacaatagccgataagcccatgaatctctctcggggcggagtatgtgtccgccatcgtcttggccttggctaacaaagcggagaagttcttgactcccggttaatgtaagagcaaaccgatccatccacatggtngtctcttggagtaaaaaacnagcacccttcctctaaccctttttctgcgttacgtgatcatactcttcgcgacctatgctctgggccatggttgacctaatcttttggtcttggcatgatactacatgtggtctcgtttcataacac

SEQ ID NO: 85857 - DNA, 390 bp, Glycine max
  unsure (1)..(390): unsure at all n locations
atcaacacanaaacgtgattcatgagtagatcgagtaaatctgaaccatcagaatgcaagaacaagtgtggatctaagatttaatgcagttattttgttaatctactctacgatggaggatagatagggagaataagatgaataacacgtaattgaagtgaattgaccgaacataatgatagaggaagcaaaagaacatcacatagacgaagatgctcttgataccacatgatgtagctccatgtagagcttgtatgccttggatcttcttcatcaatgaagtccttggcttcttgaagattaatggcagcggaatggagatggaagaatgatgattggagatgccacttcaaggagaagatgagtcaagaagaagctcaccaccatagc

SEQ ID NO: 85858 - DNA, 264 bp, Glycine max
catgcttttcactcccttctccccttggcaaaaaaaattccccaaggactaaccgcctgagactctttctgtgtctctcttctccctttgccaaaagaacaaaggactaaccgagtgaattcttttgtgtctcccttctcacttgtcaaagaattcaaaacgacacaatctgagaattcttttgattcttgcctttcccatatacaaaagatttcaaaggactaactgcctgagaattcttttgtatcccctttcacaaagttt

SEQ ID NO: 85859 - DNA, 181 bp, Glycine max
tcaccataacccgcccgggccttttcttccatgctaaaatgtagcaaagggattgatccaccaatgtctgatgagtggaaaatgaggccgcaattatactgtgccacgtggagatgtattttccccctgctttctttgacatcatgattcacttgattgtgcatctggtcagagaaatcaa

SEQ ID NO: 85860 - DNA, 316 bp, Glycine max
  unsure (1)..(316): unsure at all n locations
accaaannccacataaaacnnataaatttgttcatagntaacataaaactaagaaagggtcttatttgaagttntattctatatgcaaaattataaaggtttaaattaagtttggacaaaagcatatctttataaatatctactgggttggtatatcagaacanaacgtccaagaggaaaaagaaagacgaccatgaatggagtattaataatacgttaatcttttttaatatttatattttagcttcaaacaattatctaaatttaacagtattcattcaattcatgaaatacttgctagaggatgatgtaacac

SEQ ID NO: 85861 - DNA, 260 bp, Glycine max
gacttaacctttcaacggtcaaaggcccactctgtgtccactcataacaccacattctcactttccaaccccaggttaactctacatttcatctctaacagttttccatgggccatttcagcatataaacatcacaaacatcatcacaaaaaccctaaaacaaaatgggtatgtttaactcatccaaacatggcaatttcaacaagctttcaacaagtttcttcacaaataactatcatgaagcagaaaactggcgagac

SEQ ID NO: 85862 - DNA, 440 bp, Glycine max
  unsure (1)..(440): unsure at all n locations
gaaatgatntctataaaaaagttagtcgtacaaagcgactaacaaatctccctcaaatttacagtttttcttgtcctcaagcaaagaaagaatagttcacttgtcctcaagtgacaaagacagtggccaatcaaaagaaaatagtgtttgattcatcaaggacatcaaccatatgaaatgaatatcatggaatgcttaaatcaattacttctcacaagcatgccaattttcaaagattctcacaagcattagagtcacagctgaaataagctagtaagcatgacaaaaattaaggaaggatcatcaaccanaacctcacagtcattgtttcacacaaactcaagtgtttaggcttattccatcataaacaaccaacacaagttccaacctttgcatttcatctcctatcatatagcaatgaacacacanaaatgaatccg

SEQ ID NO: 85863 - DNA, 279 bp, Glycine max
tgaaaaccctaacttttctacaagttctaaggaagtagacacggagatggacaagaaaatccccggtattgtgagtagcattttgaaagaagcttctgtgcctgatgctgaaaaagatgttccaacatcttccaccccgaatgtttctgtgcctgatgttgagaaagatgttccaacatcttccggcccaaatgctgaagccctcccttcacccagtgaagaggaatcaacagaagaagaggatcaagcctcaaaggagactcctgcaccacgggcacc

SEQ ID NO: 85864 - DNA, 433 bp, Glycine max
  unsure (1)..(433): unsure at all n locations
tgcttcacctctcaatgatctggtgaagaagaatgtggcatttacgctgggtgaataacaagagcaagcctntgctttgctcaaagaatagcttactaaggcacctgttctagctcttcctgagttttctaaaacttttgaactataatgtgatgcctctggagttggagttggagttgtattgtaacaaggtggacaccctattacttattttagtgaaaaacttcatggtgccaccctcaaccaccccacatatgataaaatgctntatgccttaataagagccatccaaacttgggaacattaccttgtttccaaggaatttngtattcatagtgatcatcaatcacttaagtacattagagggcaaagcaagttaaacattaggcatgcaaaatgggtaaagtacctagagcaatttccatatgttatc

SEQ ID NO: 85865 - DNA, 134 bp, Glycine max
ctatttacaatatcttataaggaaaattgagatgttataatccaatttctcctatataaaatgggctattaaggttggagtaaactaactcttaatccaacttatattttgatacctacttcacctttacatca

SEQ ID NO: 85866 - DNA, 267 bp, Glycine max
aaacaccaggcccatccagggggcagatcccagtgtccgaaagagcaaagaaggacactgttcatcaagacaagggaggccgatgtctattgaacaataaactcccattgcggcagcaagcatgggacccactcgcccgagagatccaactttactatgcaatataaattatcgccttatagaaccgtggagtgatacctaactgaagatactttgaaatagtatccctttctcaaatagggataatctccctttattactgcttct

SEQ ID NO: 85867 - DNA, 312 bp, Glycine max
tttttcccaacatccaagggaaacaaggaggcatttttgtctaaacgatcacagggcaaaaaggatagagcaaaagggcagaaaactctgccaaaacaccaaccgaaatcacaggcttttctcacttaaagaccccaggaacaataccttcgatcccaattcgttaaccgttggggggactccaaaattttactggaagtctctagtacataagcctacattttgaccgttgggatctactagcaaacatccagaactcattctgcactgatctttccccaaccagcaaatgcatagcatttttctgcactt

SEQ ID NO: 85868 - DNA, 401 bp, Glycine max
  unsure (1)..(401): unsure at all n locations
cgggagacaaatgttctagcgttgcgatatgcgaagatgatattccgagtactttggatttggtacgaccatgctctcctgatntccagctgggaaattggcgagtggaggaacgccccggcatttacgcaacaagcataatgtaaacctttacgggtttaaaagctctatagttgggcctaggctttagagtatttccttttgttaaggctttgtgtcatttgttcttgaatatataatacaaggatcttacttcatctgttccgtggctctacccattctcattcatttgcatgtttacttctttntctgaaacggcagatccgatgacgagtccnncgaaggtactaatacctgggacccgtctatcgacttcgagcaagagatgaatcatacggaag

SEQ ID NO: 85869 - DNA, 137 bp, Glycine max
atgccccctgcttccccttcaagatccattcccccatgaattaccttcacccaacataatccgccatgtcccatctttacccgcacccgtatctgttcccttcatagaagattaaggaaagattgatgcgcttgaag

SEQ ID NO: 85870 - DNA, 225 bp, Glycine max
tccggcacaaagctcaacccaaggcaaaagaacgcccggaagaataagctcgggaccaatgtccaaccacgtcaagaagcgaaaatggaaaaaaaccaacaccaaagaaatcagcacccacctgaggaatctccacaggcccccaaaacacacaaaggtagtcaagtgagagtaaggatctccacaaccaaagccatgaaaattgccccatcggaaccaccgaaa

SEQ ID NO: 85871 - DNA, 391 bp, Glycine max
  unsure (1)..(391): unsure at all n locations
atacaaagaaaccacgggtaatgaacattacaaaaaataactatatgacttatgtaaatcaatctagaaaaatcatatatataaatagacaatcacattagacgatgttaattgtagaagcaaagcttcatggtgaatcaaaggtgattcaaagatgtcttgatgataacaatgatgataacaaaagatgatgacagaggagatgacaaanagctcaaagaacaactcaagtgaatcaagaacaattcaagagttcatgataagaatccagaagaattcaagactcaagaagatagttagaagcaagaataagattcaggggtaagactcaagatcagatcaatttcagactaagatcagatcagagaggctatcagatagataaagtttc

SEQ ID NO: 85872 - DNA, 185 bp, Glycine max
aaaacaacaaccctattagccttagggtgttcatcttttttcacaaagaaaaggggggaaaagaactcattttctatcttgctcttggaagctatgggtgagtgattgaaagggattctgaaaactttgagtaaattattaaaagagaactttatatttccaatttttctttaaatttataattt

SEQ ID NO: 85873 - DNA, 179 bp, Glycine max
tatactttaagggtatatagtgtttaaaaaaaagataattattttaaattttaaaacactttactaatgattgctgctatgtttgaaagtcctaataattatcgaatattatgagcaaagatggagtaggatctagaccataaagaatctcaatataattgaaaaataacctatgatac

SEQ ID NO: 85874 - DNA, 467 bp, Glycine max
aagatacataaacatattgtttaatatgttataacaaatatcatagaaaatgattatattaacaaaaaaaattatttatatttatttaaataggtcaatttattaagtttaaaaaacagtttgaatgactcaaaatctaatatttttaattaaataaactttaataaaagacttgatctgtatattttttttgtaaaaacctgatcacacatttgatgagcattaatctaacttattttcacttagagagttttaagtgaattaagtagcggatgtaggttagtagctatgtgggcaattgccccaccatagttattaaaaccgaatcgacctaatttgttcgaccaggacccattgtccagaacatttgattaatgtgcacgattggaaatggatgcaatccaatttggcctggtttaacttggtcagaattgaggaaatccggtgactcgaaccgagttgatctg

SEQ ID NO: 85875 - DNA, 256 bp, Glycine max
tgcaaactaagatactcgtcattagtcgagatggggaagttgatgagtacgcttcttggaattgggatgaagaaaaagtggagaagaacgttcttatacccgctcgactacctcacgaagaagctgaggaagaagacccaggtgaaccaccttcacctccaccacaacaacaagatcaagaactatcatcaccagagtctattccaagacgagtaagatctttggtggacattcaaaactatcaggagagttaaac

SEQ ID NO: 85876 - DNA, 442 bp, Glycine max
  unsure (1)..(442): unsure at all n locations
ctgattatgctacattgtctgtgaacagttataaataattataatttgtacctttatttcttggtttctaatttgaatttttagccccttgtaacacaaaaaataaaacccttatcaataggtcaaacttacaagcattacatgacaatttaaattntgaaacaaatcaataaataatttatctttntatcctcatgtttaattattttttcgctttatcgttgctcgttttgtctttgtcttttctatcactgtgagggttcattttactttccatctcatatgctcaagtctagtgtgctatataaactttaagaaaatagattagatattgaattgcattaaatggttgtcatatattntggcacaacataacatcttttttcttctaagcaaattattatcttaataggtgttggctactattatcctacataattta

SEQ ID NO: 85877 - DNA, 243 bp, Glycine max
aatggagccatgaactgggactccagtcactaatacacagggttatgtactttttatttgaataattcttcttggccgaataagtagcctattcaatactggacatatgaacagagtttaaatgaaggaaaattgaggttttggtattaacttatgtggattgtgtaatatcatagcctcaagggaagcaaaacaaagtacctttgcttacaacagcaagtataattgaaagcttggcctcaa

SEQ ID NO: 85878 - DNA, 442 bp, Glycine max
  unsure (1)..(442): unsure at all n locations
atgatttctttaatgaaaaatccaatgcaatgacgcgtggtttcaaaatagaaagttacttcttaagtaagagttgcagagattcctttctcacttctcacttattacagctagaacctatgtctgactgttggttctatcggctttgatgttaatattcactagcaccctgtatctaatataaaagttgacatattcacaatttttattttaaaccacataaagaataatatgcatatttgacaattaagaccatgagaaactcatatagcacgatccattggtagagaagcaacactatatttagtgttcaaatntcgtaattagacatgagaatagataccttgcgcaaatttatctataggacatgattatccattcctaccaatgttattcatttaataatgaaaattacagaaagattagtgagttcaactatatt

SEQ ID NO: 85879 - DNA, 472 bp, Glycine max
  unsure (1)..(472): unsure at all n locations
gaaaaccccctgtttgggtgagttatacatacccattctgtntatttttttgtgatgatgtntgtgatgtttatatgctgaaattgctgatggaaatctgttatagatgaagggtagaactaacccaaggttagaaagtgagaatgtgatgttatgagtggaaaaagagtgagactttgagagttggaaggctaagtctgaattctgtggtaaatggaggttatagtgagttaatactagcttgaaatgtcatttagaacatgtgagaaaggttaggctgagctagagagaaaaacaaatgaccaaagtgaacaaagagccattgctagggcaaatttgggtgttgaagagntcaaatttgattcggtgagattataggtgtaaatccagtttgaacaagtctaaatggatgtatggactggtgtaggtgagagattgcctanattacctcatctaattcactttcaaccta

SEQ ID NO: 85880 - DNA, 261 bp, Glycine max
ttctcacctaatgaatgataaaatgaatttcaaccgatcatttgtgttggaatctcatttaatcacttttaaaaagaaatctaaccgatcgttcacgctataacctcggttaaacaaaaaaaagtaaaataatcaaaatatcttgaaaaataataataaaataatcaaaatatctttgaataaaataaccaaaaaaatcaatcagacgtttttctttgaaagtttccttgaatgaattgattaataaccaaagtgaaacta

SEQ ID NO: 85881 - DNA, 390 bp, Glycine max
  unsure (1)..(390): unsure at all n locations
aaactctctaaaagatgcagcgctttatatggctcttgantacactagaatgcgtaatcctagaaacagaaaccaagcttttagaaaaagatgaaacataataattgttttccagtaacaaacacataataactatgaaatgcgtaaaagttccaatagcctcaacatgtgaactcatttgatataccacatagatgctctgttcactttccactggatttcacaggtgtagaaagccatgtacattattaacaactgcgaattatagatcctgaataaatccactaagtattgctaggcagctcaataagatattattcaaaacaagtgaagataaaatatcctgtcttttcgagccatatcttgtatttgagacacatcttcttcata

SEQ ID NO: 85882 - DNA, 316 bp, Glycine max
  unsure (1)..(316): unsure at all n locations
gtcgatggtanataacgagtctgttattatcctagcacaaaatcctgttgctcatggaatgagcatgcacattgagactagatttctctacttaagagatcaagtgtataacggaagatcgatgctggatttttgcacatctgcagatcatacttgcagacatttcgacaaaacctttgaagaaagagaggtttgaagatctgaggatatagatgggactcagaagctcaaatgaaatctgaattatagatgagtgtcagataaaaagataactcacatgaataggtagttagctctatcacttcgatgttaggta

SEQ ID NO: 85883 - DNA, 240 bp, Glycine max
ccttcatggggattttcaccatggacatgccctggaaggaaaaggaaaaaaagaaaaaggaggcaccctccactagggaaatagccatggaagaaagagcttcgccacccagaatgtgccttggataaaaagcttggagaggatgattcaatggaggaaaagagaaaatggggagcacacaattgaagaagaaaaagggggaaaaaagttgaactttgagttgtgtctcacaagactctc

SEQ ID NO: 85884 - DNA, 503 bp, Glycine max
  unsure (1)..(503): unsure at all n locations
tgcaagcttgtccttcacaggcatgatgacatcactttcatgttctgcagcatagcctactatgggaagcgagatgacagaaataaaagccactgttatattcaatgactcagatgctccctgcaagagaccagaaacacaatatgtctatgaatgaacttatgacgcagtgtttatggacaagaacaagaataggaatattagaagctctagttgtacaataatagaaattaatgatcaagagattctgagaatgatatagctatacctgtatggcggctacaaggtatccagacaatatagatacccatgctgtcaagatagcaagccagattattgtcctccattgagttaattcaagatcttcctccacatcagaaatttcaccattctctcctccctacattatgaagtgtggaaattntgtgaaaatgcactgtcgaataataaagaaaaatatgcattcaacacgcaccagatcactcacataaattctgttatat

SEQ ID NO: 85885 - DNA, 295 bp, Glycine max
tgcacaacccataccgatacatatatgttatgcctagtcacgtaccttgtgactgggattatcatccgtgtaaaaaaattgtcaactaatgtgtttgggaaacaactccggtactttgaataagactaaaattgcatacgactccaatactgttctctctttttgatagaaactggatcaaaagtagggagaaaaaaacttctattaagagaaaagcgtacaaatgagtaccaggactttcaagaggcctgaactctcctacaataatctgagttccttctcaaatcacaagata

SEQ ID NO: 85886 - DNA, 432 bp, Glycine max
  unsure (1)..(432): unsure at all n locations
gggaggactagcagcagccatccgcagatgcaccaccgccacctctatggtagccaccatctctgctcacatgcggaggatggagctccagatgcatgcatatatgcagcatgtgaccgaccagcaggcggccaatcataagggtcaggtgcagttgaatgagagcttttaccagtacaccctgcatcagcaaagccaaaatcccagccctttccattggcctaccctcgagtagttcggggccatagttgcatggcctagagataggcccaattntcaaataaaggcaggacccgcacggatccccggagatgaagatggagcatatgatgatgacaacatggccgatgtgatggacttcttccttngaggaggcagagtcagttgaccgagtcgcttaaactatgaactcgtctttatttggtttatcgc

SEQ ID NO: 85887 - DNA, 281 bp, Glycine max
catttaactgtctttgggctcgacggtctctctcaacaaaatactttcgacacctactgtacgttgatttcaccaatgctgttatgggaatgttgcgacaatcctttaaaaccttattgatacattctaagaggttcgttgtcatgtggccatatcgacgcccttctctatcgtaagccatcgtccatttttcctttgagatgcgatcaatccatgttgctatggctggactcagttcacaaattttttctaaattttgataaaaaaatgtgattgcatgg

SEQ ID NO: 85888 - DNA, 391 bp, Glycine max
  unsure (1)..(391): unsure at all n locations
tcatcatctctcgtagtctttatatttgggagccaatccaatccttgtgtgcggactctcagccacttatgatagccggcgatgatcccattacttgttcccctaagctctctatcngttcttcacgccgcatcccatgccttgcgaactccctggagtaccctcgcgtngtgctcactgaaaccccgtgcgatgaaaggcgtgatgctntcgtctgatggcactcctctcatggngtagccaagctgtcttatggcgaggacggaattataattaatacaaccccttgttcccatcaagagaacanttggacatccttcgcatgaagatagaatcctgattcttccttccttctagcgagggaaaccaataacagacgcccctccatgct

SEQ ID NO: 85889 - DNA, 253 bp, Glycine max
ctatcatcgctaaatacccagaagagttgggtctaaccatggcccacgagcatagaatcgcggacgagtatgctcaagtatacgcggaaaaagaggctagaggaagggtgatcgactctttacaccaagaggcaaccatgtggatggaccggtttgctcttaccttgaacgggagtcaagaacttccccgcttgttagccaaggccaaggcgatggcagacacctactgatgcaatcctccctaggaagggac

SEQ ID NO: 85890 - DNA, 396 bp, Glycine max
gaccgcagctgcagctctttctttattaagcgagaaatttgttgttctcgacactatatcgcgatcttttctttcaaggcttacttgatagctattatctctggttcagtctaatataacctgatattactggcattttgtggagaaaacgcaaccagttgatgatgcattgatcgggatgctagaattcgagacttgttgttattaaaagctctaataaaccatcagtttaatctctaaagtattggctatactctgctatgtagtcccctaaagaatacagtgatatgagtacttagaatttacttacctctagggactaacttgatttaggacctataagtgtactaatatgatattgttaatacttgatatacctaagatgaaattgaaagt

SEQ ID NO: 85891 - DNA, 295 bp, Glycine max
tttaaccttttaatggaaatccagaacatttttttgtgccgaaaccattaactggggaacaaattcttgaacaggttgatgacatcaatactggttttggaaagaccccaaagatgaaaaaaaaaaccattcatatggaagaagaagtcgatattatttgatctttcatattggtccgatctaaatgtcagacactgtattgatgttatgcatatcgaaaaaaatgtttgtgataatgtcatcaacacacttcttaacattcaaggcaagacaaaagatggtttgaatactcgtc

SEQ ID NO: 85892 - DNA, 248 bp, Glycine max
  unsure (1)..(248): unsure at all n locations
actccggcaatcaacttttaaatggtctggttgaatacattcataacactttggaacaaaagatgaatcttctcctcttttctttgatttcctttgtttcttaggaatntattgaatctctttatgaagaaactaaaatcatcatcttcttttatttcattcaagtcttctttaccactttcttcttgaattaaagatgaagctntatgttgtgattcctttctttttcttgtcattttcttcatgtt

SEQ ID NO: 85893 - DNA, 293 bp, Glycine max
aaactcagcttaacaatctatttctagcgtctcgtatattttggactcaatcagacatccgagtgaaaagttatcatcggttgaattggctcaaagcttcaacattcaatttcgaacgactcgatatatgatgggactcaatcagacatccgagtaaaaagttattgtcctttgaaatggctcagaaattccacattcaatttcgagcgtctcaatatattaccggactcaatcagacatccgagaaaaaaattattgtcgtttgcatttgctcaaaggttcaacattcaatt

SEQ ID NO: 85894 - DNA, 255 bp, Glycine max
aatggatgtcctggaggaagagacctcgcgacttcatactacttctctcacgccatgaattacggagtttgctttctcctgtctcactctgtactttcatagcactcgcccaattatattgattgtgatgacagctcttgatcatacgaccgtgctacattgaagacaatgtgtcgtttaaatgagaggggggatgtgcgccaatttttatccaaaaacaagtcattattacgggaaaccctaactcatacttgc

SEQ ID NO: 85895 - DNA, 216 bp, Glycine max
aaaaacataataccaaccaaatttggaatttcgaatttataacacttgatgtgaagaattgaaactgataccctttcaatgaatatagaacgaaatggtgaagaccgatatgagcacgaaagatttgttccgcggcctaactgaaagagaagagaacgaagaacagaaaccgcgccctcataggctcgctaaacctggcaacgacgcatacccact

SEQ ID NO: 85896 - DNA, 402 bp, Glycine max
  unsure (1)..(402): unsure at all n locations
tatcatagaaacacaagtgacaccaacagagaggcactgaggccatacaccataaagtncaaagaagagaagaggagcaccatagacatacatacagcaactgattgaataaaaaatggcatatacgaaagtactgcatgtataaatagagcgaatgaactaaactaataagcactcatacagctaacagaactaactactaactggaaaccagtataactacctatactaactgtaaatagagctacatacaaacagaattctcgcaaaagtcgtcgatagatatgaaaaataaatagctggtagattccccttctataatcagcctcccacagtgttgactctagagccaaacaaagaagacatgcacttgcacggcgaatagaactgagcaaacagaca

SEQ ID NO: 85897 - DNA, 323 bp, Glycine max
ttttttttattccagccttcttcgggctgcatttctcagtgggctttccttctgtgtccaacatcttgggatgttcccagcctttgatgacagctttccaggttctgctatccactgatttgaggaaggccaccatccttgctttccagcattcatagttggttccatctaggattggtggtctgttcactggtcctccttctttctccatgttcatcagaatttatctccccagatctcactctgtgatttcgagtgttggctctgataccaattgaaattctgataccaggggacagatgtcgtacaagatgtcacgacat

SEQ ID NO: 85898 - DNA, 434 bp, Glycine max
  unsure (1)..(434): unsure at all n locations
gcttcttngaaagaaaatggaggagaaagtgttctttatctttggacgaggaagaggatgagtggtcgtggatgttgtcatggccaaggaagaggaggaagaggagatcgtgataattgtgacaataatgaatggatgagccatcaatccactagaattcgtgtaagaggaataggaagatgtctaaactattatgaaaaaacatatgaaacgaggtatgataaatctaatgttgaatgtcttaattgtcataaatatggccattactcttgggagtgtagaacttatgttgaagagagggtcaatcttgttgatgataaagaagatgaagagccaacactactgttatcacttaataatggtgagaacgaagacatatgcttattgtatcttgacgatggagcgagcaatcacatgttgtgatgccaagagaa

SEQ ID NO: 85899 - DNA, 350 bp, Glycine max
ttgacttgagttatcaagagattataaatatttggccatgacatgaatttcaagaatcaataatctgtctttcaatcttttctcatcatcattcaatatctttcaactctttctacacaattttctgattcatttctcttcatctttctaaaagtttttgttcaacactttctcttccgagaaaagttctttgttcaaaaacttgtgctattcatctttttcattctcttcttcctttgccaaaagaacgaaggactaactgcctgaattcttttgtgtctctcttctcccttacaaaagattcaaaggactaacagcctgagaattcttttgattattcccttcccctt

SEQ ID NO: 85900 - DNA, 312 bp, Glycine max
catgcaatctgagttgcacatcattcgcagatgcgagattctctctacatggaccgcaggataggagaccctcaatcctatctcgcctcaccgcagacacaaatgggctgttaccttgcctgggcaatattgtccataccaaaggcatgccgcgctacactatacatcttcacacattaatgcatctcgtggttacagggcgcatactactacccctttgaaaacgttgtttacgccacagatcacatcgtatgagcatactccacacagaggcgtccctctgacagtcaaacattatgtctcctatcatta

SEQ ID NO: 85901 - DNA, 352 bp, Glycine max
  unsure (1)..(352): unsure at all n locations
tgagttctcagatgtgagcataaacacatttagctcanagagttcaagatttcaaaagaatctctttaatgtctgtcctatccttttatatgttttgagaaatgaacaataatgattcaaattgcatttaatgttttttgaaaagtttttttcaatcttggcaaaaagggtgacacatgtcttttaaggaaaacaaaataattttttatctttatgaacacgcttcctcttttgtctatacaattgaacacacgttagttccaacagattaataaaagacttcaagataatgccatcatctgtgacaacgtaacatacatcatcaatctgataagctaattagatttaggtg

SEQ ID NO: 85902 - DNA, 353 bp, Glycine max
tgccgggggtattagagtagaagagtagttttactatgttagttgacagttgttctgttagttatgccagctatttgcagttgtactcactctagtatatatactagagttgtaacctcttttcagttgggttagttaatatcaaaactccatttttgaagtttagcttttctctcctttattgattctgaaaacctttatcacttgctctaccactttctataatggtgaagttctttatatatggtacaaaagagcattagttgagagttttcttgttcttgttttcatgtgttagaattcttctttcctgttctatggtgtatttctcatagatattcccatgcctgtca

SEQ ID NO: 85903 - DNA, 441 bp, Glycine max
  unsure (1)..(441): unsure at all n locations
atccttaagtcacctcgcggcatgcaagcttgtacaagcgttgaggtctggtgttgatcttggtggtgcgagaagtagcagtacccaaaccttcatgtcataccgccacttgaaaaccacaaccatctttcataaccctgtgttgtgcgtcaagttctcccactatgaaatcctctaagccaccccaacccttcgcatctaggatgacaccatgtcaagatccacacctaggatgatgatgttttatgcatcaacttcaagatcctcattatatttgctaattatttataaaatataaagtccatttattacgtgaaaccctaactcagacttggagaacaagtggcattacaagtggttggttgacatgntaaagttacagtcacatcaacacctaatggaacccttctaacaacagagatctaatacaaaaagttttaa

SEQ ID NO: 85904 - DNA, 353 bp, Glycine max
  unsure (1)..(353): unsure at all n locations
ntgttgagtcccctgccctcaactgttttttccttattggcaaaagtcaggtgattgtttacagtgatgttgttgactatgccctcaaagccggctgatacgttttgcgctacataggcctcattcaaaattttgaccaacaacgcccgatgaggctcggagttcatgagcagccctaatagagagatcgtggctggatttttgttcaatttcttaatcactttgaattcactctattgaatgattctcagaaattcagtcgcctcctcagctgatatatctctctggctaaagttgtctctttcctctataagcttcccaacaagggcctcgtcattcgtggttgggcccgt

SEQ ID NO: 85905 - DNA, 315 bp, Glycine max
acaacacccttctcgagcattaccatcttcctttacctgtgtctactctaatgagagagacattaagccctgtacaacgttataacaataaccatagacgcaaaagaatactaactgtatctgaacaataaacgactgtactaaaatcccacccgttaaaaggagatcattttctttaaaacagaatcacccctttatctttaaacacacgaaagataaaagagagtcatgataaacatactcacataacgttatgtctcaagaatcgcaacgagaccctcaaaagatgacaccctgttccacataccaccatga

SEQ ID NO: 85906 - DNA, 326 bp, Glycine max
taatgataatctttctttagaaatttttctttttcacaataaagaaaagcggagagggtatatgaaattaatggcacaggtttcacgttttattactatttcttgattgtcacttcttcatgtcccatgggagttgggacttggcacttggaaggatgcatcatgcatggttattacaattataataacttacaaattatcaatataaaaaaaaaaaacttactaactatgaacgataaatattgcgccagaaactagaaatataacaacctaatgaagtaactacatttttttcgcctaaaccaaacatgtacgttatccgataa

SEQ ID NO: 85907 - DNA, 399 bp, Glycine max
agcttgtattcattaggtgtatcatacactgttttcttcttttaaccaacaacagcatacattttatctactattatagcaatacattccatccatgttttaggaattatcctgatctgagatggacaagtcctccgcaacacctacatcatgtcctaccttttcataatgttgctgtgttaagtcatccatatgtttcttccccaacgcaacaacagcttctatactcacaataaagacatctagcagctgacgctccttctcaacctttcttataagagtcagtgacgtcaatgaccatccacattatgctattttatcatgagacaagagccttcattcttattctgacgatccagatggtgtaaatggatactctgatcaatcaatctcattccc

SEQ ID NO: 85908 - DNA, 311 bp, Glycine max
tgtatattggcttatacaaaacaagttctctttgatattcaaaccattgggggagtttttggacaaaaactgcccccgcgcctataaaacgacacgaggtgaggaaatttaggatgaatccagatcctgaatgattgtcggatattgtccaataagaaatgttcaatcggcgtcctcatgagatgcttgctttctatttaatacctgctggattggacattttttctggccgagatagaccatgaatcatattatcagcgtcggagaataatgtttttcggccgaagtgggctaatgtcttttaggcccag

SEQ ID NO: 85909 - DNA, 70 bp, Glycine max
gcttgcttggggactcgaaaccatcgtctgttttgatccagagtatgaggagcgggggaatcataaaaat

SEQ ID NO: 85910 - DNA, 433 bp, Glycine max
agctttagtgaccttaatattgaaacaatattctacattcccataatctattccctaatatttccttttccttgatacttcatggaaatcaagttctgaaggagagtacttgtttccacattatcgcttcttgcaaagcgcttttcaatttcagcaaggaattctttggcactagttatatcatctaaaacagtgcccctaaagacctcaggaataacacacctaatgatcataagacaatcatcaatcctaatcgcatgctgctttctattcatgtagataaaaattattgtacaaagatgaataaaacctctttgtgttcccttactcaaaatcatgataaaacaactaaatgtggaagcgtacctggattaatcataatggaatgatgatgaaagggtaatgagaagattgttttatgatcttccaatgt

SEQ ID NO: 85911 - DNA, 353 bp, Glycine max
taattggttcaagtgacgaaaattttgcttttctttagataaggttacgaattcatcctactcaattcaaaatagtgaaaattcaatgtgttgtatgaaactatgaataattagccttttccttcttgaaatctcctcacatgaacaaagtattggggtttcacgttcacccaattgacaaattctaattctgcgtctgtactgaaaaggtgtttactaaaaggaccaataacatgcttccatcattaatttgggtttgatatttgttattttttaacattacctttttagaacacaggcatgcaagttggtctgatttggatatcattccttcacagttcacacatatgaca

SEQ ID NO: 85912 - DNA, 434 bp, Glycine max
  unsure (1)..(434): unsure at all n locations
agcttattaacaacatacatgcaatatttatttggctcattaaggtattatcaatcaagatcaagactaactgcatcacctaacaacttgccataatgtccaaccacacttcacaaattatagagatggccagtctcataactcatgactcaatagtggatttatggtatagcatacattaaggatgcaacacacatcactagcatcattcaatctcatttaatcatgcaaaggaaaatacaattaatagttcaagcatgctcaacaaaagcattcataagtaatcacacagagcgcacactangaaaaagagagggtttgggtttatgcgggaaaaatagaggcgtttggcatacgaagaatggaaacataattgagaggaagggaagcatagagacgtatcatcactctgaaattgacctaacgtgtctcta

SEQ ID NO: 85913 - DNA, 343 bp, Glycine max
taacaatacaaacactagtgattttatttatctcaagagactaatgttaaaaaaattattgtgataatagccactgtcggtagagttgatcacttgagcataatgttttagtgttttaccaagagaaaataaagtttaaaaaaacttgaatctctcatttgatgacacaaataaagagagagattaaaaaaagcatgtatattcatattctttacttgccctgcttgttcgcataaattataccacataattggttacaacttacaaattacaactaatcagtttctatgaaaacagataacaaaataagcacttacgaaaccacaactttttcatttgaaca

SEQ ID NO: 85914 - DNA, 436 bp, Glycine max
  unsure (1)..(436): unsure at all n locations
agctntntaattnttaaaatattatattaatattataatactgggacgacaccaaacccgtcaagtattgacggcaccgaagcaagcaccattttccttttcttttattcctgcaatgagatatttagaagtagtccttttaatcatgaggagaaaatttggatatataacatgtagctaaaagaaatnttaacatgtgtgtgcaagttacattttttattctacttctggttagcccctactcgtgtagtatctcacaattgaaaatgttggtcccttctttttcaagaaactttcaagaacatcatggcaagtaagtgctagcaaaattctataaaagcttantcaaatatatttgttnttatatgcattgttgcanagtgtgacaccctcttacccctatatatatatatataaatatatatttatatatata

SEQ ID NO: 85915 - DNA, 347 bp, Glycine max
taagctccttcgactgcataaggctcttatatatttgaagagtatccttgtggaaccttcacccgacgaagacactgacaaaaacttatcttctcctttttggacaaagtatggcaagctgggggtaagtaaattttcttcccatcagaccttggatgcaactgtgatcgtatctccatatcagctagatcttgacgggtattcaagccattcttcgtcttgccttgaatgttaaggagtgtcccaatgacactgtcacatacatttttctcgacatgcataacatcaatacaatgtctaacatctagatcagaccagtacagaagatcaaagaaaatgcacctctt

SEQ ID NO: 85916 - DNA, 454 bp, Glycine max
  unsure (1)..(454): unsure at all n locations
tgccgcatgcaagctntctatcttgaggcatttccacatgttattatgtaatctacataacacagaagctgtaaatcataatagaaaaatacataatacctgacgaagattgataagatattcaaatgcatctttaattgaattgctgaaaggttcattcttgaaaaagctttcttcccatattgtgtcaagagaagccttaaattcaagaagggatgagaccatatctgtatctttctcctcatccataacaatgccctgcccagttctcctaatgtatgaactaagggcctgcttcagtgattcaagggcattgacccttgaaaagagtgagtgcattctctgaaggtcttcaatacgattcccatccataagcataataaaaccctgtataagaaggcaaaagtaacgaaagggaaataaaattgcagaggaaatttcaccagacaaaaat

SEQ ID NO: 85917 - DNA, 348 bp, Glycine max
tcatcagcaacaacaacatttttatcaccatcatcaaccttaggattaaggacattcaaactttcctcttcaattggttcttttcctttctccacacccaaatccaacttgcaaatttcatcacacagtatctccacactagcatcacacacagaacaatcacaactcttctctgcctcctcatcttttctatccaaaccctgatcaacctcaaacaccatgtggcttcccttgttttcttcactctccttttcatcatgatgatgatcaagcacaatatcagatccggtgtgatcttcatcaatctccaaaccaacgccgcgctccgtcaccgaattctgcttctgg

SEQ ID NO: 85918 - DNA, 308 bp, Glycine max
  unsure (1)..(308): unsure at all n locations
atgcaagcttctagatgtatccacatcttctcatctctttgcccccgatgggccatgctcttcaatggcatttacgctagcccctccatgactggctagtgggttggttttaacgttggggcccccctcttggaatgatggccaaccggcattaattaagtgttgcaccttatatttgaacggcaggcaggagtcaatgttatgtcagggggctccactatggtatgcacacttggcatccgagatgtaccccttggggtatggtggctggaacacctcacccgntatggccaccacctatatatttt

SEQ ID NO: 85919 - DNA, 349 bp, Glycine max
caaggaagctacctagtctatagattttgcatgtgtaacacttgttgtaactttgatgaatgagagtcttgtgagacacaactcaaagttcaacttctcttcccctttttcttcttcaattttgtgctcccccctctctcttttcctccattgaatcatcctctccaagcttcttatccaaggcacattcttggtggcgaagctccttcttccatggcttattccctagtggatggtgcctcctttctcctcttgtccttttccttcaactgcatctgcatggtggaaaatcaccattgaaggacctcattgaagctcaaagatccaacctccataaaagctccacaag

SEQ ID NO: 85920 - DNA, 430 bp, Glycine max
agcttattgaaggtaaaaccacacaagttacattctttcacttattagagagaggtagagatacattaagatggagttttcttgcaaggacttcaaggtgggaaaatgtgagggagaaaaagtagtagatggggaaaccatgcccttggtgctaaaacctccagtgcctaacaagagtgacttggaatccttgctgttggctctgaagaacaacaaagaatggtttgagcaaatgatcatcaagaacagtgctgttctgcttagaggttatgatgtcaagaatgctgaggacttcaatgaaattgtagaaatctgtgggtgggaagacattcgttatgttggaccaacacctcgcacacatattcacaaaagggtgtggactgccaatgaaggacccctctcaaagttcatctactatcaccatgaaatg

SEQ ID NO: 85921 - DNA, 361 bp, Glycine max
  unsure (1)..(361): unsure at all n locations
ataaaccccagcttctccctatttgctatanaagggggagatgtgaagaagaaaagggttcagccttcttggcatttctcccttgctcgaaattactgaggaaaattatttccgtgaagaaaatccaagccgaagcgcttccgtaacgtttccgtgagcaattacgcgaagattctcgatcgttcttcaacattcatcgttcgttcttcgttttcttcagtcttcaacgggtaagtaactcaaaccgagcttttcaattcattctatgtacccgtggtggtccacattttgtttcatgtatttttattctcattttcatttgctttttatacccccttttgacgtgcttaagccatttatt

SEQ ID NO: 85922 - DNA, 441 bp, Glycine max
agcttcatgatgatgaaccaagccaatttgatgatgccaaaagcccaagtaattgattcaagacttcaagatcaagcatcaagaatccaatccaagattcaagagaagaaatcaagaagcaacaagtcaagacttcatataggataagtattaaaagattttttcaaaaaccaaatagcacaatttggttttacaaaagaattttctcaaattttctaagttaccagagtgattactctctggtaatcgattaccagttatcagtaatcgattaccagtgaccagtttggttttcaaaatgttttcaaatggtttgcaacattccaaaatgattttcaaacagtgtaatcgattacactatattagtaatcgattacaagtgaatctgaacgttggaattcaaatccaattgtgaagagtcacaacttttcataaaatgca

SEQ ID NO: 85923 - DNA, 353 bp, Glycine max
tgaagacatgtaacccaccatcttctcactgtgtaacgtgtccactatcattgttatcatctccctctccattattaggggcgctacttgagctgccagatccttccatctctaggcgtattctttgaaagattcattatctttcttgcacatgttctgcagccgcattctatttggggccatatcagaattgtattgatactacctgaggaaggaagccattaggtctttccaggaatggacccaggaagattccagattggtgtaccaagtgatagctgccccagccagactctcttgaaaaaatgcatcaagagtttttcatccttcgcgtatgcccccattttccttca

SEQ ID NO: 85924 - DNA, 415 bp, Glycine max
  unsure (1)..(415): unsure at all n locations
cttccattcttcattccatgtttcttattctctttcttgccaatatcagcttctctgtgctgcttgtttatgaagttcttttcagttttcatgattgaaattcacaaatgaaattatccaacttcctatcatatgtagaacatacaaatactgtgttttcaaaattcaaaattgggttgggaaacatcaaatacgcaatatgaaaaggtttaattaatgagtgatgagatttttcttttntttcttttactactactatttaaatgaaatggacacaagaagagacacatgaatgaataaatatgttttcaaagtttacacttactacaaagataactcggctacctttgcagggaaaatcccacaaaacatcttcaacaaaaccaaatcttctactctaatcatggatgaaaac

SEQ ID NO: 85925 - DNA, 381 bp, Glycine max
gacactatagaacacccacgcttcatgaacaacttcgttggagattttggtttctttttatgaattcatcatatttccaaagacattaaggccatggagattccattcctaatagcaccaacaaaccccataaacatcaaaaaatgatccaaaggatcatcaaatgagaaaaaggttctataagggcactgtttttgcagtttcatctttggcctcgctgttgtttgagtctttcttgttgttaggatctccattcaagtcaatatcctctgccattttcttcattgaagactttaaacacccttctactaattagtaatcactgtaaacagaaaaaacctttagaaaatgcattatagattcaacttagtaacacacaag

SEQ ID NO: 85926 - DNA, 442 bp, Glycine max
  unsure (1)..(442): unsure at all n locations
agcttgtgatccagagccaacacaaanactatgttcattntgataagggattttctttatttgtctttatttattttgttttggtttcattttcttttattttcattttaatttcttgcatttaggacactttaattttagcagtttaaattcagtcatttaatagttttaatttagtttgatgcatgatagagaaatagatacttattgattggttacaacacattttgagtgaaccgattgcatgagtgagactaactgtgtactaatgagtatttttatgaatggttgattctcgtgatagcaagcgtcagtgtaagtgtggaagcaatgccttccaaggttattntgatgatgccaaagaatcaagagttaagcaaagtttcaatcaaagattcaagaatcaagtttcaagattcatgaatcaagaatcaagtttcaa

SEQ ID NO: 85927 - DNA, 353 bp, Glycine max
tcaatgcctgaaatcttatcaagatatttctcaagcttctttacaattgttcagactagtagaagaatttgatctacttagagcatctttcattgggatggacagtgaaacttctgcagtccttgcagctcatggtctgagttgttcaatattagcatttgcaactgcttttggagtgtctaacatagaccaacattctcagagaattttaattggtggcaaaacctctaatttacaggctttgacaatacaaagtttaaggaggctattttggagtgtggatcatgaaacccgagcaagtttctctttgctgttgaattattttcacccaaatgagaactgtttatccccgc

SEQ ID NO: 85928 - DNA, 433 bp, Glycine max
  unsure (1)..(433): unsure at all n locations
tgcttctagccaaatggacttaccttgaatttattcctttgatagcccttatgagccttgtgtccctttccttgttttgaagctcactacaagacttaagtgaaaaaccatgatattaccatatccttaaggaatnttggagctttggaattgttctgggaataagtgtggggggtttttgtttcattggacaacttgttttggtggctatgcttcatgatgtattttgggccatacttgatgtacattggatattggttaaatgttggacatgctgaatgaaatgttgtttctcaaaggctaaagacgtaaaaaaattatatatataatcttcaaaaataaacttcaaaaaagaaaaagagaagcaataaagttgagtgaataagatcttaaatggcacaagaatgatgaaactcatggctctactcttcat

SEQ ID NO: 85929 - DNA, 352 bp, Glycine max
tgacccttacgagtcagtttaatcaatttttatgctaacttggagaaaccttctatgaatctccggttgtatcctgctaagcccagaaaactcctaatctcaaaaacagatttaggactctcccactcaagaacgacttctatcttagagggatccacaactatacccccttgagatatcacatgccctaggaaactaactttctctaaccaaaactcacactttgacaacttagcatacagttgttggtccctaagggtatgcagcactatcctcaagtgttctgcctattcctatctagtcttggagtataccaaaatatcatctatgaatactaccacaaaactatcaa

SEQ ID NO: 85930 - DNA, 437 bp, Glycine max
  unsure (1)..(437): unsure at all n locations
agcttattgtatatataggccttcatctttagtgtntgttgtctcacaacggatgaatttcttcacttaagcttcatctaatgattttggtcgatggagcatttaatgttggcattaaattcatgtcctttctaatgcagggaacactctgattgattttctcatagaacacttcaatagaaaaccagttcctttggttaaagcaagtttacacaatagagtgcgtcttttgagggagtttagcaacttttatatatataacttcattaattcttcatgagatttggcaggtcctatgagaatgtctctgcaaactggctgtaatctttttttgtacgtgaggatcccagcaaagtgccttcttcttctaataggccatgaactagatcagaattattctcaaagagtccataagatgtgatcccattnttttcatc

SEQ ID NO: 85931 - DNA, 346 bp, Glycine max
ttaaggtatgggaagatgagtggagggttattgagagatgaagcacgaaattttatgccttaaatgaggtctgaaatttgaagtgtaattctcaaatgatcaaagtttaaagtttaaaagatgcatacacaaggcctctatttatagcctaagtgtcacacaaaattggagggaaatttaaatttctattcaaatttcatgtgaatttgtgaagctaaatttggagccaaaatttcactaattatgattagtgaattttagcaatggttcagcccactaatccaagatcaagtccaagattctccactaagtgtgcttaggtgtcatgaggcatgtaaatcatgaa

SEQ ID NO: 85932 - DNA, 289 bp, Glycine max
ttgcatgcacccattgtgtctccttatttccaccaaccactatataggacgtgagcattcttgatggcgaagacaaactaatcttgggaaaaaacatggaatactcggcaaatctggactacatatatgcttgctctttggcgatggtttagacaaccaaatgtctcagattacattgacaaagttgtctttcaccaatgacacatggcgctagagatgccgctcttgcaagctaggactgaaatccgcagacactcaccgggtccaaatggatgaccttggcccttaa

SEQ ID NO: 85933 - DNA, 348 bp, Glycine max
tcatacagattaccatccgtatgcttcttacttattggtaatttgtatgaagattatggattgacaatccatatgtttcttacggattggtaatctgtaagaagcatacggattgtcatttcgtaatcttcatacggattgtcattccgtaatcttcatacagattaccaatcagtatgcttattttaaatttattttttatttatataactttattttattgtttaattagaaaaaaatggaattgataattaaaaaacttttaaatagatatagctagaatattcatttgatagttgtagtgtgtatagtttgaaagtgatattaatgtgaaaagaattgatacat

SEQ ID NO: 85934 - DNA, 439 bp, Glycine max
  unsure (1)..(439): unsure at all n locations
agctatntaaagagattgagctgagactgctttgtttcttctgccacatcagacttttgttgtagcgctgacacatcttgctacaagaaaacttcaacaactacaaaggacttctttacttgaatcttcacccttctaacccattctcgttgaggcaagaatatgactcgctgtgctcagtttctacttaactctagttcttcagtacgcaaatgcgtaatggtgatgtgaagatatgctacgagaatcttcaccattattcacttgatcatggaccatcttttgctatggtgagggatcatttcattgcggcgaggataagtttgcagctcattatttcttctagctacaaatgcctggtgtacattaaaaattatctcaaaatattaaaaaccatctttttacattatgattaaaatagggaataaaagtctatttt

SEQ ID NO: 85935 - DNA, 360 bp, Glycine max
gcttggttcgaggtacttacccgttgaagatttaataatgatgaagaacgaatgaagaacgtcgaagaacggtcgaaaccttcacgaaattcctcacggaaacgtttcggaagcgcctcggcttggattttcttcacggaaacaatttttccaagcaaattcgaaagagagagaagtgtctaaggggctgaaccctttttcacttcacttctccccctatttatagaaaattgggggagaagcttgccacccagctcgcccaagcgagcagggttgcttcctccagaagcaacagccttctggaggaatcttctggagggcccaagtgggccttgttgctatttgcacccccatttttac

SEQ ID NO: 85936 - DNA, 441 bp, Glycine max
agcttgactaagagttcacaagacttattacatttttttctcaaaaataaaagatggacatcaccttttatatctatacaggcgatatgtgattaataaaaaaaattagagcaacgcttgattcttttgtcaccttttgattttaaagcttgtttacaaaaagaatttcacatattctcattaaaaaaacaattaagttgtaaaaattatcttcaaaacaagtgtttaagaatacaattagaagatgcgtcctcgtttttcctttctatcttcatcttgatcagtatctccctcaatcttacactctactttgagcacttgtgccttaccccacacttaatttattaactgttcgaacaattttattcggttgcttgtaaaaactaaaatcagtcgctgaacatcgaaatccaatatattccatcacctcatttagttttt

SEQ ID NO: 85937 - DNA, 329 bp, Glycine max
ctatataatatggtttctctcttcttcttctccaccaacatttgactcgttcgctcccttctcgattccatctcacgggctctaaattccacctacccacttcccaatttttttggacccatcatcgacaccaaggtaactctttctttatattctctattatatctttgaagattctttatcaaaaatataataactgtagatttgggattaaaatttttcttttttggaattacaaacctcgagaatccggagctgactatgtattcctctaccttgtgtagctctatgcggactatggagtggatgcatagatttttttacactaa

SEQ ID NO: 85938 - DNA, 408 bp, Glycine max
agcttagggctgctcaagagatccaggttggtgtatggaagggctaaggcctgtgtggcggctaatagatgagcacataccatacacccttgcatcaggtacagatttctgggtcaaggccatgtgtattaccaagttaaccaatgcatccagttagacttaaagcatcttagtgtcatatgaagcatctgacgttgatgtacctcatgcacacctctaaggacgatagcatcattcatggcgctaagactgctgggaggtggaagccatctactcaaataaaattctggcttcatcaagagtgatgggtccaaaggctccatagtggtagcaaaaccatacgtctgtccatattactgagtgcttcatagaagattgaacctacaaatgctctgaaatctaatggtg

SEQ ID NO: 85939 - DNA, 350 bp, Glycine max
tggaggaatatggggtacccatcacatgttgttctacgaggcggacgggcgaaggtgcaaaaagattctacacatccacaaaaaacgtacaaacccaccatgccctgttgcccacctacaactgagctcacgcactcccacgtagcccttatcctagttactcttgacgccgagtgcccatcaatactcccaaactcccacaacatccaagaaataccacatccaatcatcatggactaacaaaaccaagcaaaacagggcaaaggcaaaaaactctgcccaaaacacaacgcaaaatcacagctattcacatacaaatatcctagtaaccttttcttcactccaagtcg

SEQ ID NO: 85940 - DNA, 446 bp, Glycine max
  unsure (1)..(446): unsure at all n locations
agcttcattacagcacctccgtcgtcatcttccctctccagaacaactccttcgttctgctgcgcatttccttctcgtagaatcatcatcaagccaagaatgggtccatatccggcccaggcccagcccaaggaggccaagctctggggtggcaggttcgaggagggcgtaaccgacgttgtagagaggttcaccgagtcgatctccttcgacaagcagctctacaaacaagacatcatgggaagcagagcacacgctacaatgctcgctcaccaggtctgttgcaaacgcatccactctactactaattcaacactgaacaatacgaatgcttattagtgctttttgttgttgttgttgttgttgttggtgttgttattgttagggtttgataaccgtgagtgacagagactccattctccaaggttnggacgaaatagagaggc

SEQ ID NO: 85941 - DNA, 367 bp, Glycine max
  unsure (1)..(367): unsure at all n locations
tactcacgctgangaagatcaactctaacttgacctctttccttacctgaggactcaggaatgataacaggggcaggaggcatgtcatcaccagcagtactaacctgcttcaccaagggtcaccattcaaaatgacccattatacctgtaaagacaaatgaaaacataacaaaggtcaacttagatgacatcataccaaaatgaacatgaaaaagggaaagacaaaacgctttaccatccaaaacaataagagggtcacttgacgaaggtagggataggatggcttgtgcgtccaacaagactggcaatcgctccaaaatatccttgttcgccctctcctctatggacatcaaatgctcatcaaagg

SEQ ID NO: 85942 - DNA, 445 bp, Glycine max
agcttcctcctcagatccctcttgttggactattttaacttaaatagcttacaaaagtttagactaatttaacctaagctttgtcctcagatccctcttgttggactagacttagaccaaacaacattattgtaacaacaaatttaaaaccaaaacttaatctgcagatccctcttgtaagactaagtttcaattctgcttcattcaagttctaaggcaacaatacatttcccaatgctaaagtcacctaaccaggcacacaaatgggtgatcagaccaaaagcatatggaatttaagcactgaaagaagcattgaacacaagaaacacaatcaattagatatcaaaataattacatcagttgttcattagaaatccccaacacgggtgtttagccagccattatagaaaaacccctaataataatactgagagtacaaaaccta

SEQ ID NO: 85943 - DNA, 357 bp, Glycine max
tggaaactccttgactagtactaggagcttttgtaactgacgaattatgaggaaaagccggtccagataccatggaggttacaggcactggctcctaaagaattattatataaatccaggatcatttgaataattgagtcagaaaaaaattaaaaccggtacccatagtttagaaataagttaatagtatagtctcaaggatccaaggtttaccacttttacagtagcaggggccacattcccagcaggaactggttgccgatttggaatagatccattaactaaaaatccatagaaaactcatgttaattatataataaatcttcaaccagaacatcaacaaaataagccacttgc

SEQ ID NO: 85944 - DNA, 420 bp, Glycine max
  unsure (1)..(420): unsure at all n locations
agcttatatgaaatggatgttaaagggtgctcgatcattgattatagnagaccgattaattggatgagagttaataattaataaattttcttaagtatagacccatgtatatatagctaactccattgcgtctcttcctttgtttttaaaaacttatcttcttatactcttgcaaattaatggctcttagaattcctttcaatgataagactgcgtgcggaagcattgattggtgaatcagagtaagagtagctgttcatctttggaagcaaactcattatagtaatccaaatgaaataagcaatactgaattgatatttttggatgaaaagatattttatataaattgactctggagatcattctacaatgtttattttggacaaaaattgctatctacctttattattcatatgacaa

SEQ ID NO: 85945 - DNA, 347 bp, Glycine max
  unsure (1)..(347): unsure at all n locations
tcttgaaacatgtaatagcagcctagtgctatgtgttaactatacaaaagctagncacaagaaatcctcaaaccgaaacacacacgaaacaaacgcacacacccacatatataaaataaaagccagctatactacacaagtaaatcatacagtgctccatactccaataatgcacaaggaaatcaagcaaataaaatcccaaagacatgagagtcagactgaaactcgctacataataataataatcatgccatatcatatcatatccattaacaacagaagaaaaaaaaaacaaaatacccagaggaagaagaacatatagcttatatactatgcctagtccatga

SEQ ID NO: 85946 - DNA, 372 bp, Glycine max
ggaaaaacagcaaaaccccaaattactgctaagaagccttcacaacaattcgaacaaaaccttcaaattcatcaattaaacagcaactcttaccataaagagagatgtagcaaactaattcaatgaagaaagaaacacagttaccgcgctagcatagataccagtttcggcatttctgacattagcaaagataccggcaaagatgaacatacagcaactctcaccgggttttgcctcttgactactttttctaactaaagagacgcagtccctacaggtgtgatttcgaaaacaaatttcctcaacataaagggtgaaattcctacaaacaaagggtgttacatgtgaggatggcagctactctttctgatg

SEQ ID NO: 85947 - DNA, 353 bp, Glycine max
agttgatccacttgccaattttttttcaacctcccctaagagcaaacgtgtgtaaatattgtcgctatcaccgagtggtgagtcacaacactgaagaatgcaatacactgaaggataagatagaattactcatccaaaaaggacatattcaaaagtttgtgaaagacaaagactgtttgtgtaaccatgaacaaaatagggggaagagcttaaaatgcatctggccctgaaaaaccattaaagcacgcgaagggaacacattcgaaacttcactccaaggtgggattaacataaataaaaggaggattatcttgaagcctatgttcgaatgtgatacaaaagtgatttgtgtg

SEQ ID NO: 85948 - DNA, 80 bp, Glycine max
tgcttgcatgatatacatctgcgcctttctcattcatattctccctgatatcatcaaaggcttcatgatcccgactcgtt

SEQ ID NO: 85949 - DNA, 352 bp, Glycine max
taaagtatgcccgagacattcatctttattagatgttcgggaagtattggcgatcagaattgccattgcttggattatagggctgaaccaagctcatgcttttacagaaaggttcatcaagtcaagctgaaatatggaagtaaccgtgttgccaaatcggggcaaaagatgaatcgagtcacatcactgcttcgtctactgccggacatatttaggactattgctgtccttgctacttccagtttcaccttgacaaagatgtcatggaccatgttgacaatctaaattgatgcaaccccatatcttgcgtaaaaattcgcactactctaactgtacatcatttgcatgcctt

SEQ ID NO: 85950 - DNA, 350 bp, Glycine max
  unsure (1)..(350): unsure at all n locations
ntttcctcacaaatgtttgatttgtttttttcaatgttataactttgaaattagaaattgacaaaacaaattaactgactcttatgaaacaaaatcttaaatcattagcaagtgtgtgaagcctttgtttcagaagaatgaaagcagagcatgggaattaaatagtgtttaatggtgctcctttacttcttttctttttcatttaagaagtagaacttatctgactttcagtttctttgatgaaaattggtggaagctaagaaaaaaaattataaatggttgaattgtatgattagttttggtgatatggaattcaaattgcaaattgtaaggttctatcaaacatagat

SEQ ID NO: 85951 - DNA, 395 bp, Glycine max
catgcatgctttctcatgagtgctaagtgacatttctctttaggattaactcatcttagcctctagttaccactgaatccagatttagccttccaactctcaaagcctcactctttgtccactcataacaccacattctcactttctaatgctagggtaactctaccctttatctctaacagctgtccatagagcaagttcagtacacgaacatcacaaggcgtaatctaaaaaccctagaacagaatgggtaaacttgctcacgccagaaaggaagttcaacacgcttcaacaaatatcctaccaataactaccacaatgcataaacctagtgaaactacccatcataccttccaatatcccatacccacgaaaaatgagcgagaaagaagtct

SEQ ID NO: 85952 - DNA, 352 bp, Glycine max
tttatcacaggtctctaccagttctatttggtgctagttacgtgatgaggacatgaccaagagcaagggcaaggatccacttgaaggacttggagggcctatgaccagggttagagcaaggaaagccaaggaagctcttcaacaagtgttgtccatactatttgaatacaagcccaagtttcaaggagaaaggtccaaggttgtgagttgtatcatggcccaaatggaggaggactaaatggcaccactttgtctcaattttagagtgtttagtttgtctaaataatggcctaatccttgtaaagttggctgaccaaaaatatcttttggattaatcaactaaaagggcttt

SEQ ID NO: 85953 - DNA, 357 bp, Glycine max
  unsure (1)..(357): unsure at all n locations
agctnttaatntcaatacaaggaagcatgacttttgncttatgaatctaagctgtggattcgaatgtaaaatggcatgaatattacgacctgttcgagaggtttttattagaatttaaatatggctgccccatgaggaataccttgcacctaggtagcttggataatacctttcaacggtatgtatatatgtgaatatatatagcatggaagtgccttgcaatgtgggtgaatatatggcataaaaataccttgcaaagggtgaatgtatagcaaataatgcatttcaaaaatctgtatatgtaggataggtagcataaaaatgcctttcaaatggtgttatttgttgattaggttt

SEQ ID NO: 85954 - DNA, 351 bp, Glycine max
tagtttaagttagtctaaacctaggttgtgttgtctaaattgagcctagtctaacaagatatatctgaggacaaagcttggattgattcattctaactagggatcgaggcttagtaacttaggctacaacatagaacacaaaagcatgattgattaagaaatatctttatatgcattagctggtatgttagaaagacccaacacttctacctaatactgttaattttacttgcatttttttactgtttttagcctagacttagtttaatcatgttttaaatcatcaattatcaatgtttcattcaacaatgccttatttatgaatttaaccttgtcttaaactagttccct

SEQ ID NO: 85955 - DNA, 359 bp, Glycine max
tggagcatttgagttatatgctttaacttgaggggaagcgttggaatttcacatattgtatgagtagttatttcacacattgtatgggtagttgttccaacaaagaataattattaatgtacctagttagtcacatattcatgtatctaaaaattcacatgcatgtacataggtactagaacttcattaatattcttgtaaatttcacattgtatttactctctatgtctatataaatatagatcagctgagtgggttaagcactcaagcatttcacaacctctagtctcttcaataattagaaaccggatggaagcttcatcctatcccaagtgaaatcgaatgcttcattcctatcc

SEQ ID NO: 85956 - DNA, 428 bp, Glycine max
  unsure (1)..(428): unsure at all n locations
agctggtagcanattcaaaccacaataacttttatctcggatgtctgattgagtccggtaatttatctagacgctcgtaaatgaatacggaagcacgtagcaaatgcaaaccgcaataacttttaactcagatgtccgaatgaatcccgtaatatatcgagacgctcgtaattgaaaacagaagctctaagcaaattctaacgacaataactttttactcggatgtctgattgagtctcgtaatatatcgagacgcttaaaattgaaaacagatgctctgagcaaattcaaacgacaataaattttaactcggatgtctgattgagtcccgtaatatatcgagacgctcgcaattgaaaacggaagctcgtagcaaattcacaccatagtaactctttactcggatgtccgattgagtcttgtgtata

SEQ ID NO: 85957 - DNA, 352 bp, Glycine max
ccacactcaagcttctattttcaatttggagcatcttatatttaccggactcaatcggacatccgagtaaaaagttatagtcgctcgaatttcctcagagcttctgttttcaatttcgagtgtctagatatattacaggactcaatcagacatccgagttgaaagttattatcggttgaatgggctacgatcttccgttttcaaatgccagcgtctagatatactaagggacacgatcgtacattcgagaaaaaagtgcatttcgtttgaatctgctcagagcttgtggtaacaattaccgagcgtcttgatatattaggggacgcaatcggaaattcgagtaataatttat

SEQ ID NO: 85958 - DNA, 441 bp, Glycine max
agcttagctgaattcagatcgaattgaagttatcttatctcatccttggccagcttagtggaccaaatcagtctcagatgcaagggttgggcactaagcgcttgagactcgcagcttatcgcatgaacagatatgcacttatccgacgcttgcgcttagcgaaaggactatttttttttcaaaaaatatttttctaagttattatatagtcctatttccttgaaattgaaatccttatgttaagcattcaaagataggctgatatactcctatgtacagactatatagcaagttccaaatcatttaaatgcataaaaagcaaagattacagaaattaaaactgggttgcctcccaggaagcacttctttaacgttattagctcgacgctcttacctcactggatgatcttatgttctggctcctactttcagaactttttg

SEQ ID NO: 85959 - DNA, 356 bp, Glycine max
tcacacagtttatctttcttaaacttgagtttttgaagaccaattactaagtctttcctaattagatgatttaaatgatgcatattaatgtgtgcagtcctacaatgccacaaccatgaatcatctattttactcaccaagcaacttagttcatgaaaaacatgcttgctcattcaacatatagatgttacctattctcttaccaatgtggataacttaatcagatatggcttcacttataaggcatcaatttctattaaattcaatcttgaaatctttatcacaaagttgactaatgctaagaagattatgctttagtccatccatatataacatattatttatctgaattttgg

SEQ ID NO: 85960 - DNA, 436 bp, Glycine max
tcacctgccgcatgcaagcttactccccacaatggtggcctcttgggaatgattcggctattcctccttctaatgacgcatggacacttatccctgacccaactacaattcgtgcgaaaggtcggccaaaatcaacaaggataaggaatgagatggattgggtcgaaccatctgaccaccgacaaaaatgcagtatatgtggagccaaagggcataacaggcgtcgctgtccaatgcaatctgagcgtgcgagttgttcacatcattgatttatgtatgttagtcgagtgacttgtatttcgttaagttgtcttcaatgtattgaatttctggggctgaatcaatttgtgtggttctatgaattcattacttaaaaacattacttatttttgtttgagtacataactatttgtggtgttccatgaatacattaatt

SEQ ID NO: 85961 - DNA, 376 bp, Glycine max
  unsure (1)..(376): unsure at all n locations
acactatagaactccccagctntggatcttcatatatagtttgcacatgttgttctatttggttaaaggtttaagaggtggagtataaacacattagaatgttttctttgtgtgtcactttactaagatgattatctttttggattttggaatagatgcaacacatctttttttactaaattttggaaagtaacttctaaaaactttttaccttctagaaaatacttttcataatacaaaaattgaaacagtattttagaaagtactttccaaaaaatattattttgtatttcagaaagtatattttggaataatgtttaaatttgtgtattcaggaaagtacttttcagaatacaaaaatttaaacatcaatcca

SEQ ID NO: 85962 - DNA, 428 bp, Glycine max
  unsure (1)..(428): unsure at all n locations
catgcatgcttcattgcctaacangccaacttacaacagttatgtccctttagactcagcataaggatgcacaggtcaaagttgattatgtgacaagattgtatgaccaagtgaatgtgcaaattgcaaagaagaatgaaagttatactaagcaagccaacaagaaaaggaaggaagtggtacttgaacctggtgataatcttggacatttgaggacaaatgttttccaagatggagggaatgatgagaatcatgatactggccaaatacaggctaaaggcccaagtggagaaggacaaaagcctaagtggagaatgacaaagcccccgagtggagaatgatgaaggcccaagtggagaaggatgaatgcccatatgcatacacactttcgagacaatatattgttgctcaaggcccaaactaatttg

SEQ ID NO: 85963 - DNA, 355 bp, Glycine max
gctttaactcggatgtccgattcaggcgcattatatatcgagacacttgatattgaataacagaagctctcgagaaattccaatggtcataacttttcacacggatgtccgattcgggcgcataatatgtcgagacgctcgaaattgaacaacggaagctctcgagaaattccaatggtcataacttttcactcggaggaccgattcaggcgcataatatatcgagacgctcgaaattgaacaacggaagctcccgagaaattcaaatggtcataacttttaactcagaggtccgattcaggcgcataatatatcgagacgctcgaaattgaacatcggaagctctctagaaatt

SEQ ID NO: 85964 - DNA, 404 bp, Glycine max
cgcttgacacaccatcaacgtacaacccaagttcattctatgctcatacccatgctctaacattacttatgctccattaatgcaacactcgatggacgtggctgctccggggggagctcgacatacgcgatgctcaccacctccaatgctggaaaggacatcactaaagactcctccgccacttcgacatatggtgactaagaaggaaaacttacccgaatatcttatttctccaagacgatgatcaatagcccttccaacacaaacttaaacttatggtggagtgatgaatggactaccctaaccaagtgaatctcaaagcacacctaacagacaactatatgccagacttgtatccattacttggaaagtgacctgacacatacagagcacattcacgaatg

SEQ ID NO: 85965 - DNA, 352 bp, Glycine max
cttctccctattttgctataaataaggggatttttgaagaagaaaagggttcagccccttatgcacttctctctctctcgaaatagctggggaaaattaattccgtgaagaaaatccaagccgaggcgcttccgtaacgtttccgtgagtaattacgcgaagattctcgaccgttcttcaagattcatcgttcgttcttcgttttcttcagtcttcaacgggtaagtacctcaaaccaagctttttaattcattctatgtacccgtggtggtccacatcttgtttcatgtatttttattttcgctttcatttgctttttatacccccttttgacgtgcttaagccatttatt

SEQ ID NO: 85966 - DNA, 238 bp, Glycine max
ctaaaatctctcttccttgtttaacttatctatcatgacattctcattgatgctttatggtctcacacctgttgcactctatacatggaaaaaatattcgtaaatcattcattgcaatatttctaaatccaatgtcccaatcttccaattcctttagcccaacctatatacagtttatatttgcaagttgtcgccttaaatctatgagcatcttgtttatatggtactcaaatcccta

SEQ ID NO: 85967 - DNA, 362 bp, Glycine max
tgctagcttgagagatagataaaggttgttatattttaatgagaaaccaagttgggtgaaagtgaggcgcaaccattatattggacttgaaggggtttatataggcacataagtgagaaaaactaattgatataagaaactagctagaagggaaattagaaaagtgatcgatatagctgtgattttgtgtttgtatgtggccacatgagagagagagcaatgatgacattggagtcatcatgattacaaagggcagcaatagatgagaggaaggaagaaaagaaaagagggggtgggaatggtgaaaaagaaaaacgcttcttctctttgtttaatttcttggcctctttgattgcctagtt

SEQ ID NO: 85968 - DNA, 437 bp, Glycine max
acgctgttcgcacatcgtacgcgtgtatgtcattcactccacaaggcttgaagtagaggagaccttctatcctattacgcaacgcggcggacaaaaatgggcagataatttaatggtcattattgtcaatgcggaaggtattttgcgctccactatccatgttcacatattattgcagcttgtggttacgtgagcctgaactactaccaatatatagatgttgtttatacaaatgagcacatcttaaaagcttactccccacaatggtggcctcttgggaatgaagtggctattcctccttctaatgacgcatggacacttatccctgacccaactacaattcgtgcgataggttatccaaaatcaataacgataaggcatggacgcctattaatttcttcttacacatagattggacttaagactacttatcatat

SEQ ID NO: 85969 - DNA, 297 bp, Glycine max
agcttggatattattttttagaagttgtattgtgttaaccattactatgagtgtgataatactaagacttatgacatccactttaatgcgtgctgtgccattatgctgaacacgagaatctaacatagaaccacttactcggaacacccggctaaaaatatgtattggtgcttctcggagataagctatcttgcacgcctccgaagtggatgtcttataccgagactgctacgcctcaaaggcacttctcgatatggacagctatctttgaaagttgatatccagatgactaatgct

SEQ ID NO: 85970 - DNA, 460 bp, Glycine max
tcacctgcggcatgcaaactctaatcatatatctcccccatctgttactttttattatgatgccaaacatgtacgctgttacaactttcacatcagaaaaaataatgttaataaatctattctgcattattttacgccaattttgtgtcaataaacaattcttatactatcatcatatataaaattataattaggaaataatcaatcaaacaaccaatatgcaaaatatgaattatattggccatggaaatggctacaaataagtatttaatataaactatgtatatagagtactggcaattgtgtggatagtgatggtaacgatgatgggcctaaatggataatattcatgtgaactttcctaatcaaatgcaactcaattaaatttgtgtgaggtaacatgactaatatataatatgtattgtattttagtgaacctaattaagattgggtcaataat

SEQ ID NO: 85971 - DNA, 348 bp, Glycine max
tagtccgttggatcatatatgagattatttttttacttagccatatttaaacattgtcacttttccttaaggccgtcctttgtggaaattaaatccactgtatccctttattgtaattaaaagttgaattacacttttcattcctattctaatggtctaattatagttcctttggtcccctagataacacaagtacggatataaataaaccaaactatttgctaactattctgtctagattcacacttactatttattcaaactcatttatttaattaaataaataaattcgaacttaatattagatctgattatttaaatgagccatctgaacccaaactttgaaag

SEQ ID NO: 85972 - DNA, 384 bp, Glycine max
tagctcttatgaaatggaagaagacaaactgatcttcaccactctcaacacacaagcgaccaccagctacctctctctcaacagcaaccaccagctacctctctctgaacagcaaccaccttctttttcaccttcaacacacaatatttacaagcaaccgtgaacaggagcctccctttcaaccaccttgcttttatatcccactgaagctgaaaacgccaacatcactggcggcctcctctcacccaaatcgccacccgaggtggcgccttccaactacgaccgcagagctgcaggtgctgcagctacgattgcagaagtgcaggtgctgaaatcgctggtcataccagcgctatcctgcacccttggatgcgcctataggac

SEQ ID NO: 85973 - DNA, 353 bp, Glycine max
agcttgaaggtgtgtaacccaccattttcttattttttaacactagtaatatgtctactatcattgttgttatttctttcttcggtattgagggaaacacttgggctgctaaatccctccacctttgggcgtattctttgaaagatctgtgccccctttttgcacatgttctgtagttgcattctattcgaagccattatactgacactgtctaacgacgacaaccattatgtccttccaagaatggactcgggaaggttccaagtttgtgtaccaggtaacagctaccccagtaagactttcttggaaggaatgtatcagcaattcctcatcttttgcatatgcccccatct

SEQ ID NO: 85974 - DNA, 349 bp, Glycine max
taagctccttcaactgcacaaggctctttatatttgaagagtatccttgtggaaccttcacccgatgaagacactgacaaaaacttatcttctccttttaggacaaagtatgacaagctgggggcaaataaattttcttcccatcagaccttggatgcaactgtaatcgtatccccattttagctaaatcttaacgggtattcaagccatcctttgtcttgccttgaatgttaaggagcatcccaatcacactgtcacatacatttttctctacatgcataacatcaatacaatgtctaacatccagatcagaccagtagggaagatcaaagaaaatagacctcttctt

SEQ ID NO: 85975 - DNA, 361 bp, Glycine max
gcagcttccattgttcaatttcgagcgtctctattattatgcgcctcaatcggacctccgagttaaaagttatgaccatttgaattgctcaagagcttccattgttcaatttcgagcgtctcgatatattatgcgcctgaattcgacctccgagtcacaagttatgaccatttgaatttctcaagagcttccattcttcaatttcgagcgtctcgatatattatgcgcctcaatcggacctccgagttagaagttatgaccatttgaattgctcaaaagcttccgatgttcaatttcgagcgtctcgatatattatgtgcctgaatcggatatccgagtgaaaagttattaccatttgaat

SEQ ID NO: 85976 - DNA, 380 bp, Glycine max
  unsure (1)..(380): unsure at all n locations
agcttcttcatattgctccccttatctctaatatcaggatctcccatntgcccatgggctatcctaaattctgcatttacttcttcttctccatccttgcagcccaaagaaaaccaacctttgcaaaatctctcctttaggaaagctccgaanaactcatgtgtttttcctgttatctagcttcctacaagctgattgaaaggagatgcaatttccataaaaatttcaaaggatgaatatcaactatgattaccaagttgtgaaaatagcttacatggttgtatcagtttatccagaggatctaaccctatcanagctgaagagttatgccagaagcttgcaaagttggggaagccccttagctagtggaagatgggacg

SEQ ID NO: 85977 - DNA, 345 bp, Glycine max
ttatgaacaacttcttggagatttttttcttccaaagaattcatcatatgtccaaagacattaaggccatggacattccattcctaatagcaccaacaaaccccataaacatcaaaaaatgatccaaaggatcatcaaatgagaaaaaggttctataagggcactgtttttgcagtttcatctttggcctcgctgttgtttgagtctttcttgttgttaggatctccattcaagtcaatatcctctgccattttcttcattgaagactttaaacacccttctactaattagcaatcactgtaaacagaataaacctttaaaaaatgcgttatagattcaacttag

SEQ ID NO: 85978 - DNA, 388 bp, Glycine max
cgcgtgctcagatgagttgtgcacaaatcctttacttatattttaggactcccttgagcagctgggctgacaacattctgagacggctgttacatgatcaccatcttagacagtatggatcatggcgtgtatatcttactttccatcacaactctataatactttctgaatttgaatgttatgtgcctcactacgtgacgtatggatagataagcaattatctgcgattaattatctgagatggttattacaaaataaccgactgagaaagtctggcatactgtgctttctaagacgacagaggagcaataaccatcttagaatgttagccttgtcagaccgttgttacgattgggaagcatcttatgtcatactatatgggacggtt

SEQ ID NO: 85979 - DNA, 350 bp, Glycine max
gcataaaatctatggctaaatgactatttttatcctttatcttatttattctttcaaaatgatttttttatcttttaaaaaattcactttgatcctttatctgatttaaaatgttcaaaattgtcatttatcttttaaaaagttcactttagtatcttattttatttaaaaagttcaaaattatcctttaactatttaaatatattcaactttaattttccctcggatgacactcaaactattttgaatatatttaaataattgaaaactcattttgaaccttttaaataagaagaggtatcaaagtgaattttttaaaagataaaaaatcattttgaatattttaaata

SEQ ID NO: 85980 - DNA, 423 bp, Glycine max
agcttctcggctcatgctgggaacgcctctagttcatcacccgtgcagcctaaggcacccacccagagggaagctccccaagtttcgactccgaacacggctcgaccggccggttattctaacacgacaaggaacttccctccaaggccattgccggaattcaccccgctcccaatgacgtacgaagatcttctaccatccctcattgccaatcatttggccgtggtaactcccggaagggtcctcgaaccccctttcccgaggtggtatgaccctaatgcaacttgcaagtaccatgggggtgccccggggcattccatctgaaaatgcttggcccttaaatacaaagtccaacatctaatggatgccggatggctgactcttcaagaggatcggcccaatgtgaggaccaccccgctcgcc

SEQ ID NO: 85981 - DNA, 351 bp, Glycine max
  unsure (1)..(351): unsure at all n locations
tggactgagcatctacgaggatgcangtgtttctgatgctgacatgctgccactggaggtggccgaagctgatgctgagggcagcaagagggaggaggttgattaaacttaaatgtgatgtgtttcttattagtagcttctctaatgcggcaaaagtctttacttttttgttgaatttaaccaaagccattgaagttttcagtaagtaaagcagcttaaatcggaagatattcaaaataaaacaagtagagaaagatctaagtttactaaattttgatgcagtggctacttaccttactggtatacacagtgccaacaaaatgcttcatagcagaataaagttgctacacc

SEQ ID NO: 85982 - DNA, 447 bp, Glycine max
agcttagtgcgagtacgcatgtccaagtccacttttgcaactataaaaaaagagtcaaatcaaggagaaaaaatatactgagtcttaaagcactttaatacacgcctaaagcctcataactctcccttagagaattctttcttcactccaatcattttctattttctttttccattccttctcttccatcagtttctaaacctattttcaagtgtaagatctcttatggctatgagaggctaaacccttatatagttagggtctagcagacctaaaaagttaaaagatgtattggatacttcatatctatcaatgtaaacaagtgttttttttcctattatcctttcttaacttttagttcatgtatcattcatccttgcatcatctttgagggttaggtgctcgacagaagggaatccttaataaaaatataaggaaggttttgca

SEQ ID NO: 85983 - DNA, 355 bp, Glycine max
tgcaagtgaatgaagtgataggttgatgttttttactgctgcatttggctttttggtctaaccttgctaattccatagtcttggagcttacatggttaaatatttcagattaagttattgtttaaaactttcaaaaaataaaaagaatatagttagagggaaacaatgtcaatgagttagattataaaatctagtttttgacttaataaaaaacaatgaataaaagagtaacaaattaagcatatatttatgatacaagaaaaaaatatgcaaaaaggtagtttgtagctcctttcaaaattaatatcatctcgctttttggcattagaatcttcacttaattgtggtatcaaat

SEQ ID NO: 85984 - DNA, 432 bp, Glycine max
  unsure (1)..(432): unsure at all n locations
agcttgagcaacatttattattntaaaatttattgttatcttttcttgtaatatgatgagactttntttttcttttgatttttgttcactggacttctttctttctttttcggatttaatttattcactcaattaacttttttgcatcaagtaacattatgtttttgtcttcatagtgaaaatatacccatctctgatctcgtccccttggatgaaattaagttcttaaaagagggaaaggttaccactccggggtttatgtagcctccaaattatacttttatttcctctccttaactttnttattaacggttaagaattttataattcctgattaattaatatgggtagcatattatattataacatntatattagttatttacatttaaatgagttcaatataaagtgatatatttaagtgagcccatt

SEQ ID NO: 85985 - DNA, 353 bp, Glycine max
tgcttctacaccatggcttattccctagtggatggtgcctcccctttcctcatctcctttgccttccgctgcatcactatggtggaaaatcaccattgaaggacctcattgaagctcaaagatccagcctccatagaagcaccacaagcaagcttccatcataagtggcctcagatatcttaagaaggggggttgaattaagatatcacaaactattcctaattaaaaattctattcttgattttaacccaaatcccaagattccttttagaatggattcctaaataattattcaaattaaacttattgaatagaagaaataagcaataataaataaaagagtttaagggaag

SEQ ID NO: 85986 - DNA, 358 bp, Glycine max
  unsure (1)..(358): unsure at all n locations
agcttggatntccttatagtagggaatatatctttcctaagatggagccaaacccagtcaccctcattaagaactagctcttttcttcctctattgcctttagttgaatacacctttgtttggttctctatttggttcttaaccctctcatgcaacttctttacaaattctgacctagattcccattctttatgtataaaacatatgtcctgtgggaggcgaatgacgtctaacggtgttaggggattgaacccatagacaacctcaaaacgggactgcttggtggatctatgaacccccctgttgtatgcatattttacatgtcgaatatactcatccctagacttatggttgcttt

SEQ ID NO: 85987 - DNA, 358 bp, Glycine max
tcatgcttaagtatgtatggcaaaacttcttttctgttgttcaacacatacaagtgagcttgtaacaaatgttctagacttggagttatcacatgcagtcctcttgaacccttaccacccaccctgtcatcatgccgagactccggaaggccaacaggtttatccttctcaatgtattctgaacaaaattcaatggcttcttctgcaacgtacctctcaacaatagatgcttctggacgatatagattttttgtatacccttttaagatcttcatgtatcgcacaaccgggtacatccaccgtagataaacaggatcacaacatttgatttctctgaccagatgcacaatcaagtgaa

SEQ ID NO: 85988 - DNA, 353 bp, Glycine max
tcaacaaccacattcataactacacttttattatgggagttaagtagtcatgcgtttacacattgagagagacacactcattcaagatatatatacgatccaaaaggttttcacaatactaatccatacatcaagagagaaatgaacttattaacaacatacacgtatgaagataagggctcattaaggcattatcaatcaatatcaagactacctgcatcacctaacggcttgccaaaatgtccaaccgcactttacaaattatagagatggtcggtctcataacttgtgactcaacagtggatttatggtgtagcaaaaattaacgatgtaaggcacatcacaagcatcat

SEQ ID NO: 85989 - DNA, 306 bp, Glycine max
ttaagtcaccgctgctgcagcttcgacaaaggctacctgttttttccttgacagccatgtgagccttgcagccgtatccttgttatgaagctcactacatgccttaagtgaagaactctgatattaccatatccttaaggaactttggagctttggaattgatttgggaataagtgtggggggtttctgatatatagtacaacctgttttgttggctatgctgtatgaagtattttgggccatacttgatgtacattgtatattggataaatgttggacatgctcaatgaaatgttgcttctcaga

SEQ ID NO: 85990 - DNA, 349 bp, Glycine max
tatgattcttgatgaatgagagatattatgtttagatgagaaagctaaagacgggtgagaaaaataatatgcatttttttctttattacatatgcatttgtttgtgcgtgtttatattaagattgggccagacaattaccttggtggcatcaatgataaattgtacagttagttgggtagggtagaataattaaagagtggggatgggaaaccacttaaccactcattgtacaattttagattatagttgggagaagttaaaaatattattattttctttcttttattcatagtttcaaaaatctaattgttgatcatcccgaccagttaaaatattgagttaccatag

SEQ ID NO: 85991 - DNA, 332 bp, Glycine max
cctaggtaagagctactcttctcaagacgtatcataagttggacaacacactattacatctttctcaggatttgaatgatatgaatcaacttcctgattatcacttacatcatagacatgatctatcgagagaatgtgcatcagcgcacaaataatatgaatctctcaaatgaaggaaacgttacctctggctggattgtgaaaaacaccatatctgcgatattcttgctctctgatactttgtactatccggacaagattgttctactccctgattgattcatacgggtcgccgattttattactcctacaactacagttacctacttttc

SEQ ID NO: 85992 - DNA, 352 bp, Glycine max
tggatacgagaccaggatatttatgatctctcaaaatcgggaggatgagaaacataaacttcctattcaatgtatccatttaggaaaacacttttgaaatccatttggtagaacttgaaatccataacacaaacatcaacaagtagcaatcttatgaagtgacaaagattactattagaatgcttaataaactattatggagagaagtagaaacacttgatttatactagttcaattaacctgagccacgtccaattctcctttactcaatagtaaagggttccactaatcaaaacttgattacaaaacaagtatgctaacttgccactcctggctttataagtgtcgcaac

SEQ ID NO: 85993 - DNA, 450 bp, Glycine max
ataagtcgcctgcggcatgcaagctcaacaaatggagctgtgtgctgccttagtcatcatagcgtccggaagactcatcacctctatcatattgaataatgcccacattgatgtctaattgcccttatatatcattgtactaaatttctaaagcttccattgcctatgaaatctccggcagttagtatacataaccgtaacgtgaatatatcatcaatatatggtgataaaaccatttcgaaagaactaacattaataggttcacatatatcgagatgcacaatcataagaagttgagtgcttcttgcagcttctttctatgaatgtatagcttgatatccctcaatacaacccacacaaactatttagattgcgtaatattctagataagagaagaatctcattctttagtaacctttccatcctatatctagaactgtgacctaaacg

SEQ ID NO: 85994 - DNA, 349 bp, Glycine max
tgacaacactctcaacccagagaactgatttgcttacctgctaacctaagggattttattaactaacaatagctaagctggtgcatcttgtaaggccctctattatcgcaccactatagcctcgtttgccatttgcttgtgcattttcatttctgttaggatatgttagaacaaaatcacaaattctattatcccaattctcagtataaatatagcatcagtgtaataaggcagaaccatgaatgaaatattaccttgagtcctctctctttttctttggaggtactggccctcaaagctagcttatttaataatgtaacattctagtgctctcgtagagctttaatgg

SEQ ID NO: 85995 - DNA, 440 bp, Glycine max
  unsure (1)..(440): unsure at all n locations
agcnntgcttcctttgattnttgacacgtctctgtacttcattcattgtgcaaccaacgacgccaagtgtctcgaagcggccaatcaaaggttgtatatcatcaaataataatccccggacgaaattatggtatgacactttcgtaagctatttaagctaagtctattccaacaagagggatctgaggatgaagcttagtttaagttagtctaaacctatgagggctatctaaattaagcctagcccaacaagagggatctgaggatgaagcttggattgatttattctaagtagggatcgaggtttagtaatttacgctgtagcatagaacacaaagcatgattgattagagaaacatccttatatgcatcagctggtctgttagaaagacccaacacatctacctactgtngtcaatttacttgcattttactgtttt

SEQ ID NO: 85996 - DNA, 356 bp, Glycine max
ttgataactatcaaaaaaaattacaggatgtagaaattttgaatatcgatatggtaacaactcatgattagagaaaacctttactagaatatctttgaaatcctaatttatctatggactgaaagacaaaatatattgtaaattatgttattcttggagatgagttgtataaaaagagtatagatggaatcttgttaaaatgtttgggagaatcgaatgcttatatagctttggctgaaactcacgaaggaatttgtggttctcataaagctagtcaaaagatgaagtgggcgttattttgacaaggttattatttgccacctattttgaaggattgcattaattatgcaaaatca

SEQ ID NO: 85997 - DNA, 302 bp, Glycine max
tgctaaagtgagtgcttaagtttttgcttcttatttgtctacaaattacggacttggaaatcacctcttgtataccaataaaaaatagttaagcaaagttactcatataaatgtcttgtcaaatcttttggaccatagtttttgtgaaaaacacatcttattttcaagctacttgcataagcaattgtgttctaaatgttctaaacacaatatgaattacgctccaattcatctctattaattaaaaaaagtaaggtggtaaataattattggcataaatatatataattatagtaatagag

SEQ ID NO: 85998 - DNA, 434 bp, Glycine max
  unsure (1)..(434): unsure at all n locations
gacctgcggcatgcaagcttgaaggattatggcgtacctatcacatgttgtactangcggctgtccggcgatggtgcacaacaagtttatcacatccacaatgcgcgcataaacccaccatcccctgtagcccacctacaactgagctcacgtactcccacgtaacccatattctcgggcatctcaacaccgggtccccataaaaccatccaaggcttcacaacatccaagcaaaacaacattctaatagcacaagcaatcacagccaagcaaaacagggcaaaggcagaaaactctgctcaacacactaaccaatatcacagcttttctcacttaaagaccccagtgacaattccctcggaacaattcgttaaccgtggatcgactccacaatncacctggaaggctatagcgcataagcctacaatgtgacc

SEQ ID NO: 85999 - DNA, 348 bp, Glycine max
tgaccaggaatcatctgtatgggttggttgttgaattctggttgttcctggtgcggagatgatggtacagagggtgaaccatgagctgaagtttcttttggtgaggtagccatggaaaagtagagcgtttgaaatgatttcgtaaatctctgagagctgttgaggaatgctgaaaacgagattaccacgaaaatataaatttgaatgaggaatgtagagggacgtgtgaagcaacggtcgaatttgctttggtttagtagtgaacgtgctattaatgttaagtgagacgtttgagcacgttcagatagcagtagctgctataattcctctagcagacaaatgcccagc

SEQ ID NO: 86000 - DNA, 470 bp, Glycine max
  unsure (1)..(470): unsure at all n locations
gagacgacccgcgcgcatgcaagctntaacctcatcgtctctcacagtctttatatttgggatccaatccagtccttgtgttcggactctcagccacttatgatagctgccgatgatcccattactgcttcccctaagctctatgtcctttcttcacgccgcatcccatgccttgcgaactccttggagtaccctcgcgttgtggtcactaaaaccccgtgcgatgaaaggcgtgatgctttcgtctaatggcgctcctctcatggggtagccaagctgtcttatggtgagaacgggattataattaatacaaccccttgttcccatcaagggaacatttggacatccttcgcatgaagatagaatcttgattcttccttccttctagcgagggaaccaattaacagacgcccccccatgctagccaagagttggtcccaattcgcctttcctttttcgacgcacgagcg

SEQ ID NO: 86001 - DNA, 365 bp, Glycine max
ggacctatgatactcagcttttatttcagtagatgaagatgaatcttggtcacctcatggactcttctaaggacaatagcatcatttcttgcactaaattgttgggagttggaagccatcttctcaatcaaattcctagcctcagcaggggtcatatcaccaagagctccaccactggcagtatcaatcatactcctctccatgttgctatgttcctcatagaaatattgaagaaggagttgctcagaaatttggtggtgagggcagcttgcacacaatttcttgaatctttcccagtactcatacaagctctctccactaagttgcctgatgcctgaaatgtcttttctgatggtagtggtcct

SEQ ID NO: 86002 - DNA, 459 bp, Glycine max
  unsure (1)..(459): unsure at all n locations
atcctttagagacacctcgccgctgcaagctatcttaatactgtgtatgctctaatctgttttgtaatcaatcctagttttcattnttggagataatagagtttcagcttcttgccttttccatgtgttgtttgagatttatactaaaagtcagatttgtaatgtagcatcttgacatggtaaattatgttgcatttatatgatataaataaaactcaaatcaattgtggtgcaacagtagcccatcaagcataatcaatggtccaagctcataggaatcttaataaacctgttagagaagacaatcttgttttcagctaatgtacctgttcatgttgattgatgtgatcaagaaagcttaggtgttgctcatgattgtaagtgtgtttcgatgcaaagagggttatacatacacacactcgcacaatgcggcaagataaataacccttttgcctctat

SEQ ID NO: 86003 - DNA, 374 bp, Glycine max
acactataaatcaccaggcttgcctaattaacctgaaattgagagaatttgtattattaaacacacaagatggaagtactaagtatttattacctatacttaacaaaaaatacttataacactacaaaataaccataaattggaagagtttgatacattttacacaagttttatacacaaaatttagtcatattcaccgactcacattctcacgcatcatttcacacgtgattttccctttttaatagttagtttacacatctgttcatataaatacatctcttttcacactagacacctatttactaaaatagctttactaagtaacacaagttccccgagagttcgatactcggttcttaccgttttatact

SEQ ID NO: 86004 - DNA, 424 bp, Glycine max
  unsure (1)..(424): unsure at all n locations
agcttctggaatgttaattcttcacttatgatttcttttattggaacaagcaaaccaacattgtatatgggtttgtttagataagtttatctagaaacacttcttggagaagaaaataagaagaaaaaaaattaaatttttctataagctcaaattaacttatatatagggcatgtttgagtgagctccagttaaagcacttctagagaagaaaataagagaaaaatgaaatgaatnntttcaaagttaaaattaattctccattaattatatttgtaaaaactatttcatcttttggagaagttatatgagaaaaattctaagaattagcttatgcattttagtttatggaaaagtttgtttttttttttattttcttctcctaagaatggttttggataagcctacccaaatcaaaaaacta

SEQ ID NO: 86005 - DNA, 354 bp, Glycine max
tgtaatcatcacaaacgggccctatgatttttattaatatataatgaattgaagatgtctctaatttgttataatataaaaattaaatttaaataataatcttgaaaagaataaaaattattaaaaaaagtaatataaaagatgtcatgcgacttaacaaaaaatatatatcactatgcggaggattgtttcaactttaattgtaatcttaagtttgaatcatatatatattgttgagaaagtttttccattcataacaagtttatttgactcaaacaatattatcttctatgacatatacatgcctctctatcaataaacatagtttctaaacatattatcacttaagagtga

SEQ ID NO: 86006 - DNA, 360 bp, Glycine max
atatgtcgatctttcttaccacagaaccggatcatatctaaaggcctacgcctttaaaagatcacctttcaagtcaaatgatatcgcgtgacttacccatcagaaataactacgtgggcttgatttcctcttcaatagagggtacttcaccacaagatccgcgatattgtccccctcacgaacctattggcataaaatcgaggataacatctattcacaattgtataaaataaggtgatgaacgatgagacaaacgtgagagatgctaataccttcctcagacgataagacaactcctgaacttataattttcgttctgtaccggttccttcatgtttttcgaatgctgccctatataaa

SEQ ID NO: 86007 - DNA, 356 bp, Glycine max
tccttaagaagattccttaagaagctagagcttagctacatacacctctctattagctaagctcacctccttgagatgagaagatggagcttagctacactccccctataatagctaagctcatccccatgacaaaaaacatgaaaatacaaaaaatatccctactataaagactactcaaaatgcctcgaaatacaaggctaaaaccctatactactagaatggccaaaatacaaggcctaaatgaaggaaaaacctattctaatatttacaaagataagagggttcttacttagcccatgggctcaaaatgtaccctaaggctcatgagaaccctagggccttcccttggatct

SEQ ID NO: 86008 - DNA, 446 bp, Glycine max
agcttaactagtcaaaattgtgtttccatcacgttatattcactatagactcattttcaactatggtggctattttatgtttattgcggctaaaccaagagttcaacatgtctcccacattcctaatatttttaggaactgctcctagatcatggactttcacgtatataactgctcttatctcttattatgcgtcctcaacttccgatcgatcccgcttgcatttatcttctaaaacatttattcaagacttcaagtattctgaattttcaatttaattgaccgaattatcctttcaacatacatatcttaatcatttacccgaaatattaaacattcttattcagctataatttcaatcttaattaattcagctaactaacttttggtcaaaatatttcgaatggtaacactatacaattcagaattacattttatggcttttg

SEQ ID NO: 86009 - DNA, 366 bp, Glycine max
cttatccttgaaaccggatgctgtaaccactgtttctcatctagtgaaaacacgtctctctgcaatgagaaagattcagaaatgtgtaaatgcttcagaacaactatcgccaactaagattgttacaagagttaagattacaaaaaaatagttaaacatttaacaggaatatacttatttaccctttaaacccatggatcttttacatttggaaaagtatcatgcctccagtattcagttattgaaaatgaaaaaacatgtaagataggaatgtgcaacaaacctgcattccaccttcagaaaagatgcgaagatagttaaaactagttactgctgcaacccaagcagaaccaagtgcaacaacct

SEQ ID NO: 86010 - DNA, 350 bp, Glycine max
tgagatgaggaagtgttgaagggtgatacttcctgcttttattgttgaccacagagtggtacctggagatatgtctcgggggtcaggagaccttggggacgtcatgtggggtgctattgcccaaaaccaagcttgaccaatcccgacccaacccgggcatagtcggtcactgagaacctgtgatgtacctaagcaggcgagctcctggcagtcaacagataaaaggaacaatgaccacaaatcaaggaggcttgtggtggctggccagctgtgaaacttgattgatatgtgagatatggtctctggtaatcgattaccaagggtgggtaatcgattacaaggcttaaaaa

SEQ ID NO: 86011 - DNA, 422 bp, Glycine max
  unsure (1)..(422): unsure at all n locations
agcttgttgttggcggattgaaagactcttaattctcctattttanggtgggtcggcaagctaacctgtccccttttttctattaaagaaattgattttataaaatatactaacgataataataaatatatactntgaagaacactaaatacttaaataaataaattgatgtcaatcatatcatattaactatacggtttttcttagtattaaacatccttctcctcaacaaatgaccctaagtagcaaaagcaaaatcatctttttttttatgaaaaataataataatattgactgcaagccaactttgcgccgagcttgctggtaaagtatatggatgagttgagacatctagtttgccccatcattttagctggatagacagtcttaactcaaattgtgtatatcattacaaagtatat

SEQ ID NO: 86012 - DNA, 351 bp, Glycine max
tgaatatataatgtatccaatctatttatttactatgtaggataaaatgtagtgtgaaaatcacaatagctgtcacaagtatattttgatttatgaacaagtgaactgaaagttactgctaaaaaaacgaggaacgaacgcttaaaaggttggttatcatgatttaagaccttgtcatcaacggttggttgaactagtcctgcaaaatcaaagcatgtttgaatcaaaataatgcaagcagattgagcataagcacaacaacggaaacaactatcaggatcacaatttagaatgcccagcatgcaacgcattcttctacatagggaaaagattcaaagaacaaaaagttgg

SEQ ID NO: 86013 - DNA, 445 bp, Glycine max
  unsure (1)..(445): unsure at all n locations
gcttatnataagctcatcccagatgatataattattataagggagatccttatgtcacaaataccatacagaacctacatgtttacttagtgtcggaaataacttaaaatacaattgctaatccatacctttatgaacaggaattttgaaaggtccaacagaggatatggatgaagtttgtatccaccacaatatatgcaagataaagccagcacacgaacctttcagcataaaaacaagaaaaacatttatcaataaatgtagaaatagatgctatgaaggatataataatttattgaaaatttggcttcactactagaaaataggctttctacatcggttatcggtgcctttctatgtcggttatcacgtgtcgttgtaacccggagtcattgaaacacaacgacggctaagagaccgatgttgaattctgacattttacatc

SEQ ID NO: 86014 - DNA, 348 bp, Glycine max
tgtataattcaccctaataccgatgctttatgctgacttactgtcatatgtactcaataatgcattgtgtcataccctaattttgaccggggaccattctttgataacatgcgaccctcattttaccaattcgaggtacttggcacccatcgttacgcaatttgtgaaggtccgtgatatgccaactgtcactggatagcattgctgcacaatccgtgatgttccctgagatgccacatattcaaaggaagtgttagtgcgcactccgagaagttctgcaacgtctcagatggcaaacaaggggatgatgatgtaatctgcatgggatgggaacattattgtacaaaa

SEQ ID NO: 86015 - DNA, 435 bp, Glycine max
tgcttgcatacagtgtcatttgcatatctatctttcttattcaaccactgcttgacattgttaaagctttccatctcagtgacatcatagacaatctgttgcaatggagaaatatattagttcctggcactgggcaagtatgtgtatgcagaagatgataggatgaagctaacttacaataattccatgtgctcctctatagtaactgcttgttatagtcctgaatcgctcctgtccagctgtatcccactaaacaaaacacaacaaatgaatccaagcttggcatgcatgtggcaataatcatgaatatgatcaagtgaaatgatgacttcgctttgattctcattacccaacaccgacagaggtgaatgcagaaattaaggtatattacacctaacaaactaaaaacacaataatatagatcgggggcattat

SEQ ID NO: 86016 - DNA, 349 bp, Glycine max
tgatatgtggcactctatattatatgatctttcccccacaaggaagcatctttatccccgttgctcaagtataaatcttaaactattgtttcttctttcgctctcaaaatatatccttaattgtggatatctttaaatagaaaataggctaactaagaacaccacacatgtttattaataatatgaaagtttttatattaataatgcatgcataactattcaacctttttttttgtttgctgaatgctattaaactcatcttaaagtatatcaaccgagacaaaacccaatgtaattaaaaatatacattgataagaattacaaaagtttaattaattataagagatat

SEQ ID NO: 86017 - DNA, 436 bp, Glycine max
agcttatgatgattcattttgttactccttcttttagttgtccctcaacaccggagcctgcattttaggtatataatttgttgtatggagagaggtacgtgagatgaataattattaggccaatatatattattttttggagggtataggggaatttagaacatatatgaatcttatgcatagcacatatggtacaatgatactgggtcgtacattgggggggtattattttttgttgaaataattcgcctctgggtatagtttctttcactataaccagtgatatatttgcaacacggacttttggggagtagcatgggtagtatattgtgtacttgggtacttctggtgccattatgtaaccgttattctggtaaaaatatatttgctctgcttttgtcgataaaaaaaatcaccatgaaaggccccctctttg

SEQ ID NO: 86018 - DNA, 367 bp, Glycine max
ctcttgctctagccccctcaccccaccccaccttatcttgtgtaagtcaattttgcaggattttttgtgtcatttaaggtcctgatgaaattttgaagaggatgcagactgctacatctttccaatgttccataatttgtagttaatccttccatacttcataccttatgcccatttttaagaccaatttatcttttgcatccaatatagcttcaattatttggagttctcttttgtggcttgactatatgttggtttttttggatgaggtgcaaagtgattttgcaacataatgcactttgtcttgataagatatattttcttgactgcaatattgcttgaattatctagccattaaacattatgc

SEQ ID NO: 86019 - DNA, 438 bp, Glycine max
  unsure (1)..(438): unsure at all n locations
agcttgctaacatatcccatgaattgcttccgtatgaaatctccagctggattaatttgtcaaacactggaatatcactggtagaagcatgcttcagacactgcacaaataaggcatgacaaaaactaatcaaaaaacaaaaacaaataaagttaaaacaatggtactcctgttttataaaaatgtccaccatcataaattttccatcagtcatgttaattatcgcaacttcagagtctcaattattaccttcacaacttgtagcacataatatttaccaagaatctgatatatttttatacaaaatgtcagtgtttttttttatcacttttaagaattttttaaacaaanaagctcaatgggctagccaacctcaacccatttatcaactcattgtggaacagctatgtgggctgtgatgttgagttctctaaaagt

SEQ ID NO: 86020 - DNA, 348 bp, Glycine max
tgcttgtggagcttctatggatgttgtttctttgagcttcaatggggtcctttaatggtgatttttcaccatggagatgcagtggaagacaaaggagaagaggtgagaggaggcgccatccattaaggaataagccatggaaaaaaagagcttcaccaccaagatgagccttggataagaagcttggaaggatgcttcaatggaggaaaagaaagagggagagaaagagagaggggggagcacgaaattgaaggaagaaaaagggagagaagttgaactttgagttgtgtctcacaagactctcatttatcaaagttacaacaagtgttacacatgcttctatttata

SEQ ID NO: 86021 - DNA, 423 bp, Glycine max
  unsure (1)..(423): unsure at all n locations
agcttgtagaactaccacaaggaaagattgctgtttgtgcaaagtagatgttcataaacaagctagacgaggcaggtaaggtaataagaaacaaggcaagattggttgctaagtgtcctagtcatggctttggtgatgataatcccaaagttgcccaaatacagggacctatgaccaggggtaggaccaaatagtcagaggataccctccaacaactggtagcagccatacttgacaaggccctattagagaaggacgaaggcccagaggcactcccaagaatcttgattgctgaagacccaaactaatttgaaggcccatatcaaatatttnttatttttgaattttaattaaataaaattggtggctgaatcctatgccttttcagctgcaccaactttcagctacactatatgtattcaa

SEQ ID NO: 86022 - DNA, 352 bp, Glycine max
tcctaacaaaaattttcatgcaggtgataccttcttctagtaattctgacttacaacagcctcctatccttcttccattcccacctagagcaattccaaacaaaaagatggaagaagaagaaaaggagatcttggagaccttcagaaaagtagaggtgaacatacctctgctggatgccatcaagcagattccaagatatgccaagtttctaaaggagctgtgcacccactaaaggaagttcaagggcaatgaaaggattagcatgggtagaaatgtgtcagcattgataggtaaatctgttcctcacattcctgagaaatgtaaggacccaggtactttctgtataccttg

SEQ ID NO: 86023 - DNA, 440 bp, Glycine max
  unsure (1)..(440): unsure at all n locations
agagacgacccgacgcatgcaagctntngncaatgtctataaagtctaaaagttctattatgtttctcttcaactatcaagagccttgtatctgtcaatgattcaaaattcggtgacttgaaatctcatgatggtcatgtgttaatgcaacaactattgtctgtagccatttgcggtatcttgcctgacaaagttagggtagccataaattgtttatgctttgttattaatgctatttgctgcaaagttattgaccctcgacaattggatgatttgcagaatgaggctgccattgtcctttgtcaaatggagatgtattttcctccatcattttttgacataatggctcacttaatagttcatctcatgagggagatctgatcgtgtgacctccgttatttacggtggatgtatacatatgagcagcacatgaaggttta

SEQ ID NO: 86024 - DNA, 367 bp, Glycine max
acactaaaacactaagcttgcacccagctcgcccaagcgttcgtatgttactcttggaacgcccaaaggggcctggttgctatttgcaccccttatttactaaatacaccccctgcctttttttgctgattctttttctgtaacgttacggaactttacgaattacgtaacgatacttgctttctttccgtaatgtcatggaaccttacgaattaattaatcatcccttttttggcttccaaaatgttacagaaccttacgaattgtgcaacaatgcttccttttgacttccgacatgttacagaacctcacggattgtgcaacaatgcttccttttgactttcggcatgttaaggaacttcacgga

SEQ ID NO: 86025 - DNA, 386 bp, Glycine max
agcatatgatataatcgataaaaaattgaaccttcttgactgccaacctcactttaccgcactccaccacttttatattttattgtatataggaatattttttattgcatatatgaatatgatttacaataaaaatacatgaacggtctttaccttataaacaaaacagatgtatcaaaatgttacagcttacaagagataaaattgctcacacgcctattaatcatctaagttagatacataaataaacttattctagaaacagatagtgagataaattaagtatcacaacaaattacttaactaaagcacactaaattatacgcaaagcatgaactctcgcgctatgtcattgctaaatggtaagttctcttaattagcatata

SEQ ID NO: 86026 - DNA, 378 bp, Glycine max
acactatagaactacttcaggccttttacaatccatagggttcttttaattcatttattgacccagggggttggccagaggccacctaataattcacgctcacgaagagtgaaagtagtttctcctgcctcacgcaatcttgaagttcaggtttcattccaaggctgtctaacttctgagttctgtgtaaaagcttcttctgctggcaacaatggatttcaacttgcaagtagtgcagacaacagtacaccaaaatataaaagaccgcctgatgatacttcatccccctttggattatctgaaagtgaagaatctggagcgggggaaaacaaaataaaagaaaaagctgtgaatggaagtgactttgctatggccgca

SEQ ID NO: 86027 - DNA, 425 bp, Glycine max
agcttatgtacttgtacaattatgccatctcttattttatattttacaaacaaacacggaactagaactgcctatgatatcctcattctgaaatcaatttgtattccaacagaagttattttacttgcatgagcaatgttgatttagggagagatgcgttttgtaatacacatgttaagactaatatgaagactgaaatgtagcatatgcatatagtatctttttgatgctcgaggagttgctatatgctatggtgttagaagaagcagagtataactaacataactaccatggattgcttgcattgcacgaaacgaaaagagatacctgatgcgcgcgttagtaataacttaagcaatgggcctgagtgagagcccaatcacggtatttgtcttatatatatgctgtgctctgctccaatcaat

SEQ ID NO: 86028 - DNA, 448 bp, Glycine max
  unsure (1)..(448): unsure at all n locations
gcaagcttcagtcttggatggtcaaacatgatcttttcattatgagatgtttgaaaatctgttataaaagacaaataactnttcaagatctgacatttattctatttttatctattaaatttatattcaaatacgtattatgaattttgaattcaagcttagttaaagtaattaaaatgtgttctaagtatattcctattggcttgaacacatgtgcatgcatattttgacaataaggataaaggtttaatctggatttcaattaaatttgtaatgacgagaaatgagttcttatttttagaattttttatttttgtatgcgtctgaggtgtttgttgagatgggggtgaagggttttttcttttttgttattattctgagtgaaggggtcttaattactttggcgatatgtggtcatgaatgaatattctaggctttttgggaaggg

SEQ ID NO: 86029 - DNA, 355 bp, Glycine max
tagaaaaattaaaataccatttgcttttttatgcaaatattaatttataccctttacaatgcggtggtaaactccggtccttatttcttataataagaactgtaccgtactcggaaataaccaacatccacacaaccttgtagtgtacttattgagtatcgtcatcgatcctgttactaatagaggagaagaagaataataaggtaaataatattttattcctattatattcttgacttatatactgatttgaatgtcaaaattactttttaggtatccatcccaccccgaagaaagagctcatgcactgtgagagagacacacatcaaatacgttgagagacgtaaatcctgat

SEQ ID NO: 86030 - DNA, 378 bp, Glycine max
  unsure (1)..(378): unsure at all n locations
ctgcagctttatagaattgggtgccactttctcatttttattattatatagcgtncaagtccagagaagctgttgaaacaccacttctgttataacaagcacgtgccaatgctcacaccattctagaaggcattgcttctttatgagatcacactttagaatgtgtgcattgtttactttgcaaattcttatattcctttgcaacatcagtttggtttatagtataatatatcttgctgtcgttcaaacttaagaggcggatttattggcgctaaacaacgcttcttctgaggattaggatcaatagtctccgatagggtgaatttatttctgagcatgaaatgctatcttctggcttgatctatgcaaagcgatatt

SEQ ID NO: 86031 - DNA, 359 bp, Glycine max
ccttggagctcttgacccttgaattctttcttgttgtagaatcttgaagaggactttatcttttcctcttgggtcttgaaaagttcttgatagcttcttgaacattttgaactcatcctttgattgacctttgagctttttgtcatcacctttttcatcatcttttgttatcatcaaaacatctttgaatcattcttgattcaccatgaagctttgcttctacattttcttatctctagcctgttcacttctactcctttcttcattcttattcttttcatctttttcaattttttcattttctttttctttttctccttctttttctgcttcttggtcattaaattcttctttcttga

SEQ ID NO: 86032 - DNA, 383 bp, Glycine max
atgcaagcttgatccaactacagttggacatatttgttatatgtctaatctattcttctgagggcaatttcagtcatgacctctagcaacaaactatgtctttcgcttctttcgataattcgtggttcccattcctaattcaatttttaatatctgccacaggatcacaattagatatttgatcttcctattaagaaaatgagtgacatctcgtaggatggtgcttcatatatttgatagggtcattgaggagacattcaaacggcatgctgcttaaataggtttctggcgcggggtgagtattcgcacgatatttgtcattatgaaatgaacatcgaatgctataattgaactctggcatcgcaatatgaccatcatttact

SEQ ID NO: 86033 - DNA, 345 bp, Glycine max
  unsure (1)..(345): unsure at all n locations
gcaagccgagaagaggcagcgnacacaggcgttttttcccgcccatcaccgacacagcacggagcggaacctggagacacgccccggcggacaggacaccctggcgacgccaggcggggcgctatcgcccaaaaccaagctcgaccaaacccgacccaacccgggcatagccacgcagtgagaacccgcgaggtacccaaacaggcgagctcccggcagtcaacagataaaaggaacacagaccacaaagcacggaggctcgaggcggccggccagctgcgcaacccgcgcgaaacacgggccaaggcccccgacagccgactaccacagaaggggaacgcgaaa

SEQ ID NO: 86034 - DNA, 437 bp, Glycine max
agcttattgttgaaatgtattcttggatattctatactttataaaggatatagctgcaattctctagccaataaacgtacatgtctgcagatctcacattcttgaaaacactatattttttctcttctttgaacaagtcccaatcttatcgtccagcattgattcttgtatagggataatctaggatggcaacaagtcataatttactagctcaattaagggagaataacacatatgataggttcaaaaaatgtttgtcacacatttgatcatgtatcatggcaacaagtcataattgatatgttaaacaatagggaagaaaaacaacagatgttaattaggaccatttccataaaattgactcattacaccaatgactctaacaatgatgattataaaaggcgcatgcatcttgcatgtgaatctagtttcctgct

SEQ ID NO: 86035 - DNA, 313 bp, Glycine max
tcctcggggccatttcttggtggtgatgaacaaaagcgcaaaacggaatcaaaaaatgcgaaaaaggatgaccctagggctgcaaactcgtcaatcccgtgggtatggcttttgaaaggggggaaaagaagtttttgaatgtaaaaacgccccccctttcgtcattcttataatttggtgcaggggtggctcgcccaggcgagctaacctgcactttttttttttttttttttttcctttttctttgaggggaacattaaccatggcccctcccttcctatagattagcatcttgcctaacttgaacttactt

SEQ ID NO: 86036 - DNA, 432 bp, Glycine max
  unsure (1)..(432): unsure at all n locations
catgcaagctngcaaattaagcctctcagttcctcttttctttcttttcttccttttctgtggcaaaatacaaataaactacggagatgacaataaagccgtgattggcatccaatattatatagctttcttcgttttcttaagaaaaagacaaataaaggaaggagagatgacaacaaagcggtgattggcctccaaaattatattgctaagggatactttggttgctaaattctaagtcaattcttgctcatttctattggagcattatcttgactaccgtgagggttaagaagcaatttcgttgaaagtaccacaaatttacaatgacgatgaaaaaccaatttcgctgaaactgctccaacttgtacacacatgccaacgcggcatgacttaggcgtaaggacctataaagcactgacacaacagctg

SEQ ID NO: 86037 - DNA, 352 bp, Glycine max
tggagtatagactatacctcaaactttttttactcaagcatcatttgaaaagcagctccagaaactacattaagtcgatctgttggtgctattactgcaacagaatggagtaacgtgctgccttcatcatccaaaaatgttaacacgaaatctttgcttgggccaatttcgtgtatcaaattgaatatgctagcatgtcggtgtaaggcagcaacgtgaattatactacgacccatcgtattcaattcccaaatcaaatccggataagtgctcataatcacagatagaaactcgaaattgccttcttctgcggcaataaatgttacttgggatggttctcttattgcatcca

SEQ ID NO: 86038 - DNA, 448 bp, Glycine max
  unsure (1)..(448): unsure at all n locations
catgcaagcttgacttctgtgtctggaacctcttttcctcaggtgtacccaaacccaatcacctggttcaagcacaactttctttctgcttttgttggcttgccttgcatagctcgcatttttcttttcaatttgagccttcacttgctcatgcaacttcttcacatactcagctttagcctgtgcatccttatgcttaaacatagcaatgttaggcatangcaacaaatcaagaggagccaaaggattaaatccatacactatctcaaatggtgaacaattagttgtgctatggacagcccgattataagcaaactcaacatgaggcaaacaggcttcccaagatttaagattnttctttaaaacagtcctaagcagtgtgcctaaagtcctattgactacctcagtttgaccatcagtctgtgggtgacaagtactaaaaaacaac

SEQ ID NO: 86039 - DNA, 352 bp, Glycine max
tcctcggggccatttcctgcgaatgttttatttagttttaccagtgggacactactcttaaaacaaaaatggcatataacctcctcccataaatacaaacatcaatgtaaatttagagcaagcttatgcgcatatttccttacgaacgttcacttgcacaagacatcctattaactaagaaaaacgcacccatatacaatcaaggcagcttccttacctagattatttacatgtacttccaaggtgtatttgttatttacatcacacacgtctccttggctaaatttacatacatgcatactcaaagttctttggggtaccaaaaattgcacatgtgcacatcttggtattt

SEQ ID NO: 86040 - DNA, 427 bp, Glycine max
agcttgtctcagcgtctatgcgagacagaaatttatatgttagctatcatcgccaagtaccaagaagagttgggtctagccacggcccacgagcatagaatcgcggatgagtatgcccaagtatatgcggaaaaagaggctagaggaagggtgatcgactctttacaccaagaggcaaccatgtggatggatcggtttggctctaccttgaacgggagtcaagaactttcccgattgttagccaaggccaaggcgatggcagacacctactccgcccccgaagagattcatgggcttctcggctattgtcagcatatgatagacttaatggcccacataattagaaatcgttaggaaacttgtatggtctctcagaccttgactagatatgaatttctctttttgaaataatatgagttgggcccat

SEQ ID NO: 86041 - DNA, 343 bp, Glycine max
ttaaaaataagcataaattcaaaaagaatgtttagaaagagatgagtgaacgacagaacaaaactagtatgtatcctcttgatttcaggattgtcatcatcaaaaagggggagattgtggaagcaatgacttccaagattattttgatgatgccaaagaatcaagagttaagcatgttccaaagaatcaggagtcaaaaagcttcaagaatcaagtttcgaagaatcaagattcaagaataatcaagattgagattcaagaatcaagagaagactctatcaagataagtactaaaaaagttttccaaaacattgtgtagcacacgaatttttcacaaaaattt

SEQ ID NO: 86042 - DNA, 412 bp, Glycine max
  unsure (1)..(412): unsure at all n locations
agcttcatcttcgcgactatatcttcctttgctcttagccactgngacaactcgccactgtacccaggtattttgctgcatctttttctgtgactctgtcttcttctctgcatctttttgtattcaatatcatggctgagtttggctcacctcgcatggctgagttttagcttcttgtttttattttatccacacattggctcacctcgcaccagtttgcttcttcttcctcttatcggtttatttttttaagtgctttagatataatngctactgtgtggtaactgatngtgtgtagtatcataggaattgttgactccctccttcaatgtggtgtgaaggtgaatgtttccaacgaccgagttgaacacctctatcctttatgtttaccaaccattgagataaaaaaatc

SEQ ID NO: 86043 - DNA, 346 bp, Glycine max
tctcaaggaagttttctcaaagaagcttctcaaggaagttttctcaagaaagcttctcaaggaagctacctagtctataaatagaaacatgtgtaacacttgttgtaactttgatgaatgaaagtcttgtgagacacaactcaaagttcaacttctcttcctttttcttccttcattttcgtgctcccccctctctctttctctccctctttcttttcctccattgaagcatcctctccaagcttcttatccaaggctcatcttggtggtgaagctctttcttccatggcttattccctagtggatggcgcctcctctcacctattctcctttgtcttccgctgca

SEQ ID NO: 86044 - DNA, 415 bp, Glycine max
  unsure (1)..(415): unsure at all n locations
ctgaggcatgcaagcttgtctcgaacaagagtttttttgttttggctcngcgtgatcgtgggtgggactcgaagctaacaacacaaccaggcagccaccggattgcattggtgcgacgtgcgtcgactaggcatccgttaactggactcggctcagactctaccatcgtctgatcagctccaactcggcatgaacgtagaacacggacacacacattatgagcgaagcaaaattcctacactaaagtggagcagcggacacaaagcgacgccatattatggaaattgttgttgtcatctgaactcgagtgactcggtgcagactcatgagtttacacaagtttcccgtgcggacaccagccttgataaaacgcgggtgttttgagttgcccacagaacacaacaaactctaaact

SEQ ID NO: 86045 - DNA, 340 bp, Glycine max
ttatggctcaattttcagattacatagtttataactagaaacaagtgactactacgggtgttgaaaacaaagaaatgactattgcggctaccaaaatgggagaaatgactactgcatctgtcaaaatcaaggaatgagctacaacgaccactaaaatcaaagatgatgtagctccacggaacttggtagccttgcatcttatttatcaatggattcctttgcttcttgtggtatgactgcagcaaaatagacaaggagaaagatgactggatatgccacttcaagtataagatgagtctacaataggcttaccaccataggaagccatggataagagctt

SEQ ID NO: 86046 - DNA, 448 bp, Glycine max
  unsure (1)..(448): unsure at all n locations
gcaagcttgtctcctctgatttcttcgaggtaatgattnttctgtatgctttcagtaaaacaactttattttttttcttattattgtacttgactgattctttatgcagggtgttcgagcacgaatggttgataaagattttgcaccaaaggtatgtctattttgttccatgaatctgtaatccagttaacaccatttttttgttaggagttacctgaagcattttatttccaaaattgcagtgggacccacctagtttaaaagatatatcagaggacatgattgaatactatttctctcctttaagtgaagttcaatctgaactagtgctgccaacggctttgcgagaaccttacatgtgaaactagcatacctctaagcaatgctcttagcaagggtaagacaaataagttctaattttgttctcaaacttcattagaagttttaa

SEQ ID NO: 86047 - DNA, 353 bp, Glycine max
ttccactcccagtccccatttcgagtccccatcgagtgtgatgttcaaatgttaaaaaccagaatgcacaatacccttaagctaaccaacaagcaatttttggatgaaatttactaccggaaacctttcacatatgcaggtaatcaatttcggtttcaatgtatgcaactgaaagatgatgttgatgttaacacaatgttaatgtgtaatcatgaattttcgtttgttggtccgattgagttattatgtagcattgctagaaccccagatggtattttaaacttacttcaagctactatgacccctactcatgatgccctgctatattaaaatgggaggtggaacatgtcacg

SEQ ID NO: 86048 - DNA, 418 bp, Glycine max
gcaagcttcatgattgaatcaagagtgattcaaggtgtttttatgataacaaagatgatgataaaaagccctagagaatgatttcgagattgagtcaagaacaattcaagaatcaagagaaatttgatttcagtttcaagtttcaagagacaagaataatcaagatcaagattctagactcaagattcaagaatcaagaatagactcaatcaagataagtactaataagtttttttttaacattgagtagcacatgaagttttccaaaagctgttaccaagagttttactctctgataattgattaccagttactgtatcgataccagtacataatttgtttcaaaagcttcgactgaattacaatgtccattaatttcaaatgggtatcgattacagaataggtatcgattccatgt

SEQ ID NO: 86049 - DNA, 351 bp, Glycine max
  unsure (1)..(351): unsure at all n locations
tgataaagtccttagtgatctattttatgtttgtgcaattaaattgattagatgatgcacaaanttgagatttgtaatttcaattagtttgaatgatagacacaacggaaacgcttgtgtgctgagtgaaacactagccttgtgaggagtgaagcatggttaatcttcttgaatacttgttgtcataccctaatttcgtctggggaccattatttgttggtatgcgaccttcgcttgaccatctcaaaatgtttatcacccatcgttgtgtaatccataaagtctcgcaacattccggaagtcaaaacaagcattgttgcgcaatccgtaaagtttcgcaacattccggaa

SEQ ID NO: 86050 - DNA, 456 bp, Glycine max
gcaagcttgtgcatccaataccctgatgaggatgttttatatgttcttaaaactggactgattcatttgcttccaaagtttcatggccttgcaggtgaagacccgcacaaacatttgaaagaatttcacattgtctgctccaccatgaaacccccagatgtccaagaggatcacatatttctgaaggcttttcctcactcattagagggagtggcaaaggactggctgtattaccttgctccaaggtccatcacgagctgggatgaccttaagagagtattcttagaaaaaaatttccctgcttccaggaccacagccatcaggaatgatatctcaagtattagacaactcagtggagagagcctgtatgagtactgggagagatttaagatactatgtgccagttgcccccaccatcagatttcagaacagcttcttctccatacttctatgaag

SEQ ID NO: 86051 - DNA, 355 bp, Glycine max
tctttgagaaaacttccttgagaaactatagtttatctacacacacccctctgataactaagctcacctccttgagaagcttccatgagaagctagagcttagctacacacacccctctaataactaagctcaccttcttgagaagagaagctagagcttagctacacacccctataatagctaagctcacccccatgacaaaaaacatgaaaatacaaaaaaaatcctactacaaagactactgaaaatgccctgaaatacaaggctaaaaccctatactactagaatggccaaaatacaaggcccaaaagaagaaaacaacctattctactatttacaaagaagagtggaccc

SEQ ID NO: 86052 - DNA, 454 bp, Glycine max
tgcaagcttgtaattgattacacaagtcttgcaatcttattatcatatgggattttcagaaaataatttccaagagtcgcatctattcaaatgctctatgaatggccatcaaaggtgacttggaaacacgaatttaaagatagttttcattgcccaaacagttttatcctctcaaaagattaagagtttttctaaaatgaaatgtcttatcctctcaaaaagattccttggtcaaccacttgcatatttaataaggaattttgattgatcttcattgtacaatctatctcttttaagagagatctcttcttttcttcttcttatttctgaaaagggattaagagaccgtgggtctcttgttgtaaatgattcttgaacacaagggataggttgtccctgtgtagttcagactttgtaaaaggagtttacaaggagagtggaaaatctcaagtga

SEQ ID NO: 86053 - DNA, 356 bp, Glycine max
tagatctaaatttttcttccaaaatattttttataaaaaaaaaacacaaaaatctaaatgtaaatcacttaatccatgttgtcttagagtcatgtttagccatagtaattgtcacattatgttctaagtttatgttgaatttttattttgttgattgaattctagatacattttttcatgtattcttagcctatcttttgaattttgagtctaattcatgtattttatttagttcataacatcttcaaaatcaattcctagaagtagtcttgttttttaactctttttttttctaagtttcgtacatgatgcctatgatgaagttgagtggtggtgctgagttgtggttggatttg

SEQ ID NO: 86054 - DNA, 407 bp, Glycine max
  unsure (1)..(407): unsure at all n locations
gcagcttgaaagaaaacttgatgccttggtcaattatttactcangttgccaagaatcagaaatctacacctgttgcaagagtctgtgatctatgttcttctgcagatcaccatacaaatctttatccttctttgcagcaatctggagtcaaagagcaacttgaagcttatgctgcaaacatttattatagacctccacagcagccaaacccacaacagcggaatatatatgacctttcaagcaatagatacaatccaggttggaggaatcatccacatctgagatggaccagtcgatgtgatcctgactacgagtggatcgcttgatacacgctacgaagattctggatgatgccacttccaatgaacgaagataagtcatggtagacgcctccacgattaccttg

SEQ ID NO: 86055 - DNA, 354 bp, Glycine max
tttcgatacattctatggaccctgttttgtccacattgcgtttcgtgcattgttattctcgtttagcgcactttttatacccgctcttaacgtgcttaagccatattacttaagtggtttctcgcttaacttagaaataaaattaatttccaccgtacgcccgaattgtataacccactaacttctgtttaaatcaatttcgaccgtacggtcatgccgtaaccacgggggaaatcataaggaggtgttaaagtataatgtgagcaggaaaacattcttttaatagaatatagcggagaatcaatccgacgtcttctcttggggatttctcattcttaactcaactgattaata

SEQ ID NO: 86056 - DNA, 423 bp, Glycine max
  unsure (1)..(423): unsure at all n locations
agcttctttgaatataggatatacaacattgatctctgttttgatatcaacataataaacaaccccttaacatagttcaacatcattctcaaatgaaacatctatccactttcatggaggacaacatgaagtcttcctgtagaaaatccctttttatgggaagcccattcatgttctttgtccttccaaacaaggaattgactgcactatgtaactgctcagtctggattgtccattgtcaaaactggacgattcttccttgctcatgttttttatgattactaagatataaattattgatggactaacgagttattcttaagcgaccaagactatctacatatgagaaaacatgattgttatttcatatcctacagctcttattaatgcacgtccattcttaagtggaacttgtnttactat

SEQ ID NO: 86057 - DNA, 349 bp, Glycine max
tgatctgcgtatccctcatgtaagactttgcttaacttaaatagcattatcatcacagcataatcagaaaaacaaagccctacaatccatccctggtaatgcacttatttagtcctgcttatatacaagttctaaggcaatagtacatttcccaatgctaaagtcacctaacaatacacacaaatgggtgattagaccaagagcatgcaataattatgcattgaaagaagcattgaacacacaaaacacaattaattagatattaaaagtaattacatcaattgttccttagaaatccccaactagggtgtttaaccagccatacaaggaaccctaatgcacatgagat

SEQ ID NO: 86058 - DNA, 426 bp, Glycine max
  unsure (1)..(426): unsure at all n locations
tgcaagctnggattgatttggtctaacgaggtatcttgtttantagnttaggctacaacatagaacacaagagcatgattgattacacaaatatatttatatgcatcagcttgtttgttagaaagacccaacatttctacctactgctgtcacttttacttaccttgcattttatagtttttagcataaaggtttagtttatattcttgttgaaattatcaatcatacatgttctctcaacaatgcttcatttttgaacttaactcaggctaacattagtttcctgtgtttgatactcggattcatccattntaatttttaaatacttgacgatccggtgagctttccggcaaactggatttcccttgaatatattngtacgaagaaaaagtggaacaaaaagtaaccgcaggggaaatccaacaa

SEQ ID NO: 86059 - DNA, 315 bp, Glycine max
  unsure (1)..(315): unsure at all n locations
tccatcaagtggtaatcagagcacatgatcttcaagtaggtccttcaatggtgattttctcacattagcacctgatattggatccacacagctacctaatgtgttccatagaactttagaagcagtagtcacctgactactcttctaagttctcttcaggaacacttgctactggacacatacaaccacatattgtgctcccatagaacttcagaagcagcagtcccctaactacccttctaagttctttccctctaaacctaggggaggacaaatactctttaaaatttgacattatggctccacctanagtgc

SEQ ID NO: 86060 - DNA, 452 bp, Glycine max
  unsure (1)..(452): unsure at all n locations
agctgcttgtggcgcttctatggaggctggatctntntagcttcaatgaggtcctttaatgatgattttccaccatggaaatgcagcggaagacaaaggagaagaggtgagaggaggcgccatccactatggaataagccatggaagaaggagcttcaccaccaagatgagccttggataagaagcttggaaggatgcttcaatggaggataagaaagagggagagaaagagagaggggggagcacgaaattgaaggaataaaagagggagagaagtggaactttgaagtatgtctcacaagactctcattcatcaaagttacaacaagtgttacacatgcttctatttatagactaagtagcttccttgagaagctttcttgagaaaacttccttgagaagcttctttgagaagacttccttgagaagctagagcttagctacacacaccg

SEQ ID NO: 86061 - DNA, 353 bp, Glycine max
tcaggctgctcaattgctccaggttgctttatggaagggcaaaggtctgtatggtggtcaacagaggagcacaaaccacaaacccttgcgacaggtacaaatttctgattcaaggccagctgggttaccaagttaaccaatgcatccagtttgccttcaagcttcttagtctcagatgatgcagctgagtttgtagctacctcatgcactcctctaataactatggcatcatttctggcgctaaactgctgggagttggaagccatcttctcaattaaatttctggcttcagcaggagtcatgtctccaagggctccaccactggcagcatctatcatacttctctccatatt

SEQ ID NO: 86062 - DNA, 344 bp, Glycine max
cagcactcgacagctttcataacgccccaaaacgtatgaatgttcatatatttatataagtacctaatcttagattactagtgagatgctacggcgctatccctattaatgctccatgcgtccataactgtaagtcttcttatctcaccaagaattgaagtcattgagtggagattgagaatcggtcgttatacaatagcacaaggccaatcttcagtgcgtatcattgcaaaagcgcctgtgttaactgctgctatgaagaatggcatgcaccatacatgtgtggtaaaaatgactaggatgtcgcatggcattattgacgcttcatgagatatcacgatatg

SEQ ID NO: 86063 - DNA, 355 bp, Glycine max
tctgggggaagcctcttactgaatctattccagaaagcgacatgcagccgcctgggcaaaaacgctgcccacccttcgttagccattggatcttctgaaacatttggccttaaacttcacagaacactttggcatgaactgaccgttgggatctttgataaaacgtctggagtgtgctataagacccttaataaagcttctggaggaagcctcttactgaagcttctagagaaaactacctgaagctgcctagcgaaaaatgctgcgcagccttcgataacgcgtggatcatcgcgaaattttgcatcaactgtacaagacaattgtgcatgatctgaccgctgggatctttgat

SEQ ID NO: 86064 - DNA, 372 bp, Glycine max
agcttacaaggacgacacactgtttatatatcttatagtccgagaatgggtgcacaaattcttgaaccttgaagaccacgtcataactggatcctgcccaacccctaatgcgattgtagctctcaatgcatccgtcagacacagtatgctttgcgagaccatgcaatctgtggagaaccaaatgacagacatacgaatgatatccctcacgctgagatgtaggctcatcatcaataaagtggcacaatgattatatatgtacgtggtacttatggaagcatgtgaaccaacctcaatcactttctcatacttctaaaagactcgctacatccaatgaatgatgtgagcaacacatggaagcctatatcactt

SEQ ID NO: 86065 - DNA, 330 bp, Glycine max
tgatgctataatggatatctatttttgtattagatcatggaacgcagctgatgcttattgtggacatcattatatcgaccttcgcgatgacacgttgttttattactgaaggatcaattggactcagaataagtgcgcgaggggggttgaataaaaaactcactagctgttcatgtatgaaaaattatactgcctacgcttttactatgctgacacgagaatggacattatgagagcaacttaagaatacgtaaaaccttgaatcaacgagctcagtactatttaaaatagttcggatgaaggagacgaacacacaagatttttatactg

SEQ ID NO: 86066 - DNA, 263 bp, Glycine max
agcttgagcatcttgtgagaaccctcatgggatctaatgacaaagcatatcagtctgtttatcatgaacctgatgaagatgagattgtgggtgtttccctctcacggtcacttctaagtgtagctgcttcagctttgaggaccaatataacagacttacgccctcttgtcttgccctattccgagcaactgcgctatggatggtcagtgatttccaggaaaatgtgggcaagggggaacaaggaaatgtatgttccaaatttc

SEQ ID NO: 86067 - DNA, 348 bp, Glycine max
tcagatatttagtaagggtccacgggttggattttttcaactctaccttgcctgctgtaaaaggccacttgggttgaaatgaggcagacaacttacttgtactaaaggtgcactttacttcgagctgaatcatagaactacttgctaggacacaatcgttttcaatctttcataggttccaaagaataaaaaagcagcaattagtaatgaatgaatggttgagaagtgttatatctataaggaaacacgcataaaccaagtaaaagaacttgtagtcttgtaggatttatattttcttaccaagttacaattgattttgactgcaaaattaaggaaatgcaaatattt

SEQ ID NO: 86068 - DNA, 257 bp, Glycine max
tgagaagctttcctaagaagatttcttaagaaggctaggaggcttaatgtaccccattaccttctctaattagcttaaggctcacgcttcctttgaagtatggaggaaggcgtagaaactttagcttcacccgccccttataataagcttaccttacccccatgacaaaaaaaacatgaaaattccaaaaaagtccttactacaaagactactcaaaatgccccgaaatacaagggtaaaaccctatactactagaa

SEQ ID NO: 86069 - DNA, 315 bp, Glycine max
  unsure (1)..(315): unsure at all n locations
agcttattccatgccttcttattgaagttttttataatcttggtgcccccccccttcctntattgccccatccacgaggaagagagcttcttgtctttctttcttgaatcctttaaagtctctttttgtgcttgggataatgaagtctcatatgttgctttttatagcctttttcaaccattttccaaacttcatgtgtagggccttcattttgatgctctaattatcataggtgctcctctttagaagtggaacttggaaggatgttgcttcattgcttgccataactatagaggaatttcttatcataaccta

SEQ ID NO: 86070 - DNA, 317 bp, Glycine max
  unsure (1)..(317): unsure at all n locations
agcttctcaaggaggagatcttaattatnagttttgtgtgtgnagctaccccctactccttcagggccccctctcaaagaagctttttaaggaagttttctcaagaaagcttctcaaggaagctacctagtctatgattagaaacatgttgtacacttgttgtaactttgatgaatgaaagtcttatgagacacactttaaagttccacttctctccctcttttattccttcaatttcgtgctccccccttctctctttcttttgctccattaaagcatctctttaagcttcttattcaaagcaatttttggtagtg

SEQ ID NO: 86071 - DNA, 317 bp, Glycine max
  unsure (1)..(317): unsure at all n locations
agtcttttaataaagagatttttagaatnatgttgttacactatgagggccccccaacatccatgtnccatgctccatttggctattttcaaaattaatatcttaaaaatcatgcaaatagtgatttaaattattttacatttaaccattaaactctccaatgattatcattaaaaaatgaaaaatgagcataaacaagttaattaatgcatatatatatatatatatatatatatatatatatagacacaaataaataattaattaattaatactaactcgtcaagaaaaaaattttatctattaacttttttttt

SEQ ID NO: 86072 - DNA, 320 bp, Glycine max
  unsure (1)..(320): unsure at all n locations
agcttcaatggaggaagcttttgagagagagagagagatttgagagtgcctgcgaattgaaatanaaaccggagagaagctgaactttgagtatgtctcacaagtttctcattcatcaaagttatgtcaagtgttacacatgtttctatttatagcatggcacatgggaagcttccttgagaagcaaggaaggttgggaagctagaggaagaaagcttccttgagaagctagaggggggctactcatactcctccaatagttaagctcacccccatgccaaaatacatgaaaatacaatgggaagcttccttgagaagct

SEQ ID NO: 86073 - DNA, 305 bp, Glycine max
agcttgttctccacttttttatcttactaagacccccccccccaaagcaaccccctcctcggagaatattctggatggcctaagtgggcctggttgctattttgcacccctatttttactaaatacacccccttgctcgttttttggtgatttttttaagtaacgttacgaaactttatgaacttcgtaacaatgcttgttttctttccgttatgttacgaaaccttacggattacgtaatcatccattttttgccttccagaacgttacagaactttacggattgcgcactaacactttctttt

SEQ ID NO: 86074 - DNA, 306 bp, Glycine max
  unsure (1)..(306): unsure at all n locations
agctttttgttgnctacatgttttatcttgaaataccccacccttaaacagncccatgatacatgtattagatgcatgcctggctgggtcaatttaattattttccttgcaaaaagagaagcttgtgattgctctttatatctgcggnagtgaaaaatcaatcttatcttttctgaaaatttgttgaagcttaatatattttggtctccagttacatcattaattaccacctctcaaatgtgttttcgagaataacaatggatgaatagcaaagcgaaatacttggtctttcatcacaactttttc

SEQ ID NO: 86075 - DNA, 307 bp, Glycine max
agcttatctagagatagttgtctgcagtatgggtcccaccccttctcttttactctccctttttttattctctctctcattttttctctctaaaacggcctagtttataatatatccttatgctaatgtacatataattagtgaaggtaacgtttgaaacagaagtatatatccacacaatgagcaaaacgtgtgcgtatttcttctaagtatgtgaaggcaactagaataagaacgattgtgggggacacatgactaagtgcagcgtgtcattcttccattcaccttgaatcagcaatgcatgtag

SEQ ID NO: 86076 - DNA, 311 bp, Glycine max
agcttattgtaatagatttcatagttcttttggagacacatgatttgattcttttaaagtctctactttaatcgattaattggtgatataatcaattacttctcttttaaaagtgtttcagaagtgaccatgaacactttaatcgattacatcaagaatctaattgattatattattcttgaaagtttttcagtttttgggacgaacactttaatcgcttgaaatggtaatataatcgattacttcttcaaaataatcgattacattgtatatttaattgattacagacggttataactgttttctctatt

SEQ ID NO: 86077 - DNA, 312 bp, Glycine max
agcttttcttgctagccattttagctcttttcaggcgacccccccctcgccctgcgaccacgtcgcttcctccagaagcaacagccttatggaggaaggatctggaaggcccaagtgggccagattgctatttgcacccccctttttaactaaatgcacccccttctatttttttggtaattctttttccgtatcattacgaaactttacgaatttcgtaacgatacttattttccttccgcaaggttacgaatccttacggattacatatttactcttttttagctttcgaagaagttacggaaactcacg

SEQ ID NO: 86078 - DNA, 299 bp, Glycine max
  unsure (1)..(299): unsure at all n locations
agcttcttattctcagatgatgcagctgccccgnacctacctnnnncctcctctaatgactatggcatcatttctggcactaaactgctgggagttggaagccatcttctcaattaaatttttggcttcagcaggagtcatgtctccaagggctccaccactggcagcatctatcatacttctctccatattactgagtccttcataaaaatattggagaagaagctgctccgaaatctgatggtgagggcaactggcacatagttttttaaatcgctcccagtactcatacaggctct

SEQ ID NO: 86079 - DNA, 324 bp, Glycine max
  unsure (1)..(324): unsure at all n locations
agcttagtcatacgattttttgttcagcttgtggtgtgggaaggcccgccgcgatctgtcnccggtaccgcgacttagtattagattattttccttattactcattattttagtttccttattatcagctattgattggatcttggtaatccaatactggattttccttttctcatatttaagggttaatgtttcaggcaaggacatttttaactaataaaaaaaagtgggctgtggctgatgaaaaaaagaaagggattgaaaaacctaaactactgagtccatgtaagaaaagtatttactgtggggtgtgctattacctct

SEQ ID NO: 86080 - DNA, 269 bp, Glycine max
  unsure (1)..(269): unsure at all n locations
accccacacccgacggannaacacgaccacccgaaatattggagagctgagaggagacaatgaaaaacgggaagataagagaagagctggaataaagacatacgaaggaaaaaggagaagacaaaaaaataggaagaaaagaaaaaagaaggaaaaaagggagcaggaacagaaaaaaaggaaacgaaaaggacctcagggagaaaaaaaaaaaccataagaaaaagaaaagaaacagggggaaggaagggagaaacagaaaaaagaaa

SEQ ID NO: 86081 - DNA, 322 bp, Glycine max
cgaccgcagctgcagctttgaacttttggttgttgagtgatgtgagagagaacgtggcccccccctaagaaaaggcccctctctctctgtttttttaaaaaaagttgtgccacatgtctttttttgagtggagcaaaaaggggcccactttttctcttgatgtgactcatactcagccacaagaagagaaaaatctgaccttttgaaatgctaaaatcctgcctcggtttgcatgccgtttctctggttccagtccctcgcgtttctctgcactcgtcggggccagttttcgaaggtaagcaatatatatatcaaaacgcta

SEQ ID NO: 86082 - DNA, 326 bp, Glycine max
  unsure (1)..(326): unsure at all n locations
catgcaagcttgacagaaaagaggttttttctaagctttttggatcggagagtggccccagaacgacagacannaacccccagatttgtgtttcctcgttagattcatttcgggttcaaggactcccacgttacatttcttgcagcatactccagaggcagaacaacatgtgttgcatcaagaataagatgctcccattgtgctagttcagtcttgttgaaatttactagcccaattccttcaagaacatcttcccctgtcagtttctccgtaattttcagtatgtcattccagtcagtggctacattggacatgtaacgaggatc

SEQ ID NO: 86083 - DNA, 285 bp, Glycine max
tgctttttggaaacctccccgccttatgacctcccgcacctcttcagctccttgtaaagaactcaacctttagttgcaaatctctttctcttgtttcttacctcttgatgttagttcctccacttgtttatgtgcctcttcaacctcatcatttcttgaatttaccacttctttgagagaaccaacttcttctttgagatcatttctctctaacttcaaagcatctaggcttacatttgcatcttctatgcttttctttcttgactcaatctcttcctttaactt

SEQ ID NO: 86084 - DNA, 228 bp, Glycine max
gctaaatggtttctactcggggctgggatttaatcattctaaatccaaaaattaaatttgttagagacaaattcgaagaataataaattaaaaatcgaaaaatgacaagtatttggctgggtaattgggttccaaaatgatggcatcctcttagtcaggctcgtgtttagtacttgcagcggagttttggggaatttggcatggatctagcttggaatcatgattgtt

SEQ ID NO: 86085 - DNA, 305 bp, Glycine max
  unsure (1)..(305): unsure at all n locations
ctccgtgatcttaagcgactgatgagatctttttgaaacttttttttttaaagccccaccgatctcttgntttcaccacattattataacttaataataaatagcaactttggggtggttcattgctgatttgatactaatcaaaatacaattaaaaatatataatatggggccaaaacatttttttgtacgcgtgttacatcttggctatcggtatattcacattccacactcattcggatccatcattttttgggacaataacattgtcttctgaggcagattccctcctgaacactgaatct

SEQ ID NO: 86086 - DNA, 307 bp, Glycine max
  unsure (1)..(307): unsure at all n locations
agcttttttaattcaatgtttcatcttccagntcacccccatatgacgtaagaaggatggtccagtccaatatcgttggatgtatccttttgagaggtataaaatgagtaatcatttatacaccaatgtattatatagtcattttaaaaaaaaaatacttattcatattaattttaggtttttacgctccctcaaaaataaagtcaagaataagactagagtcgagagatcgatttgtgaagcgtacttagtggagacatctacctttgcctcgttttactatcctgaacaaattgcaacgagaagg

SEQ ID NO: 86087 - DNA, 309 bp, Glycine max
agctttatgatgataaatttatttgattcaagtagccccataatgactctgatgagacaaaaagcccaaagaatgatttcaagattgagtcaacaagttcaagatcaagtttcatgagaagaaatcaagaagattcaagaatcaagagaagtttgatttcaagattcaagagaagatgaattcaagattcaagagaagaaatcaagaagacttcacaagggaagtattgaaaagatttttcaaaaaacaaacatagcacagttttctcttttcaaaagagtttttctcaaaattttctaagttaccaga

SEQ ID NO: 86088 - DNA, 310 bp, Glycine max
agctttctccactaagttttctgatgcctgaaatgcttttctgatggcagtggtccagatgcagggaataatttctccaagaacaccctcttaaggtcatcccaactgaaaatggacatgggagcaaggtagtatagccaatcttttgccactccctccagagaatgaggaaaagctttagaaagatatgatcttcttggacatcagggggcttcatggtggaacaaacaatatgaaactccttaagatgcttatgaggatattcacctgcaagaccatgaaacttgggcagcaaatgtattagtccagt

SEQ ID NO: 86089 - DNA, 305 bp, Glycine max
actgaggcttgttgctaccttttttttttttgagggccccccctctggttctgaaggcttgatgaatagatggagtgaaatgaatttaaggtatattattttctattatttaggattaaaaattatagagtacgtggaattcaatatttggaaaggaatgccatttgatcattttgagtatttttttttttactgcgtaccagaatcggagtgtattcgatggaacgtgaacttttctttctttattatattgtaaatgtattatttatcccttccttcacctaaatacagcaaaaatttctaga

SEQ ID NO: 86090 - DNA, 296 bp, Glycine max
  unsure (1)..(296): unsure at all n locations
actcacattaatatttgccttggcccccacgccacagaggannccccccggacgaagacaatgagagagagagaaagagaaagtggcgtggaaattgaaggagaataaggagagaagctgaactttgaagtgtgtctcacaagtttctcatttgtgacaagtgttacacatgtttctatttatagcctaggtcactaactaaatgaatattccaaagaatatgccaaaggcatcttagcatattccctttagatgccacaagcttagctacttacacccctccaatagctaagctc

SEQ ID NO: 86091 - DNA, 330 bp, Glycine max
acctgcaagcatgcaagcttaataaatctaatattttttaaaacatatcctccttgtcaatggtccccccaacttcatggacccctccttcatttggttttgatgaaaaccccatggattaatgcatgtaccacaaggtttgtgggaataaaatatgttttctcgttttatatgtagatgatattttacttgcagacaattatcggggttggctacatgaagtgaagtaatttctctctgagaattttgacatgaaggttatgggggatgcattttatgtcatatgaattaagattcatagagatagaccttgaggtattttagaaagat

SEQ ID NO: 86092 - DNA, 223 bp, Glycine max
tttaaggatgggatgccccccatcactggtgtgtccagccccattgatgtgtttctcagattttctgtaaggataacttatcaagaacttttgttaaatgaaagtaaaatgttacctactaattgattattgtttctccaatttttataaatgttggcctgctagtccaatgggaagtgattattataggtctgccagtgagagtagttcttttgaaggctca

SEQ ID NO: 86093 - DNA, 316 bp, Glycine max
tgcttgcaaaatttccaattcaaattgaggattcacgttcctatgttcccccatcaaaatccttttcactagcaaaggagacaagagttaagttacctttgctattgttacgacttactatgtctagtacaaaacaatgggcctaaaatccccaaataaaggataaccgtgaaagcaaccccagcctaaacattgttggctaacactattgtaggcagcaggcaagtaaccaaccaatctaactatgccctccactccccatcacaacatcaagaagtatcattcattcatttagtatatacagaatatcattcat

SEQ ID NO: 86094 - DNA, 309 bp, Glycine max
  unsure (1)..(309): unsure at all n locations
aggcatgcaatcttgtagttgcataattttataatggattttattatattgagagtatcccccccgcaccatccttnnaaccatccaaagttattgattngtttggaatttgactgtgcatattaaaattttagtggatgaattaaaaaaatgattttttaggaatttagacaattttataattgcactatatgggtaatgaataatgttatattttggaaaattaaggcgtttttattttagttaagcaattgatgataaactatataacgttacctaatgatggacttggtaactatatatgggtta

SEQ ID NO: 86095 - DNA, 304 bp, Glycine max
ttttttaagttctttctttttggggacccctcccttcctgttccttccccggcctcggacatgttttggtttgaatcaaaccaattccatttccccagctgatttttgtattatgggcctttgaataaggactttggaaatccccttcatcttagggtggcccttgatggtgactgccaggttgtggtattacacattgggaaagaaaaagttggagttaggcattgataatcagaaaatcagcttcaacttgtttgaagaaaaaaaacatttgtcagaccaaaatgtctgcttacaggtgaaa

SEQ ID NO: 86096 - DNA, 307 bp, Glycine max
  unsure (1)..(307): unsure at all n locations
agcttaatccttcaagctttttaaggtacacagatctcattgntcttattnnntttaattacaaatttttatgggcatcttttatctaacagtttgagtcaaaataggtaagcataattttcctaaaaaaggaagaaatacgagtgataaaaaaaagaagcacttcaaaccatggcttgaatttgaacatatccccaccaagggttgccaatcagatacttgattccccacctcaattaccaatagctccaccaacatcaccatcaagctcatgtgtgtccagcgaactaagccaagatgacaacaa

SEQ ID NO: 86097 - DNA, 307 bp, Glycine max
agcttatacaaataatgtctattcattttaataatccccaagtggccacacattaatctaattccaacattctaggctttttaaatggatccatgagctgggactccagtcactagtacacaggtttatgtactttttatttgaattattcttcttgtcgtaataagtagcttattcaatactgtacatatgaacagagtttagatgaaggaaaattgaggttttggtattaacttatgtggattgtgtaatatcatagccttaagggaagcaaaacaaagtacctttgcttacaacagcaagtata

SEQ ID NO: 86098 - DNA, 302 bp, Glycine max
  unsure (1)..(302): unsure at all n locations
tatcttttgtcatggatagtgctgtttttataacacacncccaatgccttttctgtcccgactccttatgaggtcacatttgggaagaatccctttaatttccctgagtacatcacgggaacttttaacatagaagcagtggaacacttacttactgatcgagatgcgacttttcaaacaattcgtaagaagctacttaaagctcaagagattatgaagaggcaagctgattgcaagagacgtgatgttctatatcaaaagggtgactgggtccttctttgtttttgccttttctgaaaatc

SEQ ID NO: 86099 - DNA, 333 bp, Glycine max
  unsure (1)..(333): unsure at all n locations
gacctgtaggcctgcnagcttttttaatgancgttattagcatcatgagnatcaccctttcaaatatattaactctccccgacagaccatgtgatgtatgggtcgaaatttcacggtaggtgaaataaatactattagtcaaggtgctgtttgtatataacataaagattatttgtaaaaatagttgattatgtcggaaacattttgaaattattctaaattatataaaaaaaacataggaaaaaaattcaaaaatattgcgggtttgcacgataaatttgatatatctatgtatatgctacattccctattcaacttctttgcatcactgtt

SEQ ID NO: 86100 - DNA, 327 bp, Glycine max
cccgggatcctattagtcgacctgcggcatttttcttcaatttttgccctaactccttcccccagcaatttcaggccccataagtggcattgctcgtgcttgcacgcttagtgcaattctgaaccgcttagcactcattagtggattttggcttaactcgagcttttctctcttagaggatggactgaatcggtgcactttgctggatgacccttcgcttagcacaaatgcacaactcatccttcttccaaattcttcctcgcactcagccgaggagtgttgcactcagcggatggctcgctgatgtggcattattttctcctattt

SEQ ID NO: 86101 - DNA, 323 bp, Glycine max
  unsure (1)..(323): unsure at all n locations
cgtgaccttacatcgacctgcagctgcaacactattattattattagaagacccccccccacagactctntcacactcttttgaacacactttctaatttctactatgaaatttattgaaaatcacaaaatttttgtaggtcttacttctcatataatgattctctctcctgattatatggggaccaaaagataacaaccaataatgaagtgttacaaagattaacctaacctttcttgctttctcagcatacatcaagaagaggataatgtacacaagctgaaaggctgctccaatagaattaacagttgtcaccaagagat

SEQ ID NO: 86102 - DNA, 325 bp, Glycine max
  unsure (1)..(325): unsure at all n locations
acctgaagcatgcaagcttataaaacaaatttttatatattttcaaaatgcatggacccccaagcatctccnnactccaaccaagactattgtgccagcaatcaatggggcaaaacacaccaaaagaatatgatgatggatggctcgaattctcacaaaggtaaaattatcactttcaaattgagctttcaaaactatcatgacatgtaaaggaaaaacaaggatttcaagtcacaaaatgtcaagagacttttattttcaaaacaattcccccttacttgaacatatcctataattcaaagacaaacatgcaaatttaacacaa

SEQ ID NO: 86103 - DNA, 314 bp, Glycine max
  unsure (1)..(314): unsure at all n locations
agcttatgctaaacttctgtttctacttgttctgagtctaggcttacccacggatctgcggacnaactcagcttaagttagtctaaacctaagagggctatctaaatcgggcctagtcttaaatgagggatctgcggatgaagcttggattaattcggcctgacaaaggatcgagggtttagtaatttaggctacaacattgaatacaagagcatgattgattagagaaatatatttccatgcaccagcttgtttgttagaaagacccaacatttctacttattgctgtcattttatttaccttgcattttata

SEQ ID NO: 86104 - DNA, 264 bp, Glycine max
  unsure (1)..(264): unsure at all n locations
agcttgaaagaganngaacttatcattttccatttataacactaggaatcccccactatcactggtatatctctttcttcgtcattaaagggaaacacttgggctgccagatccctccacctttgggcgtattctttaaaagatttgtgcccccctttttgcacatgttctgtagtttcatcctatccgaaaacattatactgacactgcctaacgaaggcaaccattaggtccttccaaaaggggacttgaaaaggttccaat

SEQ ID NO: 86105 - DNA, 260 bp, Glycine max
ccattgcctccttcgcccagtattatgaccagccgtgcttcacttttggggacttccagctatcacccatggtggaagaatttgaagagatcttaggatgccctctagggggaaggaaaccatacctcttctcaagattctatccctctttagctagaatttctaagatagtccaaatcttggcgcaggaattaaaccacagaaagcaagtcgaaaatggggtggttggagtactaaaaaaatgtttggaggcaaaagca

SEQ ID NO: 86106 - DNA, 304 bp, Glycine max
agcttattttttaatctttgacctagccagggaacccccccccagagccatccctccctcgcccagtattataatctgccgttgaagtgcttcacctttggggacttccaactatcacctatggtagaagaatttgaagaggtcctatgatgccctatagggggaaggaaaccatacctcttctcatggttctatccctcattagctagaatttctaagatagtccaaatctcggtgcaggaattataccacagaaagcaagtaaaaaatggggtggttggaataccgagaaaatatttggagg

SEQ ID NO: 86107 - DNA, 318 bp, Glycine max
gatccttaatcacctgcggcagcaagcttgttggtaaattttacattgcacggcccccaacaattgtttgccgggctatacgagacatcttgccaaacaaagtcaggttagccataactcgcctgtgctttttcttccatgctatatgtagcaaagtcattgatcctatcaagtttgatgagctggaaaatgaggctgcaattatactgtgccagttggagatgtattttccccctgttttctttgacatcatgattcacttgattgtgcatctggtcaaagaaatcaaatattgtggtcctgtttatctacggggga

SEQ ID NO: 86108 - DNA, 309 bp, Glycine max
  unsure (1)..(309): unsure at all n locations
agcttttcttgaatgatttttatatcctgtgcacccccccccagctgagcgatncctccatccaattgaaccctgaacttaaataattatctcctgatacctggcttaaattctaggaaagcatatggttcaagaaaaaatttacccccaatttgggggagtaaagtcagttacaatgcaaagaaaaaggtaaagcattagcacacacaaaaaataagttgtatgttaaaaaagaaaagaagaaagaagaaaagtttgttgatgtaacaaggtcaaaagcaaatgtaacaaggtcaaaagcaaatgaaa

SEQ ID NO: 86109 - DNA, 308 bp, Glycine max
  unsure (1)..(308): unsure at all n locations
agcttggtaacatgtgtttttgtctcgaggttattcttgccaagatgatgtcntccacataaacaagaatagttgttatatcattatcattatcattatcagagtataagaaaagcgagtgatcagctgaagattgacggaatccctgggagagaagaaatgacgagagccgtgtgaaccattagcgactggcttgtttgagcccatataaggaatgctaaaggcgacaaacaaggttgggattatccacaataagtcctggaggaagcttcatataaacctcttcgttaagatccccatgaaggaaa

SEQ ID NO: 86110 - DNA, 309 bp, Glycine max
agctttttcctcatcgtttctcacattttttagatcccgagccaatccaatccttcgtccggactctcagccacttatgatagccgccgatgatcccattactgcttctcctaagctctctgtcctttcttcacaccgcataacatgccttgcgaactccttggagtacctttgcattggggtcactgaaaccccgtgtaaagaaaggcgtgatgctttcgtctaatggcgctcctctcatggggtagccaagctgtcttatggcgaggacaggattataatttatacaaccccttgttcccattaagg

SEQ ID NO: 86111 - DNA, 298 bp, Glycine max
  unsure (1)..(298): unsure at all n locations
tgcttgtaatttcaattttaataaagagcccngcattatgtgactaccttttaaaaaatctttaaaaaaatgttttacaactttttttttttcagtaaactcctttataattgataaaatattgagttccgttccggttattgatttttctaagataaatcacaaatttgcaacagaaaatgatgcacacatatgacataccaacatgcctagtctgagttccgttccggttattatttgcctctcagctcccaatcactattgcagacaagttggacagctagacaacaaactcatg

SEQ ID NO: 86112 - DNA, 291 bp, Glycine max
  unsure (1)..(291): unsure at all n locations
agccagcttttttcatttcaaaganacccccccactatgtgtatnaagcccccaccgcacccgtacaccatnttttagatactaaaaatattcccatattttactatgcgcaagctagctccccactactgaaccagaggtggaacctctggaacaacaaagcgccatagcgaacgacatcgtcaccagcaccgccacgcaagccaccacaaagatcgccacaatgacaccgactctaaaccctttctttctcgaatagttaggaacggaaacgctactggtttgtgggaa

SEQ ID NO: 86113 - DNA, 311 bp, Glycine max
  unsure (1)..(311): unsure at all n locations
agcttagttcatatgatatttatgtntcagcttgagggggggggaaatccccaattgataaacnnnaattaccgcaatttaatataaaaatattttccttattactcattattaagttccttattattagtaattgattgatcttgtaatcaatactgatttccttttttatattaaggttatgttcagcaagacattttaactaataaaaaaaagtgggctgtggctgaagaaaaaaagaaagggattgaaaaacctaaactactgataccatgtaagaaaagtatttactgtgtggtgtgctattacca

SEQ ID NO: 86114 - DNA, 318 bp, Glycine max
  unsure (1)..(318): unsure at all n locations
tgctttgatggagtcgagtcttttatcacatgtttgtcatcaccaaaaaggcaacaatgggaatggnccatacatgattttgatgatgtcaaagaaaaatctaacaaggctgcttcaaatgataaacatttgcttcaagaataattcaagattgcttcaacaaacaaagccttgtttcaagattcactaaagaccaagccttgccttaaaacaaagtgctttcaagacatgcaaggctctggtaatcgattaccaggaagtgtaatcgattaccagaagacaaggttgagaaatagttgttgaaaagagttttgaatt

SEQ ID NO: 86115 - DNA, 314 bp, Glycine max
agcttatgaagatgaagctgttttgaatggtttcttggtgaaatatacccacgtcatgtctgaaccggcacaacttattatggcattaataaccctgcatttaacttacaaatttggagtaccttcttggaaatcaaattgggtgttgtatttagtggttttgcttctttatcatgaataagaattttcaatcaacttttgctttgaactcttgagaatgccacataaagctgaccataactgaaaactggttgaggaagatataatccaacactttgaagagattggccttgagatttattgattgtcatgga

SEQ ID NO: 86116 - DNA, 223 bp, Glycine max
ttgcggtgttcaaatttcgagcgtttctatatattatgcgcctgaatctgaccttcgagttaatagatatgaccatttgaatttcttgagagcttccggtgctgaattttgagcgtctggatatattatgcgcctgaattggacctccgagctaaaaattatgaccatttaaattttttgagagcttacgtgggttaattttgagcgtctcgatatattatgc

SEQ ID NO: 86117 - DNA, 338 bp, Glycine max
  unsure (1)..(338): unsure at all n locations
tcctgaggcctggcagctataaccccaccagtttctatttgccnttaatttgggagccaaaacccccccttgtgtttcggactttcagcccccttaatgatagccgtcgatgatcccattactgctttccctaatgctctatgtcctttattcacgccggattccatgccttgcgaactccttggagtaccctcgggttgtggtcactaaaaccccgtgcgatgaaaggcgtgatgctttcgtctaatggcgctcctctcatggggtagccaagctgttttatggtgagaacgggattataattaatacaaccccttgttcccatcaagggaacattt

SEQ ID NO: 86118 - DNA, 309 bp, Glycine max
  unsure (1)..(309): unsure at all n locations
agcttttattcatgaccttctatggngagagagcttccccccccactcatcaacnnccgccacaaggcgtctccactctttcttccttctccattccgctgccattcatcttccaagaagcaaaggaatccattgatgaagaagatcctaggcctacaagctccaatggagcttacatcacaaggtaactgctatttatgaaagtaaagatctttcctctatgtctcttgctactttgtttggaaaattgcaggaacatgaaatggaactccaacgtcttaatcaaaatgtagaaaccgaaaaaaagaa

SEQ ID NO: 86119 - DNA, 318 bp, Glycine max
  unsure (1)..(318): unsure at all n locations
tcttaagtcatctgcagctgcaacttttttatcgttttacataccgggaccccgccacgatgtcnnnccaagcacctcggcgacgacatgattctggttcttggtctttctgatagcaagggggaacaattggctaatgaagagaatatgcatgggatgacgctgttttactcgctggacaaatggagcagcagcattagaacgggccataaactaggctgggtcctatgttggggcattccatttgaggcatgggatacagcaaacatccgtaagcttgttgctgctataggagacctggtggaggtggatgatgac

SEQ ID NO: 86120 - DNA, 308 bp, Glycine max
  unsure (1)..(308): unsure at all n locations
agcttgttgtacctattttttggtaaaacaatatccccaaggtttcccgaanaaccgctaattaatttgagaatatggattatgtaaattattaagttcccctgcagaagtcaaaacatactcaatgcttcacaattcaactatttttctacaagggttccaattgtctttctcccttgtgttaaaaagaatgtgactatgagtgaccataaaacattcctttttttttatcccccaatacataaataaataaaaaccaaactcaaccttaaacaaataaaagttccaataattattaagacgcaatt

SEQ ID NO: 86121 - DNA, 304 bp, Glycine max
agcttgaaggtgagtaattcatcacttctcgagccaaccctggtatgtgcactatgattgttatcatctccctcaccatcattgggggcgctacttgagctgctagatccctccacctttgggcatattctttgaaagattcatgctctttcttgcacatgttttgtagctgcattctatctggagccatatcagaattatactgacactgcctaatgaaggcaaccattaggtccttccaagaatggactcgggaaggttccagattagtttactaggtgacagctgccccagtaagactttt

SEQ ID NO: 86122 - DNA, 282 bp, Glycine max
tagaaaccacccttcaaaagggataaaacaaacgaagaagctgctcaattgttgcatcctgcaataaagaaaaacacataaaccggcatagtttcttggaaattttgaaagaaaaaaaggttaaacaatgctgccacagcattagttgtagcattaaaagtatcacaatccgaatgcagtatagccaacataaaaatctcaataacaacaaaaaatagaagttggataccataaaataactacccaagcacaaaaatatacaacagacagctcattaaataa

SEQ ID NO: 86123 - DNA, 307 bp, Glycine max
  unsure (1)..(307): unsure at all n locations
tagctaaggatctgatggtttttagaanggcccccccgcccctgttcgntttcggagactactaagttattcattnattctaagttacttctcctctcatgtatatgtagaaagaagagaaacattagtggactgcatttgttaatttttttgttttgaaattacagattcacatgtacataggctcatgctttctgatgaatttgtacagtcagtacagtatacagtaatgagtggtggtttaagttaacatcagccacaagaaaattaggatgtagctataatactgcattggtttggtgttggg

SEQ ID NO: 86124 - DNA, 330 bp, Glycine max
  unsure (1)..(330): unsure at all n locations
ctgcatgcatgcnagcttatagaacntatgctttctttattggatatgccttttaaaaaacccccccatgcgatcgaanncctcattcttcaattcatgtgtataaaaaaatatctattcagagaagtttttcctttaaataaatcttcatactctgagaaatcagtctctaactcttaattgaggatatgttgatcacaaaaaatataaaattatgaaaactatattcttgattgagatagcaactaacacacagagatcttacggtatcgatctcaaaagtcaaagcaagtgttttattttataacacagaatcatcaatggcatcaa

SEQ ID NO: 86125 - DNA, 316 bp, Glycine max
  unsure (1)..(316): unsure at all n locations
agcttttgagtgaaacatgtgactcttccttttaaagaaagagtgccccccaatgactctggncctcgattaccaaaacattgtaattcgattacagcctttttgaaaatatttggaacgttgtaaattcagtttgaaaactttttcaaactcattttgctattggtaatcgattacaacactatggtaattgattaccagagagtaaaaactctttggtaaaggttttgtcaaaaactcatgtgctattcaatgttttgaaaaaactttttaatacttatcttgattgagtcttttcttcattcttgaatcttga

SEQ ID NO: 86126 - DNA, 309 bp, Glycine max
agctgcagctttattagcatgttttttgaaacttttgttttttggggaccccaaactgggtgatcccaccaagagaagcagaatttaaaacaaaattgtggaattttaacaaacatacaagcagattttatacaatttgctactgtgttgaccaccatgagagtgcaggcaagacaggagagcaaaatttttggaattttaacaaacatacaagctgcctatcatacaatttgcaactgtgcactacaaagaaacaattatcaaaagcaaccgtgtttaagccataattcacacgataatgtggaaact

SEQ ID NO: 86127 - DNA, 353 bp, Glycine max
  unsure (1)..(353): unsure at all n locations
gaggcctgcaagtctatcttgccggctgttatttttaacatttctagtattaaaggaagtatccnccgcggactctctccttttacacaaaaacccctgtaagaatatataacctattaaataaataattttaattctcggattcttgggtaactaataaattattaattttttatgggcaagtacctttaatattttattaaagaaatggaaattatatcggtagcatgttgataataagcaaatattttttttttttaaacataatgattaagtgtgactcaactactaatgttaaaaagtcatcaaatttagtatgcaaaccttaaggggttggtttattaggtaagcaa

SEQ ID NO: 86128 - DNA, 332 bp, Glycine max
tgcaaggctgccagcttgtggaaacggcttttttgatgaattattatttaccaggaatgctcccgggtttgttgctgttccccatacgccgaatatgcttttggaaactgtttttatatgagggggttcagttaacctagggtttgaaagtgagaatgtgatgttgtgagtggaaaaagagttgggctttgagagttggaaggctaagtctgaattctgtggtgaatggagggtaaaatgagttaatcctagcttgaaatgtcctttataacatgtgagaaaggttaagctgtgctagagggaaaaacaaatgaccaaagtgaacaaagagc

SEQ ID NO: 86129 - DNA, 305 bp, Glycine max
  unsure (1)..(305): unsure at all n locations
agcttttcatggaagttttctcaagaaagcgngttcccccacctacctagtcganccatcagaagcatgtgtaacacttggtgtatactttgatgaaatgagagtcttgtgagacacaacctcaaagttcaacttctctccctttttttcttccttcaatttcgggctcccccctctctctttctctccctctttcttttcctccattgaaacatccttccaagcttcttatccaaggctcatcttggtggtgaagctccttcttccatggcttattccctagaggatggcgcctcctctcccct

SEQ ID NO: 86130 - DNA, 307 bp, Glycine max
agcttctacatcatccattctaaactacattcaaacccccaagctatcacagccaaccaaaacagggcaaaggcaaaaaactctgctcaacacaccaaccaaaatcacagcttttctcactcaaagaccccagtaacaattccttcgatccaattcgttaaccattggatcaactccaaaattttactgcaagtctatagtgcataagcctacattgtgaccgttgggatctactatcaaacatccagaactcattctgcactactctttccacagccaaccacacacaagtcattttccgcacaag

SEQ ID NO: 86131 - DNA, 309 bp, Glycine max
  unsure (1)..(309): unsure at all n locations
agcttctgaactttngtttgagngagcgaggagacacacaccgcggctttgtgttctacagaaaaggctttctctctctctttttttttaaaaaaagttgtgccacatgtctttttttgagtggagcaaaaaggggcccactttttctcttgatgtgactcatactcagccacaagaagagaaaaatctgaccttttgaaatgctaaaatcctgcctcggtttgcatgccgtttctctggttccagtccctcgcgtttctctgcactcgtcggggccagttttcgaaggtaagcaatatatatatcaaa

SEQ ID NO: 86132 - DNA, 302 bp, Glycine max
agctttaagaggctattttttgttctaatgaacccttttatggggaatttcacccaggagatgcagtggaaaaataacggaaaaaggtgagaagaaggaccatccactaaggaataagccatggaagaaagagcttcaccattaagagagtgccttggataagaagcttagaaaggaagcttcaatggaggaaaagaaagagagagagggggggggggggggacaaacttaacaggcggatttattggtgcaaaacaaggctttttttgaggattaggatcaattttttccgattggtttga

SEQ ID NO: 86133 - DNA, 303 bp, Glycine max
  unsure (1)..(303): unsure at all n locations
tcttgctagtagatctaccatatggaaagaaccccccagtgcaaagtanatttcataaacaagctagacgaggcaggtaaggtaataagaaacaaggcaagattggttgctaagtgtcctagtcatggctttggtgatgataatcccaaagttgcccaaatacagggacctatgaccaggggtaggaccaaatagtcagaggataccctccaacaactggtagcagccatacttgacaaggccctagtagagaaggacgaaggcccagaggcactcccaagaatcttgattgctgaagaccca

SEQ ID NO: 86134 - DNA, 306 bp, Glycine max
atcttccatcacattggcttccccccattatgcttgtcctaatcccctctaggacttgcttggcgtaaaactccatgattatttatggatcatacttatccatgggtgttgcaagttgagtccactgcctcctggcaatgtcctcctagaattcagcatattctccttgccttaattggacccgcctctccttgagaaaagaccaacccttgactgtctcaaaatggcgctagtgttcatcgctttagaactgtcattccctaatttcggccagggacgatcatttgcaaatgtttggatttttgc

SEQ ID NO: 86135 - DNA, 317 bp, Glycine max
  unsure (1)..(317): unsure at all n locations
agctnctttnntttttatgtcttaagcttttttatcctataactgggtgccttcctatatgggccctaacttactaaataattcaattcaatgtctaaagagccgaaatttcttaaatgaaaataagggacagccgaaaacgtacctcttaagaatttgttttgaaagtgctaacgtgggttggggatagatgcgtttaattacatccagaaataaagattgtgagaccatgtgctcctctttccagctttctctttaagactttattatgtgatagcgaactgactcagtttgtttttgttgttttgagtcacagg

SEQ ID NO: 86136 - DNA, 330 bp, Glycine max
gagccgcatctgtacaagatatatattttaagattattgcttacctgggatccccactcatgttaatttttcgacacccctcaaccaacggagaaaatttatatttatcataagaacccacttttttagaataatttatgacaaaaatcaatgaactattagataattggtattagatgatattaatatattctaattatttttaatattgaatgaaaaaactgaatgaatttatgaaatctattagactcactctctatttaataggataaatattgaccgaataataaaactcattttttaaatataaaacgttgaaaatatttatca

SEQ ID NO: 86137 - DNA, 319 bp, Glycine max
  unsure (1)..(319): unsure at all n locations
gcttgttcgtgaattttttttttttcagactttcttctctttgtgttgccacctagattttttgcttcccattttcatgcctttaatntattttatatttgttctaaatttcagtagttcaattttgaacaactgaaatttggaattcattttttaaaattaattggtcgaaataaaatatgagttattcaatcttcatttgatagttccaagttactaaatgcattgaaaagtgaacgcagaggatctgatcctctgcctcagtctttcagtcaatgataggtattctcacacaaccttccaagctagcttgctccat

SEQ ID NO: 86138 - DNA, 269 bp, Glycine max
  unsure (1)..(269): unsure at all n locations
tttttcgtggattagaggaagcncacctttgatgctgcacaggattcttccaaccctttagggcggtatatctttagaaaagatttcgtagcccccttttttagcaccatagttttgaaagttggcatctctaatccgatagccattattactgacatcagctctaacggaagagcaaccattagggtccttccaagaatggactcgggaaggttccaagttagtgtaccaggtaacagctaccccagtaagactctctttggaaggaa

SEQ ID NO: 86139 - DNA, 305 bp, Glycine max
  unsure (1)..(305): unsure at all n locations
agcttataaaaagnctttttatctctgataggacgccccatatatatgtatannnccttatattattttttgggtaccantatatacttatattattttttgggtacaattaattttttttttaaaactattgattacacattactgttccataacttctattcctataatcaagtaagactttaattacaatataggtgtgagtcatgtgcccatttatattcctcatttttattggcttttctagttctgttaacgtttcctttttctttaactttcctattacgttcctactactcgagagc

SEQ ID NO: 86140 - DNA, 334 bp, Glycine max
  unsure (1)..(334): unsure at all n locations
cccctgatcttaacgcactgagctgcagcttgttgattacatttccccctttgncaaagccatcctttttgatttcatcaaatcttcatgatttacattcttcccctttttgatgatgacaaccacctgtaggttaggagcaacaacaaagaaaaaatatctatttgcatatagtttactcccccttggttttccaatgattgcttatatgagacagttgaagatttcatatttttcatatgtaaacaaattttctcataaacaatagatgatttttcttactattttatcttttatctttctctccccctttgtcaacatcaaaaacaaatca

SEQ ID NO: 86141 - DNA, 331 bp, Glycine max
  unsure (1)..(331): unsure at all n locations
ccctcaccttacgcacccgcagctgcaagctttgtacttntgtttgtgtgttgaggagaccacccgtggctttttttctaagaaaaagctttctctctctctttttttttaaaaaaagttgtgccacatgtctttttttgagtggagcaaaaaggggcccactttttctcttgatgtgactcatactcagccacaagaagagaaaaatctgaccttttgaaatgctaaaatcctgcctcggtttgcatgccgtttctctggttccagtccctcgcgtttctctgcactcgtcggggccagttttcgaaggtaagcaatatatatatcaaaa

SEQ ID NO: 86142 - DNA, 305 bp, Glycine max
agcttcatcctcaaagatttaagaaacagttctgctgaagaagaataaaagatcccttttaccaaaacgaagatgattgttttggtatctgtttagattaaatttaatttcggtcacaaaaccgtctgtttgtaattaatatgtaattaatgctagacaatactacctgtcctgtagccattaaagtcccggtcaaaactacttgtcttgtaacaaacagtcaaatagttgtgtctttgattttgacatagaatacatcaagggcacctcaaattcactacctgactaccttacccgtgaattct

SEQ ID NO: 86143 - DNA, 299 bp, Glycine max
  unsure (1)..(299): unsure at all n locations
tagctncatcttcgcgactttatatgcccccccctatagccactgtgccactcgccactgtacccaggtattttgttgcatctttttttgtgactctgtcttcttctctgcatctttttgtattcaatatcatggctgagtttggctcacctcgcatggctgagttatagcttcttgtttttattttatccacacattggctcacctcgcaccagtttgcttcttcttcctcttattggtttatttttttaagtgctttagatataattgctactgtgtggtaactgatgtgtgttagt

SEQ ID NO: 86144 - DNA, 302 bp, Glycine max
tagcttgtcattgacacttttatgcaatccctcctgagctcgccggtttcgggtgggactcgcggcttacaacagaaccaggcaaccaccgcatcgcattgctgtgtcgtgtgtcgtctagtctcgcgtcatctggtctcggctcgcactctcgcatcgtctgagcagctccaactcgccatgaatgaagaacagggacaaacacaaaatgaacgaagcaaaattcctacactaaagtggagcagtggacacaaagcgacgccatattatggaaattttttttttcaactgaactcgtgtga

SEQ ID NO: 86145 - DNA, 311 bp, Glycine max
  unsure (1)..(311): unsure at all n locations
agcttgtgtgangagaattttttttacgagtgttcaagcttaagggacccccctggcctcctattcctcctaattgagaaatgactaccaatccagtgagtgattcatcccgtgatgataaactgaacggagccaaaccacaaatcacacccttatcactctcacaatcacattcttatgctatcacggttatcgctctcacaatcacacccttatcgctatcacggtcactgaacataagatgctctctcccaacgcgtgtcactcaaaatcccatgagtattcttcaaactcaatcaatggcggatcga

SEQ ID NO: 86146 - DNA, 320 bp, Glycine max
  unsure (1)..(320): unsure at all n locations
cctgcaagcttcatgatagaatcttattgatncagtcgttttgatgataacaccccgaccgattctngccccccacaatgatttcgagattgagtcaagaacaattcaagaatcaagagaaatttgatttcagtttcaagtttcaagagacaagaattatcaagatcaagattcaagactcaagattcaagaatcaagaaaagactcaatcaagataagtactaaaaagttttttttaaaacattgagtagcacatgaagttttcacaaaagcttttaccaaagagtttttactctctgataattgattaccagtttact

SEQ ID NO: 86147 - DNA, 235 bp, Glycine max
tgcactaattgaaatattggtgtgtattgttaaaaggagaaaagtctttcatatatcctcatagtgtgtttatatgtggatgatttactaataacaggaaaggattgcagtgttatctcgacattcaagcaagagatgaagtctgagttcgaaatgtcagatcttggagaattatcatattttctgggcatagagttcaagaggacaaaggctggaatttttatgcaccaaagca

SEQ ID NO: 86148 - DNA, 316 bp, Glycine max
cagcttggactgggcctaatttttattaataattttccaaatggacaaagaccctttctaggccaattgcgtgctgaagtgtcaaattttgattcggaagatttaggtgtaaatccagtttgaacaagtctaaatggatgttatggactggtgtgaggtgagagtttgcttcaaatttacctcattctaaatttcacctttcaaacctagaaaagccattgaatggaggggtgttggacacctagattctgtgttgctgtgctttaaagcttgaatttggtttaggcatgattgatacatgatttgggacttgtag

SEQ ID NO: 86149 - DNA, 300 bp, Glycine max
agctttgaagttggactttgtctcttggtacagggtcatccatcatgtaatagtcccaaaaccagaaatggacgccttaagaagctcaacaattttcatagcagtcgggtgttcccccattttgttgttatggaaataaaagtggagttgggtgagtctttccacgggttttgtggatagagacataggagactcttttgtaaacacttcactatttgctggtaaggaacctgacatgataaccatgaaatgcaaggaaaaaaggagacacacaagtgaagccatatcggtacaattttt

SEQ ID NO: 86150 - DNA, 281 bp, Glycine max
  unsure (1)..(281): unsure at all n locations
agcttgttttgagaatttttttgcatgagaaagaccccacgccgggcgtaccgncctacggacacgcagtgaaagtgatatgaggagtacgattgagattgcccatcgctgcatatcttcgagaaaagctttgcgttgatcctaatgttctgtcagacattttctctaagggctggagcagtgtaaagtattataaaatataatcgatggataaaaaaccaacagtttttatatcctttatggggacaaggtgaggtgaccctgtgcctgtgatggcatac

SEQ ID NO: 86151 - DNA, 306 bp, Glycine max
  unsure (1)..(306): unsure at all n locations
agcttcatgtcattcaatttatactacgttgacctcacgaagactgaacatgcnggcttatctaattgtattcattatgcgatataatttgttataagccattaaaggataattattaagtactcgttgcattaagaaaaaaattagttggtgcaaccaaaatcaattacgcatgtatgatacatcgttgtcataattgacaacacataatgatatgcatgcgtattaaagtttgagcgtgacacgacattgactgacttgacaacacattctgatgcacgacattggtttagtaggaaacataaa

SEQ ID NO: 86152 - DNA, 310 bp, Glycine max
agcttgtattgattaggtttatcgagggatcgaggttactagtttaggctacaacctagaacacaagagcatgattgattacagaaatatatttatatgcatcagcttgtttgttagaaagacccaacatttctacctactgctgtcacttttacttaccttgcattttatagtttttagcataaaggtttagtttaaattctgtttgaaattatcaatcatacatgttctctcaacaatgcttcatttttgaacttaactcaggctaacattagtttcctgtgtttgatactcggattcatccatttta

SEQ ID NO: 86153 - DNA, 308 bp, Glycine max
agcttgcagctcagcaattgtccattgttgagacctaccaacagtcacgttccatcgaatgaaatccttcatcgtcttccccctacgagtcccaacacaggtcctgccacaactacctctgtttcatcttcttcccctgcacaccatcaccgaattaaaattgatgttcctcgatttgatgggagtgacccctctgggtggatcttcaagatcacccagtacttcgagtaccattcaaccccagaggcagagagacttaccattactgcattctacatggatggctgtgcgttggcttggttccaatg

SEQ ID NO: 86154 - DNA, 309 bp, Glycine max
agcttgaaatctgtaccattatatagtccacataacagttgacagatttttatcatgcagcaccgacactttcataacccccaaaactttaaatgttttatatttataaagtacaaatcttaattactagtgattgctacaagcttcccattaatctccatcatcaataactttggtcttcgatctcaccaaaattgaatcattgagtgtgattgagattggtagtcatacaaaagcacaagtaaaatcttcattgtgaatctttacaattgcacctttgttaactgctgcaatcaacaatggcatgta

SEQ ID NO: 86155 - DNA, 299 bp, Glycine max
  unsure (1)..(299): unsure at all n locations
agcatgactttattatttttgcgaccccccccncccgttcacctnaccggaagccatttatgttatggtggtttggtaaataggaagcgtggggcacatggaaataataagaaggagggaggaacccttgatgagactgacttttctacctggacaaatttcgcaccatatgaacaacatcaatacttagacaatttgaaccctttttattacgcctgctccctatcatgctataacatccaattatctataaaggccacccttaaatcataccacaaaacccgattgctgtatatccg

SEQ ID NO: 86156 - DNA, 302 bp, Glycine max
agcttgacacttttgagtatttgtaaggccctcatcataccctgcgttcccatccataatggatgcacctgaaacagaatgcctaggagcagtttggataaaacagcatcttatgcctgccactgatagccgagttgcagaggaggatagcgccatttacggcccccgccttgaggtattgggagagattgagctccgagtgcggataggccctcacacatgcgagggtaccgtggaataagggacagtatgcccccctacagctgactgctggggcgcacgtgtgtccacatgctgggagt

SEQ ID NO: 86157 - DNA, 171 bp, Glycine max
ctatctttcctctttatatgcagtaccttacaaaacctaccttgtatgttccctcacacattgcaacattttgggccacactgagcacttccttctgtatactctttggcaccttacatttggcaccatgcaatgtcgcgtgtcttatgactgccatagaacttctctttt

SEQ ID NO: 86158 - DNA, 348 bp, Glycine max
aagacgctggttatgtcaagcagaaacttccagcatattcaaacgaaaataactttttactcggatgttcgattgagtcccgtgatatatcgagagactccaaattgaaaatgaaagttcgtagccaaattcaacgacaataactttatacaaggatgtccgattgaggccacgaatatattcagaccctccaattgagaacggaagctcgtagaacattgcaatgacactaacacttaactcggatggccaacagagtctcgaatatattgtgatgcccaaattgaaacggaagctcgttcaaatcgacgacagcacttttacttgatgttgatcaggcctatatat

SEQ ID NO: 86159 - DNA, 311 bp, Glycine max
atgaatagggtaatatgagcgcgacgctcaaaatagagactagaagctctgagcaaattgtaatgacaataactttatacactgatgtctggctgagatccgtaatatatcccgacgctccatagtgaaaacggaaactcttaaaaaattctaacgacaataactttttactcggatgcccgacagagtgtcgctatttatcgagagatgcttcaaattgaaaatagaatctcgtatcaaattgaaacgacaattactttttactcggatgtctgattgaggtccgtaatatttcgagactcttcaaaatt

SEQ ID NO: 86160 - DNA, 327 bp, Glycine max
atatatattgttgctatggatataaataataatttttataaactaacagatttcattcctaatgatcactaaaacttgtattacacggtgtattttatagcaaataagaatcatatcctattatcatattacgttcctatacaaaacgtatcttatcatatccaattacgttcctatacaaaaattatatcctatcatatttacgtccctatacaaaaagtatctcctattacgttctatttattgtaaaaaggcttttaaaaaggctatctggccaagccaggcatttaaaaaggtcaggccgagtcaaaatataagtctttgata

SEQ ID NO: 86161 - DNA, 280 bp, Glycine max
ttcccaaagatacccaaccaaaggaattattcttgatcaagtactaccaccatcgtcaaactcttctgataactatgaatgctttgagctttactatatacccagggagagcaatacttgagcttacctgttcttcaagcttgttagcaccaaaaagactgggcacctcaagactatcttcttggagatacttcaaactcccactatagacactaaggaggttatggatggagacgaggaggaaccatactagatgaccctctacaagaattttctaatt

SEQ ID NO: 86162 - DNA, 381 bp, Glycine max
ctatgcagctcacttttcaggaggcatctcggatagtatctttttctgacatatttgcgccaaatctcttgaactatgaagatgttgtccatcatcttttcgatcttaatgaaagcagtttgagtgttcctaataatagtctcaaacactggggctatgtggatagcccgaattctagatccactcttgtataacaaatttcagcaagatattggtctaaaaaggttaacctgtgacgcctgatcatgcttacgaataagcgcaataatatcatggtgtgagctgctttataaattttccacctgtaaagaattcattatccgctgcttagatataatcaccatatgatattccaagccttcttgaagaataaaacattgg

SEQ ID NO: 86163 - DNA, 385 bp, Glycine max
ctctacttaatagcaatggttgtttcttatgcctctctatgacatggcatcattctggcgctaactgtggaagtgaaaccatcttctcaattaaattctggcttcacacgagtcatgtcttccaaggctccaccactggcaccatctatcatacttctctccatattactgagttcttcataaaaatattggagaaagaagttgttctgaaatctgatggtggggcaactggcacatagtttcttaaatctctcccagtactcatacaggctctcttcactaagttgtctaatacctgagatatccttcctgatggctgtggtcttggagcagggaaaagttttctaaaatactctcttaaggtcaccccactcggatggacctt

SEQ ID NO: 86164 - DNA, 396 bp, Glycine max
cactatatagtactcaacctcattacctcgacatatttctaattgtacagttatatgtgatatataagtcccttcacaaaatagctacattactgaggacatctttcttcaactatgtcataagatgaactggcattgagttttgttatttgcatggctcattaattttttttgcagtatttgtgtttcaaatctgacataaactattatatgctattacgttatgattgtatccgatattggcatgcagagctaaatatgatccaaaaagtgatttattggatcacgagttcatgctaaaagggaaatggtttcaacagaaagacatggaggtatagttaataattctgttggtaaaatcattgaatccagactattgactttatcttatttcat

SEQ ID NO: 86165 - DNA, 127 bp, Glycine max
catcactgcaggaactgcccactgacccatataatcaagttagacttcctatgaaagatctatccagaaaccaaaatcttgctaaccctttaccttgtgacgtttccctaataagattacctttatc

SEQ ID NO: 86166 - DNA, 306 bp, Glycine max
aacagctactgcaaacgtcaaaaccgttgaggttactctcacaagttccgagttggtttctataatgacaattaattatgctgacagcacatttggagctattggtcaatctgaggagtggtgtcttcatgctcgaaactacctcaattatgtatcgctcccatatcctttctgctattcacgtattccgattggtgtccatcccaaaagaaaagtggagtgggatcctatacttacgaaatctgatgataggctgaacaggtggaatcagagaaatatatccatggctggtatactcactcttat

SEQ ID NO: 86167 - DNA, 374 bp, Glycine max
gaaagcttcaatggagggaaagaatgatatataatgatagagagaggaggggggcaccaaactaaatgagaaaaaagggagacaggatgaactttgaagtgtgtctcacaagtttcacattcatcactggtacaacaagtgttacacatgcttctatatatagcccacgtagcttccttgagaaactttcttgagaaactttcttgagaagttactttgagaagcttccttgagaagctagagcttagctacacatacctttctaatacctgagctcacctccttgagatgagaagctacagtttacctatacacatccttctaataactaagttcaccccatgccaaaatacatataaatgcgcaaaagtccc

SEQ ID NO: 86168 - DNA, 376 bp, Glycine max
ttgcactgtcatggatattgtcatggcaatatctttacagcaagactgaaaagacagaccattatccatcactacaaagacacgcatttgtaaaatggtggacacaatttgactcatctaaagcggatccataacaagtaaaactctggttccaatcccatccagaattcctcaaaccatctgatccacaaacttatgtgttcttgaaccaaaagtctcatctggcggcatttttagcatgatcgacatctaaggaggtcttagctaaaaatctgaaggaagatctgtaaatgttacagctggaagaagaagcttcattctcaaagaaggaagaaacgacttctgcttaataaaaataataatatcccttttacca

SEQ ID NO: 86169 - DNA, 377 bp, Glycine max
  unsure (1)..(377): unsure at all n locations
aaactcagcttccctcattttgtaacaaaagaaaattttattgctttnttaacccacctgattaatatttattcatattttttgggtgtataataataacactagagtctgatcctataatcccatacacattatgcaaactttttattgcgagatcaacactcatggatttatttgaagctgttaactcatttaaaacgaatatattatcttgtaaaatgcttcaaatattatgaattacgtcctatcaattttgttttatatataaagattacatcattgtttatgtgcatataactattgacattccaacttacaatctgatgctttctactttaatctttcactactaaactgactttagtaaaaaataaaaa

SEQ ID NO: 86170 - DNA, 399 bp, Glycine max
gattctttaggagtctctactctaatcgattaatgggtgatataatcaattacttctcttttaaagagtttcagaagtgaccatgaacactttaatcgagtacatcacgaatctaattgattatattattcttgacaagttttcagtttttgggacgaacactttaatcgctcgaaatggtaatataatcgattacttcttcaaaataatcgattacattgtatatttaattgattacagacggttataactgttttctctattaatagtcaccttgttgtctcacttctaataacttctgaacgagctagaagtaagagttgatattagtaatagatagaagagaagaataagtgcttatatacaatgtgactcacaaccttctaatctctggatatg

SEQ ID NO: 86171 - DNA, 390 bp, Glycine max
aatacccacgcttgaaaatgatgctttaatggaggaaaagatatttagaatgggggagcacaaaattgaaggaataaaggaggaagacaagtggaactttgaagtgtgtctcataagactctcattcatcaaagttacaacaagagttacacatgcttctatttatatactacgtagcttacttgagaagctttcttaagaaaacttacttgagaagctatagcttaactactcacacccatctaaaaactaagctcacctccttgagaagcttccttgagaagctagagcttaactacacacacccctctaataactaagctcacgttcttgagaagagaagctagagcttatctacacacccctataatagctaagctcacccccatg

SEQ ID NO: 86172 - DNA, 412 bp, Glycine max
  unsure (1)..(412): unsure at all n locations
tagttcagggggacattactcttaaagcaaaaatggcatataaccttctcccataaatacaaacatcaatgtgaaattagagcaagcttatgcgcctattttcttacaaacgttctcttgcacaagaacattataccgaagaaatgcacccatatacaatcaaagcagcttcgttacctagaatatttacacgtacctccatggtgtatttgttacttacatcacacacatctccttggctaaaatcacatacatgcatactcaaggcattttggnggcaccaaaattgcacatgtgcacatcttgtgatntctaatacctatacatacgcanacttcatgatgaatcttgactatctacacaataaggtgctacatttcattgcatctttttcaggttttgctacctaaag

SEQ ID NO: 86173 - DNA, 374 bp, Glycine max
tgaccatacaataaacaccacagcatgtcccgccacggctcaaccttaagttgctgagggtaaagctctcatatagaccaacgcttccaatccctctggaaaacaaaaggaagactaggcttagctgtctattccaccttgcatacagtagtcacagacaacaaataatgttcctgtttttcaaaatcctactgatattgcaagatgagcgaattctgagaatgttgatcctaatgggtttgctcaggtgaaaaccaaaccacagaaaaaaggaaagaaagcgcaactccaatatgcaccccatattgacgcaatgcaggtagatttgcaaaaaggaaggctgcaaaaaactagcaatcatgtcggggaaggtc

SEQ ID NO: 86174 - DNA, 364 bp, Glycine max
caggcgtgctcgctataatgtagattaaacattatacccaccactcctctgctttatgctgctagttatataaatcgttcgctgttgaaagttgatgtatggtgtgaagatggagcaccatatgcatttaaatcttcttgcgacacaagatcgacattaactcgatataccctttatgattcacttttataagatacattttatgtggatctcatttaatttacatgagttacactttggtatctccaaaatacatgtagaatgtcatttattagaaaaaaaaatgtcaatgggatacttacaacaagatgtgtacccacaagacgtgtttgacaaccaatcttcttctcactgcgaattgtga

SEQ ID NO: 86175 - DNA, 78 bp, Glycine max
aaaaaaaaggaaagacatactacaaaaaaaaatcgacaaaaacagcaaagcgaaacctcaaaaagcaaaccctagata

SEQ ID NO: 86176 - DNA, 347 bp, Glycine max
cactaagtttagtatattaattacaccagaatactcttataaattcgaactactacttagatatatgaataatgcctaacctgtccactcattactcttggtgaaatctacacctacactatgattataatactcaacgtctgcacatgcaagagcctcattaacctgtaatcaaccataactgttgcaaatgatagaaacgcttataaataaaataatttcaaaatgttgattctttatccagctatgcaagatatgcaagagcatcatcaatgacaaaggaattcgaaaattacaggaacaatattaacaccaacctaagccattccaaaatgcactatgaatca

SEQ ID NO: 86177 - DNA, 417 bp, Glycine max
aatggatccgcagctatcttacgatactaatacggaaggaattgcctgatctctcctctcctcctctaaccactggctctgattctcttctcactctcatctctaacaaactggcccctaaattattcctattcacccctcttttctttctacaagaaaacacctaacaattcccttgagcccttcttcatctcatgagcttgaggctccaaaggcccattgagagtttgttcccatcacaacatcagaacaactctataaagataagcttcctagactctaagtcgggcaacatgattgctaaaggaaacaaaagagatatcacgtctatacgctcaagtatgtatatccatgaagtctctaaagacatatggctaccctttatccattcactcctcacgtatgtagatattagat

SEQ ID NO: 86178 - DNA, 327 bp, Glycine max
cataaatgactaaagaaagtgtttatagtacctatttacaacatccacgagtacttctaacttaacaaaaaaacaataacttgtataataatcagtaggctaactatacttttggttcctctatgatagtcaatgagcgaataatattatgaattggtttggtcataacatagggaccaaaagctaaggggtaattaagtctcattactaaccaattattctaatctaatcaatgtgaatagcatggaatatataataaatggcaatattctataaatgttaaatattatgaatttttttcccaaaataaaaaagaaggagaatgca

SEQ ID NO: 86179 - DNA, 417 bp, Glycine max
agtcaccgcggctgcagctggaacattaattatatgctccagctcgatgtggattgttatatatataatggactacagctgcattgagtacacagttgtgtaggtaaaagctgtctgaggtgtataaactctatgtgttgtcatgtcgagtgcgtgggaagctgagtgtttatcctaatccaaagcagctgtcccttctctctctctctctggactatatatatatattgggtaataaaaagcttaagtgctgagtgtgacaattttctccccttattcaaatcaagttctggagattctcaattctcgagcaatgaatcctctattttaacatcaacctatctatatggtagcgaatgttcgacctttaaaagacaacatgatagaaacgttggagtattataaatgagagtggtg

SEQ ID NO: 86180 - DNA, 376 bp, Glycine max
tagcatatgttgacatccaccaacagccactatgtatgtgttactatgccattgtattcagtcacaacttaactggtaaatataacaagataatcttattggcctaatgtctattgaataaagatgggtgaaacggaaaagaatactcaattttttctattcttcggtgacgctgtctttttaaatgatggtgtaatatactatctggccatcatcaattatagtgattaaacaatcagccacaagcgagatgcaccaaaataatatttgaatatatccaactgttgcaagtcgtattggataacaacgatggctactgagcaaatgcatgtaactatcttgagtttgagaaatgcatatactgaagctctggatc

SEQ ID NO: 86181 - DNA, 371 bp, Glycine max
  unsure (1)..(371): unsure at all n locations
tgagagaccatacaagtntcctaacgatttctaattatgtgggccataagtctatcatatgctgacaatagccgagaagcccatgaatctcttctggggcggagtatgtgtctgccatcgccttggccttggcttaacaatcgggaagttcttgactcccgttcaagtaagagcaaaccgatccatccacatggttgcctcttggtgaaagagtcgtcacccttcctctacctctatatcgcatatactggcatactcatcgcgatttatgctcggggccgaggtaaacccaatcttcttggactggggatgatagctaacatgctggctctgtctgatagacctgaacagctcttttgacttgacaacaa

SEQ ID NO: 86182 - DNA, 371 bp, Glycine max
aacttctaacgttcatagacatgactagtttcttattaacacacacattaatcgcagtcctaccataaaactgcaatatttaccagtcataaccagtttccagagatgaatgtgagtatcacagcttatacaaggaattgtattataaatcacacacagctcaaaatgctaagcacgcagttgtgtcataaactagacatggagatctattacgtaataaaatatcttagccaacaattcaaggtaagacatccattatggaacttgagaatagaacaattacagggacacagtttcagcaacatggttttaattttcaagtggagttcgaaggcacacatacaagctaagacttggagtctatcttgaga

SEQ ID NO: 86183 - DNA, 262 bp, Glycine max
atatttagctacatcaagacgtgtgaagaaacattttgcttctacattaggaagccaaaatttagtcgccttccatgagagctccactggaatctgggacacgtcatcaaaaatcttcatgaattatcccaatggatcctctacaacacctgcattgcacctctcaacacgatgtaccggattcacacattatgaactgaatcctatatgggtaaataacataacaactacaattattgtgtcgaggaggtattaccaatgc

SEQ ID NO: 86184 - DNA, 378 bp, Glycine max
ctacgcttctggtgggacatcttgacttgctttactatctgtcattcaccacaaattctgccttcttctattttcagattgggaatgcctctaacagcacctttgtgaatgattatcttcatgcctcttaagtgcagatgtccaaatctttgatgccatattctgactacatcttctttggaggatagacatgtggaggagtaactggtttcttgaggtgtccatacgtagcagatgccctttgatctgctgcccttcattagaacttcactcttctcatttgtcaccaagcattctgactttgtgaagtttacattgaattcttcatcacacagctgactgatgctgatcaagtttgcagtcagtcccttcaccagc

SEQ ID NO: 86185 - DNA, 241 bp, Glycine max
tcttaaatttttttgtaaagttgacttgaaaactcggacagcctgaaatggactggaaggtttccaacatccgggatgatccataagggcatcgatacacccaacagatggactcttggaacccaattcgccggatatacttgtgaatcaccttgtggccctaaaactggcccttgggccgaatgtagcccgaacacccggaatcaaaggaagcagttacccaccgtgaattcgtatgagc

SEQ ID NO: 86186 - DNA, 367 bp, Glycine max
tctggtgggacatcttgacttgctgtccaatctgacattcatcacaaattctgccttcttctattttcagattgggaatgcctctcacagcacttttgtaaaggatactcttcatgcctcttaagtgcagatgtccaaacctttgatgccatatactgacttcatcttctttggacgatagacatgtggaggagtagctggattcttggggtgtccataggtaacaattgtactttgatctgccgcccttcattagaacttcactcttctcatttgtcaccaagcatactgactttgtgaagtatacattgaatacttcatcacacagctgactgatgctgatcaagattgcagtcagtcccttcac

SEQ ID NO: 86187 - DNA, 371 bp, Glycine max
ctaagcttgatttaagaaagactggctcctgtttgggcattgcaaaattttcctctactgaccctatttccaagatgttcctatgtgacatgtccctatattaaggaaacttttgattttgcattgtttttattttcatcaacattatttggataatacgtgattgacttctttaaaagatgtgttttttctcttcttgtgtactcaagagtcgagattatacatgacattggggccgggcggggatgggtattgtctccccaatccctgactccgactgttgaacatgtcctcataccgatacctgatactcgacgggttcaaatttattatctcatccccgtatccatcgggtatcgggtatctacgac

SEQ ID NO: 86188 - DNA, 426 bp, Glycine max
  unsure (1)..(426): unsure at all n locations
gccggctgcagctagncactnatcaccgcgacagatggtttatcttactaaccatncagactctagaagatctacttttggcgtgtattatatagcaacaacgtatctggatggattgttagcccgtgatcgagtttacttacaacaatagttaccaagccagtattgttatggctcctcttgaagccttatatggacgaaagtgcataactcctatttgttggtatgatgatggagaagcattacttcttgtacctgatatgctccaacagattaatgaacaagtgaggttgattctagagaagataaaagcattttatgatatgcagaatatctactacgatggaacgaggaagccactatatctttaagacggagaacatgtgttgttgaatgtttctcccttaatcgtgatcggatgggctc

SEQ ID NO: 86189 - DNA, 364 bp, Glycine max
tgtcactactatcattactcttttatcacgtcaaagtatgaccttccatattcactatatcagaattacaattcgctattaatataaaacataatgactgttatcgagaataaaacacataaatggtgtgaccatattgcatgattatacaatccaatgaagatgaagttaatagtgattacaaaaaaaagtgatagcacagtcctcatgtttaggagcataattgaaaatcaaaacgccacaaatatgggtataagaaatgaccaagttataatactaatgatgacaaagttgaccctcttagcaagtcattcagaagtgaattatgacagactccaaatgggggatttctttgcatgatatg

SEQ ID NO: 86190 - DNA, 362 bp, Glycine max
ttgctgttgctcgtgtttttacttcctctatcactaaaatccatcgtatatttccttctacatgtctcaccgccatattgagttatgaatgacaattatgaaaaggtttgatcctatcaaacaaagacgccaaatatctacttattccacgaaacaagagcaacgatcaacaatgattatattatttaatactgaagacactttccttaattatgagactctctatattagacatcaacgatttgaagaaatttgatgaacaagtgtataaaagaaaaagtcttgaatcaagatatgaatgaaaataaaaacaatcgtggagaaacacactaacctatatagagtctatcctttgctatata

SEQ ID NO: 86191 - DNA, 366 bp, Glycine max
taatctaagaggctgacgggcctttccatgtattatggttgagcccgcagaaacacatatgctgggaagggtgacctcatttttttaaacagcatttgtcttaccctgaaagggggcatgtacttggaaatgatgatttcccaatattcttacactttacggaggaagggtggctccattcctaacgctgagcaatttatgaatatgttgccatatgaaatgtctaaaatacttattcttgccatgttataaaaaaacaatcgttatatccatgttcacggtgaaatgtctaaaaaacttattcttgccatgttatcaaaaaacaattgttgcatcaatgttcacaatcctcaaccaccattgggc

SEQ ID NO: 86192 - DNA, 388 bp, Glycine max
ggaactattaaactaagctcgtcgagtatggggtacacgtcatatgtggtataaggaggcgatcgggcaatggtgcaagtcgacttttcacatccacaaatcacacataaatccaccatacccagatgcacaccttcaactgagatcacgtactcccacgtagcccttatgctcattcctctcaacactgggtccccatcaatccctccaagcttccacagcatccaagcaattcaacatccaaatatcatgaactatcaaaaaccaagaaaatagggcagaggcagaaaactctgcccagaacacaaactaatactacagcttttcttactcaaataccccagtaacattctcttcgttccaattatttcaccgtcggatcgactcg

SEQ ID NO: 86193 - DNA, 375 bp, Glycine max
aggctgctcaattgctccacgttgctgcatggaatggcaaaggtctgtatggtggtcagcagaggagcacaaaccacaaacccttgcgacaggtgcagatttatgattcaaggccagctgggttaccaagttaaccaatgcatacagtttgccttcaagcttcttagtttcagatgatgcaaatgggtttgtagctacctcatgcactcctctaatgactatggcatcatttctggcgctaaactgctgggagttggaggccatcttttcaattaaatttctagcttgaacaggagtcatgtttccaagggctccaccactggcggcatctatcatacttctctccatattactgagtccttcataaaaatattg

SEQ ID NO: 86194 - DNA, 352 bp, Glycine max
ttctttggaggggaaaacacacccaactcaattattttgcttttgatgtccaccccaacccaattatgtgtgtttaagctgcattagcagtgtgatttgctatatattgtgaagactgggaattaattatgaatcggttgtttgggtctgggctgcattatgcagagcaaaagagacactctcttgtttgtattgcctttcactcatttgtgtctacagatgaaatgtatgtttaccattttgttgtttcaaaataaacactatatcattgatctttctttatatggaatgatgagttaagcttataagttaaggcatgtgtcctgattttacactaaggacttaagatcaa

SEQ ID NO: 86195 - DNA, 339 bp, Glycine max
ggccagcttaggggaccaaatcagactcagatgcaagggttgggtgctaagcgcttgagactcgcagctgagcatatgaacagaaatgcgcttatcacgaggcttgcgcttaccgaaaggactattgtttagaaaatagttttctaagtgtatttttgatacctttttccaagtaattgaaacccttatgttaaacatccaaagattggctgatatactcctatgtacagactatataacaagctcctaatgatttaaatgcatgaaaaccaagataacatgatttaaaactgggttggcttccaggaagcgcttctttaacatcattagcttaacgcc

SEQ ID NO: 86196 - DNA, 283 bp, Glycine max
  unsure (1)..(283): unsure at all n locations
ctatattccctttgcattactatcttggcttgtaagaaatttttcatcttgtgataagtttttaacgtatattctttgacactttgcaagaatacagcgaaaacttttatgctgccagcatccttnttgagaatcttaatcacattggagcagttcagcctgatgtgtgatntcatgcactgaattgaaccttccttttttatgcatgtctcattggattgcatgttnccacaagcctttcttattggaacaatttgagcaggaatacaacttctgaactgat

SEQ ID NO: 86197 - DNA, 399 bp, Glycine max
cgacactatatagtactcaacctcgatgtgcgactgttgtgctctctataagatcattggagtttaagcataatggtgttccgtccttacacatttgaacaggacagtctagaacattcacaccatcagatatggccttattatatgctaagtcggcacaagcaggataatctccactcgctccatattttgagataaccaaagttttatctgaaacatgataaaaaaaagtgagagaaacaggtcaaacaattatgcaagctatgctttcatcgaatgataaaaatcatactgtcgaacaactagaaatcgctgagaacaacatgagaatacatattccaaaatcaaaactaaaagttaccttttttcgtagcattggtgcctatgtgagcaaagcaa

SEQ ID NO: 86198 - DNA, 487 bp, Glycine max
  unsure (1)..(487): unsure at all n locations
ctgcacgcatgcaagctngnaagaaccacnacacccaccacccatggtgttttgttgtgttgctccaccacaaccacaacgtgtagggacaagcctaaatctataccataggtcattgagccatgggacgagcccgagccgacaacgagggttaccgacgataaccctcgtccaatgaacaatgacccaagttagcatcaacatggtctcataaaacatgggaggcacgtggatgcacaacattgcttattcatggggagagttataaagggggcaaaggattagaacatgtgggctgaacccattacggctagttgggatggaaataatttaggctgatcttggatctggagtttaacatcgggccaaagacaattatcgcgaagcttcaatcccagttgtaggacccataatgaagccttacagtgcataacaagtgggcatggaccaaaactataagtacatgtgctaacatattgaatgcatt

SEQ ID NO: 86199 - DNA, 339 bp, Glycine max
tgattatgacattcatatagggcttaagcatagcgtcttaggacaaaagcggcacgaaagcatagctcatttcacctttgcctaaacctccacaggagaaaaaagatgacgacattaccgccgctagaggagaaaaaggaggaggtaaatcattccccccttatttggcttattggctccattaattgtcatattacacattaaattctccttttatatctggtctgtggacaattaattcttgttgagagagcttaatattatataataatatttattgattattagcaatattgatgatataaattttgattattaattaacctaaattctaattgg

SEQ ID NO: 86200 - DNA, 354 bp, Glycine max
tgaagatctgggtcccgactctgttatgcttgtgggctggcgaaagcattcccactatggagcgaaaatctatgttgtttcttgctctgcagcttgagcaactgcagcacatgtgggttgcattcccgagacgaatcattgttcttgcgcaatgagaaattggaaagtgagacgtgaatgagttaatgattttaggaggggtgtcggtgatatttgaatgcatggccctatatcgatggaagatgttggacaccctttgcactctcctttacctgacgtgagagcgtgaacaataatgctctatggattgcgaatcgaacgggacactgtattgaccacatgatttatgcctgt

SEQ ID NO: 86201 - DNA, 356 bp, Glycine max
tatcatgcattattgcatggtcactagccgccatattctccattaattccatgacttcttcaagggtcttcaattatattttttcccctgcagaagcatctaacagctgcttggattattgccttaacccgtcaatgaacatattgagctatattggttctaaaaatccatgagtaggtgtctttcttagtaacccatgaaatctttccaaagcctcactcaaggactcgtctggaaatcgatgaacggatgagatggtagctattccttcatcaatcttggactctgggaagtatttcttcaagaatatttcaaccacttcatctcaagtcttaagactgttacctttaaatgaa

SEQ ID NO: 86202 - DNA, 379 bp, Glycine max
taacaaaacgcatgcgaagtgggtggaattcctatagcaattcccttatgttatcaaacataacaagggaaaaggtaatattgttgccgacgctctttctcggcgtcatgcattactttctatgcttgaaacaaaattgattggtcttgaatgtttgaaaagcatgtatgaaaatgatgaaacttttggagaaatttttaaaaattgtgaaaaattttcagaaaatggtttctttagacatgaaggctttcttttcaaagaaaacaaattgcgtgtgcctaaatgttctactacaaatttgcttgtttgtgaagcacatgaatgacgtttaatggggcattttggggtccaaaagactctataaacattacatgaacat

SEQ ID NO: 86203 - DNA, 391 bp, Glycine max
gtgaattatatacacccacgctctgcaaaaactcacttcctaagcacttcttgttttattgaacacaactttctatgttcaaaatagaatattgataagactatcgataaaagatacctcttatgaattatggagtgaaagaagacttaatcttttatacttttatccttttggatgtgaggggttcatcctagacaccagagatcaacttgcaaaatttgattaaaggtggataaagaaatcttcatagagtattctgactcatctaaagcatatgaagtgtttaacttaataactttggttggcgaagaatccatcaatcttatataatctatcagatcttgatgatgattttgcaaatatgaaattggactgtctgtagcacctaaag

SEQ ID NO: 86204 - DNA, 362 bp, Glycine max
gagggtgcaaactttgagaatgaaaaaattatttactgttttagaaaaaatgctaagaggaaatgtatttttagatactaaacaactttctaattcatgtatatgcaaatcttctacagagaaaaacaaaacataacgaatataggatataatatttaaaataatatatgctgaatcacgtgcaaggaagattgtgaaagggcactgacttacggtcatgtgctacactctttttctttttggataacggggagtttacactcatcttttttactataggctcagtataataattaattaattaattattatatcattgcatctcccaagcataacaatcacatctgtgtgttatgcttatg

SEQ ID NO: 86205 - DNA, 426 bp, Glycine max
  unsure (1)..(426): unsure at all n locations
ctccgctgcagcttgaaactcttggaacaagattttattctacttatgtttcgactcgccatttttggaaatgaagaacgaaaacgaattttgatgaattaatcgactaccatatttgataatcgattaaataatctttagttgttaaaatataaatacctttacttgttctttctaattagcgaccccttgatacaattcttatccttctagataacacattctaagagtcatgtaaatgaattattcatttattctgcattttttccacagattcaagttgatcaacatatattcactgcggcggtgggcgttgttantctaacgaaatcttgaatatgtggggagtgcgcggcaggtgtattcaactaatttgattccttgatattctaatggttaggctaccaggtttgtggagtgataagg

SEQ ID NO: 86206 - DNA, 376 bp, Glycine max
gtgtgcaaaatcacaccaataatacgcaactatatctggatggtgataacgcaatagttcgaggacatgaatggtacagtgcattgatctcactccatgacctacaagaacttagaatgtcatattgcaatatgtcaggtcccctagctagatgctttcctttcaagactacgaatctatcattcattgtccttgattacaacaattcatcattcccccaatgccagaaacatttacacattcgaaaaatctgaccatcctaagacttagaatctatcatatcattgtccttaaacactattatttatatatctgtgttagtttaactctctaaataatagctatttgagtctaaccgctttccttatgacataac

SEQ ID NO: 86207 - DNA, 358 bp, Glycine max
  unsure (1)..(358): unsure at all n locations
gcttcatagnggcttgtcgtgcttgcacgcctagtgcaattctgaaccgcttancactcattagtggagtntgggctanctcgtgcttttttctcttaggggatggactgaatcggngcactnngnnggatgacccttcgcttaacacaaatgcacaactcatccttcttccaaattcttcctcgcactcagccgangagtgttgcactcagcggatggctcgctgatgtgtcattattttctcctatttcctaacctttttgtcacccatttaattactgattagccttaattgtcaaattaattatgcagttntatcatttgggcctacttgactatattatgtgttttattttaa

SEQ ID NO: 86208 - DNA, 372 bp, Glycine max
tatcctcacaagggtgcagaacagttggcgagtttgcattgattataggaggctgaatcaggtaaccagaaaagatcatttttccctgcctttcattgatcaaatgcttgagcgcttgataggtaagtctcattactgttttcttgatggtttttctggctatttacaaattcatattgctcctgaggatgaaaaaaagaccacattcacttgtccctttgacacttttgcctataggaggatgccctttggcctatgcaatgcccctggcaccttccaacggtgtatgcttagcattttcagtgattttttaaagagttgcatagaggtgtttatggatgattttactgtttatggatcctcttttgatac

SEQ ID NO: 86209 - DNA, 324 bp, Glycine max
tgcacttttggcgattttattaatcatgtgttcgtaaggtttttgcactaaccaatgattttgcccccggtttttcgccgaaacattcccacctgcaaaaaactgatcacggtttgacaaaaaaagctggcttatcgcagaagagaccacgagcaaaaagaacagaccgatacccgtcgacattctaaaatctcagctatcaggtggtgaaaaaatccgctcgagtaaaccggatgtattttagcacctggcactcttccaacctgcgatatattttacgaaagatgcttttgggggcgcttaaatttatgtggccgtagtttt

SEQ ID NO: 86210 - DNA, 357 bp, Glycine max
tcagaatgcaacttcgattgtctcaatatattacgggattcaatcacacatccgagcaaaacgttattgtcgcttgaattagctcagaacatcagaattcaatttcgattgtctcgatatattacaggtctcaatcagacatccgaagaaaacgttattgtcgcttgaattagctctgagcttcataattcaatttcgagcgactccatagattactggactcaatcagaaatccaagcaaaacgttattgtcgcttgaattagcttagagcttcacaattcaatttcgatcgtctcgatatattacaggtctcaatcagacatccgagcaaaaatgtattgacggatgaatttgct

SEQ ID NO: 86211 - DNA, 155 bp, Glycine max
ataaattcccagtgagcctcattgtttgttacctgaccgatatcgaagggtgataatgataaattatcctgcccaaaaataacaaacaagaaaccctgttatggaaattatccggctacgcgggagccctgacaaaacattagcgcattacatcc

SEQ ID NO: 86212 - DNA, 368 bp, Glycine max
  unsure (1)..(368): unsure at all n locations
cctgatgcccaccttcaactgttgcttgttcccctctttgttttctgcaacaaagaaaatcaatattgaaacaattcaggctgaattgttatcgttattattactcgaaccataaggaanaacannnaaaccagtcantaaaaaggaactctttattcttttttgctttttttaaatacaatnnttactcaaatatnnaatttttaaatctacttaggtncggtgtttatatctaagaattggtgacaattaagaagtgtgagattgtgtacacacatatatggatggctgtcattgaacatttacagtaaatataatagaattatatagtcttcgctaccgcttggatctgcatgtgattgacacat

SEQ ID NO: 86213 - DNA, 367 bp, Glycine max
gaatggcatcaacatattcttattgatataaattctatcttcttcatattggtggctaggttgtaactattgcttccaccaacaatgttccatggagtaactctggccaacctgaatctctatattttgaattgattattcattggcattgaaactagctggggacattttcatgaattacatacacacattctccatattagaaattctttatttttcatattgatgtgaagggtgtaactcttggtcccaccaagaatcttccatggagtagagatgccaattattattgaaatgctttcctccacaaaaatcacaatttactaatggtgggtgaatgaccttaattgtatgctatcaacatgct

SEQ ID NO: 86214 - DNA, 300 bp, Glycine max
cagttaccatggtagttacttgaagcttgctcgacaggacccaagtgtggtacatttacttattttcagtatgattaattaaatttattttaaattttattttttgagaagtacttatatacccctcctcgtccttttaatgccgattttaccaaattgtcctattatctatgttcaaagccaagatacttattttttgtcatataccttatccattattttacatttttttaaatgataaaaggaagaatgctataagaactaaagtgcttgaaaagaactgcttgagggaacagcatt

SEQ ID NO: 86215 - DNA, 329 bp, Glycine max
ctaacagttccgaattatatgggccactaattttataatgcgttcgacagtgacctgatcatcccataaactttactctggggctgaacacacttcagcgatcgcctttgcttacgctaggactcatcggaggccccgactttcattaaatgtccatgcgaacctatccatccacatggactcttattgatgcaatgccttaaacactgtgaattttgcttcctattctgcgtactccggtgcgaaataatttactgatttttgaccatgggtcgaagactattttaacatcttttcgagctgccctataatatctagcatgctttgca

SEQ ID NO: 86216 - DNA, 331 bp, Glycine max
  unsure (1)..(331): unsure at all n locations
agaagagagcttcaatcctataaccacaacgggcggacaaaagtgggcagttaacttgaatgaccattattgtcaatgcggaaggtattctgtgcttcactatccattgttcacacattattgcagcttggtggtacgtgagcatgtactactaccaatatatagatgttgtttacacgaatgagcacatcnttaaagcatactccgcacagtggtggcctcttggaatgaagcgcaattccttcttttgatgatgcatggaacttatcctgagcaactcaattcatgcgaaagtcagcaataacaagataattcaaccctattcattgag

SEQ ID NO: 86217 - DNA, 334 bp, Glycine max
actacacacatgagcccacttaagggtaatgggtgagtttaccgcacttggggttagaatgaacgtgttaggatccttagaacatcaaatttgggtttattttggaatgttttgtaacatcccatttttctgtaagataaatttaaagggatttatttaacaataaatatagttttaggaaaataatgagatttctgtaattaaataaataaggagaaataattttattgattaaaataatggttttaaggtcgataaaataaatatatgttcttacaaaatcaaaaagatgtgttatttattcctttgataaggagtgaaatacagttcattt

SEQ ID NO: 86218 - DNA, 382 bp, Glycine max
actcacgcttagactgacaatcaagagttactattgactcattatacccgacggatactgaaaatatatatattatttctcataagattatttctaatataaatatcgaagatgtatgtgctttcctgcctggcattaaagtaattaaaaccatgtttacataattttttgaacgaaacaacttttttgttaaatagctacatcggtttttcatgaattcctaactgcagtttatatagaattacatttttatattgggtattatacaaattaacccccacttcttgttttatgcgaactcattttcgactcttttttttctctttgatagggaccaatgtaaaacaaggtggaatcatttaaggatcaaattatttatata

SEQ ID NO: 86219 - DNA, 364 bp, Glycine max
cgtattgcttcctccaaccggtcaaccttaatttattcaaattgaatgtcattaagaccacagtgctgaattatcgatactgctcttataattttgcatgtaacaatcaaatttgcgtttataaaactatatatgtccaccactgtgatcaatgaatccaggctaatggatactttaatccgattagtttttaattagtttgtgggttttcatcaaataatatgaaagttactttgagctatatgctgtagatttcacatagcaaatataactccacctttgggtttcaacttttgaagatagataaacgtaattgcaacaggaaataattactgcaactagaaatttgctgctgcgtatccaa

SEQ ID NO: 86220 - DNA, 377 bp, Glycine max
ttgagccacaatctctgactcaccataaacctttatccaggtgagaatgccactccttaccctcggaagcagaaaagaatggacgggaaatgtccaatcaaggaaaaagagaaggaatatttccaatgatagcaaaaaagaaatgaaggaaaattccccattcaaagagtgggagaaagcaaaaaaaaggagaagaaggaaaattctccattcacagagtgggagaaagcatatagaaaagaatggaaaattcccaatcaaagaatgggagaaagtaaaaatggatgattaataaggaaagaaagctcctgatcaaggatctaaagaaaccagaacaaatgtgcagataggtctttggaccatacaatatctgaaca

SEQ ID NO: 86221 - DNA, 271 bp, Glycine max
  unsure (1)..(271): unsure at all n locations
atgatgtttcgtgatgtttatatgctgaaattgctgatggaaatctgttaaagattaacggtagaacttacccaacgttagaacgtgagaatgtgacgttatgagtggaaaaagagtgagactttgagagttggaaggctaaatctgaattcttgggtaaatgganggtagagtgagttaatactagcttgaaatgtcatntacaacatgtgagaaaggttaggctgatctatagagaaaaactaatgaccaaagtgaacaaagagccatt

SEQ ID NO: 86222 - DNA, 376 bp, Glycine max
gtgccacccagctctcccaggcgagctatgttgctttctctatatagcaccgtcttctggaggaactttctggcaggaccaaatgggcctggttgctatttgcacccacatgtgtactaaatacactcctaccccttttttgctgattcttttttcgtaacgttacggaactttacgaatttcacaactatactcgttttctttccataatgttacggaaccttatggattacgtaattatccctttttttggcttacaaaatgttacggaacttcacgaattgtgcattagcacttccttttgacttacggcatgtcacaaaactttatggattgtgcatcaatgctttcttttgacttccggcatgtcatggaa

SEQ ID NO: 86223 - DNA, 224 bp, Glycine max
  unsure (1)..(224): unsure at all n locations
acctgcngctgcaacttttacgaagtagaagtctattatatgtgtatgttatgacaatattgccctcgtgcagaatcataacaaaacgtcttcacactgtgattactgcgcttgctttctttcttcttcaagctgagaatcactgcactatctttataacttctatcgtctgcaccgtgtctctttacgcttgcaatgtatctactttcgtttgctgctgttac

SEQ ID NO: 86224 - DNA, 394 bp, Glycine max
ggacactataaaactaagctatgcatctgaactcattggcatggatgggcttcttgaccttacgaattaagactatgaaggttttatgtatgtaagttaggtccttacctttgttcaaaatttgtagtgctagacttgtgatatcaacaccaatgatgctccaaaattggtggtaaaaaagagtggaggtgtcatttggactaagggattttgtggggagcatttgagaaatggtgtcttgaattttagtccctatgaattcagcattcaagatattgaggagattcagtgaaattgtgttttgaaataagcttgtaactttctctgttaacaaagtcttggagggggtaaacaagtcagaaaattaattcataagaacttcacctatattctc

SEQ ID NO: 86225 - DNA, 371 bp, Glycine max
cggcctagagatagaaatcatcttatctagctttccatttgtgcaaggatagaactacacattgagttgcaacataatatgtctcaatgtgagcaccctctatgtgaggctttctctgagtacacatattctaagggaggttagcacaataatcaaggaagttattgcattaatctatatgtttaagataggatttactagttttggcgaaatcatttttaccatttttgcctatgtctatgtgaaggatatatttcacgttaggcgaaatcatgatttagtaattgaactattgtccaggttgtctcctaaaggaatacaggaaggatttcatatagttatttaactaagaactaggttttaatattttt

SEQ ID NO: 86226 - DNA, 350 bp, Glycine max
  unsure (1)..(350): unsure at all n locations
tntacgatatgtcatgctatgagagcctaatatttgtgtaagatctcatatcggttagatatatgcccaaaatactccttatgtggactttggaaatccttccgtttcgaactaactttgctattcaacacttataccagtttaaattccagcgacatggacgtctttgcaataaaaatctaaaatactaatgctgtagaactgtttgatccatcattcagtagatgcaaaacgaaaatttatgccacatatttgtctgagaataccagattttaacttcatggatgaaaaaggaatgacgtggttttgcagaaaaaaacttaaaaaccatatggaatttcatgtgaatg

SEQ ID NO: 86227 - DNA, 432 bp, Glycine max
  unsure (1)..(432): unsure at all n locations
aaatctcctggaaagatattttaattcctgccatcaagggtgaacactacgagaaacataaatagttaactgattaaaattatcactctttctctcttgtggatcactcttcctttttctattcctctgtggngcctcactactgnatctctctggttctctcttttctctccttctgaattggcatcacacacttctctgagggatagaaggttatgaataattttctggtcatggtgttggaaagaaatcttgttggtgaagccatcatgcattgctttggtgtcctcttcaatgttagccctcactagtgccatctccatcttcttgtcctcaacaatcaaactttcctgngataacctctgtagtttctatcgcatggttctactgtagctagatggaacataactctntcgcataacccttctcatc

SEQ ID NO: 86228 - DNA, 404 bp, Glycine max
cgacactatataaactcaagcttattgtgtgaagaaatgcatatgagatgtgacaatgtcatataaaattatgtttgtgagtgaatcagttaatcattataaggaggattaaatagtcacacacaaattcactatgtctttctttgcacaaataaaaacttgcttatgatattatattttcaagttattgtatggaaattaaaattttaattaggagctatgcttttcatcttaactaatcagataaaatagataatccaacaaaaaaatctctaagttaaacaaatgttatgttgctagcttttgtagtataaaccacaactcagtatcctgatattctgaacttctacaggttctacttactattcattgctagcttttgtagtataaaccacaactcatta

SEQ ID NO: 86229 - DNA, 342 bp, Glycine max
  unsure (1)..(342): unsure at all n locations
catgaaaaatgggcaatgaagaggtgagaaagaaggagaaacccatgctgtgactgccattcctatacggccaagttttccaccaaccccacaatggtcgtattagccaataacaaaccctctccttaccaccacccagttatccacaaaggccattccttatcaaccacaaagcctgtctaccgcactttctatgacgaagaccacctttagcacaaaccaataaacaccaacaaanaggaattttgcagcataaagcctgtagggttcaccccaaattccgttgtcatatgctaaacttgatcccatatccactcgataattcaatggtagccataaccc

SEQ ID NO: 86230 - DNA, 390 bp, Glycine max
tactcaaccttcctcttattagtgcacagctccttcaagaatttggtatatctaggaatttgctttattgcatacaccaaaggtatgtttacctctacttatctgaatgtttccaatatctctttctttgcctcttccatttttttgttggaaactgctcttggagggaatggaagaagagggatgtgctgcttctgcaaatcataattaccagtggaagaagattcacctgcatagaaattgttaagtaaaaatttgtcatcacctttttctggagtagagtgaagtttggcatattcatttgcagaagaagaatgtgctacgggttgaggtccttgacactgctttccctacctcaatgaaatggcactgacatttttgggattttgg

SEQ ID NO: 86231 - DNA, 162 bp, Glycine max
gaggggggagcatggaaattaacggatgaaaaaaaggagagaagtggaactttgagttgtgtctcacaagactctcattcatcaaagtacaacaagtgttacacatgtttctatttatagactaggtagctttcttgagaagctttcttgagaaaactttct

SEQ ID NO: 86232 - DNA, 373 bp, Glycine max
cgctcgagaagtttctatggaggctggatctttgagcttctataaggtccttcaatggtgattttttaaccatggagttgcagcggaagataaaggagaagacgtgagaggaggcgccatccactagagaataagccatggaaggagaagcttcaccaccaagagaatgccttggataagaagcttatagaggaagcctcaatggaggaagagaatgagagagagaagaagggggcacggaaattggaggagaacatggagagaaggtgaactttgaagtgtgtctcacaagtctctcattcatcaaagttatgacaagtgttacacatgtttctatttatagcttaacacgtatgaagcttccttgagaagc

SEQ ID NO: 86233 - DNA, 264 bp, Glycine max
  unsure (1)..(264): unsure at all n locations
acatagtataatcaactgccttctcgatctgttccacagggcacggtgaataatcacagcatgatgcattatctgagacttgcatctgttaatgttaagcgggacaactacgacagccaaaactcctagtatagccacataaacccgtttcaacgtntcagcgtggaaccctgcaatgagtcagctattactattccaattatgccataccccagaagatggtgacatatgttccagcgcttgcaatatcccgcttctttatgt

SEQ ID NO: 86234 - DNA, 378 bp, Glycine max
attatactaaccccggctggacttcgatagatccagggtttttttatgtctataccacaataaatgcgcgcataatgatgtaccgttgtttttacacgctgacttcaagtacgttctgtttgttgatcaacaaatttagtatttgtccagaaaatttataggcaggatccaatcgcagggcatgtctagatctgcatcatttttcttccaaaaccacctatttctcccagtttaaccaaaaaaaaaaacattagtggttcgctgccaattattacatcaattactcatcttttaggctctggatcctagtagtgacccacttgcagtagatcataccatatttcgatgctttaaccatttacttaatgtgtgtttgga

SEQ ID NO: 86235 - DNA, 305 bp, Glycine max
ggtctagaggaatcttaatttgtctgattggagcaaggatattctataggaaagtgacattgtgtatggttcatactaagtaccggttgtgtcgggttggggaagggataatgtgtaacatcgcttgatagtcgactttttgatgaaagtcacaataagccgtgacatctccctctacatctttatttatcagaacactccactagtcagaaccctctactggtttcccgttctgaaacctacaaaattactttgcttgtctttatgattaatgactgaccccacatacccacacgacacttttc

SEQ ID NO: 86236 - DNA, 375 bp, Glycine max
tggaaacaaacaagtgcagcacattagatagtttttattcgcttctgaaggcggctttaatcttgccggtagcaactgcaagtgtgaaatgtgttttttcagctatgaagtttgtgaatagttagctatgttacaaaatgggtgatcaatggttaaatgatcgtcttgtaacttttatataaagagatgttcttggaacaatcaacaatgatgttattttagctcattttcaaaaaatggataatagacgattttcattgtaaatacatttccttaaacaacattatttcttatttttaatatattttagtctataattttttttatattttaaccacactgatatttattgtctaaatccgtccctgcatataa

SEQ ID NO: 86237 - DNA, 293 bp, Glycine max
tttttctcatgatctctccatgctaggataatgttttacatgatctttatgttccaccgataaacttgcttaaagctaatttgtctctatggtcaattcttgctcttttttgaccataattggtgagttacgtccttcgagtatgcttgtttttttgtgctgaacctacccataaagtctacaaatattaagggaagaaacccaaaactaagcgactgtcactatgactttgcaacaagcatgtctatctgaacttgccataaattctatttggctgaatattgctgaccttg

SEQ ID NO: 86238 - DNA, 330 bp, Glycine max
aagaaaaaaggcctaaatcatctcaataaatgcatgtgcaacacggaatgacaagagaagcaaggaaaaacctatagtcatctatcacgagggtgaaatctctcataaaagaacatgaatggaataatgcaatccatccacaaaatcccataaaactcacaaggaattatttcatcacacatgatccacctcaaaattttcaagcttatttatcacttctacaattgcaacaatgttttcacatcaagcatgaaacctcttaactaaaagtgatacatctgtcacaatttatacaagctacaaatcctatgaaaaatattagaaagtgcc

SEQ ID NO: 86239 - DNA, 359 bp, Glycine max
gttcttagcacctgttggagagcaacaattaacacgacggacttgccgatacccaaaaggtggattaattctattgaattattatgtcttacgtggaaacctaagtacaatgcttgtatagttttatccacaagagggtctaagtattgttatgttgagaaaatattatgaattgtattccgtaagaatggatcatgcattcatgcataaactcacaattattgttgttgtgagcatgcgcgttagtctatttactagtgtgggaaggtcagctgagcgatttcacgtgtgatcaatgtcattgccaacattatgtcataagagctactaccttgatatgcttatcctaacaatgtcac

SEQ ID NO: 86240 - DNA, 373 bp, Glycine max
tgaagcatgtatatgcataatgctcattatcttttctgtcaagtagaggttgaatatgaaattcaatcgtttttctaaaaaaaaaactatataaaagtggaataacttacatgattggtgagcttaaccatccttcatatttatcttctagcatccgaggaagaccccaatgatatagtgttacaaaagataggattcctgactggaaagaagagctaaaattttaatgctattgtttttttgctgtattttaacatcaaattcccgaatagattcatgagtaacctttttaaagtaaagaatcaatgaggctgctgtgatattgtattccctctttatggggttgcccagatccatctggtcacaaattcag

SEQ ID NO: 86241 - DNA, 374 bp, Glycine max
gcatgagaacaaggtctcaagaccgcggtattcaatcatttataatgtggcgtgcaacgtggtgttacatattcaagaataccatgaatcgattaagaaaacatactgttgattaagcacacaacagaatatagttatgccagagcataatttttcaaacctttaaagaaatataaaaatattaatgatattgtcactaattacaataataatatagtgatgcaagaaatacttatttcttttaagtggatcacataaagcctcttaaaaattatgagcgagccacttagttatcaagtcgtttctcatacacattctaagacaatgtatcatatatattttcaaatccaaataagaaaatatcatatcacata

SEQ ID NO: 86242 - DNA, 431 bp, Glycine max
  unsure (1)..(431): unsure at all n locations
cagcttccaagcaatgaaacatgacgaatcttccaatcttgtganacattaatactgagcaaacaaaagagttttcatttcttttctccatgtacattcttctacataaataaggcctatacactgttaggctattgcatcggaaaatataaatggagagaagaagagagataaagagaagcattaaaagatatcttcctttgctactacaaccataggtccaccatacaatgagagtgtacaagaaggcaaaatgttatttacttcacatnttctctagaagctaggtaaccaattattcaatacagagtccaaacaccacaaggggaagtctttttcatccttggttccatctaaatcagacatgtttcttctccacagacctccatgagttccctcggtatatgactaacttagaactntaactaatg

SEQ ID NO: 86243 - DNA, 304 bp, Glycine max
cttatttagaactagcacaagtcttcatctattgcctttaggtgcacacaccttcgttaggatctctaattgactgctaagcccctgctgcgacttctttacaaactctgaactagataccccttctttatgtataaaagaagtgttaagtacgacgggaattatgtgtaacggtgttagaggattgaactcatagacaactttgaaaggggattgctaggtggttttatgaaccccccctgttgttggcaaattctacatgaggaagatactgatcccaagacttatggctgccttttataaa

SEQ ID NO: 86244 - DNA, 338 bp, Glycine max
attattttgtttattgaataatattatctttgatgagcacacatatcatttggtgtttaacatattttcttaagatatattgtgcttgatttacttattttttgtgtgtgtaaactatttaaacaacacgtacctagtagtaacaacaagagtctattctattgattcacaaaacatacatcaacaactaaacaaacactgataatacaacttttcttaaacaaataaaaaacaatgatgattcttataaataaaacatgactgcacagattatcttacatcaaagcatgatcctattacagatcttgtttgcgtataggtacgattcatctaagatg

SEQ ID NO: 86245 - DNA, 396 bp, Glycine max
gacattctataatacccacgcttgagaacgcacaccctacaattattcactcacatatgcagagctatgtgttctgaacatagccaattgctcaactccactccagcaacaaaagattgctcctttaggtaattatatattataacatccctaagttatagtagctattgctctcagcctttatcattaaaatattctcctcaatggcaaacctcttaatcgtgcattgatgttgcttttatttatcttgcatctggatagcatgagtattgtctttctcatatgatgcatgtatgattattctgatatcaagataacgagtattgtaattgctgatatatgtttatttcctactactgcacatggaatgactgtatataatttaaaactaggtat

SEQ ID NO: 86246 - DNA, 387 bp, Glycine max
  unsure (1)..(387): unsure at all n locations
gataaattattctttccttaatagtacttcccctcatttccctaaacgaaaatctttttgtatttaaaataaagaatagatttgacactttaccaccagctaatgaaggtagacatcaagttcctagacatagaattatgtccatggaattaatctgttcattngaggaaaaatgggtcaccattgaccatagtgtttaaatcatgaaacttgatacaaaaatgcttgatagattattgatttcatttttaaaatttcattaaaggctcactacgtcacttaccattttcataattaataataattaggaatccagattgaaatgttaattataggttttggtattatggaggaaaggagaaatgagaccaatactttgagttatat

SEQ ID NO: 86247 - DNA, 367 bp, Glycine max
tttgctgctatacagaacatagcatcccacggtgtgttggaaaaaacaagaaggatgttgctatttttagtcttgtgttagacgatattcatcatcctccattgtaacaattaatcattggtatgaggagtggtacttttggtaattcgtgaaagccaaagttcaccactttgtttctagtcttttacttcattagttgattacttgatctttgcagcatctgaaaaatgctacattctgttgctgaaaggttgcaaaatgctatagtgtggtattcttgactattaaatcagatcttcttagatagaattgaacaccaattatcctggttcatgtcatgttcccttaaaatattgctgttgaagtt

SEQ ID NO: 86248 - DNA, 349 bp, Glycine max
  unsure (1)..(349): unsure at all n locations
ctacatgcttacagtaacaaaccagccagtgtggtggacaccaaaaaggcccatctgtatgtcatctaatcttggcgtttgatcaactccgagtaagggatatataagactactctgtgagttctggcccggataacataaccaaccatcttttgtataactaactctagatccattcactctggcatctcgaatgtgtgtgtcttacgctgcacacggtcatagaatcattacaggaccgtatttcggaaatactaagccctgtgantgttactacacgtcatactgcaacaaatgcctctctgaacagcaaagccggtgtttcccagataattggaaagatcattta

SEQ ID NO: 86249 - DNA, 360 bp, Glycine max
tgtgtgaccgctaccctttctttcctcttgagacaagccgaaagagaccatcttttttttgtgctttcaagtgagtgcctatttggacaactgttattacacgatctgtatctccttctctagttgcttacacaacccgtatgctctatttattaggcagggtggtccaaaagactcattttttttgcctctacctgctatgcctttccctgggggcgatggactaagactaggggtcataatgatctatctaccaaagcacatcatattgcatcacattcgcaaggaagcttgtaaataattggttttccccctgttggagttcaatcacttattaaggttctccttcgttataaattt

SEQ ID NO: 86250 - DNA, 352 bp, Glycine max
tggctatattctatgattgaacagattaagtctctccatgacaaccattcatgggaattgtctaataaaccccctggttctagagtggtcacctgctaatggatcttcaccaacatagaccgactcctaagagttgaactatatacatttaaagcaagacttgttgctcgaggattcattcaaaaggagggaattgacttcaatgaagtgttctctcctgtagtgaaacacaggtcaatcacaatacttatggctatggtagtacaatctgatcttgtgttacaacaaatggatgtgaagacaacatttttgtatggaaaacttgatgaggtgatattgatgaaaaaaccca

SEQ ID NO: 86251 - DNA, 352 bp, Glycine max
tttttattacaaacgctggccgataatgttttttaattacggaagaggaaagtttttggttttggtgttgcctaaaaaatatacaacgtatgaccgttaggtgtttccgtgcgagctcaaccgagggttcgttacgacgtcggcatggagagatgaatataataaacaatggccggtgtctgtcgttattcacggaaattgatcgaacaaaatgatagcggacgtcggcatggagagatgaccgatcgacgtctaaaaatgaagcatcaccggatcactcccgatcaaacaatctctaatcaacatcattcaaatatcatcagggattgaataaaaactcataaccacatcg

SEQ ID NO: 86252 - DNA, 369 bp, Glycine max
tggtcttcgccagtgataggatcaatgtgtttcctattagaggcaaatctgatcatcctactaggacgactgagaaaactgtggcacataaagagggtgaggatgacggagaaacccatgctgtgactgccattcctgtacggccaaatttcccaccaacccaacaatatctttactcagccgataacaaactttttccttacccaccacccagttatccacaaaggccatccctaaatctaccacaaagtctgtctaccgcacttgcaatgacgaacaccacctttagcacaaaccaaaaacaccaaccaagaagtgaattttgcagcgagaaagcctgtagaattcaccccaattccagtgtcctat

SEQ ID NO: 86253 - DNA, 282 bp, Glycine max
  unsure (1)..(282): unsure at all n locations
gcgctcagctaaagtgaaaagaattgaaccctttttttttttccaaaggcgacgaacagaaaaaaaagatatagctttacaaacttgaggagaacctcagacactgtatatcttgagaaaaaaaagaatcattcttactcctgaaaactggccactatgaaagacgtcaaagtgattttggaaataagaataagctggccaataactggtagctaagttataacaatgaacatatgacttgagcctgggactccaagctgcttatanattgcttgatgtacc

SEQ ID NO: 86254 - DNA, 351 bp, Glycine max
gaatatactttttgataagcaacagggaagttaacaaattatagaaagttgcactttaggataactagttgttgtagctgtaatttgaaagtgtgggttaagaacatgtgaaaccattggtatgtgtgtagaataaaaaaataatttacaacgcactttaatctacttttacatcaacaaaattaaagttaaaataatgctacccaactaacataatggataacccgataaccgctgctatgcttctcctcacgttcccttgccaaccacctactgtgtatacgattaccatgttaatgtcattttaacatcgaaaaatatcctgacattataacacatgtttaaataact

SEQ ID NO: 86255 - DNA, 342 bp, Glycine max
  unsure (1)..(342): unsure at all n locations
gctgactatagccgagaagnctatggatcttctcgtgggcggagtaagtgtccgccatcgctttggccttggctaacaaacggagaagttcttgacctccgcttcaaggaaagagaataatcgtccatccacattgttgcctcttgatgtaacgagtcgatcaccaatcctttagcctcctttatcagcgacacttgggcatactcgtccgccaatgtatgctccggggtcggggctaaatatatctcttcttggtatttgctgacatcagctaacatagtggtctctgtttcgcattaccggtgagacatgtttcttttggactctgagcaaaccttcaac

SEQ ID NO: 86256 - DNA, 375 bp, Glycine max
gagcgaggaacgtctgcgtctggattggaggaacttatcatgggttgctcttcaagcggaagcaaaaaaggtaaaaaaagtgatgaaattgctgccaaattcaaaaatattcttaaatataatatgtgtagaatatggtagaacaatctagaactataatcgtggatgaatatggtagaacaatctacaactatgagtctatgtgtaacatagaagaatctataactatcatgatactaatctatcatgaaactctataaagacctaaagttatgtacaaacattcaccaccattgagaggctagtaacttgagcctataaataggcaattggtatgttgtaattgatcaatctcacgaaatcaatgacatatcc

SEQ ID NO: 86257 - DNA, 374 bp, Glycine max
  unsure (1)..(374): unsure at all n locations
ngccacccagctcgcccagacgagcatggttacttcctccagaagcaacagccttatggaggaatcttctggagggcccaagtgggcctggttgctatttgcacccccatttttactaaaggcaccccttgcctttttatttgtgattcttgtttagtaaagttacggaaacttactaatgtcaacacgatacttgttttctttccgtaatgttacggaaccttgcggattacataatcataccctttttgacttatggaatgttacggaacctaactaattgtgcaacgatgctttcatttgattttcggtgtattacggaaccttacagattgtgcatcaatattttcttttgctatctggcatgatccgaa

SEQ ID NO: 86258 - DNA, 323 bp, Glycine max
ttgtgcgctataactgagtacatagtgtaactatgcggatctttatttaaggtttcttttttaattgattaccttgttatgttaatcaatcacagtgtatgtttgcgtggattttatgttataaagattttctattgtaatcaattacaacctcgtattaattgattgcatgactcgttttatggttttttttggtgataatgttctattttaatcgattaatttacattttaattctatttcgatggcctcagggggagttttcctgtcaaatttaatcgatcacactatgttttaatcgaacacttatattatattttggt

SEQ ID NO: 86259 - DNA, 376 bp, Glycine max
tgtgtatgcacacatctaccaacaccacttgttattaattgtggacaaaaattaagtgcatgatgctacaaaagtttccttaacactaagtgcaccttgtgagacaataacagtaaccgtagccttaatatgcagtggcaaattatggggagtaataagccgagatagaggggagagaatgaggatggaatatcaacatttttctttactcaacaacatttaaaagggagggattttcctattcacaagaaacaaaacccccaaataaatacgtggatggaaaaaaaaagagtgaacaaggagattgcataaaacgagcgaataaagtgtgaattagaacaacaaataaagaatggctgaagaaatgtgatgttac

SEQ ID NO: 86260 - DNA, 429 bp, Glycine max
  unsure (1)..(429): unsure at all n locations
ctcactgaagaccagcctaacttttttttttaaatgcngaatcggtcgtgcgctagcgcgagcacacctatctccgatcacaaagcacacctaaccgcacatgcctaaccgcctcaagccaacccatttccctataatagaatccaagcctggggaatgtacacctgcctaaagcacttctttcagcattcaagcctgagctctcccttttctctctatatactttgctttgattatccattctttctttcacccgagtagtaaagcccctaatggccatgagtggttaaatccctatctacgggcgtgtaggcctaaataaccaatgatgtatggtcgtcttcaagagtatctatgcaaagagaatcattccaaggttattggtcaatctttccttttatttgcattaagctaaaatctgatggttta

SEQ ID NO: 86261 - DNA, 375 bp, Glycine max
ttgacttgagtcatcagagagaagatacaatatgtttaccactgtctatgagttctcatcacacatctgatcatcgatcatcaatcatctttgaataaactatctttcaatctttacatcatctctcaacatctttcagtcaatttctcaatatctttctacaaaattctatgactcatttctcttcatctatctgaaagtccttgctcaacactatctcttacaagaaaagttatttgatcaaaaacttgtgctattcatatctttcttgctcttctccctttgccaagggaacgaatgactaaccgcctgaattcttttatgtatctcttctaccttacaaaagattcaaatgactaaccacctgagaattct

SEQ ID NO: 86262 - DNA, 380 bp, Glycine max
  unsure (1)..(380): unsure at all n locations
ataaaaccccgctttgctgcgggtgagggtctgtctttttttggcatgatcactggctgacatgtggtcaattagctcaattgcttattgcagggtcttcaataatatctttccccctacacaagcatctaacacttgcttggtttgaggtctcactccatccataaacatattcagttgaattggctcggaaaacccatgggtgggagttctatctaataaacctctgaacctctccaatgcttaactcagaaattcatcagggaactgatgaaatgaagaaatgtgggctatcccttgcgcagacttggactctgtgaagtatatttttaggaactttcttacgacttcttcctanggtttcaaactattacccttga

SEQ ID NO: 86263 - DNA, 384 bp, Glycine max
agagagaggggggagcacgcaattgaatgaattaaagagggagagaagtggaactttgaagtatgtctcacaagactctcattcatcataattacaacaagtgttacacatgcttctatttatagactaagtagcttccttgagaaactttcttgagaaaacttccttgagaagcttctttgagaaaacttccttgagaagctagagcttagctacacacacccctctaataactaagctcacctccttgagaagcttcattgagaagattcctaaagaagttagagcttagctacacacatcctctataatagctaagctcacccgcatgccaaaatacatgagaatataagagaagtccctatttcaaagactatctcaaat

SEQ ID NO: 86264 - DNA, 367 bp, Glycine max
cgaagtgagaaagtgtggaagagttactcttcctacttttattcgacgaccacaaagaggtacctggagatatgtcgcgggggtcaggagaccttggagacatcaagcggggtgctatttcccaaaaccaagcttgaccaatcccgacccaacccggtcatagtccgtcagtgaatacctgtgatgtacctaaacaggcgagctcctggcagtcaaacgataaaagaacaaagaccacaaagcatggaggcttgtgtggtggctggccacctatggatcttgagtgatatttggaatatggcctctggtcatcgattaccaaaggtgtgtaaattgattacactgcttaacaatgatgacatgaagt

SEQ ID NO: 86265 - DNA, 340 bp, Glycine max
agaatgggtaaagtatgtatacatgaatttgatgaatgtcaaagaagaatcaagcaacgctcattttgcttaagattaaatacaagattgtttcaacaaacatagcctttgatttgctcaaaatgaaagggttcaagtcatccaaggtagatgtaatcgattaccaatacatgtaatcgattaccaaggcacatgtaatcgattaccaatacatgtaattgattaccaatggtttgaaagtgtgtaatcgattacacatcatatgtaatcgattaccagagactctgaacgttggaaattcaaatttaaatgaagaatcacaactggttcaaaaataact

SEQ ID NO: 86266 - DNA, 370 bp, Glycine max
tatcaaatatgcatcaattctgccgtaccaagaccttgtggcctgctttaagccatacaaggtctatttcagtcgatagactatctcctcctgtccatgaactacaaatacttcaggctgctctacaaaaatttcttcttccaagtgcccattcaaaaaggccgatttaacatccatgtgatgtataatccaacctttttgtgcagcaggagctaacaacagccttatggcatccaacctagcaaccgaagaaaaagtttctgagaagtctaccccgaacatctacacatatcccttcacgacaagcctcgccttatgtttgtttatagaaccatcagcattaagcttggttctataagcccatttcact

SEQ ID NO: 86267 - DNA, 418 bp, Glycine max
ttcggatatctttggtgtcaccccgatgcagtgaaactatccacacatggtatctgatggttttgatatacaacacctacaaaacaaacccgtacaaacttccactggttgagtttgttggagtgacaccgactgggatgacattctctgtccggtttgcatatgtggagtgtgaacacgttaataatttgtgcttggctttacaacgctttcgatgccctttttattaaagcgtacatgccctctctagagatattgttcctgatagagatcaagcattgatgaatgcagtgaacgctgtattctctgattggtacaaattttctgagcagctttcacatagacaagaatgtgaaggccgaaatcactaatcgggcaacaaaatgcctgggatatgtctggactgttggaatgttga

SEQ ID NO: 86268 - DNA, 375 bp, Glycine max
cggattgactcagtctaactagggatcgaggtatatttatttacgctacaacataagacacagaatcataattgattatagaaacatctttatatacatcagctggtttgttagaaagacccaacacctttacctactgctatcaatcttactttcttgcatttttactgtttctttttttagcctagacttagtcaattctgttctaaatcatcaatgatcaatgtttctttaacaatgccttatttatgaatttaactctgtctaatactattgccctgagttcgatactcagattcatccgtgttaattttaaatacttgacgacccggtacgcttttcggcaaaccggatttcccttgaacatatttgtat

SEQ ID NO: 86269 - DNA, 353 bp, Glycine max
tagctaactgttgagggtcaagttttttagtgtgtctcctcacctattgtggtggggaatttcacatggcgacctttattcaaatcaaacttctaaataatgaaatatgttggcatcaaaaagaagcagttcactatctgaggatgaactaaactcacgtgtgtaattggtgcactaatctagaacgggtttataccctgcaaagcaaaaaacattgcgaaacgatctacctgtgttcataaaagcagacacttctttcgttatccattatcccccagttatcccatgcaacatgccttatacattgatccatgtaagtgtatgcatagaccacccttgcaaaagggccccac

SEQ ID NO: 86270 - DNA, 313 bp, Glycine max
  unsure (1)..(313): unsure at all n locations
aaaacaaaaagacccacctttctttttatcaagcccaattttctaacaatcaacaacatggcaatcataggtgttaaccagagctaaatggccctttcttttccgatggtctaaaacctcgcagaagagaaccactcacttgtcattctgcttgctctattacagaaaacaacccctcatctgacctaagaatcctttttttctgtaatgtccctttttttgaaagcataatgctgtcanaaaccttgctataaaacctttccaaaacatttatgagcctatgtctgggattccatttaaatataaccaccca

SEQ ID NO: 86271 - DNA, 365 bp, Glycine max
gcagctgaaagaacctgcttctttggagtcatgggactcccagatggtaccctataacgataaaacggcctttctattatgatgatgagcagggaaaaagccatgaccactgcgaagataatatcagcagctcccccgattatgtggtcttgaatgtaaacaatgagggtcactccaacaataagtccactgcatagagcacaattccaccaattgaaaaacgacattttttgcttcctttcttcatcatggtcctcatcaaattggtcagctccaaagctctccaaggagggtttgcgccctccagttccaatagatatcatgtaaatggcacggaagaaaaccacttcatgtattctccttgg

SEQ ID NO: 86272 - DNA, 388 bp, Glycine max
tgagaacaaatcaagccgcaatcgagcttcttctttgatgaaatggttgtaaacttctaccatgtttgttcaaatgctaaacaggattatgagctatgcttgaaaataacagtgcaagatatgtcctcttgattctctgtccctgaatacaccacacattttatgaaaatatcagtgcaagatatgcctgtggcataaagtccaatatcctaatctgatccaatttccagtctagttcaatctggtttaaatcactttaatggattagacttttaaacccatcccatcttatttaggttaagatccaaattattatctgatcatggatcttagtgacatttgaatccatatctaagcggtgcctgtacttactctaacaactgaatga

SEQ ID NO: 86273 - DNA, 390 bp, Glycine max
acactattatactcacctactctttttgaaatgaactcaattcctaattttgatgtgaagaatgtttgaggccacctgacagactgctaccaaaaatcatccatagtcttcatatatcataagattctcacaacatgaagactgaaatgttattgtgtctaaaggtacaactgatgtcactaatgattggcggcatttgtataacatgtttataatttgattttgcttcatcttaaaccgaattgttgaatttagagtttgaatatcttcattatgtagaagtagaaataaatgaactatagggatatggaacgctagcgctgtgttatttgcaattggagactatggtttatggttgaggctccatctaccttataagatgttgattgt

SEQ ID NO: 86274 - DNA, 232 bp, Glycine max
  unsure (1)..(232): unsure at all n locations
ttccttaacccttccactatcttaatatattttaaaaaaacctaatgtgatttcacgaccatgccatcaacgtaggtgatgcaatcctaccccccaactccncaagggtattagatagaagactcccaaaagtttggctacagatgcacgagaaggccctacggttcttatgagccttaaggtaaattttgggcccatgggctaagtgtgagcgcgcgtatctttgtacata

SEQ ID NO: 86275 - DNA, 378 bp, Glycine max
cttcttatccaaggctcatctttgtggtgaagctccttcttccatggcttattccctagaggatggcgcctcctctcacctgttctcctttgtcttccgctgcatctccatggtggaaaatcaccattaaaggacctcattgaagctcaaagatccagcctccataaaagctccataagcaagcttgcatcaagtggtaatcagagcacaagagcttcaagtaggtgctccttaaacctccattaatctttttgctttacttttcttccattgttatttcttcatttttctccactatctcctcacatgtattgtgctaaatgttgttaacatgattctttaaagattccactgattaaacttgctatagaagctata

SEQ ID NO: 86276 - DNA, 372 bp, Glycine max
tccatcaagtggctatcatagcacaagatctttttgtggtgctccttaaacctccattaattgtttattgctataccttctcttccattggtgattcttcatttctctccatgtatctcctcacatgtcttgtgctaaatttttttaacatgattctttagagtttccaccgattaaacttgctatataagctagatttgattttctatggctcaaatttcctgttcttgttcttgaaccatgaattgtgttgagtttacgttcctttgagtttcgtcttgatattttttgtggctgacacctaaaccataaaattcttactaaaatattaaagttcaataaaacctcagaaatctagagtgacttgttcac

SEQ ID NO: 86277 - DNA, 295 bp, Glycine max
aaactaaatccttaattgagggcgtacgtgaatacccatatgaaatacttaacaagagtggtagtctacttaaggtcatttcagatactccccacgcccccgaaaatactttcagaatggtaacaagaagtacctccaaattgattaatgttattaatgaagatagtgaccaaaactcatataacacaactgatataggatcagtgtcagataaaaatataaaatcaattaattccaaacactggaaaacactctccaaatatattatcaacgtccaactggccctgacctacta

SEQ ID NO: 86278 - DNA, 369 bp, Glycine max
tctgaactgacgaactgtggaagggtgatactttcttttttattcgctgaccacagagtggtacctggagatatgtcgcgggggtcagtaaaccttgtggacgtcacgcggggtgctattgcccaaagccaagcttgaccaatcccgacccaacccaggcatagtccgtcagtgagaacctgtgatgtaactaaacaggcgagctcctagcagtcaacagataaaataacaaataccacaaagctcggaggcttgtgtggtggctggccagctgtgaactttgagtgttacatgggatatggcctctggtaatcgattaccaagggtgagtattcgattacaaggcttaaaagtgaagacaggaaacta

SEQ ID NO: 86279 - DNA, 344 bp, Glycine max
tctctgtgagagtgctcttccctatacaagctgacaacctcattaggtctctatatggaagagttccaccatgtctcttacttccatatttaaaccacttaagaacctaccaatgcttgttctttccttccccctatgactagctctcaaaaagagtaagtccatttgctgtctatattcttccacactcatactcctttatctaagcctttggagccttgccataagctccctttcatagtaagagagaatgtgccctcttctaagggcactctcaagattattccatactatattggatgatcccatgaatccttctttccgtaacagggatggacccatat

SEQ ID NO: 86280 - DNA, 375 bp, Glycine max
gttgactcctttttccctttgctaattccataggcttgcaacataacattctttttatatcatctggtcagctagaacaacattgatcttttccttgttgcttggaaacttcatcgttagacaaggtgttgagataatggcacctatctcattaagcaaaaggtgtcaaatgagtatgttgtatgacgtgtgtgcatctactacgagatacttgatcatgatggacttcgaccctccgaaagtagtcaacatatggacatactctattgtgtcaattgtctctcctacaaaacctatgagttattctagaatggctatattaggccctctgatatgcccaactgtttgaaagtctaccaatatatgacatcaatc

SEQ ID NO: 86281 - DNA, 296 bp, Glycine max
acctctgtgggaagcggtgcaaagccttcatgatttttctaaacctttgatcaacatgatgaaagcagctgggtgggaccttgatgctgctgccaactcaatcaaacctgatgttgtttacgcaaagagagctcataagaaaatatgcatttgagtcttacatatgccaaagaatggtcagtggctttgagcaggaaaacttctctgtcaaattagacaatactactgcgactatagagagcttcttgcaccagattctcgctttaagagagatggatcccttggatatgcctggg

SEQ ID NO: 86282 - DNA, 368 bp, Glycine max
ttgcgccggctgctagcactactaataccttttttactatcgcatggagtatctggttagacttggaatgaggttaaactttgttgccaccaaaccccaaaccctcaaccatgtgagtatttcttgagcaataatcctgcatatcaatacgaacccctcgggcaagaatctgatttcctcaaaccttcattgcaacttgctcaggagagagcactcaaaggccatgaaaacactctctcacttggctctaagtgccgaaacccacgtgaaagagttgcttgggctgaatgagttgagctttatgagcaaactattcgcacactaaaccaaaccctatagcctaacacctagctgctccagatgatgcc

SEQ ID NO: 86283 - DNA, 351 bp, Glycine max
ctgcgtcggctgctagcacgtattattcctgttttactatccgatggggtatgtggttatactgggaatgaggttaaactttggtgccatctaaccccaaactctcagccatgtgagtatttttagagcagtaatcctgcatatcaatacgaacccctcgggcaagaatctgatttcctcaaactatcattgcgacttgctcaggagagagcactcaaaggccatgaaaacactctctcacttggctctaagtgccgaaacccacgtgaaagagttgcttgggctgaatgtgttgagctttatgagcaaactattcgcacactcaaccaaaccctaaagcctaacacctag

SEQ ID NO: 86284 - DNA, 354 bp, Glycine max
ggaacttataatctcagctctgcgtggagcttctcaacattttttcattgcaggtgccacaagaaagcttctcaaggaagctaccctacctataaatagaatcatgcgttacactgtgtgtcactttgatgaattgacaatttgtgagacacaaatcaaaggacaacttgtcttactttttcttccctaattttcaggctcccccctctctctctctccccctctgtcttatcctacacttgaagcattctctccaagctttttatccaaggctcatcatggtggtgaagctctttcttccatggcttaaaccctaggggatggcgcctcctggcaactcttatccttgtcttt

SEQ ID NO: 86285 - DNA, 386 bp, Glycine max
actcaactatgctgcaatattacatagacctactgattcttagcttcggaatcaaacacagccgagcgattatgacctttccagcaacagattcaaccctggatggtggaatcaccctaacctcagatggtccagcccttagcaactacaacaacagcctgctccttccttccaaaatgctgctggcccatgtagaccatacattactccaccaatccaacaacaacatacaacccctgaaacaaccaacagttgaggcccctctcacaaccttccctcgaataacttgtgaggcaaatgactatgcataacatgcagtttcagcaagagaccagagcctccattcatagcttaaccaatcagatgggacaattggctacccaatt

SEQ ID NO: 86286 - DNA, 340 bp, Glycine max
tctcggaaggccctgaatttcttatcttatacttgtacccccatctttaccaacttacaaatctaagatgattatattatctacacaaaacgtacatctctttatatgtgcatagaggggtgctttttctaaggactgaaagaacctgcctgagatgtcctaagtgatcatctaggcctctaactatacactaaaatatcatcttaatgaacacctacgaatcttcctattgaaatcccttaagacatgatgcatcatcctcataaaggtgccttgctgcattagtgagcccacaaagcatcactagccattcatacaaaccaaacttggccttgaaagc

SEQ ID NO: 86287 - DNA, 421 bp, Glycine max
gcttcttccggaccttgaacatgcaactaactcctctatattactctgctatgtgctcgcgacagggccctctcttcccttcgcagcctgagtacattgctgctaccctacagagctccgcgaaatatattcccgccatactcttccttgcgagccctcttggtctcttgttcaaaggctcatgcggtggctgcatgcctattccgtaatccgacacacttcattccgatgtgtgaagcggccaccttgaacttccttagggcaagtttcgccattcctaactcgcttttgagagctccgacttcttctgtctctttcggagcttcataactctctccactgaccactattatcttgacgagtcaatctatacctcgatatgaactgtcaacctttatggtatccaccaatgatgccatta

SEQ ID NO: 86288 - DNA, 369 bp, Glycine max
ctgtatgcgttggtcaacacggttacccaactggccttgaatcacaaatctgtacctgtcgcacgggttcgtggtttgtgctcctctgctgaccaccatacagacctttgcccttccatgcagcaacctgtagcaattgagcagcctgaagcttatgctgcaaatatttacaatagacctcctcaacctcagcagcaaaatcaaccacagcagagcaattatgacctttccagcaacagatacaaccctggatggaggaatcaccctaacctcagatggtccagccctcagcaacaacaacagcagcctggtccttccttccaaaatgctgctggcccaagcagaccatacattcctccaccaatccaa

SEQ ID NO: 86289 - DNA, 417 bp, Glycine max
  unsure (1)..(417): unsure at all n locations
ctgcagctgccaattacctgaattgaggaaatgatttttttatcttacagaaatactttacactacaaataccattactggagagttgatacattacacagtttataccaaaagtagtgtttcatcactacaactccccaaattacagtttgcttgtctgaagcaaaagagaacactcactggtctcagtgaaataacatgcgtgctatgtcaaaggtgttgaacanaagtctaattgctgatagataggaagaaaaggtcttatacttgttttcacaagatgcaatcatcaaagaaaaataaatatacctgataatagaggagtaggctaaacagatataaggaagtgcttaaccacagctatggtctatttactcagccaagtgttaactatcattctacactaaaagagtcatc

SEQ ID NO: 86290 - DNA, 367 bp, Glycine max
tcgtactgatgggtaccatgaggtgaatgctggggttagacacacgcgggtgttgaaaagactgactgggcataatcttccttaccttgtgcacctggtgacactatacacaatggcgtttacacatgaggaggaaacgtaatcaaactttcctcttcttcaatccaacctcgattctttgcccggagcacaccaaatacgcctagctggaccgcatgtgacccactaactcctcatatttgaacactggcgtattgtataccatcatggagatcatttatctcacaacgatgggaggagctactattgccggcaaatccctccgattgtgctcatattctttaaaggtttcaccctctttcttaaa

SEQ ID NO: 86291 - DNA, 317 bp, Glycine max
tatgagaggtacaccgatattgaggtgcctatgatagtactaccatagaggaatcaggtgatatatttcactgccagcaatgagtctcctgcggaactcaagataagacactgcgatgatgagtgggctaatatcaccgttggcagcgtaaattggaccctcgtgaatgaatcctacacaaacgcctatgaccccgtagataaatcaccattgcaagtgggggtgataggtcattcggtgaaatacgatgaagaaactctgattactgatctgaagacccccctgattgaggtacagggggaaaatttatgcgcttc

SEQ ID NO: 86292 - DNA, 374 bp, Glycine max
tatgctgccaacatctactacagacctcctcaatctgagtagcaaaatcagccgcaatagaacaattatgacctctccagcaacaggtacaataccgggtggaggaatcatcccaaccttagatggtcgaatccttcacaacagcagcagcaacaacagccttattttcaaaatgctgctggcccaatcagaccatacgttcctccaccaatccagcaacaacaacagcaacagccccaaaaacaacaaacagttgagactcctccgcaaccttcccttgaagaacttgtgaggcaaatgactatgcaaaacatgcagtttcaacaagagaccaaagcctctattcagagctaaactaatcaaatgggacaatt

SEQ ID NO: 86293 - DNA, 91 bp, Glycine max
tagtatgctagctcgaatgagaaactggtagcttcttggattcgttagaataacggacatcatcctagtaactccatgtctgcgaatccat

SEQ ID NO: 86294 - DNA, 352 bp, Glycine max
caagcatctttggtctttggatctatatgctacattcatattccatacatgaagaggcacatgcttgatgactagactatacgaggtatcttccttgggtatagcaatatctctaagggctaccgtgtctacaacttgcaaactaagaaactcgtcatcagtctagatgttgaagttgatgaatatgcttcatggaattgggatgaagaaaaagtggagaagaacgttcttatacccgttcaactacctcaagaagaagatgaggaagaaaacccaggtgaaccaccttcacctccatcacaacaacaagatcaagaactatcgtcaccagagtctactccaagacgagtga

SEQ ID NO: 86295 - DNA, 361 bp, Glycine max
tatatgaccagcaatagtgtcgatgtcaatattacatcactcatgttaatcaatttattctaatctccaagctcgtatagaaatttatattattaatattgacgtattactgaacttaaacaaaatttgataattacaaacgtatgagtatgagcatctgcccaatgttggatacatggatggagaggattacatgggtggggaccttctataaactaaatggaacctattaacaggtacccgtcgtgccctcttactatcaaggagaaattgaatgaattataaattaatgttgtcatctaatatccatataatgagcataacacagtatcgcctttactacagcaaacactttattttt

SEQ ID NO: 86296 - DNA, 353 bp, Glycine max
tctggaggaagcctctaatgaatcttctatagtaagctacatgcagctgcctcggtaaaaacgctgcccagccttcattaaccattggatcttttcgaaaatttggccttaatcttcacaagacactttttcatgatctgaccgttgggatctttgataagatgcctggagagtgctataagtcttttaataaagcttctggaggaagcctcttaatgaagcttctggagaaaactacatgacgctgcctcggtaaaaatgctgcgcatccttcgttaaccgttggatcatctctaaattttgttttcaactgtacaagacaattgtgcatgatctgaccgtagggatctttg

SEQ ID NO: 86297 - DNA, 324 bp, Glycine max
agaacccatgttggactggcattctacatggcaaattcccacctctcaacaacttaatctcagccattcacccttctattacccccaccctattagcctaaaacacccaatcatccacaaaggccacccttaaatcaaccaccaaaccctgcttgctggatatccgatacctaacaccacctttacagcaaccaaacaccaaccagggaggaatttttagaaagaagcctcttaagtcacccaatcctgctcatatgcatgggactacttagcgctatccactacttttgttagaaacatttccaaactgttagttccccatta

SEQ ID NO: 86298 - DNA, 368 bp, Glycine max
ggacacttatatactacgcgtgcttcgacagcggagctcattcattggagttattaatgctaacaaaattcatgttttaaagaaggagcttaatgcttcggatgctggtatctctgacagaattctgaatcaatttgaagtggagctcaagaaaactcttcatgagcaattgtggcatgctgctaatgcctatgaatgtatgctgaggcctaaggctagagtgaaatggatcaatgaaggggacacaaattcatcttactttcacacgctgataaatcataaaagaagacatattgctattccacgattgatcattgatggggaacgggttcatgaccctacttagtccaaactgaggccttcaatca

SEQ ID NO: 86299 - DNA, 289 bp, Glycine max
acgtgatgcctaaaacactttgagaaataccattcatgcctccacttaagccgagtcaatggtgatcgtgcctttacggcccctccaaaagtttgggagagattgatctccaatacagataggccctcacaatgccaagtaccttcatataatggacattatccccctaccactgttgttggggcgccgtggatcactcaatggagttgttcctctcactcaccaaaattgaaatcatatggaaggcatctgtcttctatatgcaggaaaactttggtgactgccatct

SEQ ID NO: 86300 - DNA, 368 bp, Glycine max
  unsure (1)..(368): unsure at all n locations
ttggaagaaagcgatgacgttctagccctaattgctgagctcgaaagagcctgngtagtcgatgagaagttcaagtccatacccatcaaagtctgaaaagagtatgatgaactaagggatgtcaatatggccaccgatgaagccttggaatgagaaaccaagaatgcccgaaaggaagaacacgaccaaagcaaagttttgaggggctttatagggcagcaatagtgagctcaagcttctaataggtgaaaggaatcatcacgggtcaaaggcatgatcttgaagcacgagctaaaggtttgccttaggtcgaaaagaaatttgtcccaacagttaagcgagactgaagggaatatgtgggccatcat

SEQ ID NO: 86301 - DNA, 238 bp, Glycine max
atttgctgatccaacctaatcagcatcaggataaccctcaactctgaggggaccatgatttaagaataacaaacatcttcttgatacagagtttaaagaccttaatatctgtccccaacatacatatgcgggtatatttttgagccatgcataacatggctcacgacattgactgcatatgctatgtctggtctagaatgagacaagaaaactaatctttcccactacgccttgatat

SEQ ID NO: 86302 - DNA, 385 bp, Glycine max
  unsure (1)..(385): unsure at all n locations
cacaacaaacaggaatagtgttttatatacctcacagcggccatatggaatgcaaagagggaaagtaataatacgatgaagtatgaactggataggaaagctaataataaaacagagtgtgtgtgagatgatcgaagtaagagacgcttaaatatatagttgnagagtcttcaacactaataccttcctaaaaagtgggaggaatggccacttccaagaatctttttcaagcagacaactcatgccactatataccagaaaaattaatataataataacagagatcaccatcttcggctgaaatgatatttgatcctttcatttattttcacaaaattacttggcacaaactataatagatataccgacttattttatattatat

SEQ ID NO: 86303 - DNA, 316 bp, Glycine max
gagtggaggaacgccccggcatttacgccacaatgtaaacctttactggtttaaaagctctcatagttgggcgctacagcttctatagattctcatatttgttaaggctctgtgccttttgtttttgaatttataatacaaggatctttcttcatctgcggctggtcgctacccattctcattcatatgcatggttacttccttttccagaaggcagatttcatgacgagtcccccgaaagcacttatacctgcgacccgtctatcaacttctagcacgaaatgaattacaccacatatgaacgaaatgaggatgt

SEQ ID NO: 86304 - DNA, 405 bp, Glycine max
  unsure (1)..(405): unsure at all n locations
agctatgcagaattggttttctccagtgaattgatcgacgnngggccgaaaaaaaaggcaaatttgatcatcctactangacgactgagaaaactggggcaaataaagagggtgaggataagggagaaacccatgttgtgactgccatttctgtacgaccaagtttcccaccaacccaacaatatctttactcagccaataacagaccttttccttacccaccacccaggtattcacataggccatccttaaatctaccacacagtctgtctaccgcacttccaatgactaacaccacctttagcacataccaaaaacaccaccaagaagtgaattntgcagccagaaagcctgtagaattcactcccaatccagtgtcctatgctgacttgctcccatatctac

SEQ ID NO: 86305 - DNA, 381 bp, Glycine max
  unsure (1)..(381): unsure at all n locations
agcttncttaacaatcctcagaatctctgacttaacctctctcttcccttcaccactcgacccttccccaacttccacctgaatcgcaaacctcgaaatgcaacactcaaactctttatctcaatcactctcacaacacccttcttccctttgcaagtccatgagaatctcaaccaaatcaattttcaacatcgcgttcactactttccttctccctatatacccaagctccaaaacacaatccaacgccgcaacgccaagccccaagtcgcttgaacgcaaaaaccctacaattttggggatctcgctgttgcagagaatctcgtccaccaacgggcttcgaataaatcttatcagcaacggtaaaacgtgaacgaagca

SEQ ID NO: 86306 - DNA, 440 bp, Glycine max
  unsure (1)..(440): unsure at all n locations
catgatacatgttttggtnttggttgntctaaggtaaaaaggatgccccacattattttcatgacacaaatgcaaaaatgatgatttggaaactctatgcaaaactggtcatgcatgcacctatgtggacactcaagtgtcaaaattttatgctcatgtgatgctacggctcacgattcattccctctattgtagtcaacccaatgtttgcaaaatatgttcttttatccatttgtgcattcatccgagtccattntgggcgttcggggaaatttcactggcgtcacccttcgggtgtacacacatttttttcaaaaaccagctatgatcggcgaatttcccaaagaagagatggtagtcatctcttttcaaaagcatgtcggttgttcagctaaacaacatagtttngctttctttttcctcatttgtttcttacttgc

SEQ ID NO: 86307 - DNA, 212 bp, Glycine max
  unsure (1)..(212): unsure at all n locations
acctgcaggctgcagcttttgcgtaccgctcttgggcncagtanattcataattcttatcccgcttatgactagctattttgaattctttagtttctgaatgtacaaccttcatattgttgctcgttcccctctttgagaatgaggaggatcttcataggacttcatccagctgatgtttgtcgccagtttcatcatccacccacccttttt

SEQ ID NO: 86308 - DNA, 202 bp, Glycine max
ctaataaaaacgcagggtcataacttctcacctaagtgccactcactaaaaccaaaactcgatccgcaagcttattgcggagcaagctgatccgcacgcttattgcggagcaagttgacccgcactagtatacagagcaagtagagccagatgctcattgcggagcaacttgatctgcaagaagctgacaaaacaactagat

SEQ ID NO: 86309 - DNA, 446 bp, Glycine max
  unsure (1)..(446): unsure at all n locations
acctgcagcatgcaagcttctacttatgggcgggcgggcnncttctctttctttctttaacgcgagcggggaccactggtcttncttcccgcgatgctacttttcatgtccccctgagtgggcttatagcctaaaccatacttcccacgatttccttgggtatttatcaagctagatatgccgccgntgtctttgcctaaacccatcccgagttcataaccgttcctcaacataactcgggccatcattaccgctgcatcggacagacaaggctgcccaaagagggagtccacggaggaaatgttgaccacctcacaagactggaaatgcagttctaacgattcttctgcggcttccacataaggcatggaggatgggcagcttaccaagatgtcttcctcgcctgacacgatgaccaagtgcccctccctacgaatttcactttt

SEQ ID NO: 86310 - DNA, 431 bp, Glycine max
  unsure (1)..(431): unsure at all n locations
agcttcttgagaacttttatttatctattcacaccctgctatnaacgaaattaacctccttgaatataattgccgatgacaaataacataacaaataatcaaacatcaaacataattactaatatatatatatatatatatatcacggtgttacacgcccatgttgtgctatcggtgtaacctctaattcaaaaaattgctcagcttttcctctccaatcccaaaagtttgttccatcaaacgcaaggaattgaatttgcgcgtgttctactattgatcgacctgaatcaagagtatctatattctcgtcttcatcggtcaagattttcttttcaccattcaatgatgctaaggatgaaacgagactctccaacattttgtgcaacgaaatctaatgtttcttggttgattcttgtgcctctgtaaatgtc

SEQ ID NO: 86311 - DNA, 454 bp, Glycine max
  unsure (1)..(454): unsure at all n locations
taagcactgcagctgcagctgtcagcccttattctgatagtttgttcaggctactttngccgagttgtcccgagtggacatgcttttggttttgtacgggaggtgtgatgtgcaagttgagggacgtccatgtttctaatgattatgcccttttctgattgttggaggatgcattaaagacaaacattacattntgtcttttgctataggtgtgtgcagcgcacacacaatactcttgtatatgtgtcactcatggagtgggcacgtactgaagacatggtgcatgggtgagtaggggtgtgtcatggtgcgaanaattagagcatcatttctgctcctaccagttactgaagagtccgcctccactttanatggaggggatgcttgagttgcgatcacggtcactttcaaattttngccttctttctcttgaaaatcttttcccttctcgtgc

SEQ ID NO: 86312 - DNA, 466 bp, Glycine max
  unsure (1)..(466): unsure at all n locations
cctctgaccggaccttaagcaccgcggctgcaagctaagcccncaactgtcaaggctcttaatatataaagagnatccttgtcaaaccttcacccgacgaagacactgacaaaaacttatcttctccttttttggacaaagtatgacaagctggtggcaagtataatttcttcccatcagaccttggatgcaactgtgatcgtatccccttctcagctagatcttcacgggtattcaagccatccttcgtcttgccttgaatgttaaggagcgtcccaatcacactgtcacatacattnttctccacatgcataacatcaatacaatgtctaatgtctagatcagaacagtccggaagatcaaagaaaatggacctcttcttctatatgcaagtcttacttttatccttcttttggtctttccacatacagcattcaagtgttgaacccgctggtatacctactca

SEQ ID NO: 86313 - DNA, 483 bp, Glycine max
  unsure (1)..(483): unsure at all n locations
agctttgagccaaaatcctgntctcaccatattcncttgacccannggngagaatgtcaatgccttaccttctcggaagcanaaaaaaagacatagagggggagaatttcccaatcannaagaacaagaagaaggaataatttcccaatgataagcaacaaaaaagaaaaagaaaggaaaattcctccaatcataagagttgggagaacagccaaaaaaaagaaaaagaagggaaaattcctccaatcaatagagtgcggacgaaagcaacaaagaaaagaaaaggaaaattcccaatcaaagaatgagagaaagtaaaaaaggaagaagaagaaggaaagaaagctcctgatcagggatcgaaggaaaaacagaagaaatgtgcagagaggtctttggaccggacaatatatgaacaatacagaattgtcaccaaatgaacaacanagaaggagaggaaaccacgacctaaaatggtcttct

SEQ ID NO: 86314 - DNA, 403 bp, Glycine max
  unsure (1)..(403): unsure at all n locations
agcttgttacagaacttatgaaaaatcaagttttatcttgttcgcacatcgntcgcgtgtatgatatccactcgacaaggtttgaagtagatgagaccttcaatcctataacgcaacgtggcggacaaaaatgggtagttaacttgaatgaccattattgtcaatgcggaaggtattctgcgcttcactatccatgttcacacattattgcagcttgtggttacgtgatcatgaactactaccaatatatagatattgtttacaccaatgaacacatcttaaaagcatactccgcacagtggtggcctcttgggaatgaagcggcaattcctccttctgatgtggcatggacactaatccctgacccaactacaattcgtgcgagaggtcggccaaaatcaac

SEQ ID NO: 86315 - DNA, 382 bp, Glycine max
catatttgtgtaatgtttatgagtttggcctatcatgcctgcaaacctatggggctttatccgggtactcgcggactactcattttaacctgtctaagtctgatgtgcaagtatcgctaattagataggttacgatcttgattgttaacttatggcgaaaggctaatttattatgcttaaaacgtaggatcattgcattgggatagaacttagcttacatgataaagtcgattgttctcttataataatatacatatctcactttttcaaaaaacattttttcaaataactattttaatccacgaaccaatccattcatctgcgagcttttgcgggccaaatacatacttgaacaaaagtctattattttgtggatctacct

SEQ ID NO: 86316 - DNA, 273 bp, Glycine max
ctacattacacattcgataaacaatttatgtatatcattttacccaatcctgtggatattatattgcaacagtattaggaaaggtgattaagacttttctacgtgcataacttaattatatttgcgcatagtgaaattcacacatttcgtgaagaacatgtctatcgatgggttcataaatctcaaaatattaatcaagataatgctttgaaagacgatggcgtcttgttgaaattggaatacaaatgatgagggatgctagctttccataac

SEQ ID NO: 86317 - DNA, 399 bp, Glycine max
  unsure (1)..(399): unsure at all n locations
agcttgggtgatgttgcgcgtactgangggttctatgaggtgtttgctggnngtngacccacgcgggtgttgaagagacngcatgggcatctccttcctttctttttgcccctggtggcccgattcttttggcgttcacgtttgtggaggaaacgtaatcaaactttcctctcttcaatccaacctcgattctttccccggcaaacaccaaatccgcaaagctggacgacatgtaacccactagcttctcatagtagaacactggcagagtgtctaccatcatggtgatcatctctctctcaaccatgggaggagctacttgtgccgccaaatccctccattgctgcgcatattctttaaaggtttcaccctctttctaaacatattctgagttgagac

SEQ ID NO: 86318 - DNA, 409 bp, Glycine max
catgcaagcttgctccataacacaatgtctgcttacttgttatggaatgttgtcaagacgttctgaaagtaagaaccaaaacataagatcacccagaaaggtaaaagcgtcaagctaatgatgttaaagaagcgcttcctgtgaggaaacccagtttcaatctctgttatctatgttttttgtgcatttaatcatttggaacttgctgtataatctgtacataggagtatatcagcctttctttgaatgtttaacataagggtttcaatttcttggaaaaaggactaaaaaataacttagaaaactcttttttgaaaaacagtcctttcgctaagcgcgagcctcgcgctaagcgcatatttggtcatgcactaagccgcgagtctcaagcgcttagcgctcaaccatt

SEQ ID NO: 86319 - DNA, 452 bp, Glycine max
  unsure (1)..(452): unsure at all n locations
catgcaagctnggtacactttcactgaaaagtttatttatagcagctggaaatgggggngctcaaagtctctagatgaaccaacaacttgaagactttggagtaaaccttgatcacattcctctaaaatgtgacaacagaagtttgatcaatctaactaaaaatcctgtcatgcattctaggactaaacacatagaaattaggcatcattttcttggagatcatgtgttaaaaggtgattggtgcattgacttcatagatagtgagcatcaattagcaaacatgttcactaaaccacttgctagagataggttcttcttcattggaaatgaactangcatcttagatggatctacaatacaatgacattttgtttaatgcacattatctattgcatattgcattctatatgtcttgatttctcttgatgtgtcttagcttgttgatatatat

SEQ ID NO: 86320 - DNA, 446 bp, Glycine max
acaagctctatatccagtaggatgtgtttaacttttcattttaagaaaaggaaagaagttgatatttaaattattttgagcttcttttcatttttcaatattattgattgaagtttgagagtttattttgcataactttagtctacaactttgactggttacattacctataacttgctttttgttctttttaggtttaaagttaaactctagatctatgaacttagtttatggtgtaaaccaaggctagtacactacactttgaggaagttcaaagccagctaaaagtcaattcaaactttgatacaaatttacccaaaataaggactgaaactccttctgtaactgcctatatcagtaaatattacaaacatcaactggttcaattaatcatacatatctttttccaaatttcaattaagctcataccccttatcaaaatatct

SEQ ID NO: 86321 - DNA, 455 bp, Glycine max
  unsure (1)..(455): unsure at all n locations
agcttataacacagnatattattgtttccgtatttntcaacctatgttaccgtggaacctgatgtcagtctcgatatttttgtgatcccagcatttgatgttccaaggggcttagaaaggagttcataaactttaagccatgaatgtagtcttgtgtgtttaagaatgattgatcagaatatccatttagacataaaacttacataaacggattgaggcagcgagagtaaatgcgtaatagagctttcatgtatgtcgntcgtatcatttgttctttaggtagattaatcatagtttgcgctgtgtttgaataggctatgtttagtttattttatataaattctttcacatctaaattaaactctctggtttattccaaagttgtgaatgtgaaaatatatttgtatggaaaaatatccatcgccgctctcaattcttcgaataattagtctctg

SEQ ID NO: 86322 - DNA, 440 bp, Glycine max
  unsure (1)..(440): unsure at all n locations
agctngatgtgagaaagctgtgaagagtctgtctttctactttngtttgttgaccacagagtggtacctggagatatgtcacgggggtcaagagaccttggggacgtcaggtggggtgctatttcccaaaaccaagcttgaccaatcccgacccaacccaggcatatcagtcagtgagaacctgtgatgtacctaaacaggcgagctcctggcagtcaaccaataaaagaacaaagtccacaaagtaaggaggcttgtgtggtggctggccagctatgtatcttgngtggtatttggaaattagcctctggtaatcgattaccaagcgtgtgtaatcgattacagggcttanaaatggagatagtatgttaaatggcctctggtaatcgattaccaatggtgtgtaatcgactacacagagtaacanggcattggtaatc

SEQ ID NO: 86323 - DNA, 321 bp, Glycine max
ggtaatattggagcaaaccctcaccttacaccaagatataacatcaatttaaacttgttcagactggatttacacctaagatttcaccgaaccaaaattgactcctcacacccaatttaccctagaatggctctttgttcactttggtcatttgttattctctctagcacagcccacactttctcataagtcttaaatgacattacaagctatgataaactcactttaacctccaaataccactaaattcagatatggcgctccaactctcaaaaactcactctttttccactcataacaccatattctcactttctaacc

SEQ ID NO: 86324 - DNA, 400 bp, Glycine max
  unsure (1)..(400): unsure at all n locations
gcaagcttgtagaagcaagatttcatttatggtttttattgaggacnnngaaaaggcctatgactcagtctcatggtctcttttggattatatgctgcatagaatgggcttctgttccaaatggagacaatggatttctgtctgtctcaactcagcaaccatatctattcttgttaatggcagccctacaaaggagattgcttctactaaaaggctgaggcaaggggatcctttancccctctgctttttatcataagtggagaagacatcacatgattgatgagggaagcacttcacaaaaacctctatagaagatacatggctggaaagaacaccgaacccactaatattatgcagtatgcatatgacacaacttttgtgggagatgctgcttgggag

SEQ ID NO: 86325 - DNA, 436 bp, Glycine max
  unsure (1)..(436): unsure at all n locations
agctntgaattgatcaacttatgctctcnttgactntaaatggtcataatttgtaacacggaagtccgattcatgcgcataatatgccgagacgctcgaaattgaacaacggaagctctcgagaaactcaaatggtcataacttatcacacggaggtccgattccggcggatagtatatcgagaagctcggaattgaacaacgaaagctctcgagaaattcaaatggtcataacttttaaaacggaagtaagattcaggtgcataatatatcaagaagcttgaaattgaacaacggaagctgtcgatatattcaaatggtcataacttatcacacgaaagatcgattcaggcgcatgatatatcgagacgctcgaaattgaacaaccgaagctctcgagaaattcaaatggtcataacttttcaaaccgaagtctg

SEQ ID NO: 86326 - DNA, 291 bp, Glycine max
cttaccacgagctcactgaatttgctgtttctatataacaataatgaaagacgtgaggtgaatttgtgttgtattgtttacaattaaatgtgttggcaatcgttatgttcaaacaggacggctcttatgcaagcgcattattacgccgctttacccggcggattattaacgagcgggccaaacgacagacctccccgggggcttgccaaacggtttggactcaccctgcactcgcatataagacgtacgtcgaaacatccagacgggtcttgagcaccctactctcgctgc

SEQ ID NO: 86327 - DNA, 394 bp, Glycine max
  unsure (1)..(394): unsure at all n locations
aagcatgtgtaacacttgttggaactntgatgaatgagagtcttgtgagacacaactcaaagttcaacttctctccctttttcttccttcaatttcgtgctccccctccctctttctctccctctttcttttcctccattgaagcatcctctccaagcttcttatccaaggctcatcttggtggtgaagctccttcttccatggcttattccttaatggatggcgcctcctctcacctcctttcctttttcttccgctgcatctccatggtggaaaatcaccattaaaggaccccattgaagctcatagatccagcctccatagaagccccacaagcaagtgtccatcaagtggtaatcagagcacaagagcttcaagtatgtgctcctttaac

SEQ ID NO: 86328 - DNA, 451 bp, Glycine max
  unsure (1)..(451): unsure at all n locations
catgcaagcttataatatattccatctataaaaagagtttatattattttttgtcctcactaaaacaaatttctagatctgccattagcctaaccatgaatgaggcgtagcatggagctcacctttatttatatgaagnagatttttttcatctgtagtccatagtccaataagcaaccaacataaggtacattcagtgtaggagatatcacaacaaatcataatagcattcctcaccattatggtgtgataaatcataagcatgacaacatttcaacatgtgtcacaaaaattgcaattttacttattaaaatatcaatggcataaactcatagcatggtagtcgggcacaatatcatccaccaatgtatctaactcaacatttagggtgatctggattatgttatatccaacnaatccaattcacactaaagtattattacataatttc

SEQ ID NO: 86329 - DNA, 320 bp, Glycine max
ccagtcacgagatcacataacggacacatgcctcaaagaaaaacaatcacacaaactctctttcttatcatgataccataatagggagaggggcatggcaatcgtttctatatgcattaacggctaatatcaaatcatggttatctccatcatctaacttgctcagggttaaaaaacagagatgaaaaggggatgtctgcacgtattctccgaagctcaaacatatagcctcaacccaaataggacaaacaaaccttttatacacgacacgattggatcgtgaacaaatatataaaagatagcactccgtactacaaatt

SEQ ID NO: 86330 - DNA, 399 bp, Glycine max
ttcacaagaagaaacacatttatttggattttttcttatcgcccgaaccatcgtagaatctgtataatcataatgtctcttcacatacttacggcaagaaattccacgtgaggatatatatatataactactcccatacatatatatatcacttccttcgcacttaagaagttctctaacagttctccttttgctaacgggggaaagagcgaaacccttctttttcatcaatatttgataagaggatgggaaaacgagccccttcacttttacaaaaaaaaatcattggaggtggaagaccgaccacccttgaataaattgaagacatacatttttgacctctcacaaaactcacaaatcatgtgtttttttacccggcacgaaacccactaaaaataa

SEQ ID NO: 86331 - DNA, 343 bp, Glycine max
  unsure (1)..(343): unsure at all n locations
gagagagggagagaaaagggcttcttgaattctttcttttggctgagtgaggagagagaacagcttttttgttttaaaataaaaagggtttctctttctctattatttattataaactatgccacatgtctccatttgagtggagccaaaagggcccactcntcccctttgactgtgacccatactcagcccaaaagtgagaaaaatctgacctttgaaacgctaaaatcctgcctcggtttgcgtgctgtttctcaggtttcagttcctcgcgtttctctgcgtccgtcggggccagttttcgaaagtaacccatatatatatcacaacgctcagaataaaa

SEQ ID NO: 86332 - DNA, 443 bp, Glycine max
  unsure (1)..(443): unsure at all n locations
gcttctatagaaggttttttcctaatttctctacaattgcatcacctctcaatgagttggtgaagaagaatgtggcatttacctggggtgaaaaacaagagcaaacctttgctttgctcaaagaaaagcttactaaggcacctgttctagctcttcctaacttttctaaaacttttgagctagaatgtgatgcctctggagtgggagttggagctgtattgttacaaggtgggcaccctattgcttattttagtgaanaacttcatagtgtcacccttaactaccccacctatgataaagagctttatgccttaatacgagccctccaaacttgggaatattaccttgtttccaaggaatttgtcattcatagtgatcatcaatcacttaagtacattagagggcaaagcangttaaacaaaaggcatgcaaaatgggttgag

SEQ ID NO: 86333 - DNA, 439 bp, Glycine max
  unsure (1)..(439): unsure at all n locations
agctagagtcttaatacttttgttgcatattgcatgtgaattgnttattatgtataatgtgattggtgattgaaaaatgaattttaaatgataaagtagtaaagtgacgtgatttgtattaaattgagatatgtgataaatatttctataatatgttttgcttatgtctttgtttattcgtattttatttagaaatgtgataactcactccctatgtgatgtttgtgtttggatcctgtgatgatctcgaaccttgtgttcctgggagcagatgactaggtggatgactttaaagaacctcgtgctagaggacactangacacaatgctctgataggatgtgacattggggctagatttttgttcaattgcatgatgttntgaacatgttatttttactntattttatttttttgcttaactntagttcttttgtaaac

SEQ ID NO: 86334 - DNA, 354 bp, Glycine max
  unsure (1)..(354): unsure at all n locations
cggacatccgaggaanatagtattgttcgctgaattctctcacagcttctgtttccattacgagcgtctcgatatattacgggactcaatcggacatcagagtaaaaattattgtcgctcgaatttgctacaagctttcggtttcaattacgagcgtctcgatatattacgggactcaatcggacatccgagtaaaaagatattgtcgcttgaatttgctcacagcctttgttttcaattacgagcctctcgatatattacacgactcattctgacattcgagtaaaaagtagttgtggcttgattttcttacagcttctgttttaatttcgagcgtcggatatactccggaca

SEQ ID NO: 86335 - DNA, 380 bp, Glycine max
  unsure (1)..(380): unsure at all n locations
agctntttatattatattggaaatctcatgtgggttgcttagggactggacgtangcacggtgggtggccaaaccactataaaatatgagtttgcattctttcttcccttaaacttcttttgtatattgctatttatcttttgttttaaagaagtttatatttgaattgcttttgagtaattcatattaagggtgcattgttaattcaaaaagagagttaaattgtaattgggaataatatttgtatcttaattcaactccccttcttaagataactaaggacactcgtcgaacatagataatgttaatgttgaacacgaattgaatattccagaaactagctttttaaccttcaccatactataatataaattgtcttg

SEQ ID NO: 86336 - DNA, 269 bp, Glycine max
aaattgtcatggtgccactttttatgctccaatgcacttattttgctccaccagtgatcaaattcatctgaggtagccaatgctattggttcaccacatgaattgctcttccttaaatgcacttcttgtgcacatgctgaagtttgtgggttaaattactttcgtggccctgtgataccgggctctctcctctttgtttcttctggaaagtggtgaagcaaatcgacgcgaagagttagctgaatttggagacttgtgcttaaaaatct

SEQ ID NO: 86337 - DNA, 438 bp, Glycine max
  unsure (1)..(438): unsure at all n locations
agcttccatcataaccgatgtnggacttattttatatattatgtcatacgcgacctagngggctcacgctctccttcttctgtatgtaacctcgcgtgtgacataccctttctttgctcgcactgtcatcctctccgtgtaacctctgaaggtacattccatctaaagcttcatatattcaacttcatatcttcattgtaacttagctgtgtcatttcggttaaccctaggtacatttcgtggtgacttgagctacgaggaaagcttcaagtctgtgcgccattgagattgatctctcttcttctctgtgtaacctcgcgtgtgacataccctatatctactcgcgctgactatctctccgtgtacctcttgagggacatttcgctaagcgttatatatacaacttcatatcttcattgtaacttatctgtgtcattt

SEQ ID NO: 86338 - DNA, 433 bp, Glycine max
  unsure (1)..(433): unsure at all n locations
agcttatncttatggctcgcctccggacttcatcttcccgtgcctaattctgaagangagagccaagcccctacctttgatgggcaactttcttccttatgccgactaccccctgctagaagacgacgaatgagatacccatctatgccctttgcttcccctcaaggatccattcccccatgaattacctcaaccaaacatagtccgccatgttccattttcacccgcacccgtaaaagaatcttttcccttcacagaaaataagggaaagattgatgcgcttgaagagaggctaagagcactagagggcctccgcaattacccgttctcagatttagtggacctatgtctcgtgcctacatacgcatccctcccaagtcaaagtccggatttcataatacaaaggacacatgtccgaagggctttctgattt

SEQ ID NO: 86339 - DNA, 426 bp, Glycine max
  unsure (1)..(426): unsure at all n locations
agccttatcctactggatgtgatcagccaatttgatatgatacacaccatngagntatagaaaaaacaagcactcttaactcacttgtcttcttccaaagaataaaatacaacattttcaggttaattccattaggttccaaattattgactcatgttccagatcaaaacaaagaattaataaaagaacatacccgtattagttaagtactatatgattggagaaaccaaacatattaaacccagattcgtagctcttttcttccccaccagcaacagtaccttcagaagcatccttttccatttctttatcttttcgtatacctcattccagcaagcagatggtgtataaccattgaactgcaaccaaacattaataacatgtcattggtgggactgtgggaattataacgttggcatggggggg

SEQ ID NO: 86340 - DNA, 302 bp, Glycine max
  unsure (1)..(302): unsure at all n locations
agcttcggtagtncaatttctagcatctcgatatattatgcgcctgaatctgacatctgtgtaataagttatgaccattttagtgtatcgtgagcttccggtgtcaatttcgagcgtctatatatgtgatgcgcccgagtcggacatacgagttaaaagttatgaccctttgaatgtctcgagtgcttccgttgtgtaatctcgagcgtctcaatatattatgcgcttgaatctgacctccgtgggaagaattatgaccatatgaatttcttgagagctgtcgacgcacaatttattatgca

SEQ ID NO: 86341 - DNA, 425 bp, Glycine max
  unsure (1)..(425): unsure at all n locations
agctatggagtntccaagtgccaattcgttctcttctttagtccagtcttcttctggcttcaattcatcagtgggctttccttctgtgtccagcatcttgggatgttcccagcctttgatgacagctttccaggttctgctatccagtgatttgaggaaggccaccattcttgctttccagtattcatagttggttccatcaagaattggtggtctgttcactggtcctccttctttctccatgttcatcagaatatatctccctagatctcactcagtgatttcgagtgcctgctctgataccaattgaaattctgataccaggggacagatgtcgtaccggatgtcacgacatcacactctagaacatgcagattctatgtgtccgtctgaacagattaaacaagtaaataacacaagagaat

SEQ ID NO: 86342 - DNA, 359 bp, Glycine max
  unsure (1)..(359): unsure at all n locations
ttgaatcaatttaacactggttatcgattacaggaaattggtgatcgattaccatagagtaaatactctggtgacttataaaaatatgagaaaactcttttgtgaaacaaaactgtgctatgtttggtttttgaaaaatccttttcaatacttccccttgtgaagtcttggcttggtgcttcttgaatcttgaattcatcttctcttgaatcttgattcttcttcatgtcntttcttgaatcttgaaatcaatctcgatcttgaatttgttgacacattcttgaaatcattcttttgggttcttttgggctttttgtcataattaaaactacttgactcatacttgattcatcatcatg

SEQ ID NO: 86343 - DNA, 453 bp, Glycine max
  unsure (1)..(453): unsure at all n locations
agcttggtatgaaacgctaacagagatcctttctctcaagggtatacgaagggaggaattgacaagactctctttgtcaaacaagatgctgaaaacctgatgatagcacagatatatgttgatgacattgtgtttggagggatgtcgaatgagatgcttctacattntgtccaacagatgcaatctgaatttgagatgagtcttgttggagagctgacttattttctgggactccaagtgaagcagatggaagactccatattcctctcacaaagcaagtatgcaaagaacattgtcaagaagtttgggatggaaaatgccagccataaaagaacacctgcacctactcacttgaagctgtcaaaagatgaagctggcaccagtgttgatcaaagtctgtacagaagcatgattgggagcttactatatttaacagcaagcagacctgacatt

SEQ ID NO: 86344 - DNA, 363 bp, Glycine max
ttaagtcacctgcggcatgcaagcttgaaattgcacaacggaaaccctcaatattagtaaatggtgataacttttcacacggaagtccgattcagacacataatatatcgagacgctcgatatttaacaaccaaagctctcgagaaattcaagtggtcataaattttcaaacggaagtccgattcaggtgcataaaatatggagaagcttgaaattgaacaacggaagctctccagaaatttaaatggtcataacatatcacacggaagtccgattcagacgcacgatatatcgagaagctcgaaattgaacaatggaagctgccgaaaaaattctatggtcataacttgtcacacggaagtt

SEQ ID NO: 86345 - DNA, 451 bp, Glycine max
  unsure (1)..(451): unsure at all n locations
agcttgcattccttngattntctcactgcctttatactcttccttaanaaaantccagattttgtgtgttggtttcatcatcattattctgttgaaaatgactggagatacagctgtgaacaaaattgatttagctttggactttcgaagcctcctttctttgtgactcttcatttgggcaacagtgggattatttggcaaaggaggaacttcgtagtcctcttctactgtttcccatacatcgttagcatcaagatatgcttccattttgacagcctatatttgatagtttagtccatcaaatacgggtacagaaatggtagtaaaggaggtttcagattccatcttatgtgtggtggctacttggtggttgtaggtgtttgtgggttatatcacagatctcgtaagatactttattgctctgataccaatttgtaggatataaagtata

SEQ ID NO: 86346 - DNA, 353 bp, Glycine max
gattatcattagcactgttattttattaaatgccttagtcaataattgtcttctgttctcactctatgcgagcgatacatgggactaacaacctagacatgcagggtgacatctgagtagtatgcaaatgtcacatgtggtatacactctttccaagtcctaagattcttcttaatgacaactctaaaaatagtacaaagagtgttattaaccacctctagttgcccatccatttgtggatgacatgtatttgaaaacaacaatttatttcctatctgaccccaccaagtctgccacaaatgactaaaacttgtgaatctcggcacttacaatcttctaggagaccatgaatc

SEQ ID NO: 86347 - DNA, 323 bp, Glycine max
atgacatcccttcaagagatacctcccgtgattatagatatgaaggagtggctattagagacgtcggaaagctacagccgttattggaactgacagtgatagattttactggaaaacacaaagagactcttgagtccttgattaatgagatgccactctttgagacactacttatggatacagctgatgagagtgaagtatcgacttgtacattacgccactatgtctacacttaagaagcttgttctatgggggacagtatcaaggtttccaacatggatttcacagttctcaagcctgacctgaataggagtgaaaatttg

SEQ ID NO: 86348 - DNA, 451 bp, Glycine max
agcttctatataagctgtatcattttatctataaacacaagtttagccttattcacaaaattaaagtttatctcttttatcttagagagagtgattctcctaagatctcgagtgatgccacaacaccctggctatatcaaaggactttcacaatctttgtgtgttgccctcgccggaaagagtgaatctttccttcctttcatcttcaaccttgttctttcaaaccacaattccagaaaatccacttctgcccataattatctcgtggccataactcctgttttacgcgctcaaattaagtgattcttgagcctaaattgaatttcaaaacgagatctttcacctcgctttggaatcacctcatttggagccctgtatcttgagttattgccatttctatatttctgtcccaccaccacttaacctacgtttatcatctattcttcattta

SEQ ID NO: 86349 - DNA, 343 bp, Glycine max
  unsure (1)..(343): unsure at all n locations
agcttccatngtttatttgaactcatatttttttaatcntaacattctgaatgtatttatctttatcttcatctggcatatcgacaacaacttggctcactgatttatcatatcaactggttgaatttggctaacaaattttttctgggtaataaacaatcaactataagggcacaacaagctctcttataaaaagcaaattatactttgtgagttatgagcagtggcatggcaattattataacttcttcgtaataacgagtttagttgttcaagagtctgggaggatggggaacctggagattagaaatataacagatggagagtccaagaaaaaaaggtt

SEQ ID NO: 86350 - DNA, 434 bp, Glycine max
  unsure (1)..(434): unsure at all n locations
tagcttaaagactaaattgaaaaatcaactgttggatatgtggatgacacgttgctatcgtcacttgtcacgacatcaccaaaagtgtcaagtaggcacatatgttaaggttaacatagatgagctaaacacaaaatcaatttgtcatatttttttacactctcgaagactaagttcaaattttttattttttagagaccaatttatcaacatcacacactgttaggaactaaaataaatatttatcttttaaacaattcaatccactttctatgtgagacaaatattaataatattgtttattatgtcttttaacacttccttgaatgtagtaagtaatagtgagtacgctaataaaagaccaattgaattntcttacatgtgacaccaagagaatgaaaatattaatttcttaataatttggtatttttttc

SEQ ID NO: 86351 - DNA, 375 bp, Glycine max
  unsure (1)..(375): unsure at all n locations
ctgcagctgggacaacatgttggcaaactttcttctgttattcagtatatacaaaagagctggttgcaattcttctaaacttgaagtgataacatgncagcctcttgaacccttacctcccactttttcatcatgtctagactctcgaaccccaacagggtttgccttttcgatgtactcggagcaaaactcaatagcttcttctgcaatgtacctttcaacaataagtgctttaagatggtgtagattctttgtatacccttttaagatcttcatgtatcgcttagccagggacattcaccgcaaataaacaggaccgcaacatttaatttcccttaccaaatgaacaaataagtgaaccatgatgtcaaaaac

SEQ ID NO: 86352 - DNA, 374 bp, Glycine max
  unsure (1)..(374): unsure at all n locations
atgcagctngagaatggagacatgaacatgtttggctggtttgttatcgaaaaagggagcccacattatttcatgaccanatgccaaagatgattggaacttatgcaaactggtcatgctgcgccatgcgacgctcaatgtcaattttatggtcagtgatgctgggttaaggatattttctctatttaaataacccaagttacaaatatgttcttttataattgggcttcctcaagccatttcggcgtcgggaaatttcacagattccccttcagtgtagaccgtttttcttcaaatctgtatgacaatgaattttttaaagagaagggaatcttttttcaaagcagcggttttactaacaatattttcttttt

SEQ ID NO: 86353 - DNA, 427 bp, Glycine max
  unsure (1)..(427): unsure at all n locations
ctctaccccgggctcactctttgactgcaccgtttttgtaattattcttaggagaagccatttgtttacaatttcccacgacccacgattagctttccctcaggctttaggttacagactttacgttgataccactatcctatagactatttttttaacccttgtgggtccttaaccactttcatctcacttatataatcctatctctatatcgcccccatcttntagaacaacacctatgcacctagagtttatcaacttacccctctctaaggcgtataatgtcttatgacacctatacatcagtctccatcctttgatccctcactaggatctttattatacccacaataaaagagcgtttacctttttttttctacactaaataaagcttcacacctcttataagctatttcttttacaataa

SEQ ID NO: 86354 - DNA, 391 bp, Glycine max
tcttttatacccagaccacaggcgcttgctctttaactaataaagctcgaatgatcctacagacacccagacaaatgttagcatagtactctattaatttgcccaaagacaattaaacatactgttgattaacaagattgggaataacaaacctctctctaacagtactgtcagacaacacaccaccatatgcacggttcacaggccttcggttattgggtgacctcgatctcatatattctgtgtggcctatatgctggaatctgcaatcgccacacattaataacaataatgtatacccgcgtgtaattcatacctaatcctctaccattctagaaagaacaactaatgtgtggaacctcgacatgataatcttaactttaaacaaatg

SEQ ID NO: 86355 - DNA, 446 bp, Glycine max
  unsure (1)..(446): unsure at all n locations
accgcagctgcaactggaccnggctatttttaatttttccccaaaaaggcggacatctgaaaaatctctataaacaagccacttgcagaattgtgactttttggaaatgtattctttcgaaancaatcactagttattcaataccattaaggtgttatcgactacacatcaacagatgtgactcttcaatttgaactttgaaaantaaaacatttagaagctctagttatcgatcacactagtttaaaatgatttgaanatgttaaacacaagctgtaactctcgagatctgaaatcttaatgttttaaaacactggtaatcgattactaccttctggtaatcgatgaccacagagtaaaactctctggtaatgattttgtgaagacttcttatgctactcaatggtttgaacaaaaaattagacctatcttgatgagactctctc

SEQ ID NO: 86356 - DNA, 313 bp, Glycine max
gcgtcttgatatattacgggacacaatcggacacccgagttaaaagttattgtcgtttgaatttgctcagagcttctattttcaattacgagcgtctcgatatattacgggactcaatcggacatccgagtaaaaatatattgtcgtttgatttttctcagagcttcagttttcaatttcgagcgtctcgatatactacgatacacaatcggacacccgagttaaaagttattgtcgtttgaattttctcagagcttctgtgtttcattacgagcgtctcgatatattacaggactcaatctgacattcgagt

SEQ ID NO: 86357 - DNA, 381 bp, Glycine max
tgcagctgcctattatgtatattttttttgtgaaataatacttcgtttttttgattgcgttggaatacctttttttagcattttcaatttatcataatggattatggaggttaaatctgctctatgaaataacggttatttaaccacccatgggacagacatatatcattgttaataatatgcaagacaaattggtacatctcacacaatagttcttttataaaagacaaagtaatcgattttacagattgtgaaacttataagttggcactcctagactaaatgtgtttagtgtccatatatttcatactcctaatcaatccttaaaccaaagatctagaatgtaacctatttgtcaagatgtcagattttatcattcac

SEQ ID NO: 86358 - DNA, 354 bp, Glycine max
  unsure (1)..(354): unsure at all n locations
acacaaactatcacagccaagaaaatatggcaaaggcagaaaactctgcccaaaacaccaaccaaaatcacagctctcctcacttaaagaaccccagaacagttccttcgttccagnncgntaaccgttggatcgactcgaacatttcactggaagtctctagtacataatcctacattttgaccgttgggatctactagaaaacacccagaactcattctgcatcactctttccacaaccagcagatacataagcattttctgcacttatgctaaaattctgctgcacctaattgacagcaaaattctgcataagtgcagatttcgaaaaaacacacatcccttcacccaatc

SEQ ID NO: 86359 - DNA, 303 bp, Glycine max
tagggggtgtcatgccggcacttacacaatatgaacgctagcgccataatgaattctgctaccgcgggcgttttcgctcggcggatggactgaagcggtgcgcttattgaaatgaagcggtgcgctcaccgaacctgtacagctcatcttcttctagattcttcctcgtgcttagccaatgaatgttgcgcttagcggacgctcgctagccagcagatgggcttaccgagaaggtgaaaaacaacactttttaaagtcgcctatttacctggaattggagagaatgattttttacacaccaat

SEQ ID NO: 86360 - DNA, 439 bp, Glycine max
  unsure (1)..(439): unsure at all n locations
catgcaagcttagaggatctcttgagagctngngttgttaatatctggttgttggatggagcnctgcctttggtggaattcacgtacaataatagttttcatggaagtataggaatgatgtttctaatgctatgtttacaacgtgtaagacgttgtcatgataatactaataaagtgagagtttactacctagactagagtaagtgtggttcaccatactataaaagttaaaatattcagaaggtaaatttaatctttattatatctcagcgatgccaaactaattttctcaccttacacatcaaagcggagtaatgagagtcatttgattgactccgacaaccccaattgtagtataagtagaaacttggtgtctgacacttaaccaagactttttaatcattcatagagacacatgagagattntcatattcttata

SEQ ID NO: 86361 - DNA, 322 bp, Glycine max
  unsure (1)..(322): unsure at all n locations
aaacaagagcnagccntggggtttggtaaagaaaagcatactaaggcaccagttctagctcttcttgactattctaaaacctttgagctagaatgtgaatcctctagagggggagttggagttgtattgtacaaagtgggcaccctattgcttattttagtgaaaaacttcatagtgccacccttcactaccccacctatgataaagagctttatgccttaataagagccctctaaacttggtaacattaccttgtttccaaagaatttgtcattcatagtgatcatcaatcacttaagtacattagagggcagagaaagtt

SEQ ID NO: 86362 - DNA, 379 bp, Glycine max
gaaacaggtatcaatttatcaatgttctttacatgtgcacgataagtaatcgcatcaaaataatgagataagggaagacagaattgtaaattccatttatttttgtgtcggccacttcctgtacctacgtccagtcctcaggaacccaactgaaaatttctaactttcctggtaaatctctaaaatttttgaacacacacatggggatcctccacccttgtgtgtgatttctcacatgccaaaagataacacaatccttggatcacaccgtattgatgtttataaagaagaacacaatgatttctctctcttagagcagatgatacgactcgaagttcctagaagaattctactaacttgcaagagttgaccaaaatgt

SEQ ID NO: 86363 - DNA, 443 bp, Glycine max
  unsure (1)..(443): unsure at all n locations
ncaagctttcaacagggtaatcaactgctaanatgntttagaatggnatnggcagaggttagaggtggctccttctcatgatcagcaatggacacaaagaggtccataccgggtagatcagatcgccctgtgggatatgatggggatggactatcaaatatttcgtgaaggactgcatggtcagtggaacgattcacagggcaaagctttggaacttgatctagaatccatgagaagccaaaccatatctcacatgtaattgacataatccacaaccaaactgcatctntatttggatttaccactctccaatgtaaaaaaaagatcaataccacacatctcaccaagataagtaacctgccaatagatatagatatagacatatatttagtcatgtaacaataattattattatcattataattacaaactatgggaagtat

SEQ ID NO: 86364 - DNA, 387 bp, Glycine max
  unsure (1)..(387): unsure at all n locations
agcttcttatccaaggctcatcttnggggtttatctctttcttccatggcttattccgggggggatgacgcctcctctcacctcttttcctttgtcttccgctgcatctccatggtggaaaatcaccattaaaggaccccattgaagctcaaagatccagcctccatagaagccacacaagcaagcttccatcaagtggtatcagagcacaagagcttcaagtaggtgctccttaaacctccattaatttttnttctttaccttctcttccattgctggttcttcattattctccatgtatctcctcacatgtcttgttctaaatgttgttaacatgattctttagaagattccaccaattaaacttgctatagaaactagatttga

SEQ ID NO: 86365 - DNA, 394 bp, Glycine max
acgtacctaccctaagtgcttcaaatatagtgcctaacacaaccacagctaagaagaatgccacctacctcgaatgccaatgggtacaatggctggcggagaataacaccaccacccagctcttctcggaagagagaagagataaacttaagaagctctcttggaagagagaaatgaataacagagaatgcttcctaaagagggaataaaagctttttaagtttttaaacgaagggcaaaattgaccttacaataaattgttgggtgcactagcaatattgctgggtgcccctgcatatccaacaagttatttgcgataatgggcctgtaggccaattcatgaccatctcttgagtgttgctaggtgcactcaacatttttgctggtgcaccca

SEQ ID NO: 86366 - DNA, 472 bp, Glycine max
  unsure (1)..(472): unsure at all n locations
gcttgttcgcacatcgttcgtgtgtacgatatcttctcgacaaggnttgaagtagaggagacctttaatcctatcacgcaacgtggcggacaaaaatgggcagttaacttgaatggccattattgtcaatgcggaaggtattctgcgcttcactatccatgttcacacattatngcagcttgtggttacgtgagcatgaactactaccaatatatagatgttgtttacaccaatgaacacatcttaaaagcatactccgcacagtggtggcctcttgggaatgaagcggcaattcctccttctgatgaggaatggacactaatccctgacccaactacaattcgtgcgaaaggtcggccaaaatcaacaaggataaggaatgagatggattgtgtcgaaccatctgaccaccgacaaaaatgtagtagatgtggagttgaagggcacaatangcatcgatgtccaatgcaat

SEQ ID NO: 86367 - DNA, 434 bp, Glycine max
  unsure (1)..(434): unsure at all n locations
aaccagtgttagctctttacaaattagaagatnctgttgtttgtttgcacactgactaactttcaatcgacttataaacagatatacaatctcaacacatagtcttttctctcaagttcatcaaagtgttttgagggtaactctaaactttaagataatntacataaagctctttttatagaaagaatttgaannngncgcttcagttaatattacatgtcttcaaagtattaaacaaagtcttaaatttcatcatttaatgttgtatcagatcatgactttagcgttgaattgtctgaaatgtcaaacgcacattcgcaaagcatgttctgataccatgtaagacacaacttntaacctttgcatttgtatgcatctaatacaattatggtccaacctattatgaggatcacgtatccagcaacccggtctaa

SEQ ID NO: 86368 - DNA, 398 bp, Glycine max
  unsure (1)..(398): unsure at all n locations
ctgcagctttccttgagcttaagcttagcctttggtttgttcaccatgttgctcatctcatgttgttactccccctatctctaacaatatattntaggttattacgacaatataatttttttttgtgttaactttatttattatgagaaattatatattttgccatgataatatattttaaatttgaagtatgaatcaatcaatcaatttatgttagctatatatataattgaatctctttaatatatatcgagtcagatcggttcaattagcaatccttggatctactactaatttattgatccaatggttcaactgatttgattattcggctagtttttatatactaccttgtgactctactcaattgcatggtaactaaacacccttatcttgat

SEQ ID NO: 86369 - DNA, 459 bp, Glycine max
  unsure (1)..(459): unsure at all n locations
cgcatagcacatactgttacgtcttactcctattaaacaatttatctattcccaagcttcaattcaaacctcanattaagaaatagaaatgactccttgacacataaactaggactatcatttgtaagaagcatcaagctatactaaggtaagaaaatatggttgcaatgtcaagccttatgcaatcctactaatataggaaaacctagtgttgactctcaannnntttcagaagattcatgattattaaaactccaaaaaagaaatggatgccccaagaagtatccaaacattcagtatttaaaaactgatgcgaagaagacagatgataaacaaaggggtgcagcacctatatgtagttatgtacaatcaccacctacaatgtaactcaaaaatcgatgcctttgttgtttctttaagagatgtgaatatatctcatagcaatcatatgataattct

SEQ ID NO: 86370 - DNA, 485 bp, Glycine max
  unsure (1)..(485): unsure at all n locations
tctaagtcacctgccgcatgcaagctnttcgattcattctatgtacccgtagtggtcctcnntgtgtttcgngcattnatattctcgttntgtttactttttataccccctgccgacgtgcttaagccattttacttaagtcgtttctcgcttaacttaaaaataaaataaatttccaccgaacgtttgaattgtattatccattaacttcggttaaaataaattccgaccgttcggtcatgccgtaaccacgttggaaatcaaaaaaagaggtaaaaaataatataataataaaaaagatatctttttagtaaaataaagcggaaaatcaatcggacgttttctctttgggatttctcattcttaatcgaattgattaataactaaagtgaagctaaggctataatcaactcgcctagtcaagctcgtccacaaaaatatgctgttgaagttggcattcaattcctactaagaatatggatcat

SEQ ID NO: 86371 - DNA, 463 bp, Glycine max
  unsure (1)..(463): unsure at all n locations
ctaagcttgatccgttagagatcccagctagtcgctgtctaatatctcttactcttgacacaaggtcgatatcatgtggagagagagaaactatggtccacaaacactntntgcaacatatctttagagaagtataatattccaatgtcgcctattgctcagagctatcatatgaatcaaaggaaacattaatagtaaaagacaaaaggaattaagaatgtcaagaaatgagnnttaaatcttcccttttgagcgatatgacacaagtttcttactaagcctatggacattactttcttgcgattgcttctggttcttgaggattgagaaactattccatgcttttgtattgcaagccaaatgcaaaagtacttgccttcttatggttggacgcacaagtagtatctctctacgactgatactttatctatttgttataaccttcatgttcatgcttttctgc

SEQ ID NO: 86372 - DNA, 494 bp, Glycine max
  unsure (1)..(494): unsure at all n locations
atcttaagcaccgcagctgcaagcttcgtgaatttgtaaattataagtatatttatttatataaatatattttaactaanaactttaagatttcaaattataaagcttaaattactaattagaataaatattaagtatttatttattaaatatatttatttataaataataaaaactaaaagttagcacattgctaggtaacatctagtttaaaagttaattaccaaaaaataaacataactggttctttataaagctcaacataaaattcatccacctataaaatatttatttgtaaatgaaatttgatttaaataataagggtatgcaatattaaccagaggttattacgagcaagtatttgagcaacttgtgatccggattaaactattctggtagcctgctatcacatgtttcagcaggtattattcatattctgtatgaatattaaggatatctcctaacatccaaaatattgactacatttgaattac

SEQ ID NO: 86373 - DNA, 459 bp, Glycine max
  unsure (1)..(459): unsure at all n locations
tcattgatctcacttcaactgcttcaattcagatggtaatttctaatatctctcgatcgagagccaaataatgttntgagttcagtttcaccatgcaccatgcccatctgttttcgtaatttgatggatctaagaagcaaatttgctctgttttttactgtatacgtgacagagaagtaaacacgcacttgatccaattcctttcgtggaaatcaacagtaatagcaacataaaacatatatgctaacgttgtcaattgatggctttgatttggatcgagtcttactggaaaaatttacatggtcaacgctcgtctacgcattgccatataattaaaagaaaaagatcaatttaaactcaaataatccatcttggacatgctcaaataagagagcatagttcaagatccaattctttaagaataggaatctccccattnntgggccttatttctttctt

SEQ ID NO: 86374 - DNA, 480 bp, Glycine max
  unsure (1)..(480): unsure at all n locations
cctgctgcatgcaatgcttttaataattcaagctaaactatcttctttatagattcagcttactagggtgggaatttaagtantttacataaattcaaacgtcattgtgtacaagaagaaaaaaaaaacactagagtttactcattaatattgtcttaaacgcctatgtaccttataaattatacatacaattttccttacaccgtcagtattctccaaaaactaaactaatcttataaagtttttattagttcaaattggataatagtttatattttaaaacaaattacaattagaaaaactacaaagaaaaggatgtggaaagtagaaacgtatataaactagtgaccacttactaatgaccattccaaaacgaggtgaatggaggtggaaagaganaaggagaaaaaaatgatagatgtgatgaaaatganatagatatttaaagttnttntaactggaggtttcatctccggttca

SEQ ID NO: 86375 - DNA, 457 bp, Glycine max
  unsure (1)..(457): unsure at all n locations
gaagtaaaagtgcacttcacatatagatgcaattattttatataagcctcctcacaacataaatcgaaacttacatttagaatatattacaccctgttcatttaatattttgaacccttttttcgcttcttacatccattcattatgtccacttgtgtgggagaacaaaacacaccaataggcaaaatacattctcctttttaacaaatatactaaccnnnngtgtacatttataatctatcattgtttaaattcaaaagcccaagcatcaagaagagaaacaaacttaaaatacaattgagtttaaaaggatgattaatatatgtttgtattaaatattggngatatttattacatcaaattgtacaacaaagatactttatatatagacaggatatagacaagttacacaaatttgaagttcatatggaacataaaaacataaattaaaatcatg

SEQ ID NO: 86376 - DNA, 469 bp, Glycine max
  unsure (1)..(469): unsure at all n locations
atccttaagtcacctgcggcatgcaagcttggaagaagtgatgaggacaagcttttaggcggagcttgaaagagcctgggtagtcgaagagaagttcaagtccatagccatcaaagtctgaaaagagtatgatgaactaagggatgtcaatatggccaccgatgaagccttggaatgagaaaccaagaaggcccgaaaggaagaacacgaccaaagcaaagttttgaggggctttatagggcagcaatagtgagctcaagctccgaagaggtgaaaggaatcatcacgggtcanaggcatgatcttgaaagacgagctaaaggcttgccttatgtcgaaaagaaatttgtcccaacagttaagcgagactgaagggaatatatgggccatcatcgatgagtgcaaagagaagctaaatctagcagcgactcacgagcaaaggctagaggatgagtacgccaagatatca

SEQ ID NO: 86377 - DNA, 337 bp, Glycine max
  unsure (1)..(337): unsure at all n locations
ctacatcgcgtactactctgagtatatttctttgttgtaaaagagatttgaccgatcgtttaagccataacttcacttaatgaatgataaaataaatttcaacctatcatttgtgttgcaatgttgtttaatcatcgtttaaataaaatccaaccgatagttcacgnngaacctcggctaataaaaaataagtaagttccaaccgaacattntactttgaaagttctcttttaaatgagttgagaaataactaagtgaaaccaaagctaaaatcacctcacaaatccaactttgtccgtgaaaagtccattagaaaccgttcgaggtccaacacctt

SEQ ID NO: 86378 - DNA, 464 bp, Glycine max
  unsure (1)..(464): unsure at all n locations
agctntactaataggtcaaagcattcagctttaattaattaaaaattaaaaaagggcaaagcaggccaacgcaatatttgtatgattgtttcacagctcgcaaggagttgttgcaacttgcaaattgaatcaaattaccaatacttaatgttgactttcctcctcaattcgcttggtatgaaaagctngttgagtattttaaatttatcgtttaagtattgtttttacttttctcacataatcttagaagtgatttgatattgatagttgatttgtcaagattagaaacttcaactgtagctgatccaactntcaaatcactgttaaaagtatttttgcctttcaaaacattaaatgttcatacttagacataagatgttactaattagtatcatcaaactattgataagaaaataaaaattaaaaaataattcaatntatcaatctataggccgacattcatg

SEQ ID NO: 86379 - DNA, 459 bp, Glycine max
  unsure (1)..(459): unsure at all n locations
ctaagcttcacaaaaatggagtttgctattgtggtcttattacatctctttaacaatttccatcctcctccgacgccgtgacgttctttctccttctcttcaactccgttgtcatcagcggcgttcgatggtgaatatgcaaaaccatgccgcggcgatagaggaatgtatcttttttaaagaaaacattcttagaaaataaattgaatagaggataagcggatnttggagnnccttcacttattacttacagacttacagtaatttgtataattattctacaattggcagattaacaacgcaagcctcatatgcttatttatgcaatgactccgcgtccagagctgataatcaaaattgaaatctcgtcatattttattaggcatttatctgagaaccgagaaagctttaactattaaataactattttgttcgactaaaatatgtgtgatctctaat

SEQ ID NO: 86380 - DNA, 434 bp, Glycine max
  unsure (1)..(434): unsure at all n locations
agcttctgaacctaacaaggaagcagttatttaatcactgcttggagcanaagaagccatgctgtggattagatatcatatgcgcctaatgggcgaggctgcaggtgttccagtaagttcatgaactaattgagcacttatttttatggttatctgttcatatgatgccgattttgattatacaaatatgtcttggtggaatatacattcctcttgtgttttttttttggttgaaatttagtgattttgtttaacccattaacacctcttgaggtgctacatctcttatcttcctatggaataagaatgatcatgaagctaagtttgacaatttacttgcaaataatatatgccatcccagacccaaaaggaaggattaagggtggattcaattccatagtggttagcccacttgctatctgaacattccatat

SEQ ID NO: 86381 - DNA, 465 bp, Glycine max
  unsure (1)..(465): unsure at all n locations
ntaggcanagccactaaagcaaatgcatcacaacaacagtattattacttagagcactaagctaacaccatgaaatttctgaaattctcacccggactcgcggcttctctcaagttcgtcgtggacctcgtggtcgtggctcgtggtactcgccgcttctcttgagctcgtcgtgttcgtgggtgggactcaagaaatagaagtgagtttgaatcttcttatcanngcgcaacctcattcaagagtaatatatatgcaagtatatttgtaatgttttttgagctgtaaaatctatcatatctcaggtgatatcttagcaccaaatttacctaaatttttactgcctataaaaagtgggagtgaaaaattgagggttgattgtttaaaataattttacttataaatttcagattngaattttcaccttataaacttaanaaanattgactatatagtaaaaaatca

SEQ ID NO: 86382 - DNA, 468 bp, Glycine max
  unsure (1)..(468): unsure at all n locations
agcttgtcgtgccatcgtcatttcgatctatattcattctgggctcatacctatcccttaacatgactcgggccaccatcaaggaggcaccagataaatgtggtttcaccggaggagcctccacataagcattnttcacaatttctagtgcttgaaaagatgtttccaatgactcttccgcagcttccacatagggtgtagaggatggacaactcactagtatatcttcttcactcgacactataactagttgtccttccaccacaaacttcaatttctggtgcaatgttgacgggaccaccccaatagaatggatccaaggctgacctagtaggcaattgtagacggggtttatgtccattacttggaaagttatctggaaagtgtgtggcccaatttgaatcaggagatcgatctctcctctcacgtcacgcaagctaccatcanaagcccttaccaccatggagc

SEQ ID NO: 86383 - DNA, 436 bp, Glycine max
  unsure (1)..(436): unsure at all n locations
agcttcagaccaatgattatgttgtggtgattcaanggatacaactgtggatcacgagtcaccacagaaggaagcctgacaccatgtaaggatgtaaactatcttccataatcaagatatatgcgttgaaagatttaattaaaggtttaaatacctttttatccttgcaatttatcattttctttttcgttcttgtaaaatttttattttttttatttttagtcattgtaaattatcattgtgttatttttcgtccttataacgctntagaaataatattntttntactgtttaaagtactatctaaatttttntaagaactaaaaacaaaacaaacataatttacaagaactaaaaacaaaaataattttgtaaggacaaaaagaataaaatattaaattataaggactaaaaaatatntaaaccttaattaaat

SEQ ID NO: 86384 - DNA, 405 bp, Glycine max
  unsure (1)..(405): unsure at all n locations
actagctggaactgccagaagagaagaagaaattattttgctgatctattattgaagtgtaaaaattggccagttacattatgttattgtagctatgtacacataagttagttgaaaaactaactttcaactaactaactaactagagttctaaccattaaccatgatcaaactaaactaagcatctaactatgctatggtcgcccctcaagctnnnnccaatgttggatattactatcttggcgtatatatctgcaagttgattggcaaaagatattggaaaacaattgacaagcactgcagggaatctttttccaacaatatgacactaaattttcgatatgcgtggccttcatgaaacacaaattgcacaatatataagttgattgttatcacagacaaaac

SEQ ID NO: 86385 - DNA, 454 bp, Glycine max
  unsure (1)..(454): unsure at all n locations
agcttgtatcatcagttggactgcagtatttttaaagagaacttgtcttggaaggttgggtgtggggaaaatatcaaattctggtctgacaattggctaggggaacaatacaccctacagcagaagtacaaccagctttttctcataagtagacaacaaaaggctctcatgtcacaaatgggccattttaacaataatagctagtgctgggacttgaggtggaggaggacctatttgatcatgaaagtcagatggctgttcagtttttggaggagatcagcaatgtgcctattcaaagccaggtcaaggataatatgatatggttgcctgaacctaatggacagtacaccactaggtcagcttatagtttatgtatgaataccagctcagtaaattctgaagacaagatctttaagacaatntggcagctgcatattcccccctcggcagtcat

SEQ ID NO: 86386 - DNA, 448 bp, Glycine max
  unsure (1)..(448): unsure at all n locations
cgcttataatttaaaatctaaactaaatcaattatatcattctatttttttttcttcggcttggttcaatttgatcgaatcgatctggatcatattcacccttaatatcaagtctcttgtgcataaaataagaaaaagatttttaagataaaaacatgcacattttgggtatatatattatattaatagatgatttttatataaaaataaaacttatatatcacannttattaaatattagtataatatttcatattattagttgtgtctataatatttatattaatgtccaaaatctaagaggactataaatcttaaattttataaatttttccattattaaataataggatttactactttttaaattcactaaactttttagaatttctagtcgtggacgtttttactatgtttggtccattaataaaagtaaggacagaaaaaa

SEQ ID NO: 86387 - DNA, 472 bp, Glycine max
  unsure (1)..(472): unsure at all n locations
agctntctccccaattntctataaatagggggagttgtgaagtgaanaagggttcagccccttatgcacttctctctctttcgaatttgcttgggaaaattgtttccgtgaagaaaatctatgccgaggcgcttccgtaacgtttccgtgaggaatttcgcgaaggtttcgaccgttcttcgacgttcttcattcgttcttcatcgtccttcgatcttcaacgggtaagtacctcgaaccaagcctttcgattcattctatgtacccgtggtggtccacattgtgtttcgtgtatttttattctcgtttcatttactttntataccctcttttgacgtgccttaagccatttatttaagtcatttctcgcttaacctaaaaataaaataaatttccaccgatcgtttgaattgtattatccgttaacttcggttaaaatgaattccgactgttcggtcgtgccgtaaccacg

SEQ ID NO: 86388 - DNA, 459 bp, Glycine max
  unsure (1)..(459): unsure at all n locations
cgctctanantacattgatgtttgtatttatgggaggaggttgtatgccatttttgttttaagaatagtgtcccactggtaaaactaactttccaaatgtttgccttcgcaggaaatggccccgaggaagcttgcctcatagaggtccaggaaggacaaggcagccgaagggactagttccgctccggagtatgatagtcaccgctttaggagtgctgtacaccanagcgcttcgaggccatcaagggatggtcgtttctctgggagcgacgcgtccagctcatggacgacgagtatactgatttccaggaagaaatagggcgccggcggtgggcaccactggttactcctatggccaagtttgatccagaaatagtccttgagttttatgccaatgcttggccaacagaggagggcgtgcgtgacatgagatcctgtgtaaggggtcagtggatcccg

SEQ ID NO: 86389 - DNA, 120 bp, Glycine max
  unsure (1)..(120): unsure at all n locations
gcaagcttcagcctgatcactaagcgacaacttgtcttgtttaaacatgacctagngtcaccaagcacaattccttacaaccataaccgggcgttcatgatgctaagcgccattcatgga

SEQ ID NO: 86390 - DNA, 278 bp, Glycine max
  unsure (1)..(278): unsure at all n locations
cataaacattgttcaccagttaccaaacctgaaaggaattcctcctagccatctccccgacttctacatattgcgtataagaaagacaacttacatcggatganttnnnttctctatgagtatgaataactgcccttccccaaaaattcaacctttcgtggagcattgaagggactaccccgactgattgaatccaagaccggcctataaggcagttatatgctgggtggatatccatcactttgaaaangattctgcttacgtggggtcaatatgaa

SEQ ID NO: 86391 - DNA, 495 bp, Glycine max
ttaagtcacctgccgcatgcaagcttgtaagaccacagtaagagtagtgttgtatctttggagaacagccaaccccctcttatcttttccatgttcacgccctaattctctctcacacacacacatatatatatgtatatgctccctcttatcttttccaaaccaaacatagcagcctcctgtcctaattatagaaagccactaatcaatttcttatttcatcatattatataattagttaatagggagggggaatgaatccatgcagagtcaaacaaaccaattcaagacaaataatatcattagcaatttataactgttggggaaagatgaaacattgtgcagacaattcccaaaaaaaaaaaaaatggaatgctataaaaaaaaatattactaataaattggttaattgacagatattttcttaataggtctttctaaatgtaattcgagtaataatgaagaacaaaggtataccattttaaccatcaaact

SEQ ID NO: 86392 - DNA, 437 bp, Glycine max
  unsure (1)..(437): unsure at all n locations
tactaagctgctgtccatttaaatacacagtagctacaaatggtcttttctgctgcgattcatgtccaaggaaaaagagctcgtatccaaaatagacttcatggattaatggataaacacaaggggagtattcccacaaaatcccaaggaccattttctgcaacatgtaagtgggtctgctgttggaactaaagcaacaagatggaaatgctggtgggtagtgctaacatggacatttggaagcatcgaaatgaggtgatctttgctaatcaaactttcgaaggaagtaaagtgatggaagatgcgattttcctattatggacatgccttaaacttatggagaatggtttcaccctgcttttcaatcactggtcctctcatctcacagcatctttntgtaattaggaaaggatggtagccgcagtattataagtaat

SEQ ID NO: 86393 - DNA, 467 bp, Glycine max
  unsure (1)..(467): unsure at all n locations
agctnacagcagaatttagtaatgacccactatcttataattaaaataacttaatgccattaacctatggaattaaaaaaaaacttaatggctgagtgtaactgaaattgtggcaaccaaaagtcacccccaacagccaacaagtcagccaccatttggtctcccaaaaggctgatgcctaagttgccaattgggcccttattacaacttgaactaaacctaactaaagcccttttagttgattaacccaaaacatatttttggtcagccaactttacaaggattgggccattatttagacaaactaaacactctaaaattgaaacaaagtggtgtcatttagtcctccttcatttgggccatgatacaactcacaaccctggacttttctccttgaaacttgggcttgtattcaacagtatggacaacacttgttgaagagcttcttggtttccttgctctaccct

SEQ ID NO: 86394 - DNA, 439 bp, Glycine max
  unsure (1)..(439): unsure at all n locations
cggaactgcctactaagcgagcattgtgcgctgagcctgtattactcactgagcgagctgtccaattcttcttcacttctttttcttccatatttttttcgtcaaattccctctaaaacactataattgttttcttttgacttttgctaatcaaaatagcaaagatgttaatttcttcattattccattaaaaacaataataaagtaaagaaattacacccacttattatccaaattgactatcaaattagtgtatatttcgcaaatatcaaactcccccaaattaaaacatttgcttgtcctcaagcaaaagacaagttctgaatgtatcaacacatgagacaactataaaacctttntaaacctttcactgattgatcctgagtttgcattcgtcttgatcttgtgatggaagcatgaaggaatacacatggagatg

SEQ ID NO: 86395 - DNA, 471 bp, Glycine max
  unsure (1)..(471): unsure at all n locations
cttggttccaacaatggatccacgccttcattgttctcatccaaaaccacgtgacggtgactccaaatcacatgacgttggacgtatctttctttttaatttaaggaaaaggagattattttctaattgtaatgtaatttagcatgtcatccctaatcctcgtagaaggagcatgtcatcccaataaagaccttgaaagcaacattgtcttttgataatgcaattntagctttccggttgtcatacatcttttcaacagattagatcggattagtaagccaactttattcgcaataatgttgtcgaagcgttgagtaattgaatttattagttatactaattcagctcaattatgttaattgagtactagtagacanttttcaacaatcaattcaattgacaagcatccaagcaatctaattgtattatatgtacgtgaatcgttataaaagaatccatctgatctactat

SEQ ID NO: 86396 - DNA, 473 bp, Glycine max
tgtctccaacatgctctgccagtgttgtctcttcagtaatttttgatgaggtgacagggggtatcttgtcttcaacatcttccattgtaaggagcagtcaggagcgctaaaagtgtctaacctctaaataataaggaaaatcaatcagtggaaaataaaagcataacaagagaattacagcctatataagcttttcaaaaaatacaattgaattggaaattaaaaatcacctgtataagtttcaattttgagcgggattggtactcacaagaacaagccacaaattgagaattgaattctatatataccatttaattactttcctttttccaatcctcatgtctattgggaagttaaaatgaaattatctatttcaaggtgttagccaattggctgaataaaaaaaagacaagaaaagaaaagctgtttcccaagttctcagttgttcagaatacaaatcgagagacttctat

SEQ ID NO: 86397 - DNA, 483 bp, Glycine max
  unsure (1)..(483): unsure at all n locations
acctgctgcatgcaagcttgcctcatagaggtccagganagacttggcggncgaangaactagttccgccccggagtacgacagtcaccgctntatgagcgttgtacaccagcagcgtttcgaagccatcaagggatggtcgtttctccgagagcgacgcgtccagctcagggaggacgagtatactgatttccaggaggaaatagggcgccggcggtgggcaccactggttactcccatggccaagtttgatccagaaatagtccttgagttttacgccaatgcttggccaacagaggaaggcgtgcgtgacatgagatcctcggttaggggtcagtggatcccgttcgatgccgacgctatcagccagctcctgtgatatccgatggtattggaagagggccaggaatgtgagtatggccagaggaggaaccggtctgatgggttcgatgaggaggccatcgcccagctgctatgtatacc

SEQ ID NO: 86398 - DNA, 467 bp, Glycine max
  unsure (1)..(467): unsure at all n locations
ccgcttgccacgccgtcgtcgttctgacccaaacccattntgtgctcttacccatgtcccaacattacagggctaccattaatacaacatcggatgagcggngttgcaccgggggagacccgacataagcattgcttaccacttccaaagcttgaaaggatttctccaagcactcctccgcgacttctacatatagcgtagaagaaggacaacttacaaggatgtctnnctccccgagagtatgattaactgcccttccaccacaaatttcaacctttcgtggagcattgaagggactaccccgactgagtgaatccaagaccggcctagaaggcagttataggctgggttgatatccatcacttggaaaatgatctggtagacgtggggtccaatatgaattaagagatcaatctcccctcttacgtcccgacgactaccgtcaaaagcccgcaccaccatggagc

SEQ ID NO: 86399 - DNA, 455 bp, Glycine max
  unsure (1)..(455): unsure at all n locations
agcttagtcccatcaacctatcacgttgtttgtttaaaattattattattatatacaaaactgtatggttgatttatgggaaaaaagtgtaagaaaagaaaaataaggaaggaaaaggaatagaaaatatataaatgatatttttttttcaaattgtatgataaaaaagaaataaaagataacaaaattaataaaaactgtgtttaaaattataaaaaaatttaaaacaaaaaagataaaaaaaaattagaaaaaatttgtgccttgaaccctagcttcagtgccatgtgcatgagaataatttgtaattaaatcacatgcatgactcggaaatcggaaattatatgcgttgcttaaacacacaaatgagataaggttntaaaaatctagcanaataaaacgcaccaggtggatataagcggctganatcttccatgaccttgatgaatattcta

SEQ ID NO: 86400 - DNA, 452 bp, Glycine max
  unsure (1)..(452): unsure at all n locations
agaagtttcatccataagtttctgcatatagtatttttatatgttgggagaggtcagctcttaaatggatctcagtgtctaaagaaattggtctttggctcccaacttggagataccctaagttcacaaaaaaaaaaaaggatttaaggcattcaagcggtcagtgaattctgactgaactgttggatgaagatcagacgnctcgnnntttatcnnnnaaatcagacttaaaatatgcatccaggattttgaaccgttgatcttcattcaatggtgtagatttacgactgtgaatgtgaatgcctgttttcctctagttatagtcaccacagtgatnngatttatgcacaggataattggatatcatttaaaaatgaaaaccccnncctaaatcatggtactgagtagtgaatagatcgcacatcgtttatgaatctatctaatgatgtggt

SEQ ID NO: 86401 - DNA, 470 bp, Glycine max
  unsure (1)..(470): unsure at all n locations
agctnggttntgggcaatagcaccccgccttatttccncaaggtctcttgaccctcgcgacatatctccaggtaccactctgtggtcaaagaataaaagcaggaagtttcacccttctacacttcctcatctcaagcatgtaggaatatggggtatccatcacatgtggtactaggtggcggtcgggcgatggtgcacaacaagttttccacatccacaaatcacgtataaacccaccatcccctgttgcccacctccaactgagctcgcatactcccacgtagcccatatcctcgtttctctcaacaccgggtccccatcaatcctcccaagcttccccaacatccaggtaattcaacatccaaatcatcacaaactacaaaccaagcaaaacaaggcaaaggcagattactctgcccaaagctcataccanaatcacagctntntctcacttaaagaccccagtaaca

SEQ ID NO: 86402 - DNA, 445 bp, Glycine max
tcttttggaccttgaacaagcaattaactcctctttcagttccatgctatgggctcgcgactggtctctttcttccctccgcaacttgagttcactattgctaccccatagagctccgcgaaatttgttccggccatactcttccttgcgagccctcttggtctcttgttcgagggctcttgcggtaattgcattctcttcccgtaacccggcacactccttccgaactgtgtagcggccaacttgaacttctccttggcaagttttgcctctcctaactcgcttttgagagcttggacttcttcgtcctcttccggtgcttcaaaactctcttcgctgacgacttttaacttggcgagccaatctaaacctcgtatatgaactttcagccattcgtggtacccaccaatgatgccattacgaatgcctctaagctcttgatctt

SEQ ID NO: 86403 - DNA, 473 bp, Glycine max
  unsure (1)..(473): unsure at all n locations
agcttgagatgaggaagtgtagaagggtgttctttctgctnttattcgttgaccacagagtggtacctggagatatgtcgcgggggtcaggagaccttgtggacgtcaggcggngtgctattgcccaaaaccaagcttgaccaatcccgacccaacccgggcatagtcagtcagtgagaacctgtgatgtacctaaacaggcgagctcctgacagtcaacagataaaagaaacaaagaccacaaagcaaggaggcttgtggtggctggccagctgtgaattttgtgtgatatatggttgtggcctctggtaatcgattaccaagggtgggtaatcgattacaaggcttanaaatgaagacagaaggctaagatggtctctggtaatcgattaccaaggggtggtaatcgataccaggcttgataacgaagtcaggaagctaagggagcctctggtaatcgattaccagtctgt

SEQ ID NO: 86404 - DNA, 396 bp, Glycine max
  unsure (1)..(396): unsure at all n locations
ttggtctcccaagccacttttggttgcatttttctttctttnttcatattcctactcattccaacaagtaagtattcaatccttgagttntttgctttccattggtgtattttgttcatcttttggagctctaaattgtaagaatgtgctcatatttgtggggcagttttggggttatttatgcttaatttgttagagttgaggggttgtaaaagatggctcaggcctatgtggtactctgaaacaatggggcatgccacattgcccccattctcttgcaatttatgcctaaacacgcgcccaccaagtgctcggtgaaatgccccaatgacatatggatgtgattntgtaagatcggngttgtgggacagttttacatacatatggacaacattg

SEQ ID NO: 86405 - DNA, 471 bp, Glycine max
  unsure (1)..(471): unsure at all n locations
agcttgtctgtatgcatgggtcattacattttctaanaaaagtatatatgagaccctatattatgtcatttttcttatagtatcttccttaaagaaaggttaattttttctttcttaaatatacttccatattaatatcacacatgtatttataattacttatccaattatcctcttatgacacaaatccaatgtttaatgtaaaatactaaagaacacaaagggaaggcgatgagttgaggctgaggtcccctctcacttgtcgatcaccagtcctaattcttttgaatatttggaaaaatggtagggtcatgggattattattattattattattattattattattattattattattattattattattattattattattattattattattattattattattattaatattattattattatgtaggctgtgttcttctatagcttcttcgttggtttctaatc

SEQ ID NO: 86406 - DNA, 468 bp, Glycine max
  unsure (1)..(468): unsure at all n locations
angnntggagataaactctaccactggtaatcgattataggattctggtaatcgattaccaaagagtgaatactctggtaacttagaaaaatttgagaaaactattcttgtaaaacaaaactgtgctatgtttggtttttgaaaaatctttttcaatacttcccttgtgaagtcttgacttgttgcttaagggnnnnttctcttgaatcttgaaatcatcttctcttgaatttgattcttcttgatgtcttttctttaatcttgatcttgaacttgttgactcaatcttgacattattcttttgggctttttgtcatcatcaaaactacttgaatcatacttgattcatcatcatgaagcttgcttctacaaagacattgtcgtcttttgacaaaagacattgaagtctttgaaatgtaaatgaagacattgtcatcttttgaatgtaaatgaagaaattgaagtctt

SEQ ID NO: 86407 - DNA, 447 bp, Glycine max
  unsure (1)..(447): unsure at all n locations
agcttcagacaacttgtgtaatcgattacgtattggttgtaatcgattaaaacagagagttttgccttcagaagaaacttttctaacttagaaatttttcttctcacttacttatgatgatgcatgatgcacaaaagatatgatatggactaagatgcaacattcaatataacaaccaatacaaatgctactcaaaggagttgggcatgtaaaagacaaaacatcttcaagcttttctccaagcttcaagctttagtcttcatgttgttcatgttgccccctctatctctaacacaacctggataagaggaaaatgcactggactctntgggagaaactaaaagtttctaaagcctctgttggtttcgggttcaaaagactcannacatttaacaatgctatattggaaagcaatttggtgataatgaccatgaagaatgcctacct

SEQ ID NO: 86408 - DNA, 317 bp, Glycine max
  unsure (1)..(317): unsure at all n locations
tcgacgtcctggggccatagtagattgaggacgaattcacccagtggctctcttgtataagaaggcactgatcaaagaccatctacgagcctactttttagcacgggtgcggtccttcaaggctngagcaagcgcctctctggttatgacaagttccttttcaagatctgnnnnaggcttgagatggtggatgatcatacacttgaacaaccagggagccaaaagtagtgttagtatcagattcaacttcttcagtgatgggatccacataatgtgtgaagaacaattgagagataggaaataacaccataaaagag

SEQ ID NO: 86409 - DNA, 423 bp, Glycine max
  unsure (1)..(423): unsure at all n locations
tgcagctagccattatctgattgtatcatttttatgaaactaaaataagagattgagaaataaatgatgataaggagaaatggtgtgtaaaatatgaacatgtgtttaatttataggttacaaaatatttatttatttttttttaaaaaatagtaacaacaatttttttaacattgagtggtccaacattcatagtttttttcctccaatggtcattttaattttttattttttattttttctctcctgggctattccacttcccctctccctttcctctttnttctcttctttgttccatctctctccccgaccgttccactgtcccttcctctttttttctcttcctctatcgctgaccctttcactgtccttcttctcttactctattgttttcttcctctcacacataccctcttccta

SEQ ID NO: 86410 - DNA, 453 bp, Glycine max
  unsure (1)..(453): unsure at all n locations
tatgagacttagagcctctatctgaagaggaggattgtttatctcttcccgtgtctataccttaggtgtagttcagtatttttagttaggtagtgatctgctctaatcctagattcttgttgatattntgatgcattttgaggggcgagatttttactataaatgtatggttttttatatagtagatgtatatcaatcgtttcaccacttttacactttgggtttgtccaaatttcttctacagtgacactatntatttgctttatttatgtacaaatgtgcattcatttatttacggatttaattgtaatgtgaaaacctagcgcttttcaagcaacacacttatttttactnntattngatttatcctatntataatgaanaaaaaataataatatantttaccgacttanaaatagaaattaaaagttaaagacgcgtattccacaatat

SEQ ID NO: 86411 - DNA, 476 bp, Glycine max
  unsure (1)..(476): unsure at all n locations
agctngaaggtgtgtaacccaccattttccataatagaacactagtaatatgtctactatcattgttattatttctttcttcgtcattgagggaaacacttatgctgccagatccctccacctttgggcgtattctttgaaagattcatgcccctttttgcacatgttctgtagttgcatcctatctggagccatatcagaattgtactgacactgcctaatgaaggcaaccattaggtcctttcgagaatggactcgggaaggttccaagttagtataccaggtgacagctgccccagtaagactttcttggaagaaatgtatcagcagtttcccatcttttgcgtatgcccccatcttccgacaatatatctttagatggttctcggngcaagtagtccccttatacttgtcaaagtcgagtgccttgaacttgggaatgaccaatttcgggtactatgaacaactcttctatg

SEQ ID NO: 86412 - DNA, 391 bp, Glycine max
  unsure (1)..(391): unsure at all n locations
gcaactcanaatctaggtatccaaaacccctcattttaatggatttcaagggttgagaagtgaaattgagaatgaggtaaatttggagcaaactctcacctcacacaagtctataacatcaatttaaacttgctcaaactggatttacacctaaaattccaccgaatcaaaatttgactcctcaacacccaattttaccctagaaanggctctnngncactttggtcatttgtttttctctctagcacagcccaaactttctcataagtcctaaatgacatttcaagctaggattaactcactttaacctccaaatgccactaaatccagatttggccttccaactctcaaaactcactctttgtccactcataacaccatattctcactt

SEQ ID NO: 86413 - DNA, 467 bp, Glycine max
  unsure (1)..(467): unsure at all n locations
agcttgtgggttctctgttcgttcctctcatctctgtgattctctnttattttcttataagagtgttttataacttcgttattctttgctctgcttctgttatcctacttgtcagattgctgcacttggactgttttgtacttatgattggtttatgtatgacttagttgttttacttatgattttgaatttaagttttgttctgattgtgtcgtgtccggtgtccgtgtcagtgtcggtgcttcatagcttctaacaacataaaacagtctctctttaaccatgatgagataatcgcaagaaatggttacattatgaattatgaatatttttttttatcagcatgaattatgaatataaagccaaatcaatcataaaacagtatataggagaaaaacaacattacatgtcttctttgccaacaaccaattacatgntgaacccaagtcctttcgaagttaaagatc

SEQ ID NO: 86414 - DNA, 460 bp, Glycine max
  unsure (1)..(460): unsure at all n locations
tcccgatacttggtaaaaattgacacatgtttttgatattataagtgattcctgttttataaaataagtcttgaatatttactttatttaataatttttttctataatataattttcataaatctagtcattgaatcatgaaatatcatgttagtgattatgcatgtcaagtttcatttaagttgacatttagaaatatataattgtttaaatatcaattannnatattttaaaagcatttataagttaaattaaagatggctagctatgacatgagtaataaggtggcatagaaaaaggaactgaatcttcagaatcccgccactgttggaggtcgcaaatttgataaacaatgattattgagattntatacgacttctggcactacaatgtcgtccaaggtagaatgacgttgtgagcagttcgtactcttttaaaagtcagtctgcttatatttgtc

SEQ ID NO: 86415 - DNA, 387 bp, Glycine max
tcagagtcacctgaggcatgcaagcttgctcatgcgtttgtagctgaattcctgtaatggctctccacggattcgaatgcgaccttggagacagcgtcggagcggcccagcatgttggagccgacgcgggcccaccaagcagagacgcggtcgaggatgttgacgttgttttcgcagagggtaacgagatcgtcgctggcgatgacgcagcctacggtttcggtggccgagaagcggagggagtcgctgggggagtcgaagcagtcggagatttccttgttgcagtcggagatgagcttggagaggcggtatgaggggatggcggcaaggatggagacagcggcggcagcgacgtctgagtcggggaagtggatgtcggtgcggatg

SEQ ID NO: 86416 - DNA, 273 bp, Glycine max
  unsure (1)..(273): unsure at all n locations
aagcttagcacagttaacattggatagcagctttggatgaagagattatagcatactttatgaagcatacacgggagatgggccatttgcctcatagaaccagaccaatttgggtgatctgggtctatatgacgaaattagatccaaatggagatgcgtccatgtatcatgcgagaattgcagctaggggattcaacataaaccaggcttggattacaatgtaggttttgcgnggttgcaagactttgtaacgatagactcactgagtcagct

SEQ ID NO: 86417 - DNA, 480 bp, Glycine max
  unsure (1)..(480): unsure at all n locations
tcctctgagtcacctgccgcatgcaagcttgagaatggctagacatgatacatgtattgtttggtttggntcaaggataaaagggatgccccacattatttccatgacacaaatgcaaaaatgatgatttggaaactttatgcaaaactggtcatgcatgcacctatgcggacactcaagtgtcaaatttttatggtcatgtgatgctagggctcaagattcatttcctctattttagtcaacccaacgtttccaaaatatgttcttttatcaatttgtgcattcatccgagtccatttcgggcgtctggngaaatttcacagcattcacccttcaggtgtagacacattntccaaaaattggttatgatcaatgatatttttcaaagaanagttggaagtcatctctttccaaaagcatgtncgtttttagctagacaacttaaatttttctcttttcccnncttttttttttttcatg

SEQ ID NO: 86418 - DNA, 445 bp, Glycine max
  unsure (1)..(445): unsure at all n locations
cctttatactaagcctcagcttcctgatgatttggtcctctttagtgctctatgttgtgtgaatatgcccaaatctatggagcaattatggctttgtttcatgcttgattggtttgaattgaagggttgtatgggatggacctaggcctatgttgcattctgatgcaatggggcatgccacattgcccccattctcttgctattcatgccaaaacatgcgcccaccaantgctcntgaaatgtctcaatgacatatgagcatggttttgtaagcttggaattgtgggactgttttatatatatagggacaacatgacggatntaaaatgagtacccgaatgcaattctaggcctatgaacccaagcttntaatttcaatgcaaggaagcatgacttatgcgtaggaatctaaatnttggtntttgaatgtaaaaaggcatgaata

SEQ ID NO: 86419 - DNA, 473 bp, Glycine max
  unsure (1)..(473): unsure at all n locations
gcttaatggtggctgtggattgagacgggatacttcttatgtggccaatacatggntgtaaattaatcagtgttagttntaacaaaatcatagaaatatcagtgagagctggaatattacccgagtggaactctactctgcagccaaagatgtgtacaacttatgccagaactagcaatgacatcatcattcattgaaactgactcaggtcttgacatcatcatttgcttctcattgtcttttataagagaagtaaagctccccccctggatggcaccaacatgtctttcaacatttatccttcctaaaaactctntgaaaccaataaaaggactcattggactagtgggtgaactcagagaaaccactgacgggggtgaagtaaatgaggcaggagcaagcactgtcagtgttagatcttcagatgtcannattgaagcttgaagaagtaaacctgataataagaaacaata

SEQ ID NO: 86420 - DNA, 444 bp, Glycine max
  unsure (1)..(444): unsure at all n locations
ctatgcgcctatntccttacgaacgttcacttgcacaagacattctattatctattanaaangcacccatatacaatcaaggcagcttccttacctagattatttacatgtacttccaaggtgtatttgttatttacatcaccacgtctccttggctaaatttacatacatgcatactcaaagcactttggggtaccaaaaattgcacatgtgcacatcttggtatttctaaacctatacatacacaaacttcatgatgaatcttgactatctacacaataaggtgctacgtttcatgctcttttcagttttttttttttttttgctacctaaagtcgtatgcaaattcaagtatattttcctttgctgactaaaattgtattaaaaggtatatattctttttgaatgtattttctttacataacatgncaacatattatatat

SEQ ID NO: 86421 - DNA, 424 bp, Glycine max
gatccttaagtcacctgctgcatgcaagcttctcaaagctcatgagataatgttgtctttcgcagatgctaaaagaagagaagtagagtaccacccaggtgattgggttatgctcaaatcgcgatcatatcgacaagcttcagcatatggacctcaagctttcatggggaaactggcgaatagatcttatgggccatttcaagttctagagcggatatgtgcaatggcgtattgctcgctgctaccagaaggaactcatatgcatcccgtatttcactgcttaatgctgaagccattcataggttccccgaagtctgcgcacaacatacatctgtcaacccattgtgtcaaaaccagcccgcgattacaccattagccatactcaattaccgtataaccaatgaccatggacctcgagaagttc

SEQ ID NO: 86422 - DNA, 451 bp, Glycine max
  unsure (1)..(451): unsure at all n locations
tgcaatttcagccttcgggtgtgtattcttgtcctgttgaagttgcaaggctgaatcaaaataacagtccttgttattatgcaggagaaagaggaaacaaatattgcataaaaccataaaaaatgagtttttttttttttttttctgaatataaaaaaaaagagttaagcctaccaagtttatggtattgcttgcgaatggtgctcacccctgcatttnnnncacctatgagaaccaaataaggagaaatttgcatcataaaaaagaacacaaaagaaaagtggtagtaccaagtttacaattgcatcaacaagaaaattaaggataaaaaaaaatacttactccaagaatgcaataccaatctatgaaaggtggcttaacatgatggtttgagacatgtatatgaacacacacaacagaacgtgtggatatggagcaaaccttcaacacc

SEQ ID NO: 86423 - DNA, 471 bp, Glycine max
  unsure (1)..(471): unsure at all n locations
agctttgtccgtgaaaagtcacttgaaacttttttaaggtccaacgtcttaaaacggtcctctttgcttttatcggttaatatgtaccattcaaaagcataaaatcaacacataactttatcatttttgtaagaactacgtaggtctgatttcctcatcacaattgaggatacgtaggagcaaaagctccgcttttgtcgaccatgccaagagatcgttaatggtccaatgccttaacatttctctcctttcaaaaacaaagagattgttaatggtccaacgccttaacgtttctctcctttcaaaatcaaaagatcatttaatggtccaacgccttaaatgacctttgttcaattaaaatctatcttgtgaaanaagataaaaacaacttaaccaacatttagttctgaaagaactacctanngtctgattcctcatcgcaattgaggatacgtangagcgagggaaaca

SEQ ID NO: 86424 - DNA, 441 bp, Glycine max
  unsure (1)..(441): unsure at all n locations
cagaagcaggtgcaaatcgtgttctttcttgtgacctccattctgggcagtccatgggctatattgatattccagttgatcatgtgtatggccaggtaacggattatcatgtcactagcatatagtaatagcatggaagaataaaatgcatataatctattaaactcaaacaaacatggcttggatgtgttgaatatttgtaannnnnntttgatagcccatccaataatttgttaatttattgtatttatgcatctcaagtctgaattgaaatgaatggacaaccttctggaaacatgcttattttactgtttatagttatatgatcatttaaatttacgatttgtgtagttaagaaacttcaaatctagatatctttagacgtgctaaaatcttctattgttttatttttcccagttcagtcacacattggactctaat

SEQ ID NO: 86425 - DNA, 477 bp, Glycine max
  unsure (1)..(477): unsure at all n locations
catgcaagcttcgtccttcctaaaacaagactatcatttataaatgatacaanngatcaaaatggaaacctcaaggtacataataacaatccacacgcacaatcaaggcatacagtatacactaaatgaccaaaaagaatctgaagagtttcaacaacagcattaaagggagtgcataaaaattattcagcatctccagatcagcatgcacatccactcctctgctcattctctggaactgccgcctcatgaatcccttgaatatatctgcaattgaaattgaaacaaagagttatgaagtcagctaagcggctatctgcaagaattaaattggaaatcaaattcttatgtttggaacttagtaaaaaatgaatatttaatatcatgttatattttcagttgcacccttttatacagactctctcactctgaataattgaaaaatctatctgcacccaccattcttcattatacatg

SEQ ID NO: 86426 - DNA, 364 bp, Glycine max
  unsure (1)..(364): unsure at all n locations
tctacgcttactgtgccaacactgtccatcatatgctaaagcttattggtttctgattcttcgtgacctgtcataattaataataaatagaaattcacattatcttgaatttaccaaatattttgacactggtgataaaaggaaaaatattaatccatcagtaactctagtgtcatgcaaataccttgtagctcaatagcccaatccacttgggcaatcttcctgtgctntttatgtcatcaccggctgcagtagccaccaagtctgcatttgttgggctgcatgcaactgtattcaatctccctaaacaagaattctagaaatgaaaataaacatcataattgtccaacttatgtacttgact

SEQ ID NO: 86427 - DNA, 459 bp, Glycine max
  unsure (1)..(459): unsure at all n locations
agcttcttttggaccttgaacaagcaatcttgtcctctttcagaaccatgctatgtgctcgcgactggtccctttcttcccttcgcaacttgagttcactattgctaccccatagagctccgcgaaatttgttccggccatactcttccttgcgagccctcttggtctctcgttcaagggctcttgcggtaattgcattctcttcccgtaacccggcacactccttccgaacgtgtgtagcagccaacttgaacttctccttggcgagttttgcctttcctaactcgcttttgagagcttggacttcctcgtcctcttccggtgcttcaaaattctcttcgctgacgactnttaacttggcgagccaatctaaacctcatatgcgaactttcagccattcgtggtacccaccaatgatgccattacgaatgcctctaagctcttgatctttccttaacg

SEQ ID NO: 86428 - DNA, 320 bp, Glycine max
  unsure (1)..(320): unsure at all n locations
caagaatgaagctctgataccacttgtttgacattaatatattacaaactatttccccaattaaaattctattttaatttcaatgcaagttacaagttcccttaaaaatgaactattaaataattattcaaataaaacaatctgaatataaatgcatagcaataataaataaaagactttaatgaaagagaaagagcaaactcatatnnntncnggtcgaccacacccttgtgcctacgttcagtccccaagcaacccgcttgagaagagtactatatgtgtaaatacatcttcaaggtctgatcacacaatgacaatcc

SEQ ID NO: 86429 - DNA, 468 bp, Glycine max
  unsure (1)..(468): unsure at all n locations
agctntgagcatattcaaacgacaatatatttttatctcggatgtccgattgagtctcgtaatatatcgagaagctcgaaatggaataccaaagctctgagcaaattcaaacgacaataactttttactcggatgtcttattgagtcccataatttatcggaacgctcgaaatagaataccgaagctttgagcaaattcaaacgacaataacctttttactcggaagtcggattgagtcccgttatatatccagacgctcgaaattgaatgttgaagctctgagcaaattcaaacgacaataacctttttactcagatgtcggatagagtcccgtaatatattgagacgctcgaaatggaataccgaagctctgagcaaattcaaacgacaataactntntactcggatgttcgattgagtcccgtaatatatcgaaatgctcgataatgaatgttgaagctcggagc

SEQ ID NO: 86430 - DNA, 226 bp, Glycine max
gcggtgttcaatctcgagcgtctcgacatatgacgggtctctatcttacatccgagtgaaaagccattgtcgatcgagatatgtcccagcccacacaatcaacatcgagcgtctcggtatattacggtgactaatcagacatccgtgttgacagttattgtcgtctggaattgctcaaagcctctggcgtataattaaatccgctatagaactttcgggactctca

SEQ ID NO: 86431 - DNA, 444 bp, Glycine max
  unsure (1)..(444): unsure at all n locations
agcttcttatccaaggcaattcttggtgtgtgatagctccttcttccttggcttattccctagtggatggtgcctcccctctcctcttctcctttgccttccgctgcatctcaatggtgtaaaatcaccattgaaggacctcattgaagctcaaagatccagcctccatagaagctccacaagcaagcttccatcagtttgattttgtgaagtccttaagtggttaatatacagtgtgatccacaagttatgtaccaatccaaaatagaaaattggattgatcaaggaatcctatcatcttacaagatttaacatttccaatatgtgatattttacatgggtgtcaatcatagtatatggtggttcttgttaataagttgcatttagcaagaatttcttgagttgattctaatcaattctcatgtcantttattaatgtcttat

SEQ ID NO: 86432 - DNA, 295 bp, Glycine max
cttggaacccgaactctccatcgactatctctttctatgttgggatgagggtttgcgtgtgtggggcactccccattcatatcagtgtaatcggtgcatatcgccatatgcaatggccttgtgaccatgataatgtcggcgagccaggtataattcctaaccactctgatgaagtttgcattgaggagttcgtcgacatcgtctctgaacggatactgtgaactgctcccatcttccattgctattgtgattatgcgtgagcctacgggcacatggtaatactgtggctcattat

SEQ ID NO: 86433 - DNA, 452 bp, Glycine max
agcttgctgcatagaagataaagaatatgttttctgtgtcaatgtaactgttttttgatttttcctttgtgtatgcaatgtcgatcgatcttgttcaaactttaataggctgtatctagatgggcatgggattctctgttacattttggggtgttctggagtggactgaacaaattcacttgtgcttcaatcaaaggctttattcattaataaaaatgtttatcttataaaaaaaattgggttttgtttacactcaaaatcattacatgtcattcctaccgctccaggggggatacgaaagataattatgtatggtgggaattatttggccctagcttacaaagaataaaatatgactcttttattcgtgtgctaacaggtaattaagcaactatatttagaatctatccatattatgatacagacatcatgatgtaatgtagaaacacact

SEQ ID NO: 86434 - DNA, 224 bp, Glycine max
  unsure (1)..(224): unsure at all n locations
tattgtgccaaactcggctcaattgcatgatcatagtcctcacaacactgcaaacaaatatgctgttacttgccctggatcactttcttcatgtaagaaaatgtacaaagcttatgatctcctatgggcaaattgggnatctgtaaaaacttactgagatgacatttcatgtgccttnatctgcatgaaacggtggaacaaggaaacttaaacgttattttcca

SEQ ID NO: 86435 - DNA, 473 bp, Glycine max
  unsure (1)..(473): unsure at all n locations
agcttatcaggaatttctttctaactcttctatgttntcaaaaggttataataattntaaataaaaaagtattcaaaactaaccaaataaggttgtaaagaaagaaaaacatgatctttggttgaaaaattagttttttaagcacttagtcaaagagtgccatttggatgaatatccaaatgatgtgctaagacgtgaaagataaattaaggctttaaaggagaagattttgaaacatgaagaagaatcttctttgaaacatcatcatgatgttgaaaggcttcatgggaagtttaatactttaaagaatagtctctccatatttgttgaaggtactaaaaatcatgaaaatgttttaaaatacaaaagggaatccttttacatatataatcatggatatagaggaaagaagtatgttcatgatgagtcggtagatgtctattatntatgtggaaaaattggacatgttaagt

SEQ ID NO: 86436 - DNA, 460 bp, Glycine max
  unsure (1)..(460): unsure at all n locations
ntgtgtcccttaacaaaacggttggaatcgggactttggtatgaaataaattgtgttgatatttatcttgtgtgcgcttctgcacggttcccgacaaaaaaaaattagtcacggctttcagccaggctactttgtactaataccttggtcggtaacaaaaggaatctgttgtgaacttgtttggaatgtgttcattgatccgtgcggtatttgtgggtttcngctgactggtgaagcggttntttgtttccagggttattgcattcatgtttgagcttacaaatacaattgactacaattgaccaaggacccaattaaaaaaaaaaatcaggacacaattaaaaaaattcatggacctaattcaaattttggtaaaagtaggggatcagttcaatttaaccaaggaatattgaactcagaaaacacatttattagttatagaaatcagttttgacaaatg

SEQ ID NO: 86437 - DNA, 501 bp, Glycine max
  unsure (1)..(501): unsure at all n locations
atcctcttagtcacctgccgcatgcaagcttagactgaanaacttagtcatgaagaatcattgcaggtggtgttaaaatatgggtgtgtttttagagaaaataatgtgctctttgcttggaaagtaagcaacttgtcttattcgtggtttgggtcaattattagaagtttaactgatttgtaaagaaaaattggaaagaaataggttcactagttctgaaataacctcaaatcaagacttcctgagagtagatcaattaagcatttaagtgggactgcgggtgattntatcacttctatcactaaaatgcaaaagataatggtctaaaagaaaatattactgataaatgttttaacaagtgtaatattttcctttccccaactcatccactacaaagtaccaaagcagatgttccctanagtagtatctaactcatatntttggagttctccttanaggtagaagttcatctacttaactnttcttttggaactatatttt

SEQ ID NO: 86438 - DNA, 441 bp, Glycine max
  unsure (1)..(441): unsure at all n locations
tgtcttatgaatccncctgtgcttatgtccccagtacctggaaggcctctcatcttgtacatgacaatcttagatgagtcaatggggtgtatgctggggcaacatgacgaatccggaaagaaagagcgcgttgtttactacctaagtaagaagttcacgacctgtgaaatgaattactccttgctcgaaagaacgtgttgngctnnannagggcatcccatcgcctaaggcagtacatgctgagccatactacctggttgatatccaagatggacccggttaagtacatctttgaaaatccagctctcacgggacgaatcgcccggtggcaagtcctgctatccgagtttgatatagtttacgtcacccaaaaggcgataaatggaagcgccttagcatattatttggctcaacagcctcttaacgactatcagcccatgc

SEQ ID NO: 86439 - DNA, 424 bp, Glycine max
  unsure (1)..(424): unsure at all n locations
ctgcagctgtatattgtccataaagaaatatctattatattngctccatattagtatgggtaagatttgattagatataaaaaacatatactgaaaatacatatatagttattaaactcttaaaaaattcttaatgaaattcatatatctgcttatttatttattgattctatcatctattgcacttaacaattaaacttttttcgcgactggccattatgtataagatggtatgtacgtacaagaatcttcacttagtacgtgtttcaattaatcccactgccgttgctttccatcgcacaaagtcacaaaccctaccatctctcccaacatcaatattgaacctcatttatcttttttgaaaatgattngacagcacaaacatgaaatgtagtgcttcttgctggcacccacgtccattctt

SEQ ID NO: 86440 - DNA, 436 bp, Glycine max
  unsure (1)..(436): unsure at all n locations
atggtgacaaccacgactcttatattttaatggctttcacggctgccaatagttctgcacaaagtgctaaggtgcttccaatatgcctcgagaaacatcccataatgataccccagttatctctaaaagttcctccccgagctgaagcagctggtgtcccccagtagtaccatcataattacatttagcccaaccatacaaanganggcccatgtgaccatatataaattgatgagttctccgatggacaacgaaacacgtggttaatggtgagtcattttttttagttgatatataccaacttagaaccgatggagtaggtttaaaaaaattcgaaaattgtcactattgtggaaacacatacaatgcacgggtaatttattggccaagaatggaataacacgtataaaagacataatcataataatcatacgtg

SEQ ID NO: 86441 - DNA, 397 bp, Glycine max
  unsure (1)..(397): unsure at all n locations
agctngccatacgactagacgagtggcctgtttttttgcggagctttgaaggatgaatcgcatggccgacactattggcctgaccccctgccacagaataggaatatgtgtcgttgctctgaacaggcaccgcgtgcgcctatacggacactcatgtgtgtcctaagtatagccattcccagctttatcgcatgaatgataatccattttataccctaccctgaggatactacatatgtccatcattccagtactgcattcatgcccctgcatttggagcgtgtggtgtacttttatagctttctcactccctgtgcacacacattgatgatcaatggatgatgtatcttgaagtcagtgactaaggactcattatgcacttgtttgagaagacatg

SEQ ID NO: 86442 - DNA, 424 bp, Glycine max
  unsure (1)..(424): unsure at all n locations
tttggacaggctgtgccctactgtatggagacgtcgtgaatctgcatctggctaagatacgacagacgatgtcgtagttgtgtgggaagaaccattgcctgtgtcatgtacatatgctctgctacgtggcacattgacatacctacttggctgttgctgctcaagcgtgctgcctcgcagngcccaagaaatggctaagcgtcataggaacttgcatatgaactactggtatagaaacactgacgtgggccttgcgtataaatgcatatacatgcatactaaccaataaagactgctatagtcttagtatcgcatcatcgacaataataacaacgataatagactatatccgaagtataactatgtggatcatgatcaattaatagagccaaaactggaagaaactctaatagggaattcctac

SEQ ID NO: 86443 - DNA, 465 bp, Glycine max
  unsure (1)..(465): unsure at all n locations
agcttgtaagaagtatagcaatataggagaatggttttggttgattgataaggacttagattttaatcatgggttaaggagttgtacaactgatggagatatattacacttagttagggatgcttttgaaaatgagaatgagataaatgtttattttcatcatgaagtagatccaattttagaagaagttccacaaatgtggtacttggaatgtgatccaattccaaaagctgttgagaatgaggatgatttanatgatgtacctgntgctggccatgaggaaggtaagttttaattcatctgtacttggtccgacatgggtaccataattaattaatatgattatattttacttgatcaccattgatgcanatgttggtgctggtgagcanatggatgctggtgagcaaatggatactgatgctggtgaacaaagagatggtggtgagcagaaggatgctgaaa

SEQ ID NO: 86444 - DNA, 469 bp, Glycine max
  unsure (1)..(469): unsure at all n locations
ttagacgcaagcaactcnaaatctatgtatctataacccctctttttttgtattctcaaggtttgagaagtgaaaatgagaatggggtaactntggagcaaactctcatctcaaacaattctataacattaatctaaactctctcaaactgtttttacgacgaaaactctaccgaatcaaaatttgactcctcaacacccaatttaccctataaatggctcttgccttcacttggtcactcattntcctcctttgcacagcccaagctttcccacagtcctaaatgacatttcaaactaggattaactcactctaacctccaattaccactaaatccagatttggcttttcaaatcctcaaagcatcacactnttccactcatatcactacattctcaattnttaaccctatgttaactctacccttcatctctatcagttntccatcantccatttatcacacaagca

SEQ ID NO: 86445 - DNA, 289 bp, Glycine max
  unsure (1)..(289): unsure at all n locations
atcttaagcaccgcagcatgcagctgagccaatggactaccttgtattanttctttgatagcccctttgagcctatgttcccctttctttgtttcgaagctcattacaagccttaagtgaaaaaccatgatatcaccttacccttaaggaattttggagctttggaattgctttgggaataagtgtgtgtgtggggggggggggacttaactactatttacggcttttccgattaatttttaatcatgagaataaccctttgtcacgtcattcttatgctacaggttct

SEQ ID NO: 86446 - DNA, 456 bp, Glycine max
ccgcttctagtccttggggatcttcttccctctattgcttaaacttctctctgtaggtttagcttgaacttcacctgtaacatcatcaggttctggctcactcaatgattctctgtcgatctgcatcattggcttcttgcttggatcatgctcgtccttcatccatgtgtttagctcatcaaattgcacatccctactgaaaactatttgattcattcttggatttaagagctgtatgaccctgtgggattgtagccaacaaagatcatatgttcactcttgtcatccaatttcttccttgtttgatcaggaatatatctataacatgttgagccaaaaactcacatatgcttcacagatggtgttttccctgaccatacaaccttctagcacttgaagtttaagatgtcgcgcggtgcacctattcaagacatatgttgttgtgacaactgcttc

SEQ ID NO: 86447 - DNA, 109 bp, Glycine max
  unsure (1)..(109): unsure at all n locations
agcttctattaagaagctgatactctattctgatatcccaactaatagttcgggtggacttgatagataagntattaaatcaccttatgcagggtcatcttatcaccac

SEQ ID NO: 86448 - DNA, 429 bp, Glycine max
agcttctagttagttaggtgccagctggcaatgtcagctggataactaacttgcatactctaactactctgaatcgattacaatactcacatagttaggggcaggcacatgaatgattgagttcattcaaaatgttagtttgtatacctaagaaagggtttatttcctgctgactctataaaagaacaaaaaactgaaaaaaaaattctaccctaaaaatttatttattattggtttttaaatcttgtgctattattgggttcatctggttgggttgcggtaaaggatggcacactcgatactcaacctgatctgattatgttttttatattacaatctatctacctatcaccctgacacaatcagtcatttttgcggcaggctgatctgtgtcgctctcgcttactctccctcatctttctcgtctac

SEQ ID NO: 86449 - DNA, 423 bp, Glycine max
  unsure (1)..(423): unsure at all n locations
agacacgatagtgaaggaagcccaccctgtctcattttagaagctatataagcgngggtttgggagacaaaggtcaagtgttcgcgatatgcgaagatgatgttccgagtactttggattcggtacgaccatgccctcctgatttccagctgggaaattggcgagtggaggaacgccccggcatctacgcaacgagcataacgtaaacctttacggnncaaaagctttatagttgggcctaggctttagagattttccttttgataaggctatgtgtcttttgtttttgaatctataatacaaggatctctcttcactagttcctggtgtttacccattctcaatcatttgcatgtttacttcctttcatgcatcggccgattctatttcaagtcccactcctgatctctctcattaaccttt

SEQ ID NO: 86450 - DNA, 366 bp, Glycine max
  unsure (1)..(366): unsure at all n locations
atccttagagcgacgcaggctgaagctatctatggttgctcggattttctctccgcgccaccccggaagatctaagccaagcccctacttttgaggggcaacttccgccttatgacaactatcccggacaagacgatggnnaatgaaatacccatcctgtccccctgctccacctcaaagatctcgtcccccatgaactaccctcaccgaacttagtccgacatatcccggtctcacccatactctgaatagaatctgttcccttcgcggaagataagggaaagatcgaggcgcttgtacaaaggttaatagcagtcgagggcctttgcaattacccattctcggattttacggattctatgctcg

SEQ ID NO: 86451 - DNA, 326 bp, Glycine max
taacaatcagtgtcatactattgatcaaaacaaagcaggtatatttatgcaatactagactcaaaatatgcaacaaacactagacctaaatcagtgtcacagaaattggaagaaaatattttatccaagcacaaacttcaagccttattccatgtattggggggaagttatggctggccatatgggtagaggtgtcatagaggagcaggtatggaggaagtggacctgactgctgaagaggacaagttgcttgttgagtatgtcaggatgcatggtgaacgcagatggaactctgttgctatgcttgattgtaacaaacacctaac

SEQ ID NO: 86452 - DNA, 325 bp, Glycine max
  unsure (1)..(325): unsure at all n locations
agcttgtgcaaatcaagtcactcccgcattttatctctagcatgcattgtatgttggtctcgtcctttgtcacgggaagccggaaggtccatatcaccttcttaattgtacacatggggcactgcgcccccaaatgcgcaagtaagaagagataattttccgggctctcgtgtccgtaaaatgcattcatatcatgcatcgcataagcatctcttcataacatcataatggacatatcctgcatttgtcggntatcatattccggcctcacattctgcatgagtcatggcattatcatgcatatgcgctcaacaaactctttgat

SEQ ID NO: 86453 - DNA, 208 bp, Glycine max
  unsure (1)..(208): unsure at all n locations
gtgaggcttggctacaaaaattcattggctcttctattattcanaggtttagattctcagagagcacanatcccaaatttatcccaacggtctttctaatacacttagcttgctcactagctntttactttcgtttgcttttgaccttgttccatcagcacactttattctttttcttattttaacatacancctatttgttgcgtct

SEQ ID NO: 86454 - DNA, 345 bp, Glycine max
  unsure (1)..(345): unsure at all n locations
agctntaggagaaaccataaaaactaatgttgntcctaaacaaaaatcaactgaggaagcttcgccaagtatccccattaaaaaacctttattcaaacctttcaaaggtagggagaaggctaaacgaaaaattagggaacttagaaaaactaaatccttaattgaaggcgtaggtgacaaccatagtgaattactaaacacgattggagtttacttaaggtcattccagatactccccaagcctcagaaaatacttncaaaatcggtacaagaagcacctccacaccaactaccgttactaatgcacatagcgtcctcagctcacctaccacaactgcatacgat

SEQ ID NO: 86455 - DNA, 213 bp, Glycine max
  unsure (1)..(213): unsure at all n locations
tctagtgngcccagngttggaaaatgtccncaaagtgacctaactgcccctcttttgaacattntgcacattttcttctgaaacatcacaaaaccttacagattgtgcgggacttagagttatgcagttcaatctgaccgtcatgaacccatatgtcgaccacctattccttccggatgactctatattctttatccccatttgtactcactc

SEQ ID NO: 86456 - DNA, 290 bp, Glycine max
  unsure (1)..(290): unsure at all n locations
agcttgtaaagaactgaggaaaaatcaagatctatcttgtacgcacatcgttcgcgtgtatgatattcactccacaaggtttgaagtagaggagagcttcaaccctataacgcaacgtggcagacaaaagtgggcagtaaacttgaatggtcgtcattgtcaatgcggaaggtattctgcgcttcactatccatgttcacacattattgcagcttgtggttacgtgagcatgaactactaccaatatatatatgttgcnataccacctatctcatcttaaagcgtactct

SEQ ID NO: 86457 - DNA, 277 bp, Glycine max
ctggcgccctacacactctcattaggtatgctaggatggattgtctcatttctatgttagtgcatttactttgtgttatttggagatatgagaaatgctagtagcatactattttgaacacatatttttatgtttagtattagctgatatttattgaatatcacaaaattctacgagacagacttctatatttaaatgagctgtactcatgaacttgtatatcagtactggaatcgaataccgcatagtgcatctataaagactgcgatagattata

SEQ ID NO: 86458 - DNA, 458 bp, Glycine max
  unsure (1)..(458): unsure at all n locations
agcttaagctccttcaactgcacaaggctnttaatattagaagagtatccttgtggaaccttcacccgatgaagacactgacaaaaacttatcttctcctttttggacaaagtatggcaagctggaggcaagtaaattntcttcccatcagaccttggatgcaactgtgatcgtatccccatatcagctaaatcttgatgggtattcaagtcatccttcgtctttccttgaatgttaaggagcatcccaatcatactgtcaaaacatttttctccacatgcataacatcaatacaatgtctaacgtctaaattagaccagtacggaagatcaaagaaaatggacctcttcttccatatgcaactcttacttttatccttcttttgggtcttttcaaatacaatattcaggtgttgaacccgctgatatacctgctcaccagtcaacggtatcatgctc

SEQ ID NO: 86459 - DNA, 462 bp, Glycine max
  unsure (1)..(462): unsure at all n locations
tctcagagaggaagatccaacatgtaattgtctttnttttttcttttattacatttattattcctattcaataattcatatcacactttcttgattattatagtgttcctttgttttagtttagccactagcaattaagttaaagtttatgtgattgtgagtgtgagtatataattattgaatggttccaactctatgtgatttagaaagttatananacttgnnnaatgatatacaatgttgatgcatgtcattagtatttttttattttcctcatgtgcgttggtattatttttaacagagattggtacaatttgagaaatccaagcgcgtgaaggcattctgatgtggtgaatntgatggatgtattgaaagggcggagtccacccagggtatgttgttaaagaatataagagaaatatacatttagagaagatgtcattcttcatgctcttcaactcg

SEQ ID NO: 86460 - DNA, 472 bp, Glycine max
  unsure (1)..(472): unsure at all n locations
agctntacagaagtaccaaacattngcactaagcagctttcgtctgtcaaagatatactagtatgtgtggtgtctatggctttcctttcaaatagattgttgtgctgatttccaaaatcagaatccatttgcagatccatctcaatntttccaccatcaaatgtacaataattacgaacaccccttgaacatgatgaaaaatctgtctttagaacagaaaacgagtttgataagttaccctcaccacaaagttccatgttgtcttcttcctgtttggtttctgaacagcacactntttcctctactaaaacacctttactatgatgcttaccagcaatatgcagcanatgattttcattntcaccagagataacatcaagattcaaatccagagaaccagcctgatccactntatctttgtggtctggtgatcaacttttatcattattattatcattatgactatctatac

SEQ ID NO: 86461 - DNA, 468 bp, Glycine max
  unsure (1)..(468): unsure at all n locations
tatatgcaatgtggtaccatgtcagtgaataacctcgtctgtcgcctatgagtacatgacaagacaaaccatacaatattaagtcaagtcactctcactagacaatagcatagggagaccagtcagggttacagtgttttgcgagaatgcttcaaccatatgggatcaacataggcttaaaggagcactcaaaccgtgtgacccccaaggcctacactctgaanagtcctcagggcctctccctcctgattcaggtccaacccagaaaatattttagcacatagactctatctatgaactgtacaaaacacacgaatcctcaattgttctcaaaataattttaactcgtcgccctttaagggtcttatcattaactcgtcgctcttaaagggacttaacattaactcgtcgccctaaaagggacttagcattaactcgccacccttgaagggacttatgatcgtgtga

SEQ ID NO: 86462 - DNA, 468 bp, Glycine max
  unsure (1)..(468): unsure at all n locations
agcttcatcaatcacttaactntaaacttcgtctcttgcatggattgttcattgtacaagaatgttatcaagagccatgactacttcaaggcattcaaacagataagtaacttggtgtatccaataaacctgaagctcattgcactactagaaaacggtcagaatcgcgattcaacaacggtgcttgaccgtttttaattataatgatgttgaaacttaaaaatttcaacaacggtccataaacaaacgttgtagtaagctntgttttttttttttctaaatcggtgctatattattgaccgatgtagaaaccttagttagaaatacgtcaccaaagtcaacaagcttagtttctacatcatnttttaattaagaaacgttgtagtaagactagtttctacatccctttttaattaagaaatgttatagtaagactagtttctaagtcaacaagcttagtttctacat

SEQ ID NO: 86463 - DNA, 452 bp, Glycine max
  unsure (1)..(452): unsure at all n locations
agtcgaccaggacgagccttaacatatctatttggtggaacatcttcatcgtcttcaatcaaaaactccttgactntgtagcaattggccttttgatgtaggaaaggcttatcaattgctatctaaaattgggtctctagagtagttaggcaagagacttgtgacctatgcatgaagggcaaatgagggttgagcctttgaattcatcgaaatgaanntcccttgatcttatctcctctctattggtagatagcttcattttttagctcagatccatagtctgataactcccagtattaaaaattcaaactttattttggtttctccaagacaatctcctttgtttgaaacgtctctccagacttaatgtaatccttatgaagagcaacattgagggagaaaaagagacccatcaatcgttgaagattcaagagagtaaagaaaggaatctc

SEQ ID NO: 86464 - DNA, 472 bp, Glycine max
agctggctgtgggtgaccgacactccatagttctgacagaggcctataatcagagcatgaaatctcaaggccctgttggacttctccgggtccaccgggtgtctggtacgcacaatccctgcaaactggtaaatagcatcagagatcagctgagccacatgtacactcacatgtgtcagtatggtgtagaccagctgacactttagtagggtgaggtccgagttatggtcgctagggagaattttgctaagcagcaacgtcatccagatttatgtgagagtggtcatgctggtgcgcatgatccgcacctttctccctgttgcggtccgggcaaagtcctaccccgacatgcacaacaattggctaatagcctcctcatcaaagctggaggcctgactcctcctccggctatactcgcattgctagccttcctccatgatcagtggatgccccagaaactggctgatggaat

SEQ ID NO: 86465 - DNA, 367 bp, Glycine max
  unsure (1)..(367): unsure at all n locations
cgtcattaagtaccctcttcattaacaggaatggaactatctctttgtttctatatatatgagaatgttctctnccatgacacatccctcacaatcacagtgatcatctgtgttagaacatccaatttcaattgagtgttagagcataaagaatgtgactcggagcataggataatcagcatgttaacagaattttctgagacataacgatacaccaactgggnnccggaccaaccgtgccgaagccagataatacataactcgaagtgaactacagtgcggtaggaaaattgtcaacaaagattggtacaactctagaatacccttggcgcgtaggcacggtcgtgtggggaaatgattgatgatt

SEQ ID NO: 86466 - DNA, 464 bp, Glycine max
  unsure (1)..(464): unsure at all n locations
agcttgttacacttagaacaacaccatcgattctaaattaagtgcttctagctttggctnttgaggatgaaaacaaaaacaatttccaccaacaagtagtacaatctcgtaagattcttcaatttagcaggaagtgaattttctttcacatcactctcctaatccttccagaaaaaacttaaaaagtggcaaggctggaatcataaacccaaagcatgacaagacggaccttgtaaatgttagcatattcacggtatctttgcaggtgctgaggccgcacagtaaacccataggcatccctgttcacaccaaacacgcattaatttccaaaaataaaaaacagaatccaacaataaaaagataaaaaaaaaatcaacagagactcaaaataattaactgcacacatacaagtagtacgaaacgaaacaacgaattatagcanaacgcaactaatatcgcccatc

SEQ ID NO: 86467 - DNA, 461 bp, Glycine max
  unsure (1)..(461): unsure at all n locations
tggtattaattagttcaaataatgctttcagcttctgtattattcttaaatatataagatatttccttctccctattgcattaccaggttaaatttatgcaggaaattaccattataagagataaaacttttgttaacgtggttaattaacaagaatttctttaaataagcaaattgttgcatagtaaatcattggcttaaaattggtaatataaaaatgaaagggggtctatataattaacggttgcatatatatataaaaaaggaatcaatatatgttagcagccaagattgctgtaggacaacgatggaaaacgttaaattaacaataaaaatataaaaaaatcaataaaacatagagaataattgaaagacaagtatatatagataaacactgacatgcaaaatgaatttaaatagttggctattttaaatntattaaatcatagtttcacacacac

SEQ ID NO: 86468 - DNA, 486 bp, Glycine max
  unsure (1)..(486): unsure at all n locations
gatccttaagtcacctgatgctgaagctttacatgcctaacgaggagtctgtttatggattaagaaaacatagctagtagcagtgctctgggtcaaacacccacatgactacatgaaagagctgagagtatttcgggttttacaaaggaacgtaatttggatattccgaccacgccaatgtgaccgaggttcagtgtatgctacgaaaataacatacatttgatgataggatattggttacacagtctctttctctaaggtttttcaaaggaagcataagacaagcaatggcggttccaaagtcagaatagatgcaaagacgtgatgacactaacatgaaacaatcatagaaccatgattacctcgaatgaaaacgaatgatcagattanggatttcgttctctaccgtaaccgcaagccaagttggaaattctgcttctgttgaagggttactcttcgtgtgggcttccaatggagaacaatgat

SEQ ID NO: 86469 - DNA, 435 bp, Glycine max
  unsure (1)..(435): unsure at all n locations
ggcctttaaacccgctctaggaagttctcaaaagcctctcaggaatcttctctgtctataaatcgaagcatgtgtaacacatgttgtaactttgatgaatgaaagccttatgagatacacttgagagttccactgttttcccttttgtgattcttcaatgtcgggctccccacttctctgtttctatgcctgcattaaagcagactgttcaagcttcttatccatggcaangcnngtggcgaagcttcttcttccttggattattacatagcggatggtgcctcccctaaactcttctcctatgcctttcgctgcatctacatggtgaaatatcaccattgaaggacctcattgaagctcgtagatacagtctccatagaatcttcgcaatcaagctgacatcagctatgctcgagatcttgcgcggcttaattt

SEQ ID NO: 86470 - DNA, 372 bp, Glycine max
  unsure (1)..(372): unsure at all n locations
agctntagtaactgtgtacaaccacaaatttttcatttagtgtccttattgatatgttctacagttggctttgcatgaatttctaattggcataacatatgattcatggatatgatctaggcattctntctttctttaactatcctaatgtatattattttaccatttgcaagccctttgagccaaacactagatattttgttggaacactaacctatgataaaagtttcctaccttaccttatgttaggagagcaagggtgttttgatggggattttctatcattnggcgactaatgttatgttaatactntggttttgtgggtattaaaggacctattgatccatgatgattatgcacagttatcttgat

SEQ ID NO: 86471 - DNA, 346 bp, Glycine max
  unsure (1)..(346): unsure at all n locations
aaaaggctntgaagggaccccttcagcgagttaatgttatcaaattgtcaccccaggttaggcaccaccacatgcatcaatggtgcccttgaccttacatctaaacaaaaatgcataacatattgatcctttggaagttcaatggccaccatatgaccttccacccaactatatacccccaacaattggaaacttgtcaaaaagttacccattattaactctcaaccaatggtgcaaccgcatggctcaaccacaaaataataaccttgctcctcaaggaaattctttgaactatcaagccacttcaaacacccatctagtggcgggggggtttcaaccaacacct

SEQ ID NO: 86472 - DNA, 441 bp, Glycine max
  unsure (1)..(441): unsure at all n locations
atcttaagcacctgggctgcagcttaatcctgtttttagcaacctctcctactctgtctgtatattcaactgaaagacatctaccaccagagctacaatcaggaaaaaaaaataccaatcattcttactgcttatataaaggatatttaaccaattaatgtactatttagaannattttgaacagcataattgcttactttccatgagtattttccaagcaaataagccttgtggttggatatactagctccccctttggatctctgatggcagcctcaatcaaatgaatgtccatggttccatcttcattgtttctaactgttgttggatgcacccctccaagggttgcaatgccgccattctcataaatgtgtatgtgggaattgtctcccagaataacttcacttccncttatgtcacaatgcacaagcactgatata

SEQ ID NO: 86473 - DNA, 457 bp, Glycine max
  unsure (1)..(457): unsure at all n locations
ctaagctagggggaatttctcatgatgatngaatacacatacaatttgcattgcacattattttttaaaaacacatgcatctccaacttgtatttttataacatgtacaaaggttacaacttaaactaatctgataaaataaatatttataattagttatactatagtaagtaaccttaacctcgatcggaaaccaaattgtaaaaggccatcaaaatgagagaggatgcatgtactaagattgtaagtaagaggctaaggcataggaaatagtaagttttatataataaggagggaaatagggttccctcatggaccttgctagctctgccagtggaagcagtagcaacaatttgttgattattacttgcacaaatactaattaatatatcatacaagtactacacagctgggtgacggtaaaagagaacgtgcaagttctttccagtagtaatct

SEQ ID NO: 86474 - DNA, 459 bp, Glycine max
  unsure (1)..(459): unsure at all n locations
agcttatcctttactttntttagagcgttcttctattgaaaaaaaggttgatggatgaagtaatcggaatgacaaatgattacggttgcggaaaccagataaagtcgggaaccttttgaatcaaagtagcgccgagtacttcgactacagggggagggaagcttcgtaggaagtcctttgtttttgcttttctttttcttttaacttaatatgttgtttgtttactttgttggaatgttgtgtttagttgtgtggctggtttgtctatgtgtgcgtaagcttcataaagggtccgtcgactctttctagaagatttaaataattaagtgtctgtagatgcaaagtagtgtgttntaatgtatggtgttctttggttttcgtctccatctttgtcgaggaataaaatttatattcacctccctctttgttggcgtcagatatattattatattctcattc

SEQ ID NO: 86475 - DNA, 451 bp, Glycine max
  unsure (1)..(451): unsure at all n locations
atatacatctgcaacgtgaattctattacaactgtatttcttactaactaattcagccaactaactaactatttctgttaaagctgtttatactgctaagagatttgtcaagtgactgatttctataaatgtaatgacctcaatgtaacatttttttgagaaatgacctgtttttagtagtcagttgtcctatcattgattacttatacagaaattccttgaaagttactttttgatataggatgacattgcttgaaatcccagttatatgatgctaatggtataaaatttttctgtttgtcagggtggtgttcaaagagttcatttgttggatggcactattattggagttctgttgttataactgttcaagagagatgggatgggaacaatggtggctatgtaggaaaaaatngccctctatctcatgaattatttccttattatgaaa

SEQ ID NO: 86476 - DNA, 459 bp, Glycine max
  unsure (1)..(459): unsure at all n locations
agcttcaagatattgtgaaaacaataatgtattatacatatacataaagtacaaatagatatagctttacacactactgtatgattgtgataattaaaaaagaaaaagaaaaacagttttcttctagtaggaaactaaattcatacctaggtaaagtttttagaatatctagttacccatgcaaaatttcagcaaccaaggcaagatagaaacattgtattttaaggataattagccactgaatgtgtccttattcttcgcacagcaatgaggaacaaatccaaatgatatcagataatgggataacaccagtgacaaatatacaatagtactaacagcaatcaactacggaaagttaanggaatattgattttaagaaataatagacacaccatgtgtccttattcttcacagaacagaggaactaaaccaataaacaggatagcggaaagaatgaat

SEQ ID NO: 86477 - DNA, 449 bp, Glycine max
  unsure (1)..(449): unsure at all n locations
ntactgtattaagaagcatccatggagggctccatatacatcatcattgcctttatcttattttctgattgtcattttaatgcctctttcaagattgaacacgggaaataattttccttagaatgtaaacttggcgtgctctttaatgagaaaaacaagatgtgtctcttcgctgtacatgttgcaaaccagagaccgaatcatcaaaccccacaccnatntnttatatatatatatatatatatatatatagccatcaattgttttgagaccagcaaaagatatctcttgttctattctgggaaattcttatgttccctcgtaacaaaagaaatagtttgctatgtttcagaatggcgttaatactgtantaagagatatcaatggctcacacgactgaaatgctatatattcaacggtatggagaacatccagaatttctcattcta

SEQ ID NO: 86478 - DNA, 461 bp, Glycine max
  unsure (1)..(461): unsure at all n locations
agctntagactgaatgtagtgtgaatggatccaatctttgccttanaatgtttagttaatagttttttcatatcaataaaagaatattaaattagaaaggtaagttcttaacaacttaaaaatatttctataaatttgtaaaaagaagcatctgaaaatataacaagtactttattataataaaataatgagatttcattttttttttccagtagacacttaaaatatcaactagaaagattggccctaatagtttaaatttattgatccattatacaaatatcaagttcatgattaagcttttcaaagtgtgtctcccggcattcacttttggttcgtaaatgacattgacgtgtattttttcctataagcacataagggttaaaatatgtttatatttcttgaaaagttntagattttgcatnntaatatctaatagtttccccccactttntagtcta

SEQ ID NO: 86479 - DNA, 464 bp, Glycine max
  unsure (1)..(464): unsure at all n locations
gatggtgtcgagaagaaatcacatgtttgtcatcatcatttatgnggagaatgtgaatgtatgtatacatgattttgatgatgtcaaagaagaatctaacaaggctgcttcaaatgataagcatttgcttcaagaataattcaagattgcttcaacaaacaaagccttgtttcaagattcactaaagaccaagccttgccttaaaacaaagtgctttcaagacatgcaggctctggtaatcgattaccaggaagtgtaatcgattaccagaagacagggttgagaaatagttgttgaaaaaggttttgaatttgaattttcaacatgtaatcgattaccatatgtctgtaatcgattaccagcaacgaaactttggaaattcatattcaaaagtcataacccttcaaattataactgtgtaatcgattacacatacattgtaatcgattaccagtggaaagttt

SEQ ID NO: 86480 - DNA, 477 bp, Glycine max
  unsure (1)..(477): unsure at all n locations
cgatcttaagtcaccgcggctgcagcttaaccctctaactaggattaatgaattattggtatgaatgtgttcnttttttatttttgattcataactcatggaaattatatcatctctaatgccatagttgtccgattcacaggatgatggatgctttgctattgctcaagcactcaagtctaatgatgatgtagctgtcacatccctaaacattggcagtaacttcctaacaaaatttgggcaggtgatgtattttatgctattgctataacttttgcttagttntacctctccttttattttattttcatggatctgaatatacttcaaattcanggtgctttggctgatgcaagagaaccatgtttggagatgaccgaaaaggaaatcaacatcttcctctagaagacattatattctgtgataaattcttgatataaactagaagcagtttttttcatttctttttttggatat

SEQ ID NO: 86481 - DNA, 450 bp, Glycine max
  unsure (1)..(450): unsure at all n locations
tgacacatgccatatttctctaaaagaatatactgttcttgtatgagacaaagcactgtaaaaaccctgcacattgttgggtacttgaatgtccctaaaacaccatatgacatctgtttttgcccctaattaagttcctcctgccttacataccaatttcattggggtctcagatatttaggttcactgaactgttctggtagatatatataataaatncaaaggaattgaagtactttttggatggatggttttgtttttatcatagggggaggaatgtggagaaagcaactcttggctcttatgtccttcacagcaacaaaagaaacaaataatagtccccaccaataagagcctctttgagagtccaatgtttggtggcaaagtttaaataaaagggagaatgttcaatagccacggtacaaagccatacaatatctgaatatggta

SEQ ID NO: 86482 - DNA, 478 bp, Glycine max
  unsure (1)..(478): unsure at all n locations
agctnttctttcatatcaatctgtctactgactaacaattctaaatgcaagttcacattcttgttctttctttgtctaacatacacacttgctcaaacttcatgaaaagaaacacaaattccatcaaaatcatgcacctcattcaaaataaagacatacacccattttttacaaaaagacaaaagtgtttcactgccatgtcatcaaaaactaagttaaactattcaaaatgctggatgatgaccaaataaactacccataaaaaaactaacaaaaaggaattactgtactaaaaccatgaccataataataataatctgaaaggcacanaanatatcattaggattttaaaaatcctgtgatcggtcctgagtatcatgtgtctaaacatcctcctcgtctggtaagtgaagcatangggtagctggaggagaggtgttcggagacaggactggtgtagtctaatcctcaggagtgg

SEQ ID NO: 86483 - DNA, 458 bp, Glycine max
  unsure (1)..(458): unsure at all n locations
tcgcttcttctggaccttgaacaggcaactaactcctctntcaaatccatgctatgtgctcgcgactggtccctttcctcccttcgcaacttgagttcattattgctaccccatagggctccgcgaaatttgttccggccatactcttccttgcgagccctcttggtctctcgttcaagggctcttgcggtaattgcattctcttcccgtaacccggcacactcctttcgaacggtgtagcagccaacttgaacttctccttggcgagttttgcctttcctaactcgcttttgagagcttggacttcctcgtcctcttccggtgcttcaaaattctcttcgctgacgactgttaacttggcgagccaatctaaacctcgtatgcgaactttcagccattcgtggtacccaccaatgatgccattacgaatgcctctaagctcttggatcttccttaac

SEQ ID NO: 86484 - DNA, 473 bp, Glycine max
  unsure (1)..(473): unsure at all n locations
agctntntggagtagaaacatgggaccaactcattntatttcagaaagtcgtatctagtcaagatctgagagatcatacaagtttcctagcggtttctaattatatgggccatcaagtctatcatatgctgacaatagccgagaagcccatgaatttcttcggggacggagtangtgtccgccattgccttggccttggctaacaatcggggaagttcttgactcccgttcaaggtaagagcaaaccgatccatccacatggttgcctcttggtgtaaagagtcgatcacccttcctctagcctctttntccgcgtatactngggcatattcgtccgcgaccctatgctcgtgggccgtggctagacttaactcttcttggtacttggcgatgatagctagcatggtggtctccgtctcacataaacgctgagacaagctccctttggaccttgaacaggcaactaactcctc

SEQ ID NO: 86485 - DNA, 439 bp, Glycine max
  unsure (1)..(439): unsure at all n locations
cctgttgtcattgtgcacaattgcaggagcaacgagtaacctttctatctnttccttccgaatcaatcttgcacaactgcagggagaaagtccaccaaaattaaaacacaaaagcaatggcataaattaatccattggaaggcataaatatagaatagtcatacaacaacaacaacgccttatcccactatgtggggtcggctacatggatcaacttccgccataatgtttatcaagtaccatacttctatccaaatcattaagtttgagatccttttttataacctctcttatagtctttttgggtcttactctgcctcgaattgtttgccttctctccatctggtctactctccttactacagagtctaccggtcttctctctacatgcccaaaccacctaagtctattttccaccatcttctctacaataggcgct

SEQ ID NO: 86486 - DNA, 474 bp, Glycine max
  unsure (1)..(474): unsure at all n locations
tgccgcatgcaagctaggatttcctttagtaaggaatctatctcttgttgcatcaccctagacttggctcgtaaacaagccacacacctagtgcaatgcttatggacatctttcttcatatggggccaataaaacttttctttgaggaagacaagggtctngtctatcccaaagaggcccatgagcccaccctcatggctctctttcacaagtaatttcctaatggatccttggggtatgcagagctttccctctgtgaacaaatacccttcatccaaatagaatacatcttgggcctttttcccacaactctcacaaatgggagagaaatgttcatctaaagcatacaagtccctaatattatcaaatactataatttgagctcctagggagcataacaatgtgtgtctcctagagagggcatcaactaccacatttgttgttcctctttgtattgataactatggaaatgtc

SEQ ID NO: 86487 - DNA, 468 bp, Glycine max
aagccattatggtatgacactgtagagcgttcaacttgtattttttaaccatgctaccatgattgagatcctgtattgatttgacacacctcaacatagccttcccgcaacttgaatagagactaagctggatctttaagacgaggtgcagacccaccagattttactgtgagacacagcagaaacagcataactttgaaattatatatgcagcagcaaaatattgaattgctatgactgatgataataaatttgatcctaaaattaggactcatttcttgtcgaagatattcacttgtagcataccatatctcaatggataggtgtaattattctactgcatttatcgagggtaactacaagtagttccaccttcaatactaatgagaagagcaatgaactattcatccctttgtgttatcaatgcgagacatttatacactgatattccatataatcaactataga

SEQ ID NO: 86488 - DNA, 469 bp, Glycine max
  unsure (1)..(469): unsure at all n locations
tagctttaatataataatagcaatatatacaatactagttntattntatactaactntaaatagcctaactttaggtgttatgtgaataaaaaaactntaaataatagcatttaagtttgttttaatcaatactagaactgatattctcttaacctgccaaattactgagttaacagttgaaacaaatttagatgttacgaaaattaaatgaaattctaaatctgaattttcgtanataattattgtcataattntatttaggacacgtgcaaatagtatgaatgttnttttttgtttttttttaaacaaatccattntatatttgtaacctactttntccccctcggtgcggtatatacaataagatatttgccaataattntactaaaataggtaaaagtaaaaatattattntcatataagggtgaagtattgttctgagcgaattaaggtatnttgtgatctaaa

SEQ ID NO: 86489 - DNA, 454 bp, Glycine max
caaggttacctaagtgagatcagtccatattaatatcgtgtatatattacagggcgctagtcggaaatgaataattattctcctctcctacttaaccaattgctcatatcaaacttttgttcgtttggcgaaactcaaagtgcgacatattccctcattctagttaatagagaaaatcgccgtgaaacatcttgtaaagtgaatacacaacgggagactcttagtatgttaacgtaactcgttggaaccagaatattgctgagagcactgaattatttttttcatgcagattacaattgtagatgacacggacacatcgaaaaaacatttgatagaactgatatcttaacttatgcaatggatcattgttccctcgatttcatagccttttctatattttacagaagcagaaataatgcgatggatactgttacaaatgaagtatatataatgt

SEQ ID NO: 86490 - DNA, 450 bp, Glycine max
  unsure (1)..(450): unsure at all n locations
agcttcattctacacctgataaagaggatgttatatttgcacaaaagagaaagcttcctaacaaaaaaattttgtgcaggtggacattcctctagtaattctgacttaccgcagcctcttatccctcttccattcccacctagagcaattccaaacaaaaaaatggaagaagcggaaaaaggagatcttggagaccttcaggaaagtagaggtgaacatacctctgctagatgccatcaagcagattacaagatatgccaagtttctaaaggagctgtgcacccacaaaaggaagctcanaggcaatgaaaggattagcatgggcagaaatgtgtcagcattgataggtaaatctgttcctcacattcctaagaaatgtaaggacccaagtactttctgtataccttgcattattgngaacagtaaatntgagaatgccatgctagatct

SEQ ID NO: 86491 - DNA, 460 bp, Glycine max
  unsure (1)..(460): unsure at all n locations
cacctaataaaagctagtagaaatgtttgttccagcatattcttaatatgtaattgcctaagcaacctttatttcctgaaccagaagtgtatttgaaattgatgttcttgcacttttttgtggagatgtatgcatctcagtggagaataccaaatacgcttaaactgcggtaaacctccgaagatcaagatctttttaaaaatatctttagttaattaanaaggttacaccagcaatccataaaggattgaaccgtaaaaacaagaatagaagaaaagaaataacagtatctgctaagagacaaaccgtgcctggcaaaggactgaaggagtcaagtcagccaattggttagactctccacaaacatgcggaaaaaaggcattgatgaaattcatccttcaatntgcaaatctcctctcttaactcatgaaaatgagtatgctgtgaatggccttcatta

SEQ ID NO: 86492 - DNA, 437 bp, Glycine max
  unsure (1)..(437): unsure at all n locations
agcttctaaaccagcaatgtttgtgccttttgtttataaattagntgcatcaacatcaggaaagatgccctctccaaagatatttttgcaaaggtccatatggtatctgcaatgcatgagaaaagaatcaacaaccgcaaatattaaagaatagtgtaataatgaaatattaaataagaggaaagaatcctgtcaatagaggagtatataaagtgaacagtgaggatgaggaacttgctctgcatcaatttctgaggagcgtatactatcatttgatggagccacctgaaagaatgcaacttcagtgcatacttgaaaccaccataatcgagtagaactgtcttcattgatagcagttctcttcatgtactcctggtcataagtctgcacattaacaccataggttccaatgtagtactctttgacgtatttggcat

SEQ ID NO: 86493 - DNA, 429 bp, Glycine max
  unsure (1)..(429): unsure at all n locations
acaccccttctatttcatgcctctcttcttggctcatcttataagccacgaacttgtcaagagctctccaatcagtggtcactttctttgtagtgttggataaacccttctgaggattatcatcatcttcgttgttattaatattgcctgatattggggacactactgagctttgtttctttgctaggggcaaagaaggactatctagatgaggaagctgcnccnatgttgttctgcatgcatgaagctcaaattattattatctgcttctatgatctcttcttgcttgtacatgaaattttgagctcctgaaaacctctgaggttgttgccttaacataatgtcaatattaggtgccaccacagtgctgctgacactaccacatgctttgtgttgtcactgtataaacagtttcgtgccatcctcaat

SEQ ID NO: 86494 - DNA, 467 bp, Glycine max
  unsure (1)..(467): unsure at all n locations
agctttacttcaatattttccaaatcatcttagatcttatngaaatcagccaattgctcagtgactgttcttgattatgtcatcttgaaggtgtatagttgttgcttcaagcatagctgatttgcaagagactttgtcatatacaaggattccaatttcagccacattgaggttgttgtcctttctcttgcaacttctcttaaggctttatctccaaggcatagaatgattgcacttctggctctatcaatcatttctgatttctcctttgagcttagagattctgacatcgtttcttctcctttaagagcttctgcacagccatgttgaatcaagatttcttccatcttgatcctccataacccanagtcactttcccctgagaacttctcaatatncgtatttggtgttcccatctnntcttgtcttgatgtccccacagaatgcgccacttgttggttcttcta

SEQ ID NO: 86495 - DNA, 431 bp, Glycine max
  unsure (1)..(431): unsure at all n locations
tgcgggagaagatggaactgtgtgagaggcgtagattgtttattttgtgttgcgagaaggagaagtcatttgtgttgcggtgcggagggagggaattctggcttcgcgggattttttatggtttgaaaattggaattggaaagaaagagtgcgtagtaccctggttgtgtgtgtcacagtcttggagtntggtgggcgatgggtgaaatctgacacccatgtggatttggttcaccttttttaatggctaaccgtgtttatagtcttcatacgtgaacctgccaaactgttatattgtttactttgaagactgtgccgtgaattgaatttcattttccctaccgaacttcttactattgtattaataatattctaatagactatattcacatcctgtgttattatgtatcgtgggtttaatactcaatatt

SEQ ID NO: 86496 - DNA, 469 bp, Glycine max
  unsure (1)..(469): unsure at all n locations
gcttgtggaatatataggatcatgatacttctttacttactcttaattcagagatcacaatagaatacgcccagttacctatgagtcagaagacatctttacttggaagaatgaacatagttaaggtaaaaatgaactcatttcacctgaagcaagcaagtccttccatctattagaaggcgagttccagctacttcttcctctgcatatatttatagcaagaaagtgaagtataaaaactcaggcagaattcagcatcttataccttatgccgtgttctgccattgattacttaccactgcaacacatatgcctcgtcaaaattgtgaagcataacattcatgagaataaagtgaagtttagtaacaacaaccattgattntaatatgagagcacacgaataacanaatctgaagctatgactactatttattggagctaaactaaaacctaatactgaaaattcaaa

SEQ ID NO: 86497 - DNA, 466 bp, Glycine max
  unsure (1)..(466): unsure at all n locations
cgactcttctgactcatgatgtagatccatgtcattcttgtttattcatcaattatggacaataaataccttccaccacctagagaaggtactcttgcaggcccccaacagtcagcatgaatgtaatcaagagttcctttggtggtgtgaattgctttaggaaatttaatcctatgttgcttgccgaaaacatagtgctcacaaaatttaagttcatccagtttctgattcccaacaactgctgcttttaaagtatcatcatacctttttcactcatatgacctatcctcatgtgccacaattgagttaagtcaggtatgctcttattggatcttgatgcaacagctactataccatcatcaatgcatgttgtaccttgaagtatatagagattacccctctttatacccttcatcaccattgtagagcctttctaaattntcatgaccccattntcagtgctaca

SEQ ID NO: 86498 - DNA, 439 bp, Glycine max
  unsure (1)..(439): unsure at all n locations
agcttgatggagttgtgagctatatggaactgagtggttgagctatgagttgtgagttgtggttggtgtaagttaagaattatattttcaaaatttataacatatttgttggcctttcaaatagcaaacttgagtaaattatgtcctgttcttcaggcacttgacaaccaggttggctttggggtggtggattcgtttgacgcaatctctactgaaaaactacttaagaaacaatgcattatacaaggtaattgaatatgaattgttcactaattcttttccttccccaattttttcaacattgtaagcttgttctgtatttttgcttcaatgtttagtcaattggtaaatcatgattgactacattactttgtactatnttacatttgaacttttcttgaaataattnntgntttcaagttaatataggtatgctcat

SEQ ID NO: 86499 - DNA, 462 bp, Glycine max
  unsure (1)..(462): unsure at all n locations
tccatcacaaggagtgcagggtaattcgcccaggctagctgtagctcgctcatgcgagtttcttgctcagggttgacgttacattntagcccaagccagttggatgctagcctaggcaaatatagggtcagatagcttaaggaaaagaccatcttgccctttcttttggctntgtttctagatctaacaaacaagcatcaaaacctataaaatcattgatgaattttcatatttaaacaaaaatattagtaaatgtacaatatatataaacaactagatttaagggtagtttataagaaagctattacaatcaaaggataagtgctaacaatttaatcccaaaaaatcattgaaatttgatgatataaacactcacattcccttctggattgataatataaacactaacaatataaatactcacattcccttctggattgataattgtctgtgcgggaatat

SEQ ID NO: 86500 - DNA, 464 bp, Glycine max
  unsure (1)..(464): unsure at all n locations
agcttgacatagttcataccctcatatacttctgatggtattagaataaggtttttactcactgtaatgcctctaatgatagtaattattatcattcaaatacttcctagaggcatgtgatgtatttttctggtttggctctgcttttgtccttttatcatttatcatgattntgtgtttggaagtagctttaccgagtaaaaaagcatgtaatagcccccccatatgctaacatacagctgttacttttttaaacgagtataataacatgggtaatatatggcagttatttctgctagtactgtctctgtgacctcaagattgagcaagtctcttcctatttccagatgatgattaaaggggctcaaggaatatggaaagaaaatggttgacttgatgtattcactcaatatattgaggagtgagtcttggagaatctagatggtgattcagctgatgggatg

SEQ ID NO: 86501 - DNA, 437 bp, Glycine max
  unsure (1)..(437): unsure at all n locations
tcattgattntgatattgacatagaaagatcattgttctttatctacagactggatgtggtcagataatatgcatgtttgcccgactacctccgacacgaatggtaaggagcaataatacatgcatacatagcattgggatttttttctgtgcatgtgccacattcttgctgctagcgttgaatgccatgtatttgcggcacctttggnacnngcgaacccattggcttcattgggggtgctttgtttcggtgaagttccacttccaggtgaagtagataactctatataacaccaatgtaactgttgagacgatagccatttatgcttgttcaatttgactgcaactgcaattccacctatatatgagcggagggacttgtcactctgagcgatatataacaggtatgacgattagtgccattatttgacattttt

SEQ ID NO: 86502 - DNA, 471 bp, Glycine max
  unsure (1)..(471): unsure at all n locations
agcttgaagaaacataaagaagtttgtcttttacttgtccaactctcttgaagggcatttgtattatgtgttgcatcttagtctctattatttcatatgtgcatcatgcatcatcatgtaggagtaaaaagaaaggttctaaagttagaaaatctcttcaatgtttaaaaatctctattntaatcgattagaagctaatcataattgattacacaagtgtttgtagcttgcagagaagtttctcatatcattttaattgattacaaacttatcataatcgattacacagttcatatgagacaatgattggtttttcaagagtctccactntaatcgattaccaggtgatcataatcaattacttctttctaanagtgtttcagaagtgatcaaagaacactntaatcgattacatcaggaatctaatggattacattattnttgaaagtntccagatttgggaaaacactt

SEQ ID NO: 86503 - DNA, 488 bp, Glycine max
  unsure (1)..(488): unsure at all n locations
ttacgcgaccttagatactaagcttttatccaggcaattcttggtggtgaagctccttctttcttggcttattccctagtggatggtgcctcccctatcctcttctcctttgccttccgctgcatctccatggtgaaaaatcaccattgaaggacctcattgaagctcaatgatccagcctccatagaagccccataagcaagcttccatcagatacgactttcaaaagtcaatgaaccggcaagcannctccggtcatatccgcttgattggtgcaaaccaaccggcgggcatcatgcacagtgaaatcaaatttccaatcatcattcagtgcaccttcaaatagtacaccttcactagataattgggtcaagtcatagaatagggattgctcaatgaccttttttatcccagaaacctcataaatcaaagtgctttcttgaatctngaggttagaataanaggctntaactaattcagaataaaca

SEQ ID NO: 86504 - DNA, 464 bp, Glycine max
  unsure (1)..(464): unsure at all n locations
gatcctcttagtcacctgcggcatgcaagctntattctactacaagattaacaattaccattaattttcattcgtctatgataaaaaaaaaagaaaataatatttttgtcatgtctgcacttaattgaacaattccacatcccccaggtggcggctatcgttactcattacggatctttaattttctccggtcttccggccacgctgtaggcaagaatatgttccatcacgcattaatacattaaaaaaaggctaaccatattttttttattaaatgatttaacaattttttttactgttagtggataaacaactatattttactccaccaaataatcaccacttgtctctagttaaattctaggtttttttttttttttttttttaattggaaataaaacatttgctcgcatatgttaacacaagggtttttntggttgatcaccaaaatggattcttctatg

SEQ ID NO: 86505 - DNA, 399 bp, Glycine max
  unsure (1)..(399): unsure at all n locations
atgggcatgttctatatctacccagggtctcccactttgggacttgttgatttgggtggctcatcgttgcaggttgtggtagagatagatggtgctggggatgatgtgcacatgatgagattgaagctcagctcaacagaacctcggattttggcatactcattgcctgcatttggcttaaatgatgcgtttgatangcagtttctcatgctcaggaacaatcaaagtgtggaaagaactgagctcagacatccttgtctggtatcaacttttgcacaaaactatacgtgcctttcttgctctggattggcttccatttatcagaaaaatcgcagccaacaccaggaaagtgaacattattctttacgtcttaccggagaacttgatagggagcaatgc

SEQ ID NO: 86506 - DNA, 406 bp, Glycine max
  unsure (1)..(406): unsure at all n locations
agctngaaggcaaactggatgcattggttaacttggtaacccagctggccttgaaccagaaatatgtacctgttgcaagggtctgtggtttgtgctcctctgctaaccaccatacagacctttgcccttccatgcagcaaccaggagcaattgagcagcccgaagcttatgctgcaaacatttacaataaacctcctcaacctcaacagcaaaatcaaccacaatagaacaattacgacctctccagcaacagatacaaccctggatggaggaatcaccctaatctcagatggtctagccctcttcaacaacaacagcagtctgctccttccttccaaaatgatgctggcccaagcagaccatacattcctccaccaattcaacaacaacaacaaccccagaaaca

SEQ ID NO: 86507 - DNA, 452 bp, Glycine max
  unsure (1)..(452): unsure at all n locations
cgcgcacccatagaatactaagctggagctgaggaagtgttgaagggtgaaacttcctgctattattgttgtccacagagtggtacctggagatatgtcgcggtggtcaggagaccttggggacgtcaggtggggtgctattgcccaaaaccaagcttgaccaatcccgacccaacccgggcatagtcggtcagtgagaacctgtgatgtacctaagcatgcgagctcctggcagtcaacagatnaaaggaaacaagaccacaaagcaaggaggcttgtggtggctggacagctatgaattttgtgtaatatgtggatggtggcctctggtaatcgattaccaagggtgggtaatcgattacaaggcttaaaattgaggacaggaggctaagatggtctctggtaatcgattaccaaggggtgtaatcgattaccaggcttgaaaacgaagt

SEQ ID NO: 86508 - DNA, 448 bp, Glycine max
  unsure (1)..(448): unsure at all n locations
gcttcatgatgatgaatcaagttgattcatgattttntgataatgacaaagatgttgacaaaaagcccaaagaatgatttcccgattcaatcaagaacaaattccagaatcatgagaagtttgatttcaagattcaagaaaagatgaattccagttcccagagaagaaatcaagaagacttcacaaggggaagtattgganagaatttttcaaaaaacaaacatagcacaatttttttttcaaaagagttttcataaaattttctaagttaccagagtttgtactctctggtaatcgattaccaatttcctgtaatcgattaccagtgggaaagtttgatttcaaaagttntcaactgaatttgcaacgttccaattgatttcaaaatggtgtaatcgattacaagatattggtaatcgattaccagtgcatctgaaccgtggaattc

SEQ ID NO: 86509 - DNA, 455 bp, Glycine max
  unsure (1)..(455): unsure at all n locations
tcactcntacatctcatctctagcatgctttttctttctttacccactcctcacgttnggttttttaggaaaaaaacaccatatctaaacgcgccgcatgggatccctatcgcaccagatccaaatctagaacgatgggtgatcaagaggagacgcacgaacagatgaaagccgacatgtcggctctgaaagaacaaatggcctccatgatggaggcatgttaggtatgaagcagctcatggagaggaacgcggccactgccgccgctgtcagttcggctgccgaagcagacccgactctcttggcaactacgcaccatcctccctcatacatagtaggacggtgaagggacacactgnggcacgatggcagccctcacctgtgatacaaccgagcggcttacccttatggattgccgcctaactattcaccacccatcttgcacgaagatgtgg

SEQ ID NO: 86510 - DNA, 421 bp, Glycine max
ataacatatcttggtgtaatctattattcactaagctaatagcgtccatttatcttggttatttggtttaataatgcattcattaattcaaagtttaatatttcaaaatgaaactctggttaaaaaagaataaaacatgctagatgtattttcttttttttttcacccttaaattcatgtcctttcctgctgttatgatatcatatattctttgtttaatcttgatcaccacatgattcccgctaaggtcaagagagtatctatacttatgtctgaaaaaacagaactaagaatgtcttataatttataaggaaaaacaatgaaccgagaatcttcttgtgtgaagactcaacgcaatagagaacctggtttggaattggttggagcatcacttctgtgtgtgttggttccttacgttctc

SEQ ID NO: 86511 - DNA, 473 bp, Glycine max
  unsure (1)..(473): unsure at all n locations
ctaagctgtgtgtgatatgacttgttcttatagaagaggagctatttcacttcttaaagggcatgcatcaccacctcaaacattatccgtactatgcaagcttgtataaaagaatatatatttatatatcaacagaagtaggagtatataacaggaaagaatgataatttaaaagagtaatgttatgaattatgatttaattaccattatgacatttgattcgttgcantaagaacttgttgtataacaggataaaacgaaagtaacagctatttgctcaccttttttttttccgggtcaacagtacagtaggaggcccaaaagcaaaagcaaagaccccgtggcccagtaataaacacaaatggcaattactttctgcgggtccataattatttcatgcaccttnttaaacttctgccctgaattaatcatttagaatatgtaaagactaaatcgtcaacatgattcattta

SEQ ID NO: 86512 - DNA, 474 bp, Glycine max
  unsure (1)..(474): unsure at all n locations
agctntcaacatatgtcttcacaaataatcttcacacagcaganaactaacaaaactacccctcatatctcccanaaccccatacccacgataatcaagagggaaagaagtccacccaaacctgaattttcgaagtcccactcgtagccacgcacttcacgaccccgaaaatgcccttctttcgcgatttggagcagaaatgagcaccaaaggttggagncttgttggggtttcaatggagaatggaggagaaggaaaaagcaacgtgaggaagagggagagcttctgaattttctgttttggctgagtgaggagagagaaaagctttntgggtttaaataaaaggttttcctctttntctattattntattcaagctctgccacatgtccctatttgattggagcataaggacccactntttttctttntgactgtgacccatacgcggtcacaaaagtgagaataatctgac

SEQ ID NO: 86513 - DNA, 454 bp, Glycine max
  unsure (1)..(454): unsure at all n locations
tattggattatggggcacccatcatatgtggtactaggtgttgatcgggtgatggcacanatcaactatcccatttccacaagttaggcataagcacaccatccccagttgcccacctttaaattgatctcacgcactcctacgtagcccttatcctcgttcctctcagcaccgggtccccatcaacccctccaagctttcacaatatccaaaacaattcaattncnttgtcatgaaactaccctaaaccaagaaaaacagagtggaggcagaaaactctgcacaaaactcattcaaattccacagtttttcctactcacatacctcagtaacattctctttgttcccattcgttagccattggatcgccttgaacatttaaccgatggttcctaatacagaaatataaagttttaccgatgggatctgctagaaaatatctagaacacgagat

SEQ ID NO: 86514 - DNA, 473 bp, Glycine max
  unsure (1)..(473): unsure at all n locations
agcttgtaagattatggngtatccatcacatgttgtactaggtggcggncgggcgatggtgcacagcaagttttccacatccacaatgcgcgcataaacccaccatcccctgttgcccacctccaactgagctcacgtactcccacgtagcccatatcctcgtttctctcaataccgggtccccatcaatcctcccaagcttccacaacatccaagcaaaacaacatacaaacagcacaagctatcacagccaagcaaaacagagcaaggcagagaactctgctcaacacaccaactaaaatcatagcttttctcacttaaagacccgagtaacaattccttcgatccaattcactaaccgctggatcgactccaaaattntactggaagtctatagtgcatcagcctacatnnttgaccgtgggatctacatgcaaacatccagaactcactatgcactgctctttccacac

SEQ ID NO: 86515 - DNA, 487 bp, Glycine max
  unsure (1)..(487): unsure at all n locations
tctttcggaccttgaaactcagctgcttgggagcttctatggaggctggatcttgagctttttgaggtcctttaatggtgattttccaccatggagatgcagcggaagacaaaggagaagaggtgagaggaggcgccatccactaaggaataagccatggaagaaggagcttcaccaccaagatgagccttggataagaagcttggagaggatgcttcaatggaggaaaagaaagagggagagaaagaagaggggggagcacgaaattgaaggaagaaaaagggagagaagttgaactttgagttgcgtctcacaagactctcatttatcaaagttacaacaagtgttacacatgtttctatttatagactaagtagcttccttgagaagctctcttgagaaaacttccttgagaagcttctntgagaaaacttccttgagaagctagagcttatctacacacacccctctcataactaagctcacc

SEQ ID NO: 86516 - DNA, 457 bp, Glycine max
  unsure (1)..(457): unsure at all n locations
agcttagcatagatttctcaacctccattttccataggatataaccccaacatgacatgtgcttatcatgcggaagttccggcgcattccattgagcattgtatgaccctaaaacctaaggtgcaaactctgattgatgcaggctggctgagattcgaggaggaaaatcactcgtgagttctaatgtcgtcaagcaatactttgtatgatgcttggagcaatttgaaagttgttgttagatgtctccaatgattcattaggattttcaggtttatgccattattggaaacaatagtcacaatgctaataatatgaataaattcgatgtccttgtctttcattctctcacaattacatctttgcttatttaactntaactggaatgtgaaagtaagtcgttggttnttttgctcaagtgaatctgcgctcctgaattgatctcaagtctgttcaatca

SEQ ID NO: 86517 - DNA, 444 bp, Glycine max
  unsure (1)..(444): unsure at all n locations
tgtgtgaagagatagacagataaagactncagaaaatatttttgcaattgtctatctgctaagtgctaaccttgcactaagcgctcagtcttcaagcgctaagccgagcttgctcgcactaagtgcatagacccctgatgggttggctgaatagttcagctaagtgcacatcactacgctaagccccacatctttgcggtaattgaattttaaccagtgggcttanctggatgatgcgctaagtgccacttcttctcgggaaaatttttattgtagcagtgctaagcgcgctgtcctacgctaagccccaaatccattttgtaacttgagtttttatgttgggcttagcgggctaggaggcactaagtgccaatctcttacgggttttgaattcttggaagtgcgcttagcgtgactgttgtgctaagccttaattagtctctg

SEQ ID NO: 86518 - DNA, 353 bp, Glycine max
gctttggtgacacatgctgcgagagtttcttgttgtgtgtcttcagacggaaattctggatgtctccaagcaacactgactcatacgactgtggaggattcaatacagctttagggttgaggtctaagtcccgcgattgcctcgaagatctgcttctcgctaatgtatagggaggctctaggttgtcaactcctggtgtgtccattgtcttcacaactacattatcagttattgaagactgctctttcacatcttcctcttgctgcacctttgtctttgcaattacattcattcccttgtccaatgcagttctgctgtcgtctagttctctacaatcatggaaaacaccattg

SEQ ID NO: 86519 - DNA, 467 bp, Glycine max
  unsure (1)..(467): unsure at all n locations
acagcttaattgaatntgaatacatagtgattgcacattagatatgttctatgaattaaatcctgacaatttgtcttattgaaattactccaaccaagtgtttgacaaaattcctcaaccaatcctctcttaattttctcttttatatatatgcaattggctttaattgtggttacttaatttgataattctcatagtctataattttactattaattactcaattnntacaccgtccttgtggagatgatattttacttatcacttaattatttgtgtgatctggtacgccaaaatcccaacacataccttaaacctcagttaaagcaccacccagccatatggcaagaccacaaacctctactgtgaacaattgtgccattattgacctctactgttaatcacacccnacaccacacatcgaacactacgccaatgacgctaccttataccacatcgaccatatc

SEQ ID NO: 86520 - DNA, 422 bp, Glycine max
  unsure (1)..(422): unsure at all n locations
agcttacaatatgtttaaatccattctctttgtaaaatcaaatcaaatctagataagataagataagataagatctagatgaaataatatctagatgagatcaaatctaaataatatctagataagataagatctaattttatagaataaattagtctgccctcttcaagtccaagcccaattctagattcaagcccaatgctagattcaagcccaatgcttcattaattcctgaaattagattaaaaacatcaaattagctgaatgggcccaaataataaaactgccaaattaattgacaattaagaccaatcaataattaaaatggtgcacaaaggggttagaaaatagaagataatgatggcacatcacttggatgttcttcacggaaacaatnttcctcagcatatttaagagaatac

SEQ ID NO: 86521 - DNA, 429 bp, Glycine max
  unsure (1)..(429): unsure at all n locations
ngctctanattacattgatgtttgtatttattgtttgatgttgtatgccattnttgttttaagagtagcattccttggtaaaactaactttccaaatgtttgccttcgcaggaaatggccccgaggaagcttgcctcatagaggtccaagaatgataatgcggccgaagggactatttctgctcctgagtatgacagtcaccgctttatgagcgctgttcaccacaagcgttcgaggccatcaagggatggtcgtttctccgggagcgacgcgtccagctcatggacgacaagtatactgatttccaggaggaaatatggcgccggcggtggacatcactggttacccccatggccaagttcgatccagaaatagtccttgagttttatgccaatgcttggccaacagaggagggcgtgcgtcacatga

SEQ ID NO: 86522 - DNA, 428 bp, Glycine max
  unsure (1)..(428): unsure at all n locations
agcttcttatccaaggctcatcttggtggtgtatctccttcttccatggcttattccctagtggatggcgcctcctctcacctcttctcctttgtcttccactgcatctccatgatggaaaatcaccattaaaggacctcattgaagcttatagatccagcctccatagaagccccacaatcaagatcccatcagtgaccttgactggtctccctatgatattacctagtgcgagtgacttgacttgctagtgtgtggtttgtcttgtcatgtactcctaagcgcccgacgaggttnttcactgacatggtgccacatngcatatangattgagtcttagtgtatntgttgcataacgcttgtgtattgttctatatngatttatntgatgatattgggttttgactattgagtatgcgaatgttctg

SEQ ID NO: 86523 - DNA, 410 bp, Glycine max
  unsure (1)..(410): unsure at all n locations
ntaaccaattcaggataaataggcaattgtaatgacatatatggtagaagacctaagttctgaaaggcttgaatggaatcaaaggtttcagcagaaaagaattccatatcaataaacttatggccgataatggaacgagatgagaaaagaatggagtaccatttctgctgttcgtcggaagaaaacactgtggaagaggacaatgagggtggaattggtgctgntatgcgctagtggctccggaacgatgagctcttgaagccgaagcagaggcggaagaaccctttcgtttctttgacgattctgccatttgaaggagtgtttgcagatntttatcggtgatatcaaaagagaaatgaataagatgaagatcgcaatctacgggagtngattngatggagaaatgagtg

SEQ ID NO: 86524 - DNA, 463 bp, Glycine max
  unsure (1)..(463): unsure at all n locations
agcttattcaaaatcattttagccaatataatgttagaattattgtactttntaagcagtggacacatataatatcttgcataactcatcaaacttattagtccatcatcaaagtttaatatcttttattatcattaaaagtaagatgttttacttccatgtctttggttccaacaagaaacaatgtattatttatgcaaaaaaaatcaaaatcaattttgatgtcactgttcaaccactcttttaatgaccaactgatccacttcattggtgagctgtcaaattgaatccattccttagtaagagttttagatctaaatagatatgatgagtacacgacaactattaagattgaaacgtgcgtgataaataatattacagtccatgctagtaatattattagaagtaataaagtattcttttttatgaatacttagcanatacctcaaaatgaaattctatt

SEQ ID NO: 86525 - DNA, 449 bp, Glycine max
  unsure (1)..(449): unsure at all n locations
tgaattagaagtgaaatccgtctttctgtacgacctcaatatgtattataaaaaaatctaattaattntagtcaagttagataaattcatttaaagaataaagtatgcgtagtattatattattttacataatttcaacttaaaattagaaccaacatttgtgtgtaccaaaaaaagaaaagcccaacatttgttgaagtaaagcacaatgacaatggaatantagagccggatgcagaaatttttattggaagcaagctatagttataattngattacaacaaaatttaaatatatttttaaacgtcataaatgagtgaatcttgtttttggttcttaataaaaacaattataataaattaattttatttcttggtatatgttactccttctaaatatttatttttttattgtggccttagaaaatttctcatttatattagcttttg

SEQ ID NO: 86526 - DNA, 476 bp, Glycine max
agctggcctaattaacctaaaatggagagataatgattattaaacacacaaaatggaagtattaagtgtttattacttatacttaacaaaaaatacttataacactacaaaataaccataaattggaagagtttgatacaatctatgcaagttttatacacaaaagttagtcgtattcaccgactaatagtgtacagtgcaaaaaccaagcataattctacctcatcatccaacacaggtaccagaaacataaaatacttcaaatgcttaggcagatgacatattgcttttgactgttcaaccaagaggaccatgatcatgaaggaagatggagaaatcaccagtgaatctgaaatcagtgaagaagaagaggtagaagagcttgaggaggaagctatgcaaggtaatatgctaaaggtgagaaggctattgtgaagtcagatgcagccactgaacgacaccgaaagagaatatat

SEQ ID NO: 86527 - DNA, 428 bp, Glycine max
  unsure (1)..(428): unsure at all n locations
tggttcgaggtacttacccgttgaagatcgaagaacgatgaatatctattgaagaacgttgaagaacggtcgaaaccttcgcgaaattccttacggaaacgttacggaaacgttttggaagcgcctcggcttagatattcttcacggaaacaatttttccaagcaaattcaaaagagagagaagtgcctaaggagctgaacccttttcttcttcacttcctccccctataatagcaaaataggggagatgcttgccacccatctcgcccaggcgagcagggttgcttcctccagaagcaacagccttctggaggaatcttctggagggcacaagtgggcctggttgctacttgcacccccatttttactaagtacaccccctgcctttgtttttggtgattctttnttcgaaagatacggaaacgtac

SEQ ID NO: 86528 - DNA, 453 bp, Glycine max
  unsure (1)..(453): unsure at all n locations
ccgcatgcaagcttcatgatgaatcaagattgattcaaagttggtttgatgataacaaagatgatgacaaaggtgatgacaaaaatctcacaggtcactcaaagaatgagttcaagatgtttaagatagaatcaagaacacttcaagattcaagaggaaagttgaagaacacttcaagattcaagaggaaagttgatttcaagaatcaaaattcaaggatcaagcttccatgaatcaagatcaagattcaagaatcaagataagtatgaaaaggttttttcaaaaactgagtaacacatggatttttctcaaaacatgtttaccaaagagtttttactctctggtaatccgataccacattattgtaatcgattaccagtagcanaatggatttgaaaattttttcatatgaatntactacgttcaaattgatttcacaaagctgtaatcgat

SEQ ID NO: 86529 - DNA, 448 bp, Glycine max
  unsure (1)..(448): unsure at all n locations
gaagcatgtgatcctttggcatcatcaaaacattagtcttatcctttgtctacataaanatcagatacatgatcaaattcaaactcagatttagattcaatgcataaggaatgacaagtatgcagatcagataaaaatggatgttntctaccatgaagaacagaatcaaaatcaaacatattatcatcaacaatctgatcaattatctcagcacnataaacaaaagatcctcagatggatgtttcatggcatcaagaatgttaaaatgaacaacaatatcaccaaattccatagacaatgtgccaacataaacatctatcttggttcgggctgttttcataaatggcctgcctaaaataattgaaactgaaccatgggaaaatccctcttccatattaagaacataaaaatcaacaggaaatataagttaccaacccgaactaacaca

SEQ ID NO: 86530 - DNA, 445 bp, Glycine max
  unsure (1)..(445): unsure at all n locations
agctntaacctcatcgtccctcacagnctttatattttttagccaatccaatccttgtggtcggactctcagccacttatgatagccgccgatgatcccattactgctttccctaagctctctgtcctttcttcacgccgcatcccatgccttgcgaactccttggagtaccctcgcgttgaggtcactgataacccgtgcgatgaaaggcgtgatgctttcgtctaatggcgctcctctcatgcggtagccaagctgtcttatggcgagaacgggattataattaatacaaccccttgttcccatcaagggatacattggacatccttcgcatgaagatagaatcttgattcttcttccttctagcgagggaaccatatatcagacgccccccccatgctaaccaagaggtggtcccaattcgcctttcctttttcacgcatga

SEQ ID NO: 86531 - DNA, 431 bp, Glycine max
  unsure (1)..(431): unsure at all n locations
tcgagcgatatcagtccatgaatgaggcaactttgatatcttgtttgtcccaagcataatgtcaggcaaaacgattcctttcaatttcatgtcatatacaatgtattcaaattcatggatctgatttgaaatagattttccatcaatcatttgatactcaatcattttttcacaagagtaacatcttatacctttttcaacagatccatatttcaatccaagngcttccataactcaacagaagttttggtatggcaaacaatcttatatatgttatcagccaaagcacttaaaatgcgtccatgacataaaatatctttatcagaaacatcatgctcaatgggtgtatcagtttgaactatatcagtagaggaagttgaaggttttatttctcttttagaatcacagagtataaatccaattcagtatgc

SEQ ID NO: 86532 - DNA, 451 bp, Glycine max
  unsure (1)..(451): unsure at all n locations
agcttagtgaggctcagagctcatgagtagctctttttggagactctagccggggtcttggtgagttgttccatgactttgaactcgctctgttggataatgtggaggaactcgttggcctcctcgagtgatacctctttcttgccggagccctctctcccctcggtgaattccttcgtcggaacctcctcatccagtgcggggatcaccttgacantttgtccttcgattacttttgttttccctctagcgtttgcgggctgcgttggcaggccaaggggtgcgaacacgtgaccgctgtgggctatgccgctcagccccgtgatgttggttactttggccgatagtgagtcgacgtcggtagctccttccttcataccacccggaggggtgtacctccatggaactgcgtgactgttcttggtaggaaacgggtctaacgcatgacact

SEQ ID NO: 86533 - DNA, 445 bp, Glycine max
  unsure (1)..(445): unsure at all n locations
tctcccccattntctataaatagggggagaagtgaagttattttgtgttagccccttaggcacttctctctctttcgaatttgcttaggaaaattgtttccgtgaagaaaatccaagccgaggcgcttccgtaacgcttccgagatgtttccgtaagcaaatccgtgaaggttttcgtccgttcttcaccgttcttcatccgttcttcgttcttcaacgggtaagtttcgaatccgagactttcaattcatttcttatttttttaagctttcatctttatttcgttcattttcgatttcttttctttcgtctataacgcgcttttactgtttatttaagccgttntctcacctaataaatgataaaatgaacttcaaccgatcatttgtgttgtaatctcatntaatcacttttaatacgaaatctaaccgatcgttcatgctat

SEQ ID NO: 86534 - DNA, 171 bp, Glycine max
  unsure (1)..(171): unsure at all n locations
tagcacgcgtaagtgaaatttggcttagcgccattctcgnctaatagcggaagagacaatcttcttgctgaaagagttgatgacgcgccgagcgcgccataacatggaaaattctattatatattcatctcactcggtaagcggatggtcccacgaaacattaccctatcc

SEQ ID NO: 86535 - DNA, 194 bp, Glycine max
tgcagcttgagacattgaagaatcacttgcatgatcacaagagaggatgaagaaacaggcggataagcatagaaaggagaggaattctgagataggtgacttggtgttcctcaaattgaagcaacataggcagcattctgtggctgcaagaatcagcccgaaattaagcgctagatactatgggcctttcgagg

SEQ ID NO: 86536 - DNA, 276 bp, Glycine max
  unsure (1)..(276): unsure at all n locations
tgtgcttagcaagattcatccactaagcgagtcttctttccgcttagcgagtaagaggaatcttggagagaatatgcctcgtcagcacgccctcagtgcgtcacaagctcgcccaacgagattcttgtctcttcttgtgctaagcatgcctggctggctgagccaaagatcacttactcacgcttagcgcgaaaatggtgctaagcgcgccttcgaggnnaaaaaccctttgtaagcctgaagtgaatagaaagaacggggggctgaacagactga

SEQ ID NO: 86537 - DNA, 271 bp, Glycine max
  unsure (1)..(271): unsure at all n locations
ccttgaacaagcaatacactcctctttcagtttcatgctatgtgctcgcgaccggatcctttcttcccttcgcaacttgagttcactattgctaccccatagagcttcgcgaaatttattccggtcatactcttccttgcgagccctctcggactctttgttcaggactcttgcggtcaccagcatcttcttcccgttatcttctgtcccatatcctnaacccccacaccccgcttcacctcctcactaatcgcttaatgtacaaccctat

SEQ ID NO: 86538 - DNA, 215 bp, Glycine max
agcttgtcaaggaagctacctaggctataagtagtagcatgggtaacacttggtgtaactcggatgaatgagagctttgcgagcactcaactcaaagttttacttctctccctcttttactccttcaatttcgcgctcccccctctctctttctctctctgtgtcttttcctccatcgaagcatcctctccaagcatcctatccacggcacattc

SEQ ID NO: 86539 - DNA, 228 bp, Glycine max
  unsure (1)..(228): unsure at all n locations
cactatagaaactccgcttccacacatggtgagctaaatcctctgagtggtctttcttttattacttgangcaaatacctgtatatctatttaatgatgtcatatggcatctctgtccaacaagagggatctgaggatgatgcttgaacaggattaggctcgactatcacgaggtatcgcggttcagtatttttggagtccacctattaccacgaacatctgttaccg

SEQ ID NO: 86540 - DNA, 105 bp, Glycine max
  unsure (1)..(105): unsure at all n locations
agcttctcccgtgaactaaacttagcttaagcataagctatattgtaaaagttctcccatttaatttgcgcttatgagagaacnccactccacctctcttggtta

SEQ ID NO: 86541 - DNA, 240 bp, Glycine max
tagatactacgcttgcatgttgctgcatgatcccatggctacagtgaagagtccgctgcgctctaacccaataatgatctcaaacaatacggtttcatctttgttgccacactaatcggggtttagacattaagttgcaagaagatgactcagtgaaacgaaagaaaacagctagatcgattgctccatcctaccaccacgaatcaacttggtgacgattttattggacctttggcacgc

SEQ ID NO: 86542 - DNA, 295 bp, Glycine max
  unsure (1)..(295): unsure at all n locations
aaaacgttcaataactgctggtaatcgatcaccatatatgtgtaatcgattacacattgcaaattttgaattcaaattttaatagctgttgtaaatcatttttggccactggtaatcgattacatcctctggtaatcgattaccagagagtaaatctcttgaaaaagactctntaacttaaatttcttggccaaaacctttgctacttcaatacgaactcccttctattaatatacccttctaagactcacagatggctcgagatccatctcgtcaccttaatctcttattgccc

SEQ ID NO: 86543 - DNA, 74 bp, Glycine max
  unsure (1)..(74): unsure at all n locations
tttgagcgggtntcctctattcgatcgttgtttttgtnttttntaatgctcctctagaagcgatatatcaaata

SEQ ID NO: 86544 - DNA, 75 bp, Glycine max
  unsure (1)..(75): unsure at all n locations
gctttgacttgagtcatcaagagattataaatangtgaccatggcatgagnttcattaatcatctatatttcaat

SEQ ID NO: 86545 - DNA, 451 bp, Glycine max
  unsure (1)..(451): unsure at all n locations
ttgtgtgtgcatttacttgaactgtgtaaaatgtaaatatctgctgtctatttttcattctttacactggattctaagcacccaccggtttgcgtacaaaaaggggtcctatacccgagttcatgagaatgtaaggaggctaggtgatttcctcaccacgctacgactatgactacactcaccttagcgaaacctcttccagaactctccctctctatcccgcccacaacatacatgctaacgctcgcaactgatggctccgattcggatcgagtcttactgaacaattttacatgctcaacgctcgtctcccattgccatcttatctatcgatcactatcaattcttactcacttcatccatcctggacatgctcctactatacagcataggtcacgatccanttcttctaaactcggaatctccccactttgggccctctctctttcct

SEQ ID NO: 86546 - DNA, 515 bp, Glycine max
  unsure (1)..(515): unsure at all n locations
gcttatgcgcatatntccttacanacgttctcttgcacaagatcatttattaaccgacaaaaaatgcacccatatacaatcaaggcagctctgttacctagattatttacacgtacttccaaggcgtatttgttacttacatcacacacatcttcttggctaaattcacatacatgcatactcaaagcantttgtggtaccaaaaattgcacatgcgcacatcttggtatttctaatacctatacatacacaaacttcatgatgaatcttgactatctacacaataaggtgctacatttcatgctcttttcaagnttttgctacctaaagccgcatggcaaatcaagtatattntcctttgctgactaannatgtattcaaattaagagggagtacatttttggaatgtatcttctttacataacatgcaacatatntatgtatattttttttgtgagacactttgactaccaaaaattatatgtacatatatncaagtattttgctatcatacc

SEQ ID NO: 86547 - DNA, 422 bp, Glycine max
gcaagcttctttgagaaaacttccttgagaagctagagctcagctctacactctcgctctaataactaagctcacctctttgagaagcttccttgaagagattcctaaagaagcttgagctgtgctacacacacctgtctaatagctaagctcaccttcgtgagatgagaagctagaacttagctacacaccctctataatagctatgctcacccgcatgacacaatacatgataatacaaaaaatgtccctactaccaagactactcacaatgcctcgaaatacaaggggaaaaccctatactactagaatggccgaaatacaaggcttaaacgaagggaaaaaacctattcttatatttacaaagagaagcaggctcatacttagcccatgggctcataatataccctaaggctcatgag

SEQ ID NO: 86548 - DNA, 290 bp, Glycine max
ctcatatgaaaagataaagactaagatgtaacacatagttcaacaatcagtttgaatgccactcaagaaggatgggcttgtaaaaaacaaaactttttcaagcattacggataaggcttcatgttgctccgcctatatctaacaactgaatgatggggagggacactgaagattgacatgcacgaaaacattgcattgatctagagatagaacatagtgagtataaaagaaacagtggtagtcttagcacgttagaacaaagaagaaatttgcattttcttagttcaaag

SEQ ID NO: 86549 - DNA, 411 bp, Glycine max
atcctctgagtcacctgctgcatgcaagctgtgctaggtactacacacttggagcctatttctctagtttggacctgagcaaaagccacacgctaatggagttcatcacaagacatctcgcatctcttagactatattaatcacacactcctttgtgagtcaccatccaatctcacttgtcaatggaagagagactttattgttgtgctcgagcacacaatttcatttacttgttgagcttccatactccactgtcaccttcgttcaccatgtagaactaatcattgaaaaaggtgaattctaatgatgacgtccttactgttgctgcgtatatggccatggaagtctacaacgatcctcctcatgctaagagtatgtaaacattattgagacacatctactcagaacacg

SEQ ID NO: 86550 - DNA, 142 bp, Glycine max
ttcctcatatattgaagctctccgggacgtgatcgatgtagctgggctgcgcatctcatcaagcagctcaccattccctctaatcatagacctatagatatataagccgaaagcaagcgcaaaaccataaaagtaccttaac

SEQ ID NO: 86551 - DNA, 386 bp, Glycine max
attctatgcccagaaagtactcaatagtgctcttgctgcttaagagaaaaggtagcattcaacttggtcacaatgaggttaatagcagtgttggaggaacccgcgatgattatatcatctacataaatgagaataagcacgcagcagccatgttttgtgaatatgagaagagagggatcacacttggattgttgaaaaccacaggagatgagagtatttgtcaaactctcataccaaagccctggggcttgttttaaaccatatattgccttgtgaagtttgcatacaagagtggattcaccctgaataaagcctcgaaggctgttcatgtagacatcttcatggagttgcccattaagaaaggcattgttgacatcaagttgaat

SEQ ID NO: 86552 - DNA, 449 bp, Glycine max
  unsure (1)..(449): unsure at all n locations
agctntgttgcccatggacatcgggatgtattgactatctgccattgngcaaccaaagcaccctggtcgtgtccatgctgntggagctggagtcacgattaaaaactactttggaccggcttcaaggggctcctggacctcttcattcatggcttctgaagacctacaacacttgacacaaaagatcaaagactagttgaaggagttgatcacacaaaaagtgactcaacaattaatgatgtccttcagctagatgtactcacgaatgcaatcacaaggactcgcactgtctcctaaggctaaagttggtcctttttctactcgtctaaacataaaggagaggtgtgtcgatcccttagggcaggaacccaaaacgggagacttagatnaatgtgggttgtatgtcgatggtagtcctccatgaccacgtgctattggaagagtttatg

SEQ ID NO: 86553 - DNA, 456 bp, Glycine max
  unsure (1)..(456): unsure at all n locations
attaaggtataaaagcagcttatgatctttctacataattaactcattntaataatctgcataagtaaacatttaacaataagtacatggcatggacatgggggagtcacacaattttgcttaaccattgaatttaatgttggacaagtgggctcagtcatcttaagaatgtggggttgatttagatacaaaaattattctcattacaatttaactctccttttaattaacactgcacccttaatataatactcataaacaattaaaaataaactttttaaagccaagataaattacaatacataaagaatttaaggaagataaatgccactcaaatttatctggtcaccacccctgtgctacgtcagccccaagcacccgtggagattcactatatgtaaaagttttacaactctgaccaataggaccccttccttggttagatatctacaacat

SEQ ID NO: 86554 - DNA, 302 bp, Glycine max
  unsure (1)..(302): unsure at all n locations
ggtaccaggataagactaggtgggtactgaagtgaccaagccccccagcacgttgcccttgctccaagcgtcctagtgcattggcctattacattgactaacctactaaccctttatngataaccaaacatttttggtcgccacttacaagatgggcattattaataactacctctaaatgaaccagtgggcctttatctctccattggcatgatcaccacacttgacttctcttaaactggctgattaaatgttggcaccttgtgaaaattcctgcttcttgtctccctgaaagtctcaaa

SEQ ID NO: 86555 - DNA, 287 bp, Glycine max
ggagacagctagtgtgagtgctgggggagactcaagagatcgtgtgcaagctggatcaccaccagatttataagcatctgcttctacaatataactatgatggacttcgacccacggagaggagtatgagcgatcctgccaatggaggagctactgtggatatgacacttggtggtgccagttacccgattgagaagatggtcttcatcccccaaccatacattgacagatatgatgctaacgtgcgctgaggagaccatgaggtggcaccaattgatcatcatata

SEQ ID NO: 86556 - DNA, 408 bp, Glycine max
  unsure (1)..(408): unsure at all n locations
agctnggtgcctntaatgtntcatagtacccaaactatattccattatcacacttagagacaaactttcctaagttggccttagtgtttaaaatgaaacattgacatctaaagcgatggaagtatgatatgttggggggttggcctttccacaattcatatgaagctctttttagaataggtcttacgaatattttgttttgtgaataataagtaatattcactaattcagctcacaagtgcttaggagtaaaaaatattattaagcatggcctttgtcatttcctataattatttgttcttccctccaaccacaccattctgttaaagtgttctaagagatgaacaactgtgaacgatactattctccttccaaaataggtgtaaatcacatttccaatctttttca

SEQ ID NO: 86557 - DNA, 459 bp, Glycine max
  unsure (1)..(459): unsure at all n locations
gcttgangattatggggtacccgtcacatgtggtactatgtggcggtcgggcgatagtgcaagtcgactattcacatccacatatcacacataaatncaccattcncagttgcccaccttcaactgagnctcacgtactccacgtagcccttatcctcgttcctctcaacaccgggtgcccatcaatccctccaaagcttcataacatccaagcaatttcaacatccaaacatcatgaactatcaaaaccaagcaaaaacagggcagaggcagaaaactctggcccaaacacaaaccaataccacaacttttcttactcaaataccccagtaacattctcttcgttctcaattgttcaccggtggatcgactcgaaaatttactggaggtcctagtacacagtcacattttgaccgtggatctgtaganacgtcgaaacccatatgacaaccctttcac

SEQ ID NO: 86558 - DNA, 373 bp, Glycine max
  unsure (1)..(373): unsure at all n locations
ctcgagatctttcgtggntcaatttcgggcgtctncatatgtcatgtgcctgaatcggacctccgtaagaaaatttatgaccatttgaacttctctagagcttccgttggttaatttcgagcttctcgatatctgatgtgcctgaatcggacatccgagtgaaaagttgggacaatttcaatttctccagagcttccgttgttcaattttgagcgtctcgatatgtgatgttcctgaatcggacctccgtgtgataacttatgaccatttgaattgctctagatcttacgcggatcaatgtctggcgtctccatatgtgatgtgctcgaatcggacctccgtgtgnaaagtatgaaccattgatattttcgag

SEQ ID NO: 86559 - DNA, 343 bp, Glycine max
  unsure (1)..(343): unsure at all n locations
gatcctctgactcacctgcggctgcagctgtatcataccacaactgtatcgataccagagaaatctttcagacaatattctcaacagacacatctttntacttgattcttgaatggctgtcaaagacctatatatgtgtgacttgggacaccaatttgcttagagattttcacaacaaacaggtcttatcctcttaaaaagaaaaatcagtttatcctcttacaaattccgtggcttanacacttgtgattcaataaagaattatttgagtgctcanattgttcaatctatctctgtcacgagagaattcttcttttcttcttcttcattctgaaaagggatt

SEQ ID NO: 86560 - DNA, 297 bp, Glycine max
tcccagctttctctcgccctatggcatcaacaaaaagccaaagtgcgtattgagacataaaatcatgcattcactcatgatcattcaagcagggaagacaataatgcgtacataaactaagcaaggatgataataattcatttgtaaactataatataatgtcagataccttagagaggcatccaagataaccaaattaagatagaataattagaaagtaacatacgggtggtttcgaacatagtcataagacatcaagacattacacaattcatttggctaagtcactagcatcta

SEQ ID NO: 86561 - DNA, 465 bp, Glycine max
  unsure (1)..(465): unsure at all n locations
cctgcttatgtggcaaggcgggctaccttcactatcttgtctcaacttgcagcctatggccacttgcttatctttccgcggtgctactcttcgtatcttgcctagtgagcttatatcccgaaccatactttccacaatatactttgncnttatcaagctagttatgccgtcgtagtctttgcctaaacccattccgggttcgttaccgatccccaacataactcgggccatcattactgctgcatcggacaggcaaagctgcccagagaaggagtccacagaggaaatgcttaccacctcaaaagactggaaagcggattctaacgattcctctgccgcttacacataatgcatagaggatgggcagctcaccaagatgtcttcctcgcctgacacgatgaccaaatgcccctccactacgtaatttaacttttggtggagtgaaagggcacaactcccactgag

SEQ ID NO: 86562 - DNA, 342 bp, Glycine max
  unsure (1)..(342): unsure at all n locations
acttatcataatntgtaacccttatgctctcttataaccctaaaacaaggtccacgatatcaaaattacgctcacgggtttactcaaacatatcattattacttttggctcaacaagggtgcaagggataaattcattacaggttggctttttggctaagtggctaacataaaaagaaacatggtcctgatcatatccaccttatgcacaatatctaacagtctaagaatgatgcacaattatgaatttattagcagacgttttctcataataatgtcacacagctcaccgtgacaagataaagttatcggcttaccagaccttgatctctttcatcaagct

SEQ ID NO: 86563 - DNA, 461 bp, Glycine max
  unsure (1)..(461): unsure at all n locations
atccttaagcaccgcggctgcactttccccatttcataataggtgaattgaatgtanaaggttcaccccttagcctttcttctttcaattgcttggaaaatgttccgtgaagaaaatcaagccgaggcgcttccgaaacgttttcgtaacgtttccgtgaggaatttcgcgaaggtttcgaccgttctttgacgttcttcattcgttcttcgatcttcaacgggttagtacctcgaaccaagcttttcgattcattctatgtacccgcggtggtccacatttgtgttcgcgtatttctattctcatttcatttacattttatacccccttttgacgttccacatctttgtcaaggtgaaactggaagtaacaaggacatcaacaatcctatatattgttgcagtagacgaacagtgatggactcgattatcttttgcccaatttgcagacggttcttcata

SEQ ID NO: 86564 - DNA, 454 bp, Glycine max
  unsure (1)..(454): unsure at all n locations
agcttacacntatattattaatccacacacacttatcatatatcatcatccatccatagntccaatcaatcatgctcagtatgatgcatgcacctgacctcaactcttcaatgcaaatgtggtaccatccccaaggaaatagcctaagtgtgtccacacgacactctcacttatgaaaactatgcagtaagtgtcgaggtcaccctgtcgtgcataggcaactcctcccacagtgatcagcctgagtctcaagggagttccaaaccaagtgacatgcccctaagtacaagtatttttcctcatgaaaaactatgagtacttactgacagagtntgtactatttccatgcaatatgaaatatgaaacatgggcaccatcaatgcactgaccgtggataattaaagaatttaagccatccnncctcagagatgcttaaaactctttaaccactata

SEQ ID NO: 86565 - DNA, 393 bp, Glycine max
  unsure (1)..(393): unsure at all n locations
tgacctatacatactcaagctgtggcatactctactgtatcagtctnataatacgatatatcaactctatacactggacagatgacacttataggtactatcgaggtctgtcaattgtccattcatcactgatttctatctctgtaatcctttgacctcgatgtataaaaagatcttnnnccgcacagcgttcttgcaaagtggcctaaataacttggacgagtaatcaatattacaagagggtaaataaaatatgtctacaaaattacataaggattaaaaatttgaatattctttgttaacaaacatgaagaagaaagattcacggatggttgtaaatatatctatctattcagaataattgaacacccagaaaagatcacgacacaaaga

SEQ ID NO: 86566 - DNA, 509 bp, Glycine max
  unsure (1)..(509): unsure at all n locations
atcttaagcgacgcggctgcagcttttcatgaaggctgaagttatgacttatcaagcaaaacacacttaactattgaaccaganacgagtgttacttgtttatagattaaatgatntgtgcaaatgaagatttggttgtgggtgaaatattaaataataataactgtaagtttgtatacaacttcctaatataactgaatccataaaatgttaaacgctttacaaattaaagttgtgtctgttatccttgcccaaagaccatgctaatattctctgatatcgttgccaatttatcggatagtaaaactntacaaattaatgttagttatactaatatacatgtatgtacacatccggattaatttattgttaagagtagaatttaaacatttgtttcttataataatcttttacaaataactcataaatataattgtngaattatgtcagatcgctcttacgaataacgtatgtaannattaaatanataaatagtataggatataatc

SEQ ID NO: 86567 - DNA, 458 bp, Glycine max
tatcctactatcgagcttctttattttttatcatgtactgcactaacaatatgttatgcagtattatcattattcactccctaactctatctctattgttaattacaatactggctacgaatattattacataatacctcttgtacacaactatagcattcattattactcaatgtttaataaacatgattgaccatgtatatcatcgcaccttaatgcacaaagttattttataaaacatattatatattccaatcatatttgctttggttctcattaaataagttatacaccgttacaaccatactattgaaatatttatggtaactatcatgattatcaacatccattgtctctcttctatattagttaatatcgacgtcgagaattatggactatgatatacatgatgccagggaacatgctcatctaataacatataatctagtgtagctcta

SEQ ID NO: 86568 - DNA, 522 bp, Glycine max
  unsure (1)..(522): unsure at all n locations
ctctgagtcacctgcggcatgcagcttgatggagaaacacctttttactttgatgtgctagcggcngccagtttcttggatgatatctcatggggtcatattgatcgttgaacattatactgctgggtttggaaaccagaacctaatggtcagtnttctacaaagagcgcatattgtatgctactagaaggagcagcagatcagactatggatgaggctttaaaggacctatggtagctcaaaatccctttaaaaccaacaacatttgcttggtgattgatcaaagatagaatcccaactaaagggaattngcggagaagacagctggagaaaggctttgcccagccctacaactatttggtctagtaattatcaacaacattttttgattatggtagcaatgcacggttattgtattctatttaaattgtcacctgattcgtaggaccctatggtctgctagtctgctggtttctaccttgtatattatacctctgtactcacagtcattaatacaatata

SEQ ID NO: 86569 - DNA, 378 bp, Glycine max
  unsure (1)..(378): unsure at all n locations
agcttagatcagtattcagaatatgttgatgacacatttcagaggttgagaatngagaatgccatcctcaaaaaaactaaattcaaacaaatatgagtttaattattcgacaatatgcatattaaatcatttaagagagcttgaactagctatgcttcaaattgaatctaaacacagtttcttcaaaacaaatctaaaacatgattatagaaatcaatgaagtcacaagtgaaattaaacagctcacaattgataaaatatatcgaatcacagattcttatatatgtatacaaatcaaagctcattggaaaagaagatagaaagaagagaaatactggccacaagaataattaaggataacactatgccacctgacac

SEQ ID NO: 86570 - DNA, 456 bp, Glycine max
  unsure (1)..(456): unsure at all n locations
agcttggcaccttcatgactccactacctgaagcctaatgatgttntggtggatgagggtgcaatatgaacctgagatggagagtctgcatgacatgaanggtgaagtggcggctgcggagaaagtggttntggctganggtgaaccttcactggagactcaatgctgaatgaagatgttaggtggtgtgttggatgaggtagtgactctttttgaggttcagctcttggggcttcttcagttttggtgggactaggaggagataactctgaaggaactaccanagaaggcttagatggtctatgaatnggcacacttgtgtctgagtggggtggagatcttggtctttcttttgtccgacgagcgaatgattcagatggtactgatagccatgggatcctaanacgaaatgacttacttctatgtgccatggatggttaatgatngttgattact

SEQ ID NO: 86571 - DNA, 388 bp, Glycine max
  unsure (1)..(388): unsure at all n locations
tatgatttaatgggaagcataaattgtaaacatcagattcgtaattaattcgctggacgtgggataggtnnnnccatcaacacatggatctactatgtaggtcaatacaggattaggaggactatgtttattctatcgatcgataatacaaccacgcagttgatactctgaccatgaggacgagttatcggtggggaaaacaaccctttatgaacacgaaacaaattattgagatccaagttacatggcctgtctgaaatgagtcaggagatttatcaagggtgcccttcgatcgtatactagttacacagttcattcttattgttaggcacggtcatagacatttgcttataaattaaacattttcattgagacaatatagttatgt

SEQ ID NO: 86572 - DNA, 497 bp, Glycine max
  unsure (1)..(497): unsure at all n locations
aagtcacctgcggcatgcaagcttatcaagattcaagactaccagatatcctaacatatattatataacactaacccttatgcaatatacatcttggaataattgctcagaatctaaatgtaattgatatccctagaaatgaaaaatgtatttgcagacaaaaataataatagtaactaataacaaaacacatgctgtttcaaaagtaaaactatccataatgttcaagaaattggccaaattttcaaagtaattctatgactatattaaaaccagaagatttcagttgcgtaatcaacactacaccttatatttatcctgatttttaggtagattgtagagcaccatgcncacccatagaatgaccaaaatagaagccttgatgtttcaaggggggaanatatcgctagaagcttggaacntctgacaacatatcatacatgcccaattttcantctttggtagatgaataaatctgcctgtcagatgatataaat

SEQ ID NO: 86573 - DNA, 504 bp, Glycine max
  unsure (1)..(504): unsure at all n locations
atcctctgagtcacctgcggcatgaagcttctaaggagggtgagctagntattagaggtgtgtgtgtgtagcttagctctagcttctcaaggaagttttctcaagaaagcttctcgaagaagctacctantatataaatagaagcatgtgtaactcttgttggtactctgatgaataagagtcttgtgagacacaactcaaagtcaacttctctccctttttcttncttcaatttcgtgctcccccctctctctttctctccctctttcttttcctccattgaagcatcctctccaagcttcttatctaaggctcatcttggtggtgaagctccttcttccatggcttattccctagtggatggcgcttcctctcacctcttctcctttgtcttccgctgcatctncatggtggaaaatcaccattaaaggacctcattgaagctcatagatccagtcttcatagaaagctcacaagcaagctttcatcaatatccttttacat

SEQ ID NO: 86574 - DNA, 391 bp, Glycine max
  unsure (1)..(391): unsure at all n locations
tgtttggcaagcaagatgtatgatatatattgggaaatatatatttttcatcatagagatttcttggataaggtgtgataagcggcatatggacttgatnnntcgtttctatgacacttatttgactaagttatagtacaaaatatcagtagaaaactccatgaatagggtatcttgcaaaatatatgataaatatgattcttttgtgaagagttgtagatattttaatgcaaatcccttgtattgatggcacgtgagaagattttgttaagagactcatttgtgggaagcaattactaagtggatntacttgtggttgagtgcgttatgccctgaaatttcaataaccaaaaaaagatgtctgaggagttcttgtatatttaatacttga

SEQ ID NO: 86575 - DNA, 239 bp, Glycine max
  unsure (1)..(239): unsure at all n locations
caatggcggttatgactgaccgacgcatatctgggttgagggagcaaagctcaatgttcctcgccttcaaagaagaagtgatccacatgcccacctgcactgtgagaagaagactgagcacatatgtgctcgcaatgactacactgatgcgcagatagtcatgctagctgcatctgaattctccgactatgcccttgtttggtggcataaataccacccacaaatgntgatagaggaat

SEQ ID NO: 86576 - DNA, 475 bp, Glycine max
  unsure (1)..(475): unsure at all n locations
agctagtcatgttcactgatgcctgcctcttcatgatagatgtgttcaacatagtgccacacaaagcgcctgtggtcgccatattctctcctctctctctcttgcttcttcttcttcttcttcttctgggtgatagatagataaatagataacaacgaggagcttgcatgcttcattataatgagtgagcagcgacatgcaaccctatctgccacgtgccattatcttatgcttcaatctatctgcctctttccttttcagtaaatccgtctctctattcgcacggcagattattcacgattctggtggctacgtactatcctcagttcctcaccagtcaccacacgtacgttatactttatgaactatttactgaatctntnttacaatgtaagaatnntaacttattnttgagtggntgtagtgaanntttttttagtacatagaaattatgctanaatatgtttnttataat

SEQ ID NO: 86577 - DNA, 228 bp, Glycine max
  unsure (1)..(228): unsure at all n locations
aagaatagcatgcatcatgaatgtttaattattgtatatgactgatctgtaataatgtggtctgtagtctacgtgaagacaatgttagaagcttcaaaaaaaaagtattgagtcgtatagataaaacgactgttcgataatccctcagatgcctctagcntatagggcatgttccttagcccgacacacatagaagccgtactaatggtgatatacaataaatcatct

SEQ ID NO: 86578 - DNA, 262 bp, Glycine max
  unsure (1)..(262): unsure at all n locations
agctngttaaccattctctatgtgcagncatatgattggaacatccagaatcaagataccattcttcattctgcaccttatcttcacaagttgtagtcatcatcaacacagtatgaggatctttgccctgagccacattagcttcttcattattctgctgatccttcttgaaccaacactcatcagcaaaatgtccatacttctcacaggttgagcactgcactttactcttatcaaactccttcttcttgttatgagctct

SEQ ID NO: 86579 - DNA, 154 bp, Glycine max
aaaacaaaggctgtgaagcgtgaacagatattaccaacacaattaaagcgcaatgacccttctttattattagttacaagtacacaagcagccactttccatcatatctgggcgttatggagctttgagcagaatactcaagcgtgcaactcca

SEQ ID NO: 86580 - DNA, 427 bp, Glycine max
  unsure (1)..(427): unsure at all n locations
gcaagctntntcggagtcatttcctgcgaggaataacatttggaaagttagntnacaaaanaatgctattntaaagcaaaaatggcatgccaatcttttcgatttagaacaaacttgtgcacacatttccttaaagaagaacatttataaatgtgcatacgtgcaaaatatcttgctatttatatcaatatacatgaacattcaaaacattctatctaccacacatactcttttgaagagaactcatatatgcatgcttaaggtattgtgccaaaatttacacgtccatattcaaagcantttgctaccaaaaattacatacgcacatttgaagtgatttattatcatacaaaactntgtattgtgtcattcactntatttatacatatatgcacattggtgagccaatgtcatgtcatacacacac

SEQ ID NO: 86581 - DNA, 255 bp, Glycine max
ttcgggcgagcaatgcatggtcctatagcacatgggccacatcattgataaacggggtatgtgagacactcctattagataaaggcaactgtgaagacgaaactactgggctagccacggaagatcaaatgtaagtgcaaatgatgctgggatactgcaaaagcctaagcattttaggaggttatgacctcaagaggatattgtataagccaacaatagcacgtgcggttccctcagtggcacacgggaacatgt

SEQ ID NO: 86582 - DNA, 442 bp, Glycine max
  unsure (1)..(442): unsure at all n locations
agctntgtagcagatgccactctactctatanttttgaaagatatgttaacaaggaagcataaatatattcatcaggaanacatcatagtggaaggaaattacagtgttgtgatctagaagatccttccacccaagcataaatatcctgggagtgtaactattccttgttcaattggagaagtcaatgtgggaaaagctcttattgacctgngagctactatcaatttgatgccactctccatgcgcagaagattgggagagttggaaataatgcccactcaaatgactntacaattagctgaccgcttcattaccaggccatatggagtaattgaagatgtgttggtcagagtaaaacattntatcttcccggcagactntgtggtaatggatatctctgaagatactgacatccctgtaatattgngaaggtcattcatg

SEQ ID NO: 86583 - DNA, 362 bp, Glycine max
  unsure (1)..(362): unsure at all n locations
agcttcctcggagccatntcttgtnggtgatgaattatagcgtanaacggaatcgaataatgcgaanagtagagatcctanggctgcaaactcgtaaattctgtgggtatggctttcgaatggggggaaaagaagtttttgaatgcataaacgtccccctttcttctgtttttatattttggtgcaaaggttgctcgcccaagcgagctaacctgctnnttttttttttttttttttgaggggaacattaaccatgtcccttcctttttcatgggttagcgtctcgcctaacctgaacttacttaagttagaataaggcatcgattacttattttataacaaacaaattgtaaaagaaaact

SEQ ID NO: 86584 - DNA, 405 bp, Glycine max
  unsure (1)..(405): unsure at all n locations
agcttaagaaaaggtcaaactcctttcagaaatttgttttcatgcttaaataggtggctttgntcgtgctcgtgcgcttagcgcaattctgaaccgcttagcgcgcattagtgaatttcggcttagcgcatgctnttcttgctcaacggatggactaaagcggtgcgcttagtgggatgacccttcgctcagcgaacacgcacaactcatccttcttccagattcttcgtcgcgcttagctgaggaatgttgcgctcagcggatggtttgctaagccagcagattggcttagcgagagggtgaatatcaacacttcaaaacttgcctaattatccagaaattgagagagaattattattaaacacacaaaatggaagtactaattatttattaccaatctttaac

SEQ ID NO: 86585 - DNA, 304 bp, Glycine max
atactccacaagtgcatgtccattcacctaaattgacctgaaccttattcccccacatgtgaacctcatatcttatgcccatgttatcaccacaccaaatgggagtgcattgattagcaaaatggaattctttctctagtctttgatactgcactggacataatggctcatgttttccagaaagtttaaccttgcgagcatgcatggatctcatgatatgacttccatattcttcatgcattgtgattataggctggcatctatactgctacaatctggaattgaatacctcacaagtggtggt

SEQ ID NO: 86586 - DNA, 371 bp, Glycine max
  unsure (1)..(371): unsure at all n locations
atgctatcataatgcatgaagtcaagaaactttaagaataaattttgcaaatggttgagtgagaacactgatcatcttttgatcgtatatttagaagaatacataattacatttttgatttacaagaataataataaaagataaatattacagtcataattatccatgacttcatttacttttcttgtcattcttctgcttttgaagaaatattggtgttaatcatgtatatcttccgtccttgtcgttcttctgcttttgaagaattgctggcttngattaattaccaattattggcatacatcacatggaagctcatgctctggttgccaggtaaagttatagttctttactgaaatatgtaatcttct

SEQ ID NO: 86587 - DNA, 288 bp, Glycine max
tatgacatattcacataatggaggatttttatcacaccattctgctgtctttcttttgaacagaacttgatggagaaacatctctcaagcttaatgaaacacacaatagcataaccctaattcataacagttcaaaatgtaatgagaagaagaagaaattattgaagaattggttgacctgtgatgcttacaaggaagaagagaagagagaatgatgactgaaagaatgcgaaggatgattggagcacagagagacatttgaggaaaaagagaaaatttgagggttaa

SEQ ID NO: 86588 - DNA, 444 bp, Glycine max
  unsure (1)..(444): unsure at all n locations
ctgcagcttttacttctggatatggatgcacaatagctatttcctattctacgttgaagaataatacgaaaacgcttcacacctccaagctgacatttgtgcccaggcaccgacaaacaaccgacactaacccaaaatatatattcttatcacacttctttttatcaaaggggaaaaattcatcacataagatacgcgaattatcttgtatgatgccataggatgatgttgtcccatgacatgggccctaccaatgataggatgggccaagcatatctatccataaaacatggaggatccgagaacaacaaacaagaaactcaaccatgcattctggcatcgtatgcctcagacaaccncctcattgaagtaaacatatgagatgacaataaattntggtggcatcacccccgagaatgggtgaggaagcccaaactatttaca

SEQ ID NO: 86589 - DNA, 318 bp, Glycine max
catcttaaccaaatccaatattcacagagtttgtcttttatgagaacttttgaccatatatttttaagataccattttttaaacttcaagaatgattgtctttacatgggaatgaaggatgagatgaaccctaatattttattgatgaataaaaacgttctatacaacattgctttcacagtgccataatttctcaattgtttatttatttatgtaacgtctgttttgaaactgacgcttgattaaaataactgtgtgaatgtgaaagttacttgaaattaagatgaactcactgcaccacccttcattatatattct

SEQ ID NO: 86590 - DNA, 489 bp, Glycine max
  unsure (1)..(489): unsure at all n locations
agcttgattngacaggttatacaccattgttagactcctatgtcgagaatcatgccaattacaagtttgaggagaagaacgcacgangagctcatacggaccttaaggggcaatcagtggatgccttgccaatctaagtatggggcgtgtgagataacctatatgatacataggtgtattgttacttaagaccttgctcttaacgacttatagctctgctttataaaattgtgccattaagttgttngcatgttataatggagaaatttgttattctccaattgtgtgattaggaatgcttcagagatttaaaatagatctctagatggctacctgactacaaagtaaagtagctcatataactactttacaggccatgtatgaaagtcaaagaacaagaattatcttagatattatggatgtgtgtgtattgtataactaatggtggaagtgcataacccctatatacaaaatgacttagatctatca

SEQ ID NO: 86591 - DNA, 414 bp, Glycine max
  unsure (1)..(414): unsure at all n locations
cacatattacacaagtgtgctatatcttttcattctcttctccctttgacaaaaataattcgacaaggactaaccgcctgaatgctttttgtgtctctcttcttgctttgcctnantattcgacaaggactaaccgcctgaattcttttgtgtctctcttcttccttttgcaaaagaacaaaggactaaccgcctgaattcttttgtgtctctcttctccctttgccaaaaagaattcgctaatgactaaccgcctgaattctttatgtgtctctcttctcccttttccaaaagaacgaaagactaaccgcctgaattcttttgtgtcttccttctccctctttcaagaattctaaacgacgcagtctgagaattcttttgattcttacctctcccttaaataaaagatatcaa

SEQ ID NO: 86592 - DNA, 163 bp, Glycine max
  unsure (1)..(163): unsure at all n locations
atacttanaggcagctgcagcatgcagctacactatagcgagcgaagatttttttctttttttacacgcacctgcgacgcgcgacgagggctctgcaaaatcctagccccactctcgcaaaaaatgattttatctcaccaaaccattattgcgaaatatggcg

SEQ ID NO: 86593 - DNA, 423 bp, Glycine max
  unsure (1)..(423): unsure at all n locations
agcttactgaattatagctagcttacggttgttgtctctatgttgaagaacatagggatcaagtttttggttggtatgatgataatgaaccactctcaagttaaatattgtctctatacaacttatatgatgtgtcagactctaaatattatctcgtattgcaacctgctatgctataagcaatagactgtgggagatgggtcagatacatgccaaaacttatagaagaagaagcattttcaataataacaagatggtattagcacaactttatatgtggaataaaatataccaggagtctcctccttacacctgcttacctgtacatctattcaacaccatatattatattntcatgaataaatctaacgccgtaccttcctttatttcacaatataccaagaatattacacgcatatactt

SEQ ID NO: 86594 - DNA, 371 bp, Glycine max
  unsure (1)..(371): unsure at all n locations
agctagtagcanatgcaaacggcaataactgtttatcttgatgttcgnatgagtcacgtaatacatcgaaacgctcgaaattgaaaacagaagctctgtgcaaattcaaacgacaatacattttaactcggatgtccgattgagttccgtaatatatcaaagacactcgaaattgaaaataaaagctctgaacaaattcaaacgacaatatacttttactcggatgtccgattgagtccagtaatatatctagacactcgaaattgagaatagaagagctgagcatattcaaacgacaataactttttactcggatgtccgatggagtcccgagcgtctcgatatattatgcgcctaaatcggacatccga

SEQ ID NO: 86595 - DNA, 199 bp, Glycine max
catatctattaacatcggaggagcgattcaggcgcataacatatctagacactcgaaattgaacaacggaagcttccgagaaattcaaatggacataacttataactcaaaggagcgaatcaggcgcattatatatcgagacgctcgaaatggaacatgcgaagctttctcgaatatcaaatgagcattgactttcact

SEQ ID NO: 86596 - DNA, 357 bp, Glycine max
  unsure (1)..(357): unsure at all n locations
agcttatggaagaagttcttccgtaagatttcttattcgtttacggaagaagttcttccgtaacaagtcttttacggttacaaaaggagttcttccgtataaaaattactgaagaataactttttttcatatgtaacagatctacacaaaaaagtggtacgatgcgtaccttcagcgaaataaaaacaactgccaatatntaaccttcaccgaatggctacctcgaaaatacttgcaaaaattacccagaacgacacaaacttgacgacagtcaaagaaagaaagcgtatactgtgaaatattacacatgcatcgtatattaaagaaaaacagaaggggcaaattgcatttataaag

SEQ ID NO: 86597 - DNA, 431 bp, Glycine max
ctctctttaatctttacttgttactgcgatcattaccagagctagtttgttttctaagctttcactaatttacatcgctcaatcaatcctaataggtggaattgattccatatataggtaatcaattaccagtgtgatagaacgttgaaattcaaattcaaatgtgaatagtcacattctttctcaaaaatgctgtgtgtaatcgattacaatgatttggtaatcgattactactgataagttttgaatataaatcaatagatataactcttccaatggttttcaagcttttctaaaggttataactcttctaatggtgttcttgaccagacatgaagagtctataggagcaagaccctaacttgcattttacatacaattgaatacattgattggaatcctttacaaccctagagtctctctgaacatct

SEQ ID NO: 86598 - DNA, 480 bp, Glycine max
  unsure (1)..(480): unsure at all n locations
agcttggaagtngaagaaggagtctattgtcgtttattctgtatgtctctggaatatattctggaacgtaagttggaagcccgcatttgaggaggtcataaagagctatgtgaactattttgcctctcgtcccttatagcccttgagaaggagcttcaagaataacacaatcaggtcctctattcggaagaaatgttgtggtactagaagtctagagataatttgattaaatatggcaataaaaataccacaattttccgcactcagatagtatgagaaggaagaataagatttccagctctatgattgatgatatttagtgttctgatgaagatatcttgaatagagaagctcacacctttgtgaaaggtcttnttcaagtctatacttcttgcaacctaacaactngatcctcaacaatatcccacggctagcccaggatgcatctatgtcccttataactctgatgttagttgagag

SEQ ID NO: 86599 - DNA, 452 bp, Glycine max
  unsure (1)..(452): unsure at all n locations
ctcataaaccctctcatttgaccgagcatatatggtcttttcttaagacggaaggaccttcatgggcagctctaagagcccatctcactctatttttagtgcttaggctccattgtatgtagatccctttcttatgttnttttaagccaacacaaactcatccatgttgcctttgaatttaagcccttaattcatcaataaatgtaggtagttcattgcctctacattaccattttacatccacaaaatttctctaatatcttccattagcctattgtggcatctcactgtacatatgataggtacgctcggagtcttcatcctttctgtaggagagactttgtccatgttaccgcttggcaatatagatgttattagctagcacatgccaataattgtgatgcacataatcttcagaaggaactacttctaacccgtcatccttcaacatc

SEQ ID NO: 86600 - DNA, 460 bp, Glycine max
  unsure (1)..(460): unsure at all n locations
agctntataagctntattcaagccatctcgaggcattgtgggactgaatacactcctcgaggctgcaattaaagtgtctttccaacacttctttacacaatttttttgtatttgttactattagagattagagatgtaacatagaatcaatcataagagtaatgccttcacttaccaacttaagctnttggtatagttggttcatgtcttggtatcaaagcttcttctataatcaaatagtttagaagttgatccctcccacctccattcttttaatanaaaattaaattttagtacaaggtgggtgggcctgttattatccaagcttgaacccnaagcgtctgcttgggaggtgtgtagaatgaatatacatcattttgctcatcaacaatactaatatatcttgaagaggaccaacataaactgactttttttcataacttaatgtttcaagatgtct

SEQ ID NO: 86601 - DNA, 265 bp, Glycine max
acaatgtacgttgtgtgatgaatgaggataaaatagcatttccttttttcttctactggagataatgaagttctaggattccttcaatagtatggagtatggagtgtggactataaatgatgacattagtgtattatattacaatctctatttagctatttttgtcaagacgtggttattcttgtaaatggggatatcttgtgcaaactatgactagtgtattaaaggtctttgaagtatttttgttgggatacccacaaatgtc

SEQ ID NO: 86602 - DNA, 338 bp, Glycine max
  unsure (1)..(338): unsure at all n locations
agcnnttgaaatgggaagtattggaaatttactcctatttatgctagtccattagatggtctgagacatgaactgtggaatttcattaatatgattgaagatgggatgaatgacagttggttgattgctagtgattttaatgatgttatctcttagcaggaaaaacaaggaggagcccctgtttccctttggaaatgtaaaaaattcatgtagaggataaattcaaataacatattagatcttgaggccattggacctccttttacttgagaaggccgaagcataatggaccccaaaggatatttgagagacttgatagagccctttgcaatgatgct

SEQ ID NO: 86603 - DNA, 380 bp, Glycine max
  unsure (1)..(380): unsure at all n locations
acactctataatactcacgctcccatctgcgtaccccttattcaatctcatgttccattccacccaatggtgcactagagctctaaattgctactgctaatccttgtgaatgttcatctctctcttcaatcctagttctcgatcattcatgataatatnnnctcacgattgaaaatggattacgttatggatttatttcctaatttcaaaatctaatcactgattgtttgaatgatttctcaacctaatttgtgatttcaatcaattaaaggaatgagtcgattgaactatttctaatgcatatgactcaaatttccactctgcacatcatttatagtcactgtgataattcgatttgcattgatctggtgaatcggata

SEQ ID NO: 86604 - DNA, 431 bp, Glycine max
  unsure (1)..(431): unsure at all n locations
gcagcttgaaacccctctgagtgacccttgtgtcgcaacctaccctnttggcggagggcgacacgagactcacgggtgtgtcttccaanggaggaaaatgcgcgaagtcgccaccaattgttattcaacgaaaacgtttggaaaatcggaaaggtgtggtctacgaactttaatcgtgaaaatgttcgggagttgctttatgcacggngaaggtattatcaccccacacgtccgtcacaatagacgacaacctttaatcaagtgtgcaaatatgacttcaaaatgtgtattttcactcttatgtcttttttattttatgcttttatgttctaatttggcgggcgacaagtgttccctcctcatactcnctcaatgcgataggaatcagacctactattctttcgactaacgtggtaaagttgtttatcatt

SEQ ID NO: 86605 - DNA, 343 bp, Glycine max
  unsure (1)..(343): unsure at all n locations
actcattcttcttcactcatgattaanattgctgcaagaattgtgttagaagagatcgtaaatggacaaataaatatcctcacacaaacactctctcatgtgttttcactcaataataatattttcactcgagtgtcactctctgttgcgtttttcctctaataagatgaccactcttgccttctaccactcaacttctccttatgagctctcaagtaagaacctcttgggttgattatacacgacacgacacacgtagggattattgataacttagtgaataagaacagacaaaggacacggaacactggatttaagaaaagtgtttttctttcaacttgaa

SEQ ID NO: 86606 - DNA, 407 bp, Glycine max
  unsure (1)..(407): unsure at all n locations
atccttaagcacctgcngctgcagctatgctaatangcccaatnttgtagcttcttgatcttgattcattcttacatgaaggatctgcgaacaaaacttaatttaagttagtctaaacctaagaaggctgtctaaatcgggcctatttcaacatgagggatctgcggatgaaacttggattatctctgcctgacgatggatcgaggggttactcatttacgctataccatataacacaatagcacggttcattagagaaatatatttatgtgcatccgcttgtnttttagaaaacccaacattgctacctactatatttactttgcactttatagtgttagcataaaagtttagttatattttgtctggactatcacttatcatcgtatctaacaatgcttaactct

SEQ ID NO: 86607 - DNA, 467 bp, Glycine max
  unsure (1)..(467): unsure at all n locations
ctaagcttgccccctgctcctctcaggtgagacccggcgatgttgcttctccttgtcccacacctgctcacgtgtggccagtgccatctgatccaccatctctaggggcggatccatcatctgccgagctctgagcgtctcccgcgncntgccgatcagcattattatctctaatgactctacacagtcagcatctggatgagctgctactccttgtgctacccctgttctccatctgacagatgaagaggatactcaagaccagtcccaggaattctaaattcctgagtacccattttttggatattattattaccattatgttttagaacattgtgtttattggcgattgtgggttataatgataattatttacttgcacttcgcgtgaacagttagtatgcatgttttgaagcatacagaacagcttaacttgatctggatgaatatgcagtgaaacactgtta

SEQ ID NO: 86608 - DNA, 504 bp, Glycine max
  unsure (1)..(504): unsure at all n locations
atccttaagtcacctgcggcatgcaagcttctatagaaagttcgttcctaatttctctactttagcatcatctctcaatgagctggngaagaagaatgtggcatttacctggggtgaaaaacaagagcaagcctttgctttgctcaaagaaaagcttactaaggcacctgttctagctcttcctgacttttctaaaacttttgagctacaatgtgatgcctctggagtgggagttggagctgtattgttacaaggtgggcaccctattgctgattctagtgaagaacttcatagagccaccctcaactaccccacctatgataaagagctttatgccttaataagagccctccaaacttgggaacattaccttgtttccaggaagttgtcttcatagtgatcatcatccttaagacattaaaggcaagcaagttaacaagggcatgcaaatgggagagtacctcagcaattccatatgtatcaatacaaaaaggataacaatgt

SEQ ID NO: 86609 - DNA, 190 bp, Glycine max
gagctgacgacccacgacggataggtgcgcttcacgactccgaaaatggcctcctttcgcgaattggagcatatatggtgagcaaagggtggagctttgatggatcctcaatggtgaagaagaagaagaaatatctacgcgagagagagagggagaaaagcttctgaattcttgggctgacggaagagac

SEQ ID NO: 86610 - DNA, 440 bp, Glycine max
gctcccactaaagagatattctacatccatcatagatgaccacaaactcttaagaaactaattttaatctcagtccttgatgcctgtgctactaatgatttgggttgaatgctggatcttacacaatacttaatttagaaacatgaagaaagtatggaacattggcttaccagtgaaggtttcaagcttgggatctatccaaactcataatcatgatactagaagcaaaagcctagtcatgcatggtttctatgtcaaagttcaaatattagaagttgatatgactagaagcatgattttgatgtggctctatcaatcggtaatgctgaagctccattaataaagacaccaaagatgatataagagagcaggtgtggaataattgttgccacatccagcatctgtataatctattaaaataagatatttattcttgctat

SEQ ID NO: 86611 - DNA, 165 bp, Glycine max
acttcttaaaaggagctattagaaaggagaattcctaaaaaaatggcaaatcgctgttttgcttgagtttctttgttataaaaatgagcaataacaactaactgaaccacccagacagagatgaggaccctggatcacatcgacccatatataattaacgctcaa

SEQ ID NO: 86612 - DNA, 373 bp, Glycine max
  unsure (1)..(373): unsure at all n locations
atcttaagtcacctgcagctgcagcttacaagcaagcttcatagattcttagtgtttgatcatgaaccccaagaantttccattgtcgaccccaatagtgcactttttagggtngaggcacatgttatatttacaaatttctctgaatacttcctttaagtctgctacatgttgggccacactatgagacttaatgaccatgtgatccacataaacctcgacattttgaacctattgatgattgaagacctggtccatgagcctttggtatctggcttcatccatttttagtccaaaaggcatgaccctgtaacagaagttggcctttttagtgatgaaagtggttttttcttcatttgcgggtgtatcctga

SEQ ID NO: 86613 - DNA, 252 bp, Glycine max
gctcttctgcaagagaatccatattaatttactatatacacatgaaatcaacatagatctaacttctattcacctgataaaggagagaagacctcctcattgccccaatgctatgaatgggcacctgagattagatgcctgcttaacaaaaatggacagccttctgaaagtacaagatataagagaatatactcatccttcgagaaatgacatgatttgcagtgatcaaaataaatccaattggcctatggc

SEQ ID NO: 86614 - DNA, 334 bp, Glycine max
cagcagaagagcacacaccacaaacccttgcgacatgtacagatatctgattcaatgccagctgggttacctagtttaccaatgcatccagtttgccttcaaactgtttacactcagatgatgcaactgagttagaaatacctcatgcactcgtctaatgactatagcaccatttctggcgctgagctgccgggaattacaaaccatcttctcaataaaatcctggcttaacaggagtcttgtctttagggctccaccactgcagcatctatatacttccctcctattcttgctccttctaaaaatattggagaaaaactgctccaaaactgat

SEQ ID NO: 86615 - DNA, 240 bp, Glycine max
tatattatatagagtccctagtacaaagactatctaaatgccctgaagcacatcgctaaagacctatactactagaatggcccaaatacgaggccgaaaagaaggaaaatccatttctaacatttacgaagataaaaggggtgcaccttgacccgtgggctcaaaaagtcaacctaatgttactgagaaccctatggccgacttctgtatctctagcccaagccacatggaggcttctat

SEQ ID NO: 86616 - DNA, 415 bp, Glycine max
ggacactttatactcaagctcagcatcatgcaaatccctacaggacattcttctttctctatgcataagtgaaatgtgctacaagaatatcttatatgagtgtgttcactgcacaatatgattccatcaagttattctaatggtcataagacattatatttaacagaacatcaacttttatatttctctataagttggatagtaaaatcttactcgtacagtcacttgatttctaaaacaggtgttagggctacctattggaaacacaagatttaacaacaccgcttggataatggaagcaggttgttatttcaaaacaaaagactaagtctgtacctaaagtgcctcacattggttaagatcagtgaaccaccatacttgttcaattgtctatggcatactggtagtcctgata

SEQ ID NO: 86617 - DNA, 286 bp, Glycine max
  unsure (1)..(286): unsure at all n locations
agcttagtatanngcaaaagaactnaaacatttatctatagctctncgaatccaagtaattttcacctaataattatgtatataagaaaattagcatcagcccaaatgaatgaattactatgcaaatggctcagaattatgtaattcgtgcattgggtttggtggggtatgcttggacatggatgcaaggtgcacatggtgagtaccttgaatggggtgggagttatgacatgactggcccactgctgatgtgaacatgatgggtatgccaccctttacagacact

SEQ ID NO: 86618 - DNA, 390 bp, Glycine max
  unsure (1)..(390): unsure at all n locations
agctttacctcgaaattagattactaaataataatatcagtagtaaaaataagaatgtgaaggttcagtttcttataaaaagataatacatttgttgtaactgtaagcctatagaaatgctatttntatttctgatgacanataatgtcatttggttaaggtgtgacagaggagccacctttgcatgaagaaaaatggagcccaacagggaggtctacatggaccccagaatggatatggtgtaccaaattattgactcatggttctactcttaccacagcaagtgaggaatgcacatgggattntggaaatcanagcccanataaaatgctaagattcacacaactgttgccatgcaatggcccatgtctacaaactcaacccatagcc

SEQ ID NO: 86619 - DNA, 452 bp, Glycine max
  unsure (1)..(452): unsure at all n locations
agctnggcactacagcagttaactgaacaaaggaagtgtccacagtcattggatggttgcctggnagaggtacatgttataaactaataagattcctgcgtgtaggtataattattaagaagaggcactatatatatagacttttatatataaagcttattagaggtttaacacactctccactgttggtcctcaatttattgagaattataaaatcagaataatgactcatcatatgagtagttggacctggaaaaatntgtgaattttaagaaatttgagccaacaaaaaagagtgttcaagagaatgtgttagagacagtgttgctaccatttctctgttatgaatggtgtttgtagtattattgaaataaaatagaaatatttccttatgtanacaggcttctgcttactattttagttttacacattatgtagatcatatatatttt

SEQ ID NO: 86620 - DNA, 328 bp, Glycine max
  unsure (1)..(328): unsure at all n locations
cgactttnnnccataaacagaatacattatcgttttatattaagcaggttaattttgaggatgataatcgaacttgaattgaactaatattcttaaagattaattacaacgaatgaagaccttatatgtcaaatgagtttcagttcagatctaaataaaagagtctgcgagattattaactttttaatttgaattacacacacatcatttataactcattccgaactcaacattacacacataatattatagtatggatatatatatttgttacatagtgtaattgaagtccgaaggatntttaatatttcgtatttggattagatat

SEQ ID NO: 86621 - DNA, 337 bp, Glycine max
cacaccaacactctctcatgttgtttcacttcaataatagtttttcactcgtgagtcaactctttttgcttttcccctaatagttcaccactcttgcctttaccactcaacttcttcttatgagctctcagtaagaacctttgggttgatatacacgacaagaacagtaacggattatgatacttagtgaatagaacacacaatgacaaggacaatggatttagaaaagtgtgttttttcacttggaacaatgtaaaactgccaatttgttttctatgtttttttgccaaattcaattaactaaaatgtgttggctatcaatctaacgtcctgattt

SEQ ID NO: 86622 - DNA, 155 bp, Glycine max
  unsure (1)..(155): unsure at all n locations
gcacctgcggctgcagctgccgcctcttaatgcangacgttcatattccatccaancngtagcttctgttgggtgacngactgaaaactagaaaactggccttgtatcttgatgctctanaaacttgatatattccctctgctcttgactcttga

SEQ ID NO: 86623 - DNA, 460 bp, Glycine max
  unsure (1)..(460): unsure at all n locations
agctntagcgttcttcagcatatatatnttcttntgttgttgtttatgatcactannatcattacaagcactcccatatactaattattagcattgaaaatcgtaggtcatgcaccccgcgttactaactggtaacagctagctgctaccggtttaaggaaacattcctaattatcaaaccccaattgtttaaaggacaatgatatttactaccttttgtgtaaattggatatcatgtcaattcttgtatggattgatgttattttcttatcagagaatacgcataatttgagcggatcctgtattacagccttaatgtcctgtgtgagaaaaatcaaataaaatgtctaatgcctcgagaaaaatgccacataaatagggtactagtntttatntcatttatatntatgcctatctgtntctaatagtgtcaaagaggtgattaagattccctaatcta

SEQ ID NO: 86624 - DNA, 336 bp, Glycine max
  unsure (1)..(336): unsure at all n locations
tctcggtgaagatggcatcatatcttctcaatcaccgttccatttccataagtgttatttttcatcgagcttatgaaagcgttcggaggaggtttccaactaactncntactaactcgaacgatattgcaaggttggcctggacacaaatagatatttctccagtttgtgaaatgctgccactacagtgtgggaggcgatgaagtttcctcccagagcatagagttcctatccttccacatacactatagaaccaccccagtgcgtgatcttattgctcggtgttgaatcctgctacaactaaaacataaaatcatgattgttctccgcagtggtc

SEQ ID NO: 86625 - DNA, 305 bp, Glycine max
atatctcgcaagattctcactctacatagaaattctggaatatgatttaattcgcgctacgacaattcatgtgtctcacatgttttaaatcaccaattaatgctgactatactttcatatgttctaaccaaagcacctacaaagaataacatttcaatacatgacaacagagttggctactattatgtattggttctcagatatttgactttgtgcaactgaactgtatgaatggcttccttagtttaacatccgaaaatggtggattattttggaaaagtagtttcacaactgtcctttgtaat

SEQ ID NO: 86626 - DNA, 254 bp, Glycine max
cgaaacagatagggagctggtgcgtcccttcttcttgtacgagggtggagctaatgggctcatcaactattgagagatacacgattagtggcactcctggcctgcgttgaattaaaactatcggtgtggctatggtcttctcgaaagccacgaaagtatgtcacaactatcgttccatatgaatggctcaactttcttgagcagttagaaatcgacactacgctttcaatgagcttcggtaagaacatggacaa

SEQ ID NO: 86627 - DNA, 483 bp, Glycine max
  unsure (1)..(483): unsure at all n locations
agctntattaaggtcattcaacaatggaatctggtctgactctaaagtccttgatagtacagggctaagttgtcgcactatcacgaggaatcggtaagttagttgtgtatgtgtgtcttaatgcgcgcctgatngagtttagtcttacaagaagaatctacgaacaatgcttaatcaggattaggctaaactatcatgaggaatcgaggtttattatctcangagacaccataagaacacatgagcattgttagctagagaatatcttttcagcataaggcacctattaagaagaccaatgtgtntctacttgtttntacacatcattcctttcgcgtgattctttctttgtgcacanatagtttatacacctgttcatattcacacttatctgtacacactagacacttatttgctggatagcttaccaaataacacaagttccccangaagtcaatactcngttcttaccatttattctac

SEQ ID NO: 86628 - DNA, 421 bp, Glycine max
  unsure (1)..(421): unsure at all n locations
agcttctagccaaatggacttaccttgtattattttctttgatagcccttntgaggcttgtttccctttccttggtttgaagctcactacaagccttaagtgaaataccatgatattaccatatccttaaagaattttggagctctggaattgttttgggaataagtgtggggggtttttgtttcattggacaacttgttttgctggctatgcttcatgatgtattttgggccatacttgatgtacattgtatattggttaaatgttggacatgctgaatgaaatgttgtttctcacatgctaaagagttaaaaaaatatataaaaaataattcgaaaaaagaagaagataagcaataaagttgagtgaataagatcttatatggcacaagaatgatgaaactcttggctctactcttcat

SEQ ID NO: 86629 - DNA, 464 bp, Glycine max
  unsure (1)..(464): unsure at all n locations
ctattattatttctacggtcactactagcactacccttgtatctaagaatactcacctattgtattgtcactaagctcaccatggcttagacattcaaataatcttttgaataagagactctatctctcaaagagtgtgtnnncatgaagtcatccttagtacaatgactattctacgcaaaggattttttcactcagtagtacttctctttaattctttctcccttttcaatgtatgaatacttttcgttagtcttgagtgaggttttgatgcactttttatacgagaaggatgaatgaatcattgtaggatcttatgcattcaattttctactattgtctatcttattcatctggggtcaactaagatatgggaatagtgtagtcatagcatgtttttattaacaactctaatttgaatagaaacatcaaacattaatagggtgtgatcaaataatgaaccg

SEQ ID NO: 86630 - DNA, 473 bp, Glycine max
  unsure (1)..(473): unsure at all n locations
agcttaagctccttcaactgcacaaagctcttaatattngaagagtatccttgggggaccttgacccgacgaagacactaacaaanacttatcttctcctttttggacaaagtatgacaagttggaggcaagtatatttttttcccatcaaaccttggatgcaactgcgatcgtatacactgtcacatacanttttctctacatgcataacatcgatacaatgtctaacatctagatcagaccaatacagaagatcaaagaaaatggacctcttcttccatatgcaagtcttactttcatccttctttaaggtatttccagatacagtattcaggtgttcaatccgctagaagaacctgtgaccagtcaatggtatcgacgcagnttcgtgctcttaacttccattaaaaagctttttcaatcgtctgtaagggtgatgaaggtttaaaaaacggcgatgcctggtgtacact

SEQ ID NO: 86631 - DNA, 399 bp, Glycine max
  unsure (1)..(399): unsure at all n locations
ggacacttgaatctaagctgcttctcaagtatgattagaactttcttgtttggtatcttgtatgaaagagaattgttatttctggaatggtacatcgccactgcgcactgattgatgggtatacttattaggctgaatttgagttataaggatatanntcccccactacagaatggctcgagtgtgattggtctttgtttgaggggtagacacacacaatggctatgtctgatgaaaaaaatttgagttatagcttctttgtggttggactttggtattgtagaggagtgaagtcatataatttgttgtttggtggacctcaactactgggacactattattactcaagctgtggaagtggttctgggctatttatccactattgtggatgcaatggtg

SEQ ID NO: 86632 - DNA, 397 bp, Glycine max
  unsure (1)..(397): unsure at all n locations
ataatactcatcacctctatcatatcntaataatttcacatttatgtctaattgcccttttatttcattgtaggaaacttctaaagcatgcattgcctaagaaatctctggcagtaagtagacataaccgtaacgtgaataatcatcaataatggtgatagaagatctttcctttctgaaagaactaacatcaaaagggccacaaatattagtatgcacaatttcaagaagttgagtgcttgctgtagcctctttctcttgatgttgtgcttgtttccctaatacaacccacacaaatatttatatccggaaatctaataaagaagaagtcattctttattatctttcaatcttctctaaaatggacctaacgctatgcacaagaaacagatcgtca

SEQ ID NO: 86633 - DNA, 355 bp, Glycine max
aattatgtgcgtagatagatacacacgctcttggattgatgcttaccgacatttgtgggccatttcatacacctttatggaatggtcatcaatggttttatgcgttcataacgattactccatatatgcatacatgcttcttatacatgataagtcacaatctctggatgtgttcgaaacattttatgttgacgttgattatcatgtccacaaaagatataagagtgttagatctgactgtggtggcgaatactatggtatatatgacggtgtatgtgaacaacattcggggccttttgctaggcacctagaggaatgtggaatcattccatagtacaccattccatggtcacct

SEQ ID NO: 86634 - DNA, 322 bp, Glycine max
agcttataaagtccttagggattctcttgtgtgtgtgtgtgactgcatcgcataagatgatgtgcgcaggtgaagcatataacttctgtccatttaaatgaaatacagataactgcaacacctgtgtgcttgagagataacactaccttgtgagaaacgaagcatagtagatctttctttgatacctcgcagacttgctaacctctttaatctctgagaattttggcatgattccatcaagacaacatggaagtgaaactcgtggtcgaagtaaaatcgtctaaagatgcactatctcatttatgagatggtacccctgaca

SEQ ID NO: 86635 - DNA, 407 bp, Glycine max
  unsure (1)..(407): unsure at all n locations
ggttcagccccttaggcacttctctctctttcgaacatatctacgaagattgtttccgtgcaaaatattctaaccgatgcgcttccgtnncnncccgagagtgatttcgcgaaggttttcgaccgttcttcgccgttcttcattcgttcttcatcgatcttcagtcttcaacgggtaagtacctcaaaccaagcttttcaattcattctgtgtacccgtggtggtccacatttggtatcatgtatttgtattctcgtttcattcactctttatacccactttcgacatgcttaagccatattatttaagtcctttctcgctgaacctacaaatataataaatttccaccgatcgtttgaattgaattatccgataactcttgtagatatgaattccgaccgatcggt

SEQ ID NO: 86636 - DNA, 371 bp, Glycine max
  unsure (1)..(371): unsure at all n locations
atgaagtgcgacgcctccattgattctatctatcacattagcatggtaatatggagctcattgcttatgataagctctggggacctcaatgtaattctgcaatgntacatttcatnttacacattgtagttggatcatttagtaagatggataaaatttgctctggtgttnttagaaaatgtttgacataactaccctatcaacatggaatactgcctcaaaggagtatacgactgtgcatggcgagaaactgggaggggacttgaaatcatangttggcctaattagtaactgccccaaatggtgtgtttcaaatgatggaaagacttatgggacacgacgccgtggangcgtcgctcctcatgatatgt

SEQ ID NO: 86637 - DNA, 315 bp, Glycine max
  unsure (1)..(315): unsure at all n locations
aatacacccctgaaagaattaatgtaatggattgatttgattgtgatgaacataactaatagaatgattgtttgttttattgactatgatattagtacgaagtaaccccactcgaaggtgatgattaatttttgttagagactctgagcgcatacgaagcgagtatttttctccttatgtcatattcacttattaatcaagaatcagaccttgaatcacttgattaaaaaatacaaattgttatcacttatcaatcattactgatttaanagaatgaatatgatgttatctgatgacgcatactcatgtgacaaa

SEQ ID NO: 86638 - DNA, 408 bp, Glycine max
  unsure (1)..(408): unsure at all n locations
caagcttataaaagtntatgtggctagaaacaagcactgatgctttggtacnaagaagttaatgagtgtatgagcaactcgggattcaacagatgtgacatggaccattgctgctatgttaagaaatatactaacagccatggtatccttgccatgtatgttgatgacatgatgattgcaggatctagtatggcaaanattaatagggtgaagtagcaattggaagaaaacctttgaatgaaggatcttggtctagctaaacaaatccttggtatgagaattcttataaacagatcanaagggaatttgaagctgtctcaagagaaatatatacacaagttgcttgacaggttttacctttgagattctaacaccaagaatacccttttgggatctcgtttgaagttt

SEQ ID NO: 86639 - DNA, 479 bp, Glycine max
  unsure (1)..(479): unsure at all n locations
gacacttagatactcaagcttgtgaaccgcctcttcacatgacctcatgctgtcttacttatcgtgttgacccctcgtcaactgagagattctgttcatgccaagaacctcctttacctataatcccaactaccagatcttagaagaggaaattttctcaaatccnnaataatatctccaaagataaacaacattatagagattgaaataatatcttgtaaaatcaaaacaatgtcctagagatttgaaattataaatttgaattatttcccaacaaccttatgcatatattagcctcgatattaggtttaattatacatttgatccttataattacacaattttcttccttataatccctacacttcaaaactattgtgtttagtctctatactaacactcttagttccattttggccttggcgttaaaataatttgatatcattatagaatgctggaatgatgttgacacgtgttac

SEQ ID NO: 86640 - DNA, 482 bp, Glycine max
  unsure (1)..(482): unsure at all n locations
ctgcagctgaagcnactgatgcattggtaactggtacccagctggtcttgaaccanaaattagtcctgttgaaaggtctgtggttgtgctcctctgctaaccaccatacagacctttgcccttccatgcagcaaccaggagcaattgagcagcccgaagcttatgctgcatacatttacaatagacctcctcaacctcaacagcaaaatcaaccacaatagaacaattacgacctctccagcaacagatacaaccctggatggaggaatcaccctaatctcagatgggctagccctcttaacaacaacagcagtctgctccttccttccaaaatgatgctggcccaagcagaccatacattcctccaccaattcaacaacaacaacaaccccagaaacagccaacaggtgaggctcctccacaaccttccctcgaagaacttgtgaggcanatgactatgcagaacatgccagttcaacaag

SEQ ID NO: 86641 - DNA, 363 bp, Glycine max
  unsure (1)..(363): unsure at all n locations
cttcctgcttttattgttgaccacagagtggcacctgcagatatgtcgcggtgggtcaagagaccttggggacatcacgtggagtgctatatcccaaaaccaatcttgatcaattgcnncccacccgggcatagtcggtcagtgagaacctgtgatgtacctatacaagcgagctcctggcagtcaacagataaaaggaatacaataccacaaatcatggatgcttgtggtggctggccagctatgaatgttgtgtaatatgtggatggtgggctctggtaatcgattaccaagggtgggtaatcgatttcaacgcttaaaattgacgacaggagggctatattgcctctgtgtatcgattac

SEQ ID NO: 86642 - DNA, 119 bp, Glycine max
  unsure (1)..(119): unsure at all n locations
agctagccgccacggagttntccgactattctcttttgtgtgtggaacaagctacaaaaggagagagcaagaaatgaagagcccatggttgatacatggacggagatgaaaaagatcat

SEQ ID NO: 86643 - DNA, 409 bp, Glycine max
  unsure (1)..(409): unsure at all n locations
aagtgaatgcagctgcagcttaactggtgtaaacaaacttagcatataatatttatgttcacggactgaaggtccctattgcaactgataaagacaaatatttgttgcagtacttactcttcgactccctcaaggggcttcccatgaacattttatattgacaacccaactccaatataacaacaaagcaggtcaagtgtatcttttgcacaccgcttgaaaactacatgttggaataaggttataagaatgctgaacatctgaataaaataagtataacttaggtgctcaggttgggaagcaatnttggtttggccactagactcttaagcgaagggaagtgcgttaggtgaaaatactggcgccgatcgaaggcacgcagataatctcagagatcactggctctcag

SEQ ID NO: 86644 - DNA, 441 bp, Glycine max
aacgcttctggttgttgaagcgctcatatcactgggatgaaacaacaactataggatactggtatcatacttgatcacattcctttgatatgtgactacacaattgccactatcttgtccaaaatcttgtcatgcattctattaactacagcctattaaaaataaaacctcattccattagatatcatgtgcttaaagagattgtgctatacgattggtaaatacaaccaacctactagttgacatctttacacaacccttgtctatggatagatttataaaataggacatcatttcgttatatatcatgtgcttaaaggagattgtgttatattatgtgtatatacaaccaaccgactagcttacatgtttacataacccttgtctatggatagattctactccattagagatgaactatgcattttatatgaagactat

SEQ ID NO: 86645 - DNA, 283 bp, Glycine max
  unsure (1)..(283): unsure at all n locations
ctcgagggcgaggataagaatacttttgcagacgtcgctgccgatggaaatgaaagagattcttcttgttcttcanattctgctgagtcccgtgatttcaagtacttggttaacaccgttaagatgacagtgaaccggggtcgtaacgttgttggttaaagaaaagagtaatgatgccgctggacctagctcaaatgctgtgggtgtggaaagaaatgtgtaacaaaaagacattttccaattacatgactctattttgcgtgatatattatgggccaaatgt

SEQ ID NO: 86646 - DNA, 301 bp, Glycine max
aaaccacttcaaacaatggatgataatgaaagcatactggtgagtgagattgtgctggttagtaaagatggaagtggatacttcaccactatcaatgatgccatacctgctgcgccaaataacacagctgctaccgatggatactccaatattatgatctcagagggcgtgtatcaagaggatgtatctatagccaaaaacaagaagttcttgatgctaattggagatggaatcaatcggacaatcatcactggcgatcacaacagtgtagaaggcgtgacgactttcaactctgccacat

SEQ ID NO: 86647 - DNA, 358 bp, Glycine max
  unsure (1)..(358): unsure at all n locations
agcttgtantcgattacaagaaagctgaattgattatatctcatccctgcctattaaaagctgcactttcgcagaaccctcactctnctcttcttcttgacggtgtccaacctcctctaaacttcaaatcctcataactttctcgtttcttggccaaattacttcaaacaaagctcaaacttcttctttttttaattcntccaaaatcctacctatcagaattaactgaaacaagctccaatggcagaatcttcaaagaaacgaaagggatcctcctccaccaccactactgtaagccacccgtcccatggaacattcgatgacccaccagcatccattcctttcttctttttatctt

SEQ ID NO: 86648 - DNA, 490 bp, Glycine max
  unsure (1)..(490): unsure at all n locations
agcttccttcagttaaccacttaatccatctctattttaatntatctaagcgaaatcaatttaggtgtgtcaatatgtgattaagcaacacatacaccaattaaccccttgttcattaagcccaaacgtaatttaagcacagaggcaattaatcgaacacgaagcgtgcacagattaacagaacgcatgtgggttaattggtgaagggaaaaccgataggagagcaacaataaaaacagaacctcanagagagttatgcttcttcctcagagggaaacaacactagaaatttagccttccataagttcaacagaagcagaagacataaatgaaactataggcagaaagcgtaaatgaagctaaaggcagaaaacgaaaataataataaaggctgaagaaggaacataaacganattgtattagaagcaaaaatggaaaaaatgcatcacgtgacagtatacaagctatacgtataccctaaactcatgcc

SEQ ID NO: 86649 - DNA, 465 bp, Glycine max
  unsure (1)..(465): unsure at all n locations
acactctctaatactcacgctcgagcgagctatcatcacatgactcactacttgtcacatatcatgttgctttctcaacaattgtaattattatacagaaactctttgttagcttcccactaaattctctattggtccacctacacactcttctctctctcnntntcacgcagtacgcatctattgtgacgctcatgatacacgccaatgtactcccactgtagaaaactctcgtgaaatacatcctatgggaaatctacagttaaaacggtatactcaatgaggattttcatgcttcctgcagggtacatataatcaacaatgactcttgatgacacaccctggcaatcagttcaacatataccacagtgtgccttctaactatccaatccatcagggacctaacatatttcatataacttctaaacttgaggacaccttcgactattttatgcatgtcacaat

SEQ ID NO: 86650 - DNA, 429 bp, Glycine max
  unsure (1)..(429): unsure at all n locations
agcttgaacttaaagatagagtctctcttttttaattgatcacacccaacgctgggctacataacannaccttgattaacagtgttcctagtctccaatatgagactccatggtgatgntctcattgttgttcaataagactntctgatcctcttctgagcttatgtctagtaccatgaacaatttatttataacagaaagaagacaatattacaactttcactatgcttgacaattgctttgtgaattgctcgagagtatctctcagtcttttgatntatatttacatcactgcataattgaatcccaaccatctcaggattagatgaaccatntacagcatgtgtccagaatttcctaaccttaatatatagaagcaattagatcggaataacaatgagataaggatctaggaaatanggaagtcta

SEQ ID NO: 86651 - DNA, 401 bp, Glycine max
tgagatgacgaactgtctataggtgaaacttcctgctttttctgttgtccgcagaacggttcctgaagatatttcccgtgggtcatgataccttggtgacatcatgtggtgtgctattttccataaccaaacttgaccattttcacccaacctcggcatggtctgtcagtgagaacctgtgatgtacctcagcaggcgagcgcctgtcagtcatcatattatatgaacagagaccacatagcacggaggcttgtggtagttggtcagctgtgaaacttgactgatatgtgagatgtggtctctggtaatcgattaccaagggtgggtgatcgatgactatgctgtaaaatgtaatactggatgctaagatggtctctggtaatcgattactcaagggtgta

SEQ ID NO: 86652 - DNA, 476 bp, Glycine max
  unsure (1)..(476): unsure at all n locations
cggatccttaagcaccgcggctgcagcttaaagagttacatcctgaatatacatagtctatgtgaaacanattccctgtggatacgatactcggtcttactggtttatactacttgtgtgaatcggtacacttgtcgtacgctatcaacaagtttttggtgccgttgtcggagaatttctttccacttagatagtatacttcaacttggaaacattcattctttattctttgattatttnttgtgaatagttagaattccaattttatctcttgacttggttaactgctgctctgtttagttgcttcttgtatgcaagggaaaactccagcagggggtttagctccattagatttggagatngaagctacttgcaggagaaacaacgcataaaggatgaggaaagctntacaagagagcacagcccatccaagtgccgagagaaatctatcatctgaatctttatcatcatttcta

SEQ ID NO: 86653 - DNA, 229 bp, Glycine max
  unsure (1)..(229): unsure at all n locations
cactatccatgttcatacttattgcagcttgngtgtactcgagcctgaactactaccaatatatatatgctgtgtacacaaatgagcacatcttaaaagcttacttcacacaatggagtgcctttaggaatgaactggctattccttcctctaatgacgcagggacacttattcttgacccaactacaattcgtgcgaaggtcggccacaatcacaaggataacgaatg

SEQ ID NO: 86654 - DNA, 457 bp, Glycine max
  unsure (1)..(457): unsure at all n locations
agcttactccggagttgantgatctggtgatcctattaatcgncgctccaccactagtttgtggatgtttctcggagattctcttatttcttggagagaagaaacaaactttcacagctcgttctatcactgaagctgaatatcttgacttgctgatctacttctaaatattatggcttgggtgggttcttgctgatttagaagaagttcaatcttcctccactgattttattgtgataaccaaagtgcatctaagatgtccataatgatattttccatgagcgctcgattaagattgattgtcacttcgtttgatattgtaactaaatttagaatcaatcatgactttatccttgacttatatttttattagttgtctcctttacatgataataagagcacaaatttctcacatatttaatttgcgtttactctaatctaatgggtaaaaataatc

SEQ ID NO: 86655 - DNA, 193 bp, Glycine max
  unsure (1)..(193): unsure at all n locations
gtaatgacagcgattttttttaatttgtcaagtatcttgtgtattgtcattnnnntggggagaggatccttttcaaatatcttaagacttctctccatattttaagaggaaaaatatataaaataatttaaataatgttgggggtcttaaaattcctgatatggatatttctttctatactcacctcggtttt

SEQ ID NO: 86656 - DNA, 224 bp, Glycine max
tgacaaatgagaatattagtcttaatggtgtgcgctatatattatgggacttatattcctcttatttataggaataaattatcttttttacaatataagaggctatggctattctgcagaattaagtacaggctgacatgcatgtctcggcgtataacttatattacaagggggtcacgggttatccatttatactgaataaagaatgtattctaaagtcatta

SEQ ID NO: 86657 - DNA, 456 bp, Glycine max
  unsure (1)..(456): unsure at all n locations
ctaagcttctctactgttctgttggcccttatcaacacgcctattgcaatatattttaagtacgtcccttctcttttttttccttagttcgatgcaaactgagctaatataataataaacattcatattagatttctaacgaacttctcttcnnntacagcatacattaatactgattgatgtgttgtcgtcctatgtgcatgcctgttactttaaacatgaaagacatttgaatcctttgccaataagtgtgaatatagccagctgatggtctagctgctatgatagagaatacagatttcaatgtatcttttatcaaagcagaaatttcttttcagtgccaaaatgaagttttcagagcacaacaatcagattgactaatctccaaacaataaaatccaatcccaatttatgttcacgtttaagtagcgtgacatgtgagaaactaatgtattt

SEQ ID NO: 86658 - DNA, 351 bp, Glycine max
  unsure (1)..(351): unsure at all n locations
tcatcacccactacattttagccttcgaatcatactaacctttaaatggaatattagtaaatatcataccatcaatagattatatgtactagaacgnnnaagggcctcttcttctcctttcttctttattatgaactctattctgcattagatccaacctctcatggagcgcatcatctcgctgcttcattgacctcaccaaatgttgcatcaaagctagcatttggaattgcgaaagccccactccatcattaggattagtacctgacatctcatactaacaaatcaaacgtaacaatacacttatagttgtttgttgaatacctcacacactcaagtgtatcacacaaa

SEQ ID NO: 86659 - DNA, 439 bp, Glycine max
  unsure (1)..(439): unsure at all n locations
agcttactttcagantattttctaatatataatatagaacaggctgaatgggtacccatcatttatcaagtacaataacattctaacatagaacccatcatcgatatttaaagcctaaattntaatgaaaaatcctttctcaatttaatcaaaatatcgtttgaaggatcactaccaatttcttatgaagataagcgcacataaagcattggcgttcaaaccatcatattgaaatatgagtcatcataataaatatggtccgtaatttccaaataaatgaagactatggagaatcttagttaataagggaaataagacaaatgaaacaaatataatcacgaatattctccataacttacatattntcatatagaattgaataaagattgggattgacaaaactaactagtataactgatgactgaaaaatatttaatcg

SEQ ID NO: 86660 - DNA, 476 bp, Glycine max
  unsure (1)..(476): unsure at all n locations
ggacacttaaaactacgctcggcgtgaatctatactaaacatttgttgttatctatagaagattngagaggaaatattgtgccatataatgtgtggattntaatgtaatactaacataaaaatggttgcagtggatttctatcaagagagaattnttcagacattattcgaagggtgaagatatatcatttgtgtcaactgcgtgagtcatagtaatgctctctcttagcttgaagcatggacaaaggcgcatgctcacccaaaccttgttcataattatattgttgcatatatagctcttgttgacagatatagatgataaatgattaatgttggctgcatcaccttgaagcgtgtatgtttactgaagccattctagttaatgttgaaccacagctctgaccgagctaaccaatgagtcaccttatgtacacttctaaaaacttattaatggcctccatttggctngtctatca

SEQ ID NO: 86661 - DNA, 162 bp, Glycine max
  unsure (1)..(162): unsure at all n locations
aatataatgactacgcctctccgcatggtttacatagaaattaacatatatntctcacgacagttgcaatatgtttgatggcaccacgcataaacatatttacttttatgaagaaaacacatttctagtattattacacaatagaccgcatgactcttatta

SEQ ID NO: 86662 - DNA, 424 bp, Glycine max
  unsure (1)..(424): unsure at all n locations
agtcacctgcggcatgcaagcttaatggaggaaagaaagagagcgagatgtgttgtgtttcatganattgaaagaggaagagagggacagaagctgaaccttgaagtgtgtctcacaagactctcattcatcaatagtacaacaagtgttacacatgcttctatctatagccgttggtactttcctgagaaacttacttgagaagcttccttgagaagctagagcttatctactcacacccttctgataactaatctcaccttctngagaagctttcttgagaagattcctagagtagctagagcttagctacacacacccctctgatagctaagctcaccttcttgagatgagaagctagagcttatataaacacacccctataatagctaagctcaccctcatgctcgaatacatganaata

SEQ ID NO: 86663 - DNA, 373 bp, Glycine max
  unsure (1)..(373): unsure at all n locations
aaaatnaacaagatttggtggaagattgcccactgactaaaaagatgaatggctaataaacaaatatatnacttantactcttagtntttntttttaaagtatacaaagagttttgagagctttgtatctttagaagaatatatagaaatctttacaagacagaatgaaagaaatgaattgcttagatgattcgcatcttgtttattcaaagcttcttctatatatagtcttcaactccaggtatctgttgtctctcaacggntgaattcttcgctctgttctctgtatgagatcttgagtctatcgaaacatattaattttacattaaatgcacgtgcctttctcatgcanagtccatgctgataagataac

SEQ ID NO: 86664 - DNA, 223 bp, Glycine max
gatatatgcagactagaccacactactaaaaaaacaatataacattgagttttcatgtcggttatgatgaaattaatcgatcaagaaacttatgggatagcaaatttgcaatttagtggcaactgtgaacctatcattttgtgctagatgaatataaatataaagaaaaattattctatatgactgtactatataaagagtgttaactaggcatctgaagtat

SEQ ID NO: 86665 - DNA, 367 bp, Glycine max
agagctttttgccgaaaatgcactgtgggcgctgggaatctttgcctggcattgaccctattctgacaaaacgcttaatatgctctgatacccgacctgcgcttatcgcgagtaagtggatttgagcttatcgccaatcgtgcgctgagcctggctgaagacaacatgctgtgcttagcgcactgatctcacgcttagcacacggccttaatgatgatgccctaccaaattcttctatcgcgctatgcgtgcttagcccactaatgagctaagctcaactatcacttttagcacttcatgacttatcctcattttcacctgatattgcacatatttatattaaatccaatggacatattctagatac

SEQ ID NO: 86666 - DNA, 444 bp, Glycine max
  unsure (1)..(444): unsure at all n locations
cgtgtgagtactgtgaaagattcacgaaattgtgtgctagttgtcctcaccaccagacttctgagcatctcctccttatataatctatgagggacttagcaacatggagaggagtctgattgatgctaccagtggcgganctttggtgatatgacccctgatgaggctaggaatttgattgagaagatggctttcaactccctacaattcaatgcaagaaatggtgctattattcttagatgagtccatgaggtggccatggattcatcttcatctactgaaaataaaaagtttgaaggaaaacttgatgccttggccaacctagttactcaccttgccatgaatcaataatctgcacctgttgcaagagtatgtggtctatgctcttctacagatcaccgtacagatcttttgtccttctttacatgcgacctgtagtctatg

SEQ ID NO: 86667 - DNA, 396 bp, Glycine max
  unsure (1)..(396): unsure at all n locations
atcttcagaaacaagtcacttgttgaattgcgactcttggaaatgtatntgttgaaatcagtcactggtaatcgattaccactaaggtgtaatcaattacacatcaacagatgtgactattcattttgaatatcgaaaattaaaacgcttagaagctctggtaatcgattactagtattgtgtaatcgattacacacgtntataatactgtaaaactatttaaacataagctataactcttgaatttaaaatcttaacgtgtaaaacactggtaatcaattactaccttctggtnatcgattactagagagtaaaactctctggtaatgattttgtgaanacttcttgcgctactcaaagttttggaaaactgtttagtactcatcttgatagagc

SEQ ID NO: 86668 - DNA, 259 bp, Glycine max
cgagtattactgatatcctaggatgagataggtcgccggcggtgggcattactagttacccccatggccaaatttgatccagacatagtcctcgaattttatgcctatgcttggccaacagaggagggcgcgcgtgacatgatgtcctgtgtgaggggtcagtggatcccgtatgatgcagatgctatctgccaactcctgagatattcgttggtgctggaagagagccaggagtgcttgtatggccagaggaggaacc

SEQ ID NO: 86669 - DNA, 450 bp, Glycine max
  unsure (1)..(450): unsure at all n locations
agcttgatggaagaaggctcacaacatttgctgttactaggaagaagaaaaaaaatatggtctcctctttctccaaaagcttcaagaaaatgggagtactatcctangctttggcttttaaaaaaacaacacttattgtangtgaaatgcttggaccaatggaaatgcaaggcttaatccttatcttcttaatctaagcactttgaatgaccattaatatgactaatcggcagcttggacagccattgatgtgctctccacaagctcagccatgccttatatgacttctttgcatttttcaaaactaactataaaaggataaagtagagttttaccaaaaatggtaaaaaatgcttttgctanaattggtaaatcttatcctaatattctagaatagtgtgttaaccctccttgagacatgtatactcagagtgaaccttgcacagagtc

SEQ ID NO: 86670 - DNA, 441 bp, Glycine max
  unsure (1)..(441): unsure at all n locations
cgatagctcgcgctaagcccaatatgtctgcatgttgttattgggctaagccagacagcttgcgctaagcccggttgtttagtcaaatagcttacgctaaacgccattactcctcgagttagagatgggctattcttnnacttgcgccatgctcaagcgttaagccagaaaactcgcgctagtcccaagcgtgctattcagcaatcttcaacgtgctccaattctactccttgtggctgtctgcttgcttgcctttaatgagtagtccatccttgatcctcttggccatcttttcttgtagaaacttggctctagaccttcaaatcatgaagtatttctaggtccttatgttctgtggataggcctctatcatattcattatgtaatactatgattttctcattattatacaatatcttgtgtgagacatgtatactcaga

SEQ ID NO: 86671 - DNA, 316 bp, Glycine max
gactatggcatcaattctggcgctcaactgctgagaagtggaagccatcttctcaattaaatttctggcttcagcaggagtcatgtctccaagggctccaccactggcagcatcttatatacttctctctatattactgagtccttcataaaaatattggagcagaagctgctccgaaatctgatggtgagggcaactggcacatagttttctaaatcgctcccagtactcatacaggctctcttcactgagttgtctaatacctgagatatctttcctgatggttgtgagcctgcaagcaaggaataatttttct

SEQ ID NO: 86672 - DNA, 407 bp, Glycine max
gcttaactagccatcttgaatagtaatttgatatataacttgaagaacaccttctatgtatggatcaaatgactaactaactgtttatacgcaagctcttccaatgagagatgatcatgaaagaggttggagcctacatattgaatatgatcatgatgaagataaactcatcacgagaatacctattctaaattttaaaaggaggtatggaaatcaatgagatgatgacctgtagtgaaaattctacttcttgaaacttgctgtgaaaaatgagcgtacattataatttctcatgtcccaccttttaataatgataaaaggtgaaacttgcaactcttgaatttactgattatgctcttgttcggtgggatcaaatgaagaaagagagagctatatattgacaacat

SEQ ID NO: 86673 - DNA, 432 bp, Glycine max
agaagcttgagcttaactacacatacctctctaataactaagctcaactccttgagatgagaagctagagcttagctacacaccccctataatagctaagctcacccccatgacaaaatacatgaaaatacaaaaaaagtccctactacaacgactactcaaaatgcctcgaaatacaagggtaaaaccctgtactactagaatgctaaaaatacaaggcccaaacgaaggaaaaacctattctaatatttacaaagataagcgggctcatacttagcccatgggctcaaaatctaccctaaggctcatgagaaccctagggccttccctttgatctctagcccaatctacttggagtcttctatccaatgcccttataaggtaggaatgcatcattccctccaacttggaaaggatatgacctcaagtctt

SEQ ID NO: 86674 - DNA, 407 bp, Glycine max
  unsure (1)..(407): unsure at all n locations
ctactcattatttctgtactgtcgagtattctattgcactacctttctatgtttaaggcactgatgaacgtgataacggacgtggaaggtatacagcggcacatttngtggaatggagtttccgaccacgcgaaaatcaattggctaaagtggactacagtttgtacacctaaacaaatgggtggtctcggaatcaagaatctaagcatcttcaacatcagcttattggtaaaacggcgttagcattttctggatgagactaaagctatttgggctcctattatgaaattacattatggctcattagactngtcaaacacaggctcattcagccgcacattccaatggtggagggatattataagaattggcaactgccaatatcaaccaggctggctaactatcac

SEQ ID NO: 86675 - DNA, 198 bp, Glycine max
cttattcaacctgcacatagctaggagatatgacctactatattcatttgactagcccacttcacaatcatggaaaatagtgcaagcacagattttatgcaatacgcaagtacgtatagagcggtcgcaatatgaaagacaatagaaacgaacacacaaagtttgtggcgatacacagtacatttaaaaaagaactat

SEQ ID NO: 86676 - DNA, 434 bp, Glycine max
ggatcttaagtcacctgaggcatgcagcttattatcttcttcaatccatgtatctctcacaaggataagtacgtatgtcatgttgtggcacggtttgagatgtccaacaaacataatatgggagccatgagtgatgatgtgaatataccggcccagataagaagtcatcatctatagggcaccacaggtttgtacgggttctacaaaggccatcatggagatgggtggctgagatcaaagactctctaccaaaagatatgctttggcttggaacatatgacactgctgaggatgcagctcgagcatatgataatgctgcaccaaccttgagaggttccatgctagaacctactttgagttgcctgagtcagcttcttctggtggtgctaataagacgtggggtgtcaagtttgtgcctgaatgcactgaaccct

SEQ ID NO: 86677 - DNA, 456 bp, Glycine max
  unsure (1)..(456): unsure at all n locations
atcttgatgtatatgataaagcttattcttgtattgagatctaatctgcttcattgcatattctttcacctcgtcagataaactaaaagcatccttatatcatacgttttcatcaaaaaaagtaaaaattaaatactatcaagatacattatcaaaccaatttgaagatataactaatattcaaatatataaataaattaaatataattgacctaattatatactaaccttcatgtcgtcatagttcatctacatcatctttactaatttcactccaaccattaacttgtagaggagttttttggcgaatacacacttgtgcctcanacttgaaatattttgcatgtntttcgcanatcttataaaatggtagaggaaattggatgtcgatactttcataagaatttcctttttcttttgaaatgttgcatttattgtatgcccacatcccttctt

SEQ ID NO: 86678 - DNA, 228 bp, Glycine max
acgatgaggcctgatgtgcatacacatcctttgacacaaacttacttaagataactgacctcagtctattatagctgaagattgtcaaataaccctgacctaatgattatctacaatccttgttaaatatagaacctatggtcaaggcaactcaccacatcggggagtgactaatgcatgaaaaaagaggaaacatatccacacccataataaatggttcaaaacatc

SEQ ID NO: 86679 - DNA, 431 bp, Glycine max
  unsure (1)..(431): unsure at all n locations
agttaaggagcatattatgattatgattatcttaaagttagtagagcatggtggtttaccaagaatcgaacatantctcggtagttgaaacgagccaatataaatntattgtgtcttattttttattttattatttgaattgacctacggtctgaatatgatctttgcttttgaaaaactctatttgttttacaaagatctggaactattgtctgatctgtcctttaatttgaaaatatgatatatgttttcttaagatttactttattagataatatctctgctatattcaaaataggttttaagttaagtaaaaatcacaattcaactctcttattgtgatatttgtctttatacgttgtgtacggacatagttatcatcatgtgtatagtagcaacaggaaactctacgaccatacttattgaaaatc

SEQ ID NO: 86680 - DNA, 431 bp, Glycine max
  unsure (1)..(431): unsure at all n locations
gcaacttcttgatgcacacaaatactgcctattaaatattctatgttgaatcccaagtacaattatgtccttcttaggttcttcatctcaaacactatcttcaagcaatttatggcttttggaagttcttctacagctctaatgatatttatgtcatctacataaagaacaattatggcaaattcattgttagattttttcttcttcttgaaaatacatggacaaatgagatcattcttatatccttcctttagcacaaactcactaagatgtttgtaccccattcgtcctaattgctttagtccatagagagacttattcaatttgatagagtattcttctctagaacatgctctatngngcaaactaaatccttcatggagtttcatattaatgtcattatcaagagacccatattagtaagttgggac

SEQ ID NO: 86681 - DNA, 374 bp, Glycine max
atatgggctacgtgggagtacgtgagctcatatggaggtgggcatcaggggatggtgggtttatgcgcgctttgtggatgtgaaaaacttgttgtgcaccatcgtccgaccgccacctaataccacatgtgatgggtaccccataatcctacaagcttgagatgaagaagtgttgaagggtgaaacttcctgcttttattgttgaccacagagtggtacctggagatatgtcgcgggggtcatgagaccttgtggacgtcaggtggggtgctattgcccaaaaccaagcttgaccaatcccgacccaacccgggcatagtcggtcagtgagaacctgtgatgtacctaaacaggcgagcttctggcagtcaaca

SEQ ID NO: 86682 - DNA, 345 bp, Glycine max
gagccttttgatgttgaatcacgattgatcgttgtgttatgatgatggctaacatgatgactaatcgcccaccagagtgtgttcaacaatgccatatgagcacttctggaatcaataggacatttgatttcttgattcgagactcgggtttcaagaatcaccattcaataataatcctgctgtagattttcgaatcaggacaagactctgtctggatcggtcctcaaaagtttatcaaaacatatggttgcacatgattttttctcataaccttctaccaacgagtttttactctctggtgtcggttaccagcatattgtgatcgactctcttattcggagattg

SEQ ID NO: 86683 - DNA, 359 bp, Glycine max
  unsure (1)..(359): unsure at all n locations
ttgaagaagatcaataacgatgcctatatgttggacctcccacaagagtatggagtcagcaccacttttaacatttctgatttaattcctttttcaggtggagctgatatagaggaggagggaactaacaaattgaggtcaaatccttttcaaggggaaggggatgatgcaatcttgccaaggaagagaccagtcactatagccatgagcaagcggctccaagaggattggactagagctgctaaagaaggccctangattctcatgaacctcagggtagatttctgagcccatgggccaagtttgggtccaattctctttgtacatattagactaggatgtcattatatttgatcctt

SEQ ID NO: 86684 - DNA, 323 bp, Glycine max
gatgccaggccatcagctttctgatgcagaactcaaaatgttatttattgatcgaaaaactatgactccagctcagaaacactggcccgaaaagttcgacaaaaggcacaaactcctacatcttatgagatataagttgctttactaccaaaagataaaccatttacatgaaatgaactacgcaatatacatgcttgatatattaatgtataacttagaatgaatatgattccactgcataatccaaagtgcgagcaagacttatgtgcccgttacttggagaaacagagtagacttaatactataaaaaaatctcaggtctg

SEQ ID NO: 86685 - DNA, 387 bp, Glycine max
  unsure (1)..(387): unsure at all n locations
cacatgttggactaagaggcggtcgggcgatggggcacaacaagtttttcacatccactatgcgcgcataaacccaccattccctgtagccacctccatctgagcccacgcacttccacgtaaaccatatcctcgtttctttcaacaccgggtactcatcaatcctcccaagcttccacaacatccaagcaaaacaacattcaaacagcgcaagctatcacagcccatcaaaataggcaaaggcagaatactctgctcaacacaccaaccaaaatcacagcttntcccacttaaagaccccagtaacaattccttcgatccaattctgtaaccgttggatcgactccaaaattttactggaagtctatagtacataagcctacattg

SEQ ID NO: 86686 - DNA, 363 bp, Glycine max
  unsure (1)..(363): unsure at all n locations
atgctatactaaatatagatgggaatataggtaacaatggcggtaatgacggaccgatgcataaccgggttgagggagtaaagctcaatgttcctcccttcaaaggtagaagtgatccagatgcctacctggactgggaaatgaagactgagcacgtatttgcctgcattgactacactgatgcgcagaaagtcaagctagcagcagctgaattctccgactatgcccttgtttggtggcataaataccaaagagaaatgttgagagatgaacggcgagaggtagatacatggactgagatgaanagggtgatgaganaaaggtatgtgcccactatctataacagaaccatgcgacagaaac

SEQ ID NO: 86687 - DNA, 447 bp, Glycine max
gcttgtgacagtaatagttggcaataagtttctatatggtcatgaatgctatcatgactgtcaaaactagcttacaagttatgcaaactttgctgtacgatagaataattattgattttaaatttacattgtttcctatagaaatcataaaatagaaatgtctctctgctatcactattttacggctgagtgcataatatattagcatctaagggaatgactacgatgacgggtagcctgtgacttgtgtatttagatgcacttgcataaggtattgattaaaataacagaaagaggtgcaaagcacaccagcctcaaacttaccataatgttatactatgatttctgcaatgaatatatttcatgttccaacttaaacaagtattccattgggactcataagccaaaataattaatttcacattaattaacaatgttagttgacac

SEQ ID NO: 86688 - DNA, 451 bp, Glycine max
atggcgttcagacgagagctccggttttatagagaaacaacaccaattcttaattagtgtaatgttggaagattaaggatgataagattgatttatacagaaaataataataaaaaaactgattggagagagagtcttagataaaataataaagatatcatttattttaaattactctttaaataaagaaatagtttttatggcgaaaagaaaagatgttgatgagtaacttatcctttataaaaattagtcgaaataagttaacaatcccctctaataaacaacaaatatgatattaaaataaaaaataattatttactgataatatgatacattgaatgttagatatatatatttatcttcactaataaatttattaatttgtgagtactagttttaaaattcatacttaccatagatttgtatgattcatacaatagatatcttacat

SEQ ID NO: 86689 - DNA, 303 bp, Glycine max
  unsure (1)..(303): unsure at all n locations
gcatcttctagcagatacggtaagtcatttgtgttgagcctgatatcgagctnnnanaacggggcagataccttctaactgtgctcaagaagatcacaagaacgataccagctatgaaatgtgagcaccatgagcgaattaaggatagagaaccgatgcatctttaactatctccatctttaagtaagcatccctattacacgggcactcgatgtcactctcctcaaaggtgatcttatgaatgaaaacaacaagatggcactccttgataggcattgccattgtggctggatcacatttgat

SEQ ID NO: 86690 - DNA, 438 bp, Glycine max
ctgagtggttgactcttcaagatgatgggcccaacataaaaacaaacccgcttgccaatcatggagggggggcggttaatgccatcgaggtgagtatgtcacaccggcccaagcttttgaaggacgtaacgacccccagaaggtttatctacaaagcattgcaaaaggcgggcataattccctgcggcgggtgcaaaggagattcttgcttaatgcatccaggtgtactccatgacatggaaacatgttcggcagtgaaagatctattacaacagatgatagaccaatgccgacttgaggtctgcagtaagagggaggaggaacaacatgtatacatgcagtcggcagatgaagaaggacctaaaaagcctaaaccctcggtaatacactttaccagggacacggctcctcaaagacctcaacacccctcagcagtgt

SEQ ID NO: 86691 - DNA, 389 bp, Glycine max
acattcagttatggcgggaagaaatatcactcattgacagctcattagagaaatcatacatgtcgggcctggagtatcgaaggatattgttatggcagcataacttatgctatgaagaattgatggttaatcgtaaaccactgcaaaatctttctctgatcgagtgttacaaatcaaatacttataatatgagtaaagcttgaataccctctcaggaataaagataccaaatatatgggtgttaagtgggtaactgtgttagctgtgtgactggttagacattattgtctctctttgggttcccaacatattattatcttgtttttggtaaacatttgtggtcatagattcaaatgctatcttaagcttcattgatccatgaagtactc

SEQ ID NO: 86692 - DNA, 436 bp, Glycine max
  unsure (1)..(436): unsure at all n locations
ctgaggcatgcaagcttgttttatgttacacatatgctatatcttgacgaagtgtgagattctgtcttaatattattcctaaaatatatgtatcattggaatattctatttcctatctgattagaattgaatgaccttgtaatcaataatgactccttcttcatattataaataacatgaggtgtggtctactttgacacactacacaacagctaaaaatactgttataagtagtaactcattgacctattacttcgacgtagataaatgatggcatttatataactacataacactcgcattacacttaaagtttgctacacggagtgtgactatacagttgcctatgtatgtcattgngttgacatactatgaatttgatagaacccctttccgaccgctatngctattcaaatattcacgggtctcgtcatac

SEQ ID NO: 86693 - DNA, 396 bp, Glycine max
gttcattcacgattcgttgcatgttgctacatgtattcttactatagcgtatctttattaccacaaaaatattttaatttgatagaggatgggaggagcgtattggaagcggcgaaaaaaaataggagttgaggttatgacttatgagatgggaccagtggggtggaggcggatcaataactcatcatctatataaatttagctattacatttgactacatcctcttaatttcaaatcgattaatttggtctttaggtgtatttagtctttatacattgacgacttgggagattaaatagggactttctatgtcaccacttaaataataattaaatccacctatttttgttaatacgaattaaattgatctgatttaaactacaggaattaaaatt

SEQ ID NO: 86694 - DNA, 409 bp, Glycine max
  unsure (1)..(409): unsure at all n locations
tgcacgcatgcaagctatttcttgattcttgaatcttgagtcttgaatcttgagtctcgaanncctganctcttgtatatcttgaactcattctttgattgaccttcgagctttttgtcatcacctttgtcatcatcttttgttgtcatctttgttatcatcaaaacatctttgaatcactcttgatctnntnatgagacctttgcttgtacaatctccccctttttgatgatgacaatcttctgaaattaagaaacacacacacacacacacactttttgctagtcgaacactcacataaatatccattctccccctttgtgttgaatgtatgcttatcttacaattaagctgattactcatgtgagatcttgatttaatccttatctctcttcccctttatcatcaa

SEQ ID NO: 86695 - DNA, 390 bp, Glycine max
atcttagcactgagctgcacttgttatgtgagtaccctccttttttaacaaaattttattggggagtgttcttcatctagctctttttttgttaccctctgagatgtttactgtgaatattctctcggggagtgatgtcaactgaaaaagattgttgttttttatgattacgaggcgaatgggtcatttgcaatggtgcccttggtggaggctgggaagatggagatgatgatggtgatgaatgagagcaaaaagaaacttggaagcttccacatatgtgccttgtgcacctgctgtggaggagcaaaaaggatgtgctatacctctccttgttgctatgccatcaattgcaacattcctcatacaccttttggcttttgctcattcaca

SEQ ID NO: 86696 - DNA, 360 bp, Glycine max
tattataaaattaatcattttataattgcataaattcctattgtattctatttattcctaaatctggagttacataatttttttattaatctaattatgatgtccatggcaatacgaaacatttgattaacaagaactaacatttaattaattatgattactttattactttatttgttttttgtattacataattcttttctcaatttgttggcaattaatcgtgaatgaaatttatggagtaaatagtagaaaaaagttgtaataaatttatttgttaattaaataacttttttaaaactatttctaattcccacttcttagtgaaaaaatacttataaagtatatatgatacaccta

SEQ ID NO: 86697 - DNA, 265 bp, Glycine max
  unsure (1)..(265): unsure at all n locations
caagtgggcctggttgctattttcacccccattttgactaaatgcaccccncctttctattngtggggaattttttttccgtaacgtatcgaacattactaatttcatcacgaaacttattttttcttctccaaggttaccaacccatacgaattacgtgctcactttgtttagctatcgaagaanntncagaaactacggattgcgcaaaaacatctcttttcgacttctagcacattacggaattacactgatcgagcagcct

SEQ ID NO: 86698 - DNA, 379 bp, Glycine max
  unsure (1)..(379): unsure at all n locations
cgcgtgacattngtcaactctgatttttattgaataaaacattattttggtcattaaatcaaagtatctctcgttcttaaatatttttaaactaaacaaattatacaataagtgttttattttttacagaacaagaagttgttaaaaatattattatttttttactaaaagaagttgttaaagtaatagaaatcaagttattatcattcaaatattaaaaaacaatcttcaaattaaactcttgggaacatttggttgagttgagttgaatttttttcttatttgagaattatgatttcagaaaaatttgattattgaaaactatgattcatgtataaatatatttgatgagttgtaacatatttattggaattaaata

SEQ ID NO: 86699 - DNA, 428 bp, Glycine max
  unsure (1)..(428): unsure at all n locations
gcttgccacccagctcacccaagcgagcattgttgcttcctccagaagcaacatccctttggaggaatcttctggagggcccaagtgggcctgggtgctatttgcacccccatttttactaaatacaccccctgcccttgtttggtgattcttttttcgtaaagctacggaaacttacgaatttcgtaacgaaacttggnttctttctgtaatgttatggaaccttgcggattacataatcatcccctttttgacttacggaatgttaccgaacttcactaattgtgcaacgatgcttccttttgatttcggtgtgtcacggaaccttaccgattgtgcatcaataattttctttgatatttggcacgtcacggaatttcacaaattgcctaatgatgggtgtcacacacctcaaaataccaaaaaca

SEQ ID NO: 86700 - DNA, 451 bp, Glycine max
gctttaagttgtagaattggccacaaacagtatggccagattatcaagagaatatccgttaaatccggtatgtacaatgtgctaaatattgactagcctctggacaggaaagaactgcagcaacagagatgtgattgatggtgtggcaaattgagttaaatttttacaaaggctaagctgtggcaaatcgagcatcaggtgttcgtgtctttaattctgggcgatgattgtggtttgggatgagttgaaaggatgtgtaattttttgtgccaatgggtttgtcagtactttataagtactataagccaagaaaccatgaccgtgagaagttgttcatggtacgttgcctcacccttttgatttggacaagacagatttcatggattggaggcactcccatctgggaaataagccttccttgcctagttggtaattccaagtttcttacttc

SEQ ID NO: 86701 - DNA, 329 bp, Glycine max
ttggaagaaatacacatacttcgagccatgcacacattattgacattacgagttgaataagagaggtctatattctgacagggacaaaagtagacatcaacagtggaaccgattgccgtcgaagttgaagattttgaaactgaataaaggtcatcagcacacacaacttcttgaaggaggaccttatgtgtatcttgcgaattgacgagacagatatgaggacgaaattctaatacagagttatctctggcatactactcacactaacatgtttatgaatagaagacatgtactattttgaatcaaaagtataccatgtcatagagaat

SEQ ID NO: 86702 - DNA, 423 bp, Glycine max
  unsure (1)..(423): unsure at all n locations
agcnttggggctgaaatactatataacaactccaaggttctagattaggctctcttctctctctcctctcctctcctctctctctctttcgttttagttttagagtgctactctctttttcgttttagtcactttttcgtatagcaatagaatttcgctcttcaatctataattctgttctctattgagtaatggaaggctaagtctccagcgtcgttttctcttgaggatcaagcacagttctctttgaggttctattattactgttaaattctgatcattctttcctcttcactaattactctgtattcgatggtattaattcatgcatgcttagtgcttgaataattgtctctgtgctctaattacggtcatgcttaaccgatcgctatgaataaatggtgtatgtgtggttaatcacat

SEQ ID NO: 86703 - DNA, 217 bp, Glycine max
gatcttaagtcactgggctgcagcttttgttcagtctatacgacactatctttgcacactctgaggatatctcgtatattgacacctaccgcataccaatgaactgcttctatataatattcacgttgcggtgcgttccgtatagacatcttgcatgcaagaatatacgagatccaatttgtcttgccgtccgagtgagtcaacaacttgctcatac

SEQ ID NO: 86704 - DNA, 438 bp, Glycine max
  unsure (1)..(438): unsure at all n locations
gcttttgatcattctatgtacccatggtggtccacaatgtggtttgtgtatttctattctcgtttcatttactttttatacccnctcttgacgtgcttaagccattttacttaagtcatttctcgcttaacttaaaaataaaataaatatccaccgaacgtttgaattgtattatccgttaacttcggttaaaatgaattccgaccgttcggtcgtgccgtaaccacgttggaaatcaaaaagagataaaataataatataataataaaaaatgttcattagtaaaataaagcggaaaatcaatcggacgttttctctctgggatttctcattcttaattgaattgactaataactaaggtgaaactaaggctaaaatcaactcgcctaatcaagctcgtccacaaaaatagggttttgaagattgtcatttcaatct

SEQ ID NO: 86705 - DNA, 352 bp, Glycine max
cttatgcctacggttttaaatattggtttttaatgtaaaaaaaaaagcatgaaaatagggacttgttggtaagagtgtaagctgccccatgattggtatttttacacctaagtgacgtgggagatgcttttcaatggtgtgtagatatatgtgtaaatatgtatggcataaaaatgtgttgcaaagtgtgtgaatatatggcataaaaataccttgcaaagtgaatgatagtaaataatgtatttcaaaatatgtatattggtggataagtagcataagaggcttttcaaaaaatgtacccatgccacgatggcacaagaatgcttccccaatgaatatatgatgtggaatt

SEQ ID NO: 86706 - DNA, 409 bp, Glycine max
  unsure (1)..(409): unsure at all n locations
tttcgagcgtctcaatatattactggactcaatcagacatccgagtaaaaagttatcttcgtttgaattagctctgaggttcagaattcaatttcgagcgtctagatatattacgggactcaatcagacatccgagcaaaaagttattgtcgtttgaattagctcagaacttcataattcaatttcgatcgtctcaatatatttcgggactcaatcagacatcttgagtaaaaaagtattgtcggttgaatttgctgagagcttcaacattcaatttcaagcgtctcgatctattacgggactcaatcagacattcgagtaaaaagttattgtcgtttgaatatgctgagagcttcaacattcaatntagagcgtctcgattattatgggactcaatcagacattcgag

SEQ ID NO: 86707 - DNA, 398 bp, Glycine max
tgttctctcttcttaccagacattcaattcactcagaataaacttcaaacattccaattctcatatacatagtcacagttttgaaattttaaaaatacaaataaaatagaagtgttattttgaaacaaaaagagttaataataaatcagattcctgaaagtgataatttatgtagctttgatccctaaacatgtaccgttagtccccaaaagtgtcaacttgttaacaagttcatactaccatttgtgaactagcaaacaatttcatccctagaatgacgacttataatgtgtataaatgagagctttcataaaccatagcaacacaagatgccactttctgaaccacaatttgtagtatcaactaaaatcataacagagcaggcaacaatatcactg

SEQ ID NO: 86708 - DNA, 384 bp, Glycine max
tacttattatgcatagcaatttcttttcataaatatatcaactgactatataattgtaatatggagaaacttcttgcatcatatgatcaaaagatcactactagatgccaaaaccagaatatgttgaatcgcttcttgtatttttctgtatcaattcattatttctgtagcaactatatgatgattacgtgtagttaattatgattttgcattactgcagtaaatgagacatttgcctgtatactttagaattaaatgcttctccatggtgttgggtctaggttgacttttattttaaacccagtcaacatagctggttcattgtttattatggtctcattccgtcattctgtagatcctttgatattttagtgttctcatcta

SEQ ID NO: 86709 - DNA, 443 bp, Glycine max
acatattacaactatatacacactatgcattcatccagctcctgtgttaacccaccctcacataaacctataatacatataatcttagtagaatacatcttattcaaacccttttaactgtaacatggctatactattttgaagaacagttcacggaagtgtatcaatgggagatgagcatgaagcttagttagctaaattgtaataaactaacaataaggtcacgtacaatttgaaaactagctaaattgtaaattcgtcaatcaagaaaattatatttatgtgttgatattattgctctgaccaaagcaccattatatgatatattatctatgcaatgcggtgaatctatggctcttccttctaaataagctaactattaatacatgcttatctgctgtgggacattatatatattcaaccaatgggagaataataacgct

SEQ ID NO: 86710 - DNA, 295 bp, Glycine max
  unsure (1)..(295): unsure at all n locations
ttaagctataataaggatctaagaattactgacattcgctctcgattcaccaagactaatcncttccatagacataagcttaccgtcttatttaccaaacctttacttcccaaagaactgctccaatgagaacaatccatgtttcaaagacaacttactatgctgtagactttggctttcataacatggactatctgaaatcatgcacataagttattaatgctgatataagaaacatctaaagcttaaaaactatatttgcttgcaactcattgatattccagtgactacatga

SEQ ID NO: 86711 - DNA, 259 bp, Glycine max
  unsure (1)..(259): unsure at all n locations
ttttaaaagagccgaaaaacttagcttgcccacaacctctcaatagcaagcaccctncctggatacaaccagagctcacgacctccccctaaatagcgagctcaccgcaagacaaaaacatgaaataacaaacagtcccatactagacaactcaaaggccccaatacaaggctaaaccctatctaccaacaggcaaaaaccctgcctaatgaacgaaacccaatctaatattacaaagaaagcgggccctacttaccca

SEQ ID NO: 86712 - DNA, 432 bp, Glycine max
  unsure (1)..(432): unsure at all n locations
catgcaagcttgttctccaacgctctgttcangctttctctaaatctaaaggtaaacctatgatctctatcagacactatgctagatggcacaccatgtaatctgacaatctcactaatatacagggaggtcaacttttcccaggaaaatgtgatattaatgggaataaagtgagcagactatgttagtctatcaattaataacccagatagaatccaaacctctgggggtcctatgtagttctaccacataatccggggaaatactgtcccacttccattggggtatcttctagggttgtaacttccttgaacgtctctgatgttctatcttagccttctgatagactaaacatgcatacataaactcactaacctttctcttcatgttgatccacacaaacattatctttaaatcctgatacattttggt

SEQ ID NO: 86713 - DNA, 355 bp, Glycine max
ctgtgcagaatacgaaaaatgtgagtgacatcaccttgatgttgggcaaccaaattcaagtgcctccaccagtagtagcacctgcacctgaacctatcaagcttcattctacacctgaaaaagaggatgagatatttgcacaaaaaagaaagcttcctaacaaaaaatttcatgcacgtggaccttcttctgtaaatctgacttacagcaagcccctatccctcttccattcccacctagagaaattctaaacaaaatgatggaagaagcggaaaaggagatcttggagaccttcataaaagtagaggtgaacatacctctgctagatgccatcaagcaaattccaagatatgcc

SEQ ID NO: 86714 - DNA, 454 bp, Glycine max
cagcttgagatgatgaagtgttgaagggagatactttctgctattattgttgaccacagagcggcacctggagatatgtcgcaggggtcatgagaccttggggacgtcaagtggggcgctattgcccaaaaccaagcttgaccaatcccgacccaacccgggcatagtcggtcagtgagaacctgggatgtacctaagcaggcgagctcctggcagtcaactgataaaaggaaaacaagaccacctagcacggaggcttgtggtggctggccagctgcgaattctgtgtaatatgtggattgtggcctctggtaatcaattactaagggtggggaatcgattacaatgcttaaaattgaagacaggaggctaacatggtctctggtaatcgattaccaatgggtgttatcgattaccatgcttgaaaacaagttaggacacttatggagcctct

SEQ ID NO: 86715 - DNA, 301 bp, Glycine max
attacatgggttacgcagatgcatcttaaccgaggaatctattgacagataatattctaattggttgtttcaaaattaaaccaatgaaaatgtaacttcacagggccttaatatcagtttcaaagtaaaacgagggagataacaactctagcatgcggtgtaatatcaagagatgtatcatgtataaatgattcaagtagatcgagcaactcggaagataacataagaaatctaattgcttcaagatatctacgtattttactgtactcccgactttttcataaatggattctttatgatg

SEQ ID NO: 86716 - DNA, 362 bp, Glycine max
gctttataaggacgacatggtgactgtgaactggtcggtgcgtgagacgggtggcttgggaagctctactaagaacaccaactgactctggagattttcttgcctggctgcgctacatgagatgtcctatttgtcccactgttagggaagttgctaagtgttcacttgcgcttgcgcgccaataccacgatgaatgcttcgttagatgttctttgtgctacgagaatggacttgacaatgcccccgctgctgctggaaagatatgtatctcacctttggtgcgccttgttttcattttcaggtgcattattttttaattacaaagcctcattttaaatttatccttttctgggggccgttca

SEQ ID NO: 86717 - DNA, 319 bp, Glycine max
  unsure (1)..(319): unsure at all n locations
atgatgcctcctctcacttcttctccttatcttccactccatctccataggggaaaatcaccattcgaggacctccgtgaactcaaaatctacctcctaaagcttccaaccagctttcatcaagtggtaatcagagcataagaacttcaagtaggtgctccttaaacctccattaattatcaactttacattctcccccattgatggtgcttcatctttctccatgtatcttctcacatgtctcgtgctacatgttgntaacatgattctttaaaattccaccgcataaacttgctataaaagctagattagcttttct

SEQ ID NO: 86718 - DNA, 263 bp, Glycine max
  unsure (1)..(263): unsure at all n locations
ttttatgcgaanaggatgaccctacggctgctaactcgtcaatcacttcggtatggctattgatatgcgggaagggatatttttgaatgccgaaacctaccccctttcgtcattcttatattttggtgcaggggtggctacacggtgtttgtttcatccaaaatttcgcatttatttttgcaattgactcccatttctcttactgtgataccctatataaattttctacgatgtttcaatttttacaccttgacaactcaaaa

SEQ ID NO: 86719 - DNA, 449 bp, Glycine max
  unsure (1)..(449): unsure at all n locations
cagcttaaagagcttcaatggacgaagagaatgatagagagaggcgggggngggtgtttggttaataaatgagattatggagagaagctgaactttgaagtgtgtctcacaaatttcacattcatcatagtcatgacaagtgtcacacatgtttctattatagcccaacacatgggaagcttccttgataaacaaggaaggtagcttccttgggaagctataggaagaaagcttccttgagaagctagaggggggctactcacacccctccaatagctaagctcacccacatgccacaaatactatgggaagcttccttgagaagcaaggatggtatcttccgtgggaagcatggaagaaagcttccttgataagctagataagggctactcacacccctgcaatagcttatttcactccatgcccaatatcattgaaatattataaaa

SEQ ID NO: 86720 - DNA, 390 bp, Glycine max
  unsure (1)..(390): unsure at all n locations
actcatttgttatcttctttcgccaactaaattgacaacgttacaacactatggttgtcttatcttaaaatactctcttgcgattcgacactcttatctatgaacatctcccatctttgaatagagtacatagcattgacccagttaaagatcccaactagtcgttatctaatagcttaagtgctatacacgacgttgttattgtgtagagagagtgtgtcttgaccataaacactttctgtgacatttcttcagaatagttcaacttgtctatgtcaccttgtgctcagagctgactttcaacgttttaatcagatatcatggtaacaacatacgccacaaggagttatggatgtcaagacaaaccaatttanatcttctattttgtgt

SEQ ID NO: 86721 - DNA, 430 bp, Glycine max
tacatacatccatctaaaaactaagcttatctctgtgactaaatacatgatattacaaaaaaaagtccctactacaaagactacccaaaatgccctcaaatacaaggctaaaaccctatactacaagaatggccaaaatacaaggcccaaaagaaagaaaaacctattctaatatttatatagataagcgggctcatacttagcccatgggcccgaaatctaccctaaggctcatgagaaccctaaggccttcccttggatctctggcccaatttacttggagtcttctatccaatgcccttacaagggaggattgcatcattccctccaccttggaaaggatttgacctcaaatcccgaggttcttcatactctgggctccttccctcgacacctgtaaaaaaaacaaaaatatatgtattagtggtgt

SEQ ID NO: 86722 - DNA, 379 bp, Glycine max
  unsure (1)..(379): unsure at all n locations
tccagagtcgacgtgtgccatgacgactatgatgatgtgagtcttttccttacccatgatgacttagactggaatcaattcaaagaaacacgagtcagaactcaaaataactataaaccaaattatcacacaactaaataacaagggtaaggtataatccaaattcacacatttatagttaccaataacaaaaaatttctaaaacagtgaaagccaagagaaatattctaaaaagtaaatcaatctgtaacagcaaaaacaaactcaaaagcatatggaaatctaacagaanaatccatatgggaacaacaaaacanacatatcanacatggttcgcatcatacatagaaccttattcagtatccacagtgttttcaat

SEQ ID NO: 86723 - DNA, 412 bp, Glycine max
  unsure (1)..(412): unsure at all n locations
gcttatgatgaatcaagaatgattcattgtgttntgatgataaaaaagatgatgacgaaaagctcataagtcaagatcacttcatgataacaaagatgatgacattcaagatggagttccagattgagtcaagaacacttcaaggaacanaagaaaatttgatttcaagaatcaagattcaagattcaagattcaagaataatcaagatcaagatccaagactcatagattcaagaatcaagagaagacttaatcaagataagtattaaaaagtttttcaaaacattgagtagcacaagttttcacaaaatcattaccaaagaattttactctctggtaatcgattaccagattatagtaatcgattaccagtggttntaaaacgctaagatntttcaaattcaaaatgaag

SEQ ID NO: 86724 - DNA, 300 bp, Glycine max
aataataaaattgtacctgacacaacggactgaggtttgtgctactcttctgaccaccatacagacctttgcccttctatgcatcaacctgtagcaattgagcaatcttgagcttatgctgcagacatttacaatatacctcctcaacctcatcagcacatacgacctctgcagaacaattatgaccttctcagcaacagatacaaccctggatggaggaatcaccctaatctcagatggtctagccctaacagcaacaacagcatactgctgcttacttccaaatgctggtgggccaag

SEQ ID NO: 86725 - DNA, 240 bp, Glycine max
ggatactttagtcaccgccgcagcagcttttcgctgactttcaaatattacttgtgcacgaatttaggggtaaggggcctattcttggaataaaatccctaggattttttaagctacacacttggagcccttactccaagtctcgatttattgaacttcttttgggtgaacctctcatggtaataatagactaactttccccttggtgggagcttgcataccaaaatttggtgtttacac

SEQ ID NO: 86726 - DNA, 369 bp, Glycine max
cgtggttactatcattgggagaatctctttctctgtgtttaggaggcgctacgttgagttgccaagtctgttcatcttcgggcgtattctttgaaagattcgtgcccaccttttgcacactttattgtagtagcattctatccggagccatatcacaattgtactgactctgactaatgaaggcacccattacgctcttccaagaatggactcgggaaggttcctaacttagtataccaggcgacagatgtgctattaagactttctgaggacaaatgtggcaacagtttctcatcttttgcgtatgcccccatcctgcgacagtacatctttatatggatcttgggcgagtagttcccttgtacttgc

SEQ ID NO: 86727 - DNA, 251 bp, Glycine max
ttgggaaatacgatcgggctccttgtgtgagacatagaatccttggagagtctgagctctcatgtaaattgagctacgcgaagaatcttcttggggtaatgattgacctggctagtgttctacaccgcagatgtggcatgccgatatttgtatgatagaagagcgagagggacttatcaccttgaattgctgagggaacttggtgatgtgttgcgacgatggctatatatgtctggaccattgcttgtttt

SEQ ID NO: 86728 - DNA, 414 bp, Glycine max
  unsure (1)..(414): unsure at all n locations
atcatgaactttgtcatctcggttaagtatacaactcgtctcaacaatgataaaactggccatatttctcctactagatggttgcgtcgaggcaaccctctatccctatctttttatcatttgtgtagaggatctatcgactctaatcaagagacatgaagtgagggggtacatccaccgcgtgagcatttgtaggaaaatagttttgcatctcctttntgtaacgccctaaaattatgctaactgtaaattgatgtttaaatgtatttattatgttatttgattatgtgattaactcggatgatttgaggtattgtgtgaattatccatgtgtggtttgcttgaatgtggatgttgagttatgtggagttctattaacttaaatcaaaattatgagatctcaagttttaccta

SEQ ID NO: 86729 - DNA, 396 bp, Glycine max
  unsure (1)..(396): unsure at all n locations
ctacttttttctctaatacagaaaccgactcttactattaccccaccactataaatggagcttcgggagcaacacaccttgagtttgtcctattaacttttttctgggaaaagagatgcgctttgttgataataatctgcccactggacctctgattttggtgatgttgacccacagcacatttggtgttttgaaccttttctcttacaaagaagagattgatcgccacattgttgatttttgcctatgaagaatgngtatatgtgagtgtgccacaacgctttgattatctccgataatatgaggcttgtgagtatgaacaccacattcttgtaatgaggtttatagccacaggatgccaggtgaagttagatccaacctctatactctacttgt

SEQ ID NO: 86730 - DNA, 249 bp, Glycine max
agtactccagatcttctatagttcacattcgagcatctctgtgtattatcagcctgaatccgacattcatgtgaagagttatgaccatttgaatgtctcctgagccttcgctgctgaattatgagccgctttacctattatgcgctggaatcgcgaatccgcgagagaagttttgaccgtttgtatatcacgacagcttgtgatgttcaatttgagcgaatcattttatcatgaggccgactctgacct

SEQ ID NO: 86731 - DNA, 409 bp, Glycine max
  unsure (1)..(409): unsure at all n locations
gtatgctaagtgtgtgaatttgtcatgtagaagggttctcggacttcttcngtggtttcaaggtccaccctcatattttcttcattatgttgtcggaagaacaatagtctccttgtcgacggttccccaacttcaacaagaatcatggcgtatgtgtcatatgtaagtcggtaaggaatttagttggtggttatctagggtgtacaatggtatgctcagagtatgctatagagttcttctttccataggcccttagacttgtcaagtctagttcacagggctttgagaatgactttgttagttgtctctgcctgtccgttagtctgaggatgtttgatagaggtgaccangtgcttaatgcctagccttgttagaaagtcttcgtaagtctgagctttgaattaagtgt

SEQ ID NO: 86732 - DNA, 309 bp, Glycine max
aagctgtcaatgaatttttaaaaaaatacgcctcataaggcataaaacagtccctcacactccacagcagaatggtttggcagaaagaatgaatacgaccattttggaaagagtgaggtgtatgcttctaagtgcaggactgccaaagaccttttggggagaagctgcaaatacaacaacatatttgattaatagatgtccatcatcagccttagatttcaagacaccaatggaagcttggagtggtgaaccacctgattattcagaattaaaggtgtttggatcgctggcctttgctcatgttaaaca

SEQ ID NO: 86733 - DNA, 341 bp, Glycine max
  unsure (1)..(341): unsure at all n locations
caacagccttctggaggaatattctggagggcccaagtgggcctggttgctatttgcacccccttttttttactaaatgcatcccccttctatttttttggtaattctttttcccgaacgttaccaaactttacgaaattcgtaacgatacttaatttccttccgcaaggttacgaatccttacggattatgtatttactcttttttaggtttcgaagaagttacggaaacttacggattgcgcaaaacacctctnttcaatttccgccacattaccgaatttcatggatcgcgcaagccttgcttctttataattctgagacgtctcgggactttattta

SEQ ID NO: 86734 - DNA, 332 bp, Glycine max
agcttgtcataacagaatgacaactgataaataattatgctgagtcagaatgctggctcagcttatactctatttaaatggggtctgttaacacaaatgtccaatcctcaatatgttttaagaaaaccccttaaaagtgcacacattacattagataggatgaaatgcctaatcttattccatgtgaactgctgtgccataaaaacctccttaatcaaccaagcatataacacaaatattatgagatagtgctttttgtgtgatattcaaatctgcaacaatagttactgttagttgagttgggaataaagaaaaggataaaataataaaat

SEQ ID NO: 86735 - DNA, 330 bp, Glycine max
agctttgaacaatatacttgcccttcatttaactgtctttgcgcttggcggccccgctcaacaaagtactttcgacacctactgtacgttgatttgaccaatgttgttatgagaatgttgcgacaatccttcaaaaccttattgatacattctgagaggttggttgtcatgtggccatatcgacgtccttctctatcataagccatcgtccatttttcctttgaaattcgatcaatccatgtggctatggctggactcagttcacgaaatttttctaaattttgatcaaaaatgtgcttgcaaggagtgtaggctgcataaaattagtta

SEQ ID NO: 86736 - DNA, 503 bp, Glycine max
ctctcccttaatgatgatgacaacttctgatatcatgatacacacacacacactttttcctagtcgatcactctcataaatttccattctcccccttcgtttttgaatttatgcttctcttaagattaagttgactactcatgtgaattcttgattgaatccctatttctctccccctttggcatcaacaaaaagccaaagtgcgtaacaaatttgaggcatgcaaatacatctaagcatccatacaacattcatggaacaatataaaccatatcatgaagcacgaaccatgatgcatgaatcataaatagatcatatataaaaaccacattgtcaaataacataattaatatttgttcaacataccatgcaaataaagaaatagtaaattgttcaaatatcataataatatagattatttggataagtcactggcatctaacagtcctaattctcttctaatggtgtagaacgtattcttacttagtggttatgtaaaatgt

SEQ ID NO: 86737 - DNA, 328 bp, Glycine max
agcttcaatgtggcaccatctatttggcagtttaaagttagggcacttgtcagtcatgtgagggcgaccacgatcaacacaaccggagaaattactacctaatactataatttaaagtgctttcttgtaggcatcaacatatttatattggtgcttcctattatacagaagcaaacttgcataacttcgatgctagattccaatatacataccccagaaaccctaaataaatcaatccccagaaagcaagctataaacatcattgaggcattgtttgcgacattcataatcagaaggttgccaaagtcacaaaaagtacctgagacaa

SEQ ID NO: 86738 - DNA, 498 bp, Glycine max
  unsure (1)..(498): unsure at all n locations
tcatttccaaatatgcatgtgaattatgacgcatcaacaagaatcaagccaaggctattgtgcaagcaatcaatggtgaaaaacataccaaatgattatgatgatggatggctcacattctcacaaaggtaaaatcatcactttcaaattgagctttcataactattatgacatgtagagaagaatcaaggatttcaagtcacaaaatgtcaagaacttttattttcaaaacaattacccatttcttgaacatatcctataattcaaagaacaacatgcatagtcgtacgtgtacacaaaattgacccanaatattaaactaaaaattcgacgaaactaacaacattaacagattatcacaactaacaaattaacaaaaccaacgaaactagcataacctaagaacactccccctccacccatacttaaacaacacaattgtctcaatgtagcacaattataaagatatataacaattcaatcatcatagagaatccg

SEQ ID NO: 86739 - DNA, 329 bp, Glycine max
tagcttctatggaggctgtttctttgagcttcaatgaggttccgaatggagattttccaccatacagttgcagcggaagacaactgagaagaggtgagaggagacgccatccactaaggaataagccatggaaagagaagcttcaccaccaagacaatgtcttagataagaagcttagataggaagcctcaatggaggaagagaatgacagagagaaagcggcgtggaaaattgaaggaagaaagggagagaagtttaactttgaagagtgtctcacaagactctcattcatcaaaggtgtgacaagtgttacacatgtttctatttat

SEQ ID NO: 86740 - DNA, 363 bp, Glycine max
ctctagtcgcccgggatcttatagggacctgagctgcgagctgggagagagcttgtttgatgacagagagagggggataaagagaggatggtgagctccgtatttaaggataaaaatgggggagaagatgaactttgaggtggagctgacgagactttcattgatgaaagtgacaacaagtgttacacagtggtctgattataaactagagttgcttccttgggaagcgttcttgagaaaacttacttgagaagctgttttgaaaaaacttcgtggggaagctgtagcttagctacacacaccgctctaatgactaagctcagctccttgaaaagcttgcttgaaaagagtcctaaagaagct

SEQ ID NO: 86741 - DNA, 462 bp, Glycine max
  unsure (1)..(462): unsure at all n locations
tgctcgtggagcttctatggaggctggatcttngagcttccatgatgtccttcaatggtgattattcgccatggagatgcacgggaaggcaaaggagaagagaagaggggaggcaccatccactaaggaataagccaaggaagaaggagcttcaccaccaagaattgccttggataagaagcttgaagaggatgctttaatggaggaaaagaaagagagaatgggggagcacgaaattgaatgaataaaagagggagagaagtggaactttgaagtgtatctcataagactctcattcatcaaagttacaacaagtggtacacatgtttctatttatagactacgtagctatcttgagaagctatcttgagaaaacttccttgagaagcttctttgagaaaacactcttgagaagctagagcttatctacacacacccctctcataactaagctcactttct

SEQ ID NO: 86742 - DNA, 329 bp, Glycine max
agcttgtagtgaggcttggctacaaaaataattggtttttctaggattgaaaggcttggattctaagagagcacaaatcccaaacttatccaagtagtcttttcaatacaattagcttattcactagcctttcattttaacttgtatttgaccttattacaacaacacacactttctttgattgctttttttttttcctcttcttttttattttttttatttttttttaacacaacttatttgttgtgtgtgctgatgtgctttgccttccactttacatcgcggttaactcccccaaatttagggaaaatttccttgaaccatcttga

SEQ ID NO: 86743 - DNA, 422 bp, Glycine max
  unsure (1)..(422): unsure at all n locations
ccgaattatatcgaattgaagttagcttagcttatccttggccagcttagtggaccaaatcagcctcaaatgcaagggttgtgggctaagcgcttgagactctatgcttagcgcatgaccaaagatgcgcttagcacgaagttggcgcttctcataaggactgtttttcaataaatgttttataagttatttntcagtcccttcctcaacaaattgagacccatatatctaacattcaaagataggttgatatactcctatgtatagattatgtagcacgttcccaatgatctaatgcatganaacaaaaattacagaaattaaaactgggttacctcccangatgcacttctttaatgtcattagcttgacgcttttacctcactgggcaatcttatgttttggtcttacttcatacctct

SEQ ID NO: 86744 - DNA, 326 bp, Glycine max
agcttattttgaacattcttatgttacataatgcttcaaacagcattttgaaacacggctattttcagaggttttctccttggaacattttcttggtttaagtttaatttcccgtttcgcttagtttttatttggtgacttccatttagtcctgtggagaaaaatgttcaggttctcaaagtttggctttctgtaattctaacttggctatggtccccaagtgaacttcatctggaccatccgcgattctcagtgtccttgcagctgcccagagatgtgccaggactgtgtcagatgatacaccagctgctccatgcacttgtatt

SEQ ID NO: 86745 - DNA, 327 bp, Glycine max
agcttcaagaataactgtctcatcaaattatttatttcccgaagggaattctataaataggccttctatttttaatggcgtgggttaccattattggaaaacccgcatgcaaatttttatagaggcaaaagatcttaatatctaggaagcaataaaaattgggccctacattcccattatggtagcaggaaatacaaccatagaaaaacctatggaagaatggagtgaggaagaaaagagattagttcaatacaatttaaaagccaaaaatataattgcatctgctttaggaatggatgagtacgttagggtatcaaattgtaaaag

SEQ ID NO: 86746 - DNA, 300 bp, Glycine max
  unsure (1)..(300): unsure at all n locations
tattcaaatgattcatatgaatatgcgcataacatctatgccaaagccacacatcatgattcttactcaacaaacattttgatttactaagggatgctttttctaaatccaacatttagatattatcaagtctatntcctatcaacttcgtgtcatttaaagcattacaaatgccaaaacttgaagtgaacgaaatatcacagccttctgttttctctctgaaccatacccaagttcagtcctacccatgacacacttttgagaacttataaggcatctaagttttcttttccacttgtg

SEQ ID NO: 86747 - DNA, 318 bp, Glycine max
agcttacggcaaagattcttattatccaacagaataatcgaaatctgagaaaccaaatcaaatgccgaaaagccacgactactgaatgctacacgaaagccatataaaatggcgccacaattccacaagcaaaactgagcatctcccaatatctgcggcatatataggaaaaaagcacacctccactgtgatggcgaagggcacctccactgtgattccgtaaaggcacaatctcatgtatattgcaaaacacgttgcgttttctcttgcggaagagataccataacccgtggtggacgagaattgctatccggaagc

SEQ ID NO: 86748 - DNA, 297 bp, Glycine max
agacaagacacggattctgtgagtcgattccatgttgtctgcacatgccgcagagctggagtgtgaaattgcacgctacaagtggggcttctctctacgacacgtatcttatcaaaggtcgcttcaccaaactcatatacgcctggtttctcaattgaaaaaacccacttatgcaagtatgccatggctggttccagacatttcgctacctgcatggaccatttatgtgctgattaataaattaatgaatggagactatgattctatttttttaacgcatcgccttctatttccctt

SEQ ID NO: 86749 - DNA, 126 bp, Glycine max
tagacttgagcttcatgaggtcttcatggtgatttcaccatggacagcgggggtgattaggagaaacgggaaggagggtcgtccgctgggtatattcgtccagaaaagattagaccatagaggcct

SEQ ID NO: 86750 - DNA, 326 bp, Glycine max
  unsure (1)..(326): unsure at all n locations
agcttgnatgttaatttctgttgtttctagctccggactataaaaggctatggagaaaagtgttgcaaaatattgaaaggaatttgcagccatgttttttgtgaagcttcaaatgataaactgaatatggatatattcttcggagttattggtcagtgatcacacttcatctactttaaagggtaagaatagtatgtaaaatgaactgatgaagataatgatgccagggaacccaaattttggtcccagagaaaaaatagaatcattaattaattaattctataaaaagtaccacaagccccacctttttgggggattttctggaa

SEQ ID NO: 86751 - DNA, 323 bp, Glycine max
agcttgtagggttaaagtctcacgattgtcatgtgctcatgcaacaattgttagccgtggctatacgagacatcttgccaaacaaagtcaggttcacgataactcgcctgtgctttttcttccatgctatatgtagcaaagtgattgatctagtaatgtttgatgagttggaaaatgaggccgcaattatactgtgccagttggagatgtattttccccctgctttctttgacatcatgattcacttgattgtgcatatggtcagagaaatcaaatgctgtggtcctgtttatctacggtggatgtacccggttgagcgatac

SEQ ID NO: 86752 - DNA, 401 bp, Glycine max
  unsure (1)..(401): unsure at all n locations
taatacccantatcacatctacaggaccaatgtccttcatatcaaaatntctagataagaaagacttcgcatcatttatgaattacatattattatcaaatatcaatatgtcatccacatacaaacataaaatgacacattcattatcatcaaattgtttcacatacacacatttatcagtattattgatttgaaaaccatacgaaagaataacttgattcaaattttctgtcaatgctttgaagcttgtttcacacaatgcaaagatttaacaaattaatttttaaggaaaaatattttcaaagaaagtgacatctctagattgcataatagtaacattagaaatttaatcactcgtgaattaacaactaagaatctatantagtattatgtaaaaatat

SEQ ID NO: 86753 - DNA, 330 bp, Glycine max
agctttgagcaaattcttacgacaataactttttactcggatgtctgattgagtcccgtaatatatcgagacgctcgaaatggaataccgaagctctgagcaaattcaaacgacaataactttttactcggatgtctgattgagtcccgtaatatatcggaacgctcgaaatggaatgccgtagctctgaacaaattcaaacgactataactttttactcggatgtctgattgagtcccgtaatatatcgagacactctaaatggattactgaagctctgagcaaattcaaactacaataactttttactcggatgtctgattgagtccc

SEQ ID NO: 86754 - DNA, 343 bp, Glycine max
  unsure (1)..(343): unsure at all n locations
tcaagcctctacattcaatntcgagctattcgatatatcacgggactcaatcggacatacgagtatacgttattgtaggtcgaatataccgagggctcccgtattccatctcgagcgtctcgatatattacgggactcaatcggacatgcgagtaaaaagttattgtcgctagaagttgatcacagacttggcattccatttctagtatcacgttgtattacgggactcaatctcacattcgataaaaagctattgcattttgattctgctcacggcttctgtatacatgtccatcgttctatgtattacgggactcaatcagacatccgagtgaaaagttat

SEQ ID NO: 86755 - DNA, 331 bp, Glycine max
agcttatagtatatcgagatgctcgaaattaaacatcggaagcgctcgagaaattcaatgggtcataatttttcacacggatgtccgattcgggcgcataacatatagaggcgctcaaaattgaacaacagaagctctcgtgaaattcaaatggtcataacttgtaactcggatgtccgattcaggcgcatcacatattgagacgtatgaaattgaataacggaagctctcgagaaattcaaatggtcatagcttttcacaccgaggtccgattcaggcttataacatattgatatgttcgaaattaaagattggaagctctcgtgaaatt

SEQ ID NO: 86756 - DNA, 371 bp, Glycine max
  unsure (1)..(371): unsure at all n locations
aagcttgccgtcacggagtattacactatgctcttgtgtggtggaacangctacaacaggagagagcacgacatgaggagccaatggttgatacatggacggagatgaaaaatatcatgatgaagcggtatgtgccggctagttactcaagggacttgaaattcagctccaaagactaacccaaggcaacaaggtggttgaggagtatttcaaggaaatggatgtgctcatgacttctgcatatattgaacaagatgatgaggttactatggctcgatttcttaatggtttgactaatgatatccgtgatattgctgaactgcacgagactagtgacatggatgaatcgcttcacaaatcagtccaagtgg

SEQ ID NO: 86757 - DNA, 327 bp, Glycine max
agcttctccttccttttctaataaataggggaaggagggaagaacaaaaatgttcaaccctcctggtatctgagattcacttaaaattagtgagaaaaattgtttccgtgaagaaaatccaagctgaggcgcttccgtgacatttccatgggtgatttcgcgaagattttcaaccgttcttcatcgctcgttgttcgttcttcgtcgttcttcagtcttcaacaggtaagttcccgaaattgaacttttcgattcattctatgtacccttagtggtcctcatttgtttcgcgtgcttttattttcatttcatttacttttcgtaccc

SEQ ID NO: 86758 - DNA, 408 bp, Glycine max
  unsure (1)..(408): unsure at all n locations
gatatcaaagacttctntagtcaattggacttgagatgatnttgcctcagtaaacaaaaggcaatcatcagcaaagaaaagatgggaaatagatggcccatttctatccactttcacaggcagccagagttgttcatcaactttttgttgtataagaagagagagcttctccatacacaaaacacaaagataaggagacattgggtcaccttgtctaagacctctnttatgagcaaaggagttcaacttctcactattccatttgagggtcaaagttgttgaagtgatacagttcatgatgagattgacaatttgagaatggaagccaaaatcaataagagtaagcctaatgaaattccaatcaaccctgtcataggctgttttataatcaattttaaacatgacata

SEQ ID NO: 86759 - DNA, 330 bp, Glycine max
agcttgcttgtagagcttctatggaggctggatctttgaacttcaatgaggtcctttaatggtgattttccaccatggagatgcaacggaagacaaaggagaagaggtgagaggaggcgccatccactagggaataagccatggaagaaggagcttcaccaccaagatgagccttggataagaagcttggagaggatgcttcaatggaggaaaagaaagagggagagaaaaagagaggggggagcatgaaattcaaagaagaaaaaagggagagaagttgaactttgagttgtgtctcacaagactctcattcatcaaagttacaacaag

SEQ ID NO: 86760 - DNA, 408 bp, Glycine max
  unsure (1)..(408): unsure at all n locations
ctctactgaggtgagcttagttatgagaggggcgtgtgtagctaatctctatcttctctaggaagatttctcagagaagcttctcaaggaagctttctcaagaaagcttctcaaggaagctacctattctatagatagaagcatgtgtcacacttgttgtaactttgatgaatgagagtcttgtgagacacaactcanaagtcaacttctctccctttttcttccttcaatttcgtgcatcccccctctctctatctgtccctctatcttttcctccattgaagcatccttccaagcttcttatccaaggctcatcttggtggagaagctcttttattcatggcttattccttaatggatggcgcctcctctcacctattctcctatgtcttccgatgcatctgcatg

SEQ ID NO: 86761 - DNA, 243 bp, Glycine max
atggacatgagagtcgaaagtataggtggggtgtgaagataaaagtgcggtggaaataaagatgttgctctagcgtcgaagccagggctaattctggattcagacccaatggctggataatgctgcgtgaaattaaagtaaaaacacagaattagtccattgagcccagatgacaaaggtacgtagtttgttggacagttgaagactaatcatggagtaaaatggtgcccaaagggtcaggaa

SEQ ID NO: 86762 - DNA, 366 bp, Glycine max
  unsure (1)..(366): unsure at all n locations
gagatccaggaacgataaagcggctgaaggaaccagttccgctcccgaatatgacagtcatcgttntaggagcgctgagcaccatcaacactttgaggccatcaagggatggtcatttcttcgggagcgacgcgtccagcttatggacgacgagtatactaacttccacgaggagatagttcgccggcggtgggcatcaatggatacccccatggccaagttcgacctagacatagtcctcgagttttatgccaatgcttggcctacagaggagggtgtaccagatctgcgatcctgtgtgaggtgtcagtggatcccattcgatgcggatgctctcagacaattcctgggatattctttcatgct

SEQ ID NO: 86763 - DNA, 369 bp, Glycine max
cccgatgatcctctagagaccacgctggaagcctgcactgcttcctcagggcttttcctgcgaaggcaaacatttggaaagttagttttcacgaaatataacaatcattacaaacaaggaccaaacaatacttctcatggcacgagtgtcaacatgcactttaaaaaataatcatattggggtcgtgctattttatgacacatacgtatttgcacacataaaaaattttgtgtgaagcattttacgacacctatccatgtacatatttttttgacaaaccttttcatgctacatcctatatatatatacacacatttttttggaaggtttcttttattacctactcacaaatacacatattttgaaaaa

SEQ ID NO: 86764 - DNA, 353 bp, Glycine max
tgacccactaacctataattaaaagaacttaatgccattaacctagggaattaaagaacttaatgactgagtgtaactgaaattgtggcaaccaaaagtcacccccaacagccatcaagtcagcccccatttggtctcccaaaaggctgatgcctatgttgccaattgggcccttattacaacttgaactaaacctaactaaagcccttttagttgattaacccaaaacaatattttggtcaaccaactttactaggattggaccattatttagacaaactaaacactctaaaattgagacaaagtggtgtcatttagtcctcctccatttgggccatgatacaactcacaac

SEQ ID NO: 86765 - DNA, 330 bp, Glycine max
agcttataaccgactcttttttttcactttctaccttcgaagaacaatgcaaaataagtgttctcataatcacacactcttcatattcacaggtctacagacgagacactgatgaacgcattcataatatacaatactttgaaaacacatcagaagcttattgctctaacaacgactcttgattctgaagaacaacatatacgaacgacaaatcaagagactctattttccttatgtagacgtgatcaaaccaatcaattttttcatattttatcctggaaaagaccgatggacacgatggatattacattacgacccaaaaggcaaaat

SEQ ID NO: 86766 - DNA, 324 bp, Glycine max
agcttgttgctggtgctgccccattaacttccctaactcttttagactagtgatccctgtgctcttgaccttgacttgatagaacctctttttgagcgaaggcatttgacttgatcccatgttttactaaagtgaacaaaaccgatgcgaatcaaaactccgacatctatcatgggtggaatggatgaacgcatgaagaaatgcatatgacacagatgcaatttatgaatacgggagcccgagaaattgtctctttcttagatacaacgtcttggggtagcacagtgcctgacatatatatttaagaaggtgacacggaccctc

SEQ ID NO: 86767 - DNA, 232 bp, Glycine max
gttcatagccatcatagtctgtaaagagtatgatgaactaatggacgtcaatatggccacaactgaagccttggaacgagaaaccaagaaggccccgtaggaagaacacgaccaaagcaaagttttgaggggctttatatggcagcaataatgagctcaagctccgaagaggtgaaatgaatcatcacgggtcataggcatgatcttgaaggacgagctaaatgtttgcctt

SEQ ID NO: 86768 - DNA, 333 bp, Glycine max
agcttcttatccactcctttttttgggggagaagctcctcctttcatggcttatcccctacgagatggtgcctgccctctcctcttctacatttacattccgttgcttagacgcggggaccaaacaccgagagaagggacctggtgaaacgcatagatctagccagcatagcaagctccacactacatgctatccatcagattgaatggaaaggcatgtaccctctataggtcccctttagatagggtgcatgtatcaatcacctaattaaggtagaaggaattctattctactcatacagctcgaaactagatgatccttagcgtcctggaa

SEQ ID NO: 86769 - DNA, 365 bp, Glycine max
  unsure (1)..(365): unsure at all n locations
tatgataacttatgaagtacctttaactttggtgtcgagtggtatatattatccattatgaagtcaatttgatcatccacggacaccataagtagtagcatttacctagcaaagaaaaagagaattatatttatttcctttggcgggaggaacaagctaattttnttttcctgaaacagatacctaacagaccaaataaacattaataatcacttagttttctttatgtgttatgcgctctgcctcctctcatattaacaaaaacaagactcaactntttccaataaagacacaattatgttgagtgtgtaagagagagagtatacttgataaatttggcttcaagttcgtggcaggctcaacat

SEQ ID NO: 86770 - DNA, 477 bp, Glycine max
  unsure (1)..(477): unsure at all n locations
acttacccgttgaagactgaagaacatgaataacgaacgatgaatcttgaagaacggtcgagaatcttcgcgtaattactcacggaaacgttaccgaagcgcctcggcttggattntcttcacggaactaattttcctcagctatttcgagagagagagaagtgcctaaggggctgaacccttttctacttcacttctccccctantgtatagaaaatagggggagaagcttgccacccagctcgcccaggcgagctcagctcgcccaggcgagcaagggtgcttcctccagaagcaacaaccttctggaggaatcttctggagggcccacgttggcctggttgctatttgcacccnncattttactaaatacaccccctgcctttttttttgggattctttnttcgtagagtgatgaaacttacgaattcctacgatacttgtttcttctgtatgtacaacctgcgatacatatca

SEQ ID NO: 86771 - DNA, 328 bp, Glycine max
agcttgcttctacactttagccactacaacccaaaagaaaacaaaacaaataaatggctaaaaatctcacaggtctcgttgcataagggtacgattgttgttgcacaaatgtgcatcttttgaagagattagaatagcattgcacaagatgtgcaaatttcttcacaaacaattatggttttttaaagtgcaacattgacacaccaaatttcgtggatcataatagttatgatgctagtatgagcatccttaacagctcaagagattttattcttgcaaagatggttgggcaccatggcaaaccacctccttatgaatatgaagttgc

SEQ ID NO: 86772 - DNA, 476 bp, Glycine max
  unsure (1)..(476): unsure at all n locations
acactatgaaactcagcttccaacctgcttatgtcgcatggctaaattaaaacaatagagattacacacaatcattaaaacattatcaagtaaacttaanatctcaaatctatttcggatttctttcaaatgtaacatgatcttatatgacacaaattgattgtcctcatagtaataatcaacattaaatttagtattaaaaaataagtaagataaatattaacaacacactctctaacacactnatttaatcacactctatcttataggttggaatttattgaaaatgacaaaatttggagggttccacatcatatttaaacaaattttaaaaggaaatcaagatatttgaaggcatatcttatatttgaggctcatntaatttggagtctccacaacaagaagtgagatngatatataataggaaatgatacangagtcanatacgtaccgctatgttaaaaaaatatattatt

SEQ ID NO: 86773 - DNA, 324 bp, Glycine max
agctttttgactcctatttttttggaacttgcttaactcttgattctttggcatcatcaaaataatcttggaagtcattgcttccacaggagattctcttccttagatgcttggaccagatacatagataatgttctggggagaagcattttactcgagaggaaagtagagatatgctagatgaatttaaggctgaattggagaggcataatttccataaatgcctcaccaatttagtcgatgggagcatagacctaactttggtgaaagaattctatgcaaatttttacagttctgaggatcatccaccaaagcagtcctgag

SEQ ID NO: 86774 - DNA, 377 bp, Glycine max
  unsure (1)..(377): unsure at all n locations
ataccctgatgaggatgtcccatatgttcttataactagactggtccattcgcttacaaagagtcatggccttgcaggtgaagacccgcacaaacatctaaaagaattccatattgtctgctccaccatgaaaccaccagatgttcaggaggatcacatatttctgaaggcctttccttattctctatagggagtggcaaaagactggctatattaccatgctccaacgccatcacgagcttggatgacctcaagagagtattattagaaaaaattttccctacttccaggaccacggccatcaganaggatattacatgcattatgcaactaagtggagagagcctatatgaatactgggagaaatttaaaaacta

SEQ ID NO: 86775 - DNA, 331 bp, Glycine max
agctttctcgtgaggcttccttgagaagcttccttgaaaggcttctttgagaagctagagttttaactatccacacccctctaataactaaactaaccttcttaaaaataaaacatggataaaataacacaacaaataaaatcaaacatcaattataattgctaataatattttagggtgttacacgggtcaagcatcttatctttcctagtgactttgttgtaatggacattgaggaagatgcagatattcccttaattttgggacgtccatttatgtctattgcaaaactgtgtagtggacatggggaagaaaaagttagaaatgggta

SEQ ID NO: 86776 - DNA, 335 bp, Glycine max
catatgtggtactatgtggctatcgggcgatggtgtatgtccactatccacattcacatatcacacatataatccaccatccccagtgcccaccttatctgagctacgtgctccacgtgacctatcctcgtcctctaacactgggccccatcaatcctccaagcttaacaacatccaacaatttcacactccaactttatgaactatcaaaccaacaaacatggagaggcagaaactctgccaaaacaaaaccagaccgcactcttctactcaataacccacaacagatcttcgatcatacggcaccgtggatcacggaactatactggaaccct

SEQ ID NO: 86777 - DNA, 330 bp, Glycine max
agcttcgacaccattaatggtaaagactcttcctgtggccttcggatgtccagtttggtcattcagacccccaccattctgctccttcttgggatatgggcaatctctctgaatatgcctcttttgtctatagttgaaacaggtcattcctttatcaacacaatttgaggagatgtgccctggcttaccacacttataacatgtgatcagagttgagaaagtagtgggtttgctaccactaccaccagcaaaccccatagcaacagtcctctaattgttgggatggttaccatattgcttaggagggtcgagtacggttttccccaatgt

SEQ ID NO: 86778 - DNA, 329 bp, Glycine max
agcttgtacccttttctttctcttgctcatacaagctttacttaagtatatacttgctttaatttcctcactcatattcttacttgagcatcgaagtcctttgttttgtaggtcctcctcctgtcaaagacacctctcctagccgacatgtgaagttcgtgaccccacccaaccacatccaccctgaagtgtcatggttccgaattttaggtaagaatagttacgtagaagcttctatttaggctagaatttttctagattgagtctggtacactatactctcaggtagatgctcttatttataaagctaaagagatatagattcggaa

SEQ ID NO: 86779 - DNA, 469 bp, Glycine max
cctgtgctgagccccacggcatttatgaccatccactcatggttcctctccgcgtagaacggcctgtatctcccctcggagtcgatgttggcgcggaaggggtggtgggcccacttggagtgttcggaggggaccacgtctgtgtgggagtagaggaggatggattctagggttgggtccgtgccttttcattaaaaaggaccagtggcttccctggaacgaactcttaggtttgcgattccagggagaggcgatttgcttgggatgcgagaaatgatgcggattatatggtagctcggagtgcgttgggcggtgtcgatctgaaggtatcgcttgaatcaggatatgatgctgcattctctgaatctgtttaaatgctatgccgcaacaacatacacgaggatggtctgcaataactccattgtcgttagcgattcaaactcgttctatggtatgttccttcacactg

SEQ ID NO: 86780 - DNA, 328 bp, Glycine max
agcttggattgattcggtttgacgagggatcgaggtttagtaatttaggctacaacatagaacacaagagcatgattgattagagaaatatatttatatgcatcagcttgtttgtgagtaagacccaacatttctacctattgctgtcacttttacttactttgtattttacagatttagcataaaagtttagtttgaattctgtttgaaattatgaatcatacatgttctctcaacaatgcttcatttctaaacttaatttaggctaacgttagttccttgtgttcgatactcggattcatccgttttaatttttaaatacttgacg

SEQ ID NO: 86781 - DNA, 394 bp, Glycine max
  unsure (1)..(394): unsure at all n locations
aactcactttaatctnctattaccacagaatccagatttaaccttccaactctcagagcctcactctgttttcactcataacaccacattctcactttctaaacctaggttaactctacccttcatctctaacagtctccataagcaatttcagcatataaacatcacaagcatcatcacaataactctanaacagaatgggtatgtctaactcatccaaacatggcatgttcaacatgcgttcaacaagagtcttcacaaataactatcacgaagcagagaactaacaaaactacccatcatatctcccaataccccatacccacgaaaatcaaaggagaaagaagtccacccaaactcgatatgtcgatgtccactcgtaacacgcacttac

SEQ ID NO: 86782 - DNA, 356 bp, Glycine max
cgatgatcctctggagacctgctggcagcctgccttcttgacatgattttgtgttgacaggtgatacttcctgcttttattcgttgaccacatttggaccctgcagatatgtctcgtgggtcaagataccttgtggacgtcaagaggggtgctattgccctaaaccaagcttgacctatccttacccaacccggtcatagacatcagtgataacctgtgacagtcctaacataggcaacctactggcaatcaacatatgtttggtaccaataccaccaaccaacgaggcttgtggaggctggtcatctgtgaactgggatcgacatgggggataagggctctggtcatctattacc

SEQ ID NO: 86783 - DNA, 311 bp, Glycine max
agcttactctgcacaattgttgcctcttgggaatgaagcggctattcctacttctaatgatgcatggacacttatccctgacccaaccacaattagtgcaaaatgtctgctaatatcaacaaggatcacgaatgagatagattgggtctaacctaaagaccacataatataactacagttcatttgccgcctaaaggcatcacaagcgtcgatgtgcaattcaagatgtacgtttgaataccacctattaatgatttatgtatgttaacctatatactaatcttggatgaaaattatttatacatatacta

SEQ ID NO: 86784 - DNA, 325 bp, Glycine max
agctagaaactcttatttttaatgaccattaccataattcattgcaatatctatgaataactagtggttggaagctcactgcactgtttttcggttaacgggacatatgacataccttaatgtagcaacaaggaagatgtggaccaacacgtcccacactgtagtcatcccactctgagaaggcagccccagcaaatgtttcagtcaagccatatccttgcccaataggagccctatcaacaagtaaatatagagaacttcaacactaaatggataataaaaggtgtaaatcaaatttatcaactccgggacagtgaaactcttc

SEQ ID NO: 86785 - DNA, 327 bp, Glycine max
agcttgatataagcatttgctcacctgatcaactaagtaaaatgcaaggtaaaccgtttctgatctcaatagctcatctataatcgaattttgttacacataaaagaatttcactatgcttctaatcaatcctagaaaacagtctaaaatttgccatgcctttgtcaccacttgatgtatgtaatttgttcacagcccttaaaattttaaaacactggcatgagaatgaaaaacaaaaaaaaagtacatgttaaagggtcattcatttcagtaaaagcttctagtagagttccagactgagatttttcaacacttctactccttttg

SEQ ID NO: 86786 - DNA, 427 bp, Glycine max
acagatggaggtggtgaatacacttcctatgcattcaacacttactatgagcaacatggaataattcatgaggtaacgtcaccttatacatcacaacacaatggcttggcagaacgaagaaatagaactattcttgacatggcaaagagcatgcttaagcagaagaagctacctcattcattctggggagaagctatgagcacaacaacttatttgttgaacaaatgttctactaagagattgaaagagaaagtcccataagaggtttggtctggaagaaagccactggttagtgatcttaggatctgtggatccctatgctacaaacacattcctgatgccaaaaggaggaaattggaagacaatagtgaaccaatgatactgataggctatcatgttactggtgcctatagactctataatccac

SEQ ID NO: 86787 - DNA, 115 bp, Glycine max
gcttgaatattgagcaaggctagtataccgcccttattgttgcgctaaacccatccggtggtcataaccgttccccagcataacgtgggccatgattaccgcgtgatggacaaac

SEQ ID NO: 86788 - DNA, 401 bp, Glycine max
  unsure (1)..(401): unsure at all n locations
tcatttctaattgtaatgttagttctagggggaatgtattttatgtaaaatgtgtaatagcagcttctgatattgtaattgttgctttgctgaagaatttgtagtaggaagtagcttttgtagtgtaatagcagcttttgttgctactgtcaattgctgttttgctgaagaatttgtaataggaagtaacttttgtagtgaataacagctattgttgctactgtcaattatccatttcaattaaatataatttgttggtgaaatctgttgctcgaaattgcacgttattaaatataatttaataaaagaaagagaattatgttataagaagcagatggctcaagaaagagaagtctattaaatataatttggtggtatataactntttgaagtattgaagt

SEQ ID NO: 86789 - DNA, 325 bp, Glycine max
agcttgcttgtacaatctccccctttttgatgatgacaaacctaaaatcaagaaacacatacaagctctatcttctaatcgatcactcacttaattctccccctttgtttttgagtttaagcttcacttgaagctaagtgattcaattatatgagttcttgatttaatcccaattttctctccccctttgtcatcaacaaaaaagccaaagtgcgtatagagacataaaatcatacacaaactcataatcatccaagcattttaatccatacaacaagcaaggaggaaaataattcatacataaactaagcacggaagataataa

SEQ ID NO: 86790 - DNA, 469 bp, Glycine max
  unsure (1)..(469): unsure at all n locations
tcttgagaatcttctatggaggctggatccttgagcttcaatgacgtccttcaatggtgatnttcaaccatggagatgtagcggaagataagggaaaagatgtgagaagaggcgttatccactatggaataagccatggaaggaggagcttcaccaccaagagagtgccttggataagaagcttatagaggaaactccaatggaggataagaatgaaagagagagagagcggcggcgtgtggtggtttctatttctcttattctcttgtttttgttttttctactatcttgtatccatacattttttcttcttattcatcttactttactctcattccttttcatactagtgttcttatttatgcttctaatcacttattgtttgctcctctttatctatttattcttctatttgttactagccgtctttttctattagtctcttgtcatctcattatcttgttttagt

SEQ ID NO: 86791 - DNA, 313 bp, Glycine max
agcttgacaacctttttacacatgcgtaatcaacgcggaagcaagaccccccctatgtgatggcaaccaaggcgctcccctcagaagccacaaccaacaggagatataaactaccacgcccaagggaagcctagttaacaagtgaggaccgcctaagtactaataacgcagctgcctgtatgtacaaaggacataatccttaaaattcgagaccagggttttaaaaatgtgtaacaactcggatttacccgctcatagggtttcgaattcgagacaaacctcgtactcaattttagagtgatattgaacaaga

SEQ ID NO: 86792 - DNA, 331 bp, Glycine max
agcttcttatccaaggctcatcttggtggtgaagctccttcttccatggcttattccctagtggatggcgcctcctctcacctcttctcctttgtctttcgctgcatctccatggtggaaaatcaccattaaaggacctcattgaagctcaaagatctagcctccatagaagccccacaaccaagtttctatcacatacacttccagaaagaagaaaaaacaaaaaaatattgtgatttcccatacgctacgagctagctagcatgcaagattccaaaagaccatgacaatttttggaaaaaaaaaacattgtggaacataatcaattagg

SEQ ID NO: 86793 - DNA, 313 bp, Glycine max
cttgtgatcttatcctgacaccccattgccttgttggacttttttgggttcactgtgtgtctaaaacgcgtgatccctgtaaaatgatatattgcgtctgacattaactaggccacatggacactcacctgtgtcaagatggcatatagcaacttgcgctttgtcacacggaggctggaattatggtcgctgtggaaaatgttgcaaagtaacaacttactcccatttttgttcagggtggtcatgctggtgcgcatgatctgtacccgttttcatgcacgcttatagcatagtcctgcccacgaacacacaa

SEQ ID NO: 86794 - DNA, 331 bp, Glycine max
tagcttgtagaacggatggtcatgatatatgtcagggtgttgggctggttcagggataaaagggaatgtccaccattatttccatgacacaaatgcaataatgatgatttggaaattttatgcaaaactagtcatgcatgcacctatgtggacacaaatgtccaccattatttccatgaagtattgtgctacctaaacatatgtatatttttgcgaggtattttgctatatacatgcgtgtccaaggtatcttgctacctaaacatacatatatatgttttgcgagatatttttgctatatacatgcatatccaaggtatcttgctacctg

SEQ ID NO: 86795 - DNA, 417 bp, Glycine max
  unsure (1)..(417): unsure at all n locations
tccacgcccatagataaaatgaaatctaatctagataagataagataagataagatctatatgaaataatatctagatgagatcaaatctaaataatatctagagaagataagataagatctaattttgtagaataaaatagtttgtcctcttcaaatccatgtgtcaaaccctaatttcgttcggggacctttgcttgatgacatgcaacttttgtttggtccttgtgaggtgcttggcacccatcattaggcaatatgtgaaatttcgggacatgccggtaatcaaaagaaaatattggtgcacaatctcgtaggttccgcgacacaccggaaatcatatggaagcatcgttgcacaattagtgaggttccgtaacattccgtaagtcanaaaaggggatgagtatgtaattcac

SEQ ID NO: 86796 - DNA, 330 bp, Glycine max
agctttgttgtgccctctgccctcaactggcatttcttcatcaataaaagtcaagtaactgctcatagtgatgttgttgattatttccccaaacttctccaccgatatgtcatgcaccatgtgcgcctcacttcaaattttcatcaacaacttcctatgaggctcataatgcatgggcaaccctaataaagagatcctggctggaattttattcaattgttcgattactttgaattcactctgctaaatgattttcagaaattctgttgcttcctcagcagatatttctttcttgcttgtcctctctctctgtaggtttttcgatagggg

SEQ ID NO: 86797 - DNA, 394 bp, Glycine max
ttaaaactcagcttctcagaaggttcgctctaatttctctacacttgtctcacctctcaatgagctattgaagaagaatgtgacattcactcgcggtgaaagacaagagcaagcatttgctttgctcaaagtgaagctcaccaaggcaactattctaactcttcctaacttttctaaaactcttgagctacaatgtgatgtctctgtagtgggtgtgggagttgtattattgcaacgtgggcaccctattgcttattgtcagaccctaatttcgtccgaggcctattattcattgatgtattgattatcgttagccgaactgcgctgttcgacaccatttaccgtacaagacaacagatcgttcaatgttctgatcaacaacactaaatatacc

SEQ ID NO: 86798 - DNA, 330 bp, Glycine max
agcttgtctcagcgtttattctagacagagaccaacatatttgccatcgtcagcaagtaccaagaagaactaaatctagccacagcccatgagcacaaagaggaggacgagtatgcccgagtgtacgctgaaaaataggctagaggaagggtgatcatctcgttacatcaagaggcaacagtgtggatggaccgatttgctcttactttgaacgggattcaagaacttccccgattgctagccattgctaaggcaatggtggacacctactccgcccccgaggagatgcacagacttctcggctattgtgagcatatgatagacttaatg

SEQ ID NO: 86799 - DNA, 312 bp, Glycine max
tacatgaattggcgactgtacgatttattttgggcaatattggatgagggacagagtggatttcgagatttgcactttatgcagaattttgcttgtgaaatgtgcaccacaatcttgtataagtgcacacaaatgcttgcgaatggctggccgtgaaaaaaggtaatacatattggagttctggacatttattatcacatcacatcggttccaattgtttacttatgtgctacagacttccagtcatatgttgtagtcgatccaacagttaacgaactgtgacgaagagaatgttactggggaaattgaatg

SEQ ID NO: 86800 - DNA, 359 bp, Glycine max
  unsure (1)..(359): unsure at all n locations
cacatacatggaagggtcttcaaaataagcangctacaatgaaatgggtggcacaaaaggttgttgataagcttaaggttcatccaaacctaactcatgtggaggaacatgaacatcttagacaaaaatatggtgtgcacatttaggaaagaaagatgtttatggctattaaaaaggctttggtgtcgcaacctgcccttcgacgagggcacgaaaagacctctcgtatgggccaatggtgaatcttccattgaaggaaaacacgtggagtcgccaccactactaaagaanacatttattatgacgcgtcaactacaacggtccacaaaaaccatttttaaaaaatatccggaataata

SEQ ID NO: 86801 - DNA, 328 bp, Glycine max
agcttgagatatttgtgccatagtaggccagatattgcttatggtgtgggtctggtaagcagaaatatgaatgatccgaggacttctcatatggctgcagcaaagagaattttgagatatgtgaagggcacacttgattatggcttgttattctccaaagcaaatcataatcaaggaataaggtgtagaagcaatcttcatgatgatgaaccaagcaattttgatgatgccaaaacccaagtgattgattcaagattgattgaagacttcaagatcaagcaacaagaatccaatccaagattcaagattcaagagaagaaatcaagaa

SEQ ID NO: 86802 - DNA, 492 bp, Glycine max
  unsure (1)..(492): unsure at all n locations
tgattcttacatgtntctaatcaatntaaacaattcataacctcatataaggtccatcaattatcgtcaatctttcaaaaaatccaaacttccaagaactcaaattagccaagaacacatttctatgtgtatgcatcgtctgtgaacaactatattcatcccaataacaaaaacaatatagtataaggtggagttttccttacatattcaagttcaagtttctagctcttggagagaagagagaaacaataaagaagctcttttgtcaaagaactaagctntgctccacccaaccagcaatctacactaatagagcacaaaatcaatcccacaccaaactccaatttagatnttgaatcacaactcagcataccatgggttatctcaataaggatgttaatgggagaaacaaatggataaataactgaaaaatatgtgtctgaatacacagccgatgcatgtttatatatggtggattacataactgtacat

SEQ ID NO: 86803 - DNA, 329 bp, Glycine max
agcttgataaaaaaattatgtctagtaaccactgtaattcaaaaaagaaaaaatgtctaaaaaaatctcaattgtttgagagatattttaaaccgaaaagttagatgaaatctaatgaaatctatcttataaaacaataagttaaaatttgtatattttttaataccaattaaaaaaccttttttaagttataaaaaaattttaattgaatattattaaattttgttgtatttcttaaaaaaattctaaaaattttaattaaataccacatgacttatatatatcatttaaaaatcttaattgaatattataatattttttattaaaaa

SEQ ID NO: 86804 - DNA, 328 bp, Glycine max
agctttagcctcccttttatacggtaaacccagtaagcctgaaaaaggaaatgatcaagatgcgaacatttatttttttcacatcctaaaatatctaaatgaacatttagcaaaaaaaaaaaaaatgatgctaaaccacaaaaattgaggctaaatgaacatttagtaaaaaaaaattgtgcttgagcaaacactaaatagtgtcaactaagttgacttataatatacactattatgagtctatttgtttttgtggtatttactagacgacatttattagtgtcaaattagattatgttaattttagtgttgacttaattgttgctac

SEQ ID NO: 86805 - DNA, 326 bp, Glycine max
tatctaggagttggaaggtttaatatgggagtagctactggcctatactccatgtgctgctttaccgatgaaaaatattggaatggcaattcttattcggccaacctaagttcaactgttggtctaagtggctagttcccaagctcaaagtaaagctttctcttttaacttgtcatgatagcttaaattttggagctattgctggaggagttatgcatcgaaaaccgacaaggacttttagcagaggtgatgagaactttccgagaaaatgggttgaatgtgacacgggcagaaatatctatcattgggaacatggcatcaaatgc

SEQ ID NO: 86806 - DNA, 422 bp, Glycine max
gctctatggcgctatatcttgagcttcatgagggccttcaatggtgtattttcaccatggagatgccatgaaagataaaggagaagaggggagaggaggtgtcatccactatggaataagccatcgaagaagaagtttcccaccaagagagtgccttggataataagcttatagaagatacttcaatggaggaaaagaaagagagagggggggcacgaaattgatggaggaaaagagggagagaagtacactttgaagatgtctacaaaactctattcatcagagtaaacaagtgtacacatcgtctattatagccttggagcttcctgaaagctccttgaaagtttcttgaaaacttcctgagaacttcctgaaagctaagcttactcacacccctttatactaattcacttttgaaactt

SEQ ID NO: 86807 - DNA, 337 bp, Glycine max
gacctgaagcatgcaagcattctacgcaatttgtctcagccttaataggacttgatgtggtacgcgacttcattgagagtgagaaatgccgggaagagaacgtgcgattgagtgttcgctttattgcactgagaagagattcgtggattattatgtgacgtctgttgtgagtggcaacatggttgcgacacaaccgaacagtcagaattcatttaagccgaaattaacggatgatgcgattcaaacgagcgagggaaatggattttatttgtagattacgcgagaaatgacttaaataaatggcttaagcacttgaaaagggggtataaaaagcaaa

SEQ ID NO: 86808 - DNA, 395 bp, Glycine max
  unsure (1)..(395): unsure at all n locations
cgatacaacaaacttctatgcatgcttcatacaattgtgtaatcgattacgatcagcctataattgattaaaatagagagttttaacttcagaagaatttttctaactttagaaagatttcttctacattatgatgcatgatgcacatatganaagatagatactaagatgcaacacacaatataacacttaatacaaatgccattcatgagagtctgacatgttaaagacaaaacttcttctctctccctcagaaacctcactgcaccttaacctattcttctctcagtcactcaaaaaacttgaaaccctaatggtggccaagaaatagaaccaaccccaagttgtccaagtcacacctaactttagaaacaacccttcctctacatcattcg

SEQ ID NO: 86809 - DNA, 324 bp, Glycine max
agctttggggtcgtactcttttttctctttttctctcaattcttcttcattctttttcctcttttcacttttattcttcatttttcttacacaaatttcatttctcttccactagtgatgatcatggctaaacactcgatcaatctatggattcattccaaacaaagttgaatctgaattctagtttaatatatttattttgtgagaaagttcattttttttcaatctaaggatcgaaacatgatgtccagcgcatttttcaaactttaatcatatcagagagaataaaaatatagctgacccttttaaaatattgaaagcatc

SEQ ID NO: 86810 - DNA, 352 bp, Glycine max
  unsure (1)..(352): unsure at all n locations
ctgtaagtattgttccacgatgcgatctgcgacctccgtntgcccatcggattatgggtggtacgcgaaacttaagcgaagctttgtgccactcaatgtgaaaagttctcgccaaaacttgctaataaacaatggatcccgatccanaataatgctcttgggcatgccatggaggcgcccaaccatgttcacaaacagaagagccatcgtatgggcggtgtcttgagtatgtagcatgcctaaatgcagtcccttcgaaaaacgatcaaccaccatgaagatgcacgtgttgctgcgatacgctggaagaccagtgatgaaagtcatggataggtcatcccatggtcgcgtc

SEQ ID NO: 86811 - DNA, 324 bp, Glycine max
agcttgctgaacgatatatacaaatggagcttgaacgtctgcgtgaactccaagaggaaagagacgatgtatgtttctgttctttaaatttctcattatctttatcatgttttgatatctcttctggttgtcaacctagattagtaacagattttaaaagttttccttccttccttcttcattttagtgtatatttttaaattttttaattaacgtgacctgcttgtttatggtttaattcctatctctctattttaaattattgacattttttgtatttaatatttgcataggttaccaagaagaaggactttttgcttgatt

SEQ ID NO: 86812 - DNA, 417 bp, Glycine max
  unsure (1)..(417): unsure at all n locations
tgcttattactgaagaacttcacaacagaatttgggacaggttgatcacaattagtaccattccctttgaacagnccatgagaactttaagctctccatgtatattttaaatcttcaattgttccattgtatttaatgttgtgtggattctgaacctgtaaatggcaaaggcacatcacatcacacgtactctgaatatgtgaaacacataatttgaagaaagaacagttatatttatcaaccgacaaccatgcacaatgcactcaacaatatcgggttggaaaataagaagaattccacaaatggaacatcaaaattcaacttacctcatttaactcgtttttgctatttatgcctcgagctactcgagatgatactttgcctaataataataataatagtaataataataataat

SEQ ID NO: 86813 - DNA, 327 bp, Glycine max
agcttgtttatagcttggttagagcctactaatcattggttagccaaagttgcaacagttactaaggaggataagttactaagtgagctgatcagtcgctatgctcatgggggaaccattgatcctaagtatgatgtaaatgatgaattaatatttagaaaagggaaattgatgattcctgaagattcagctttgagaaactagattttacaagagtttcatgacactaaaatgggaaggggggggggcatgctggaaggactaaaaccattgctagaatttgcagtcaattttattggcctaaaatgcaagaagatattaagtcat

SEQ ID NO: 86814 - DNA, 239 bp, Glycine max
gaatgttgtcgattcagtctatgcttgagctactcaggcaagtccattaaattttggagacatttatttatgaaatatatataaaaaatgtctataatggattagggctgacaattaatgagattgatggctctttctaaatcacacccgtatttgtcaagattggaaattggttgtacatatacaattccttaactatggcattgctttataataatctcatcactaaggctcctttt

SEQ ID NO: 86815 - DNA, 329 bp, Glycine max
agcttcatatttggtgtcttgtgattgcacagaagatgaatctgcaacttctccaaaaccatggagtccaagttcagtagcatgaatcccgccagtgatgaaaacagattcgattccagcagcattagcacctttaatatcatgatggaatgaatcacccacagcaatacagtcagaaacatctgtgccagccatggccatggctgacttgtagattatctgacaaatctcaattgttacaaacactgtcaagaacagggaatatggatggatatgccaatgcaacagagctcacaaatttttttaatactaccataatgtgaaaaatt

SEQ ID NO: 86816 - DNA, 449 bp, Glycine max
  unsure (1)..(449): unsure at all n locations
gttgtggagaaaaatgaatatgctcagcattattcctctaaggcctaaaacttaacttaacccttgtcccggattagtcaaaaaaatggggtgcaccggctcatcattctaataatttttatattggttcaaccttgtgtagaccaagtttaacctctgcaaattatagtctttcaccttaatgttgttatgaatntgaccaaccccaaaggaaaacatcattcatgctcaggtaggaaagtcaaattctctggctgaccggctntatagctattttcaatagtgagcctaaatttggaaaattcccagttagatagtgcgcatangcaaagttaataataactttcttacaggccctaaacttgaccctcttcccaacatttcttaatgttgagaaagagcaaataaattcaattatatgttccacttgcacagtgcttcttctgatg

SEQ ID NO: 86817 - DNA, 328 bp, Glycine max
agcttgcttctacagggcttagtatccaaattcagttgggacactgacctgtaacttgcaacattggtacagcttcctccatcaacaattaaagagcaaagcttaccattaatagtgcatctagtgtggaaaatattttatctttgggtgtcgtctaatggctgcatctgacttcctaagagcctcttcaccattagcatatcaccctacatagcttcctcctcaacctgttcttccacttcttcttcttcactaatttcatattcactggagatttcttcatctgccttcatgatcatggtcctcctggatgcacactcagaagcaa

SEQ ID NO: 86818 - DNA, 429 bp, Glycine max
  unsure (1)..(429): unsure at all n locations
ctcagatccctattggtggactaggctcaatntanatagccctcctaggtttagactaacttaaactaagcttcacccttagatccctcttgttggactcgactcaacttaaatagcttacgnaagtttagattaatttagcctaaactttttcctcagatccctcttgttggcctgcctaaaataattggaattgaaccacaggagaatccctcttccatatcaagaacatataaatcagcaggaaaaataagttgaccaacctgaaccaacacattctctatganacctgcgggataagcaacacttctattttccaaatgaatcaccacatctgtatattgcaaaggtccaagagataacgaatttgaaatggacagagggcatgacactaatgatgctcctagatctagcatggcattctcaaat

SEQ ID NO: 86819 - DNA, 331 bp, Glycine max
tagcttgatcaaaacaattatttattcgttccaatccactcaaatcatacaatttctcattcaaattattctctaacactcattttataccaaacaatccactacatatcattttcaatcaattcattcttcaaacatgcttttggtacaagaaaacaactcaaagtgctgaaatttaaagaactaaaacataaaccaaactaaatactgataaactaaaatgttcatgctttgcagaaattaaactaaacacaatttaaacatcttgctcatcctaaggctgatcttcattaagatctagtgctggagctgctgatgaatcttggatagg

SEQ ID NO: 86820 - DNA, 510 bp, Glycine max
  unsure (1)..(510): unsure at all n locations
ttaaatctaagctcggatctggcaatagcaccccacctgacgtccgcaaggtcttctgacctccgcgacatatctccaggtaccactctgtggtcaacgaataaaagtaggaagactgactcttccacactttctcacttcaagcttgtaggattatggggtacccgtcatatgtggtactaggtggcgatcgggcgatggtgcaagttgactctccacatccacgaatcacacataaatccaccattcccagttgcccacctatcactgagctcacgtactgccacgtagcccttatcctcgttcttctcaacaccgggtcctcattaatccctccaagcttccacaacatccaagctattcaacatccaaacatcatgaactatcanaaccaagaatatatggcagaggcagaaaactttgcccaaacacaaaccaataccacaacttttcttactcatataccccagtaacattctctgtgttccaatcgtcaccaatggatcgact

SEQ ID NO: 86821 - DNA, 368 bp, Glycine max
  unsure (1)..(368): unsure at all n locations
caaagagtatatttggtgtgatcgggatgtcagatacttgggaggcgtctactgctagttatctaaattgtgagcttgtggacataccttttctctatctgggtatcccgattggttcatacccaaggggctcatagctgtgggatcctattgtcaaaaaatgtgagaggaacatggtgaaatgaaaacaaatattatctttgtgcgggaggggtaacactcataaatgctgtcctaaatactattcctatatacttcttttcctttttcagggttccaaatagcattctggataaactggtctggttgcangggtggtatttgtggcgtggaggggcagagcataataagatagcgtgggtgaaatg

SEQ ID NO: 86822 - DNA, 329 bp, Glycine max
agcttaaaacacatttttttaccgagatggacatcagccggcaagcaggaaggaagccaccgctccaattcctccgcccaagaataccgccacacagccggacaaaccacaagtatagacccttcctccacaaaacaccctgcaatagcaatagcctaaaaatccacaagacaaataataaccctccaatcaaacaatcacatttaaaaccacattcacccaattcaaccaagcagtaatcaccacagtgcgcacaagaccaaagaatcaacacctgtagcgtcttcccgaggcccatatcatcggcaatgaggcaccttgcacctctt

SEQ ID NO: 86823 - DNA, 410 bp, Glycine max
  unsure (1)..(410): unsure at all n locations
gtgcaaacatgctcataatattatccctctcacatttgtacttcatcgccttgcatgctctatngctctcattatgcactccttaaaacaaaacatatctcgtctacttaaataaacgtaaaataagtattaccctcaaagactatatgatcattcataatgtcacaatttgacggtagagattttctcatgacaacgatttaataataattcttacctgattaaatgcactatcatcctaaactcaataggtctaaataagattcagcgttgaatatagaagaatcgtggatggagataacctaacaaacactctctgtgacaacacctaccatataaaacatgatttagaatcatataatctattggagaatatgttgccacctgtaaagttatgaatccatgtttat

SEQ ID NO: 86824 - DNA, 328 bp, Glycine max
agctttgtcactaatttatttatgggattcaacccacctaagattttattaataaaaaaattatgagaaaatttggaaaaaaataatttggattctcccaagttaaaaacgggagtacatttcccgctatatatatttgtggtcatttattgcttttcatgaatgaaaccatccttaataattttattaactataaaggttcgtattcataataaaaaataatatattagtatcatcaattaatttgaataaaaaacatatcttttttttttgttaccgtattgtttaaaatcaaagtctatataaaatttcatgatttaactttaga

SEQ ID NO: 86825 - DNA, 73 bp, Glycine max
agctttcaagtctatgtttgaattgcaacttaacactaagatcaagagtattcaatctgattaggggtggggg

SEQ ID NO: 86826 - DNA, 325 bp, Glycine max
ttcttcagaagattatttcttaattttggaaccaaacatttgggctttgcacgaaaatgatgattaatcgagcacaaaagaatagattgacgatcttcttataaaagcttgtagagaaggattctgaacacactactatggaacttgtaagaagatgaaaatgggggtctcttcctccttgaaggtctcgtgttagctaaagaacatgaaagctcaagttttggttcttggagaagaaaaggtgagaaacggtgaaaagtgatgcataatactattgatgagctcacttgacaagcttgaatgaccatttgatggccatgttggg

SEQ ID NO: 86827 - DNA, 439 bp, Glycine max
tgaattatatgggataactcatcgactaatatttctgtccagatgtgaaattgagcacatatgtatttaattaatagtgaaatatatcacactacaatttatattatttctatagaattttatttaattatgcttctacttctatttttgttgtggaggagaaattttgtaggtcatcattctcattcatcctcatactgttgtgagattatccaatattcatgtttgctgcacaaaattaaagtaactaaagatattcataaaataacaaagaatgtagagacatcttggattcctatgtcattggtatttaaaatttcattgatcttgctttctgcatctcgactatgaatccaagatattgtgggtatcttttgtgcctgtgtatagaggaagataagatacagtgacacaccaactttctctatgaagcaagctg

SEQ ID NO: 86828 - DNA, 359 bp, Glycine max
  unsure (1)..(359): unsure at all n locations
actcagcatatccacgcttctgtggccgacattgcgttggatatcttctcatatgtattttcatccaccgattgataaatgagaaagagagctctcttgtctctctttattgacttcttaacgtctcctttacaccttggcttaacgaggcttcatcttgctcctcagagccattctctatgatatcccacacatcttgagctcctagtagcgccttcttcttgatactccaattatcaaacttgttcttggaacatctgcatatggaaaggaaaactccattcccatcttttaagatcttgaactctgatccactttgttggnataatgcttttatgttaagaaaagtgttagaaata

SEQ ID NO: 86829 - DNA, 308 bp, Glycine max
tacgcgtgccagcttacattgatatctccctccatgttaattgccaatattgttccaacctgagctggcgatgaattggaccaccccatccgcgtctgagtctcacaagagtttgaataaatttcgtaggccaccttagacggcggtgcctccttcataccagagactgagcaagacaagggcgtacatctgaaacaaaacacgtctcccatgtcttcatcctgctccaatctatgacttacccccctactaggcgagaggacatactcccgttcatattgtggagaagacaccgaaactttcactct

SEQ ID NO: 86830 - DNA, 369 bp, Glycine max
  unsure (1)..(369): unsure at all n locations
cacaagaacactaatcaatctctcataatntcacccttgccactgaatactgagtgttgcttacgagaaaacaatgcccacgtataacatattcaagaaatctgactatttttttatttgagtagtcaaagattgtagtgcatttgtatcacgattccttaattggattaaaaaaaggttcgaattctcgtgaggcagagcacagcctccggcagtaaagatgtgaaacattacttttcctagaaacatgattgaagatcaattcaattacttagaacctgatttcgttgtatctttaattcaacacaaaaagtactaaccaaggattatatgtcacgcctactacgagccaagaaatcagattatgac

SEQ ID NO: 86831 - DNA, 326 bp, Glycine max
tgcttcaacattatatctcttccagggtgctggaactacttcacatggacttgatggggcctatgcaagttgaaagccttggaggaaagaggtatgcctatgttgttgaggatgatttctccaaatttacctgggtcaactttatcagagaaaaatcagacacctttgaagtattcaaggagttgagtctaagacttcaaagagaaaaagactgtgtcatcaagagaatcaggagtgaccatggcagagagtttgaaaacagcaggtttactgaattctgcacatctgaaggcatcactcatgagttctctgcagccattacacca

SEQ ID NO: 86832 - DNA, 173 bp, Glycine max
ctcagctggcgctactctatgcatgtaagattctgccgtttatttttgttctttaactctcattgggcgcgcacattcgtcatcaactcttgcctgctttagtaattgtggaccattcttcatcttggatatttccagggccgggcctgtcagatgaatctttccttgtaaga

SEQ ID NO: 86833 - DNA, 328 bp, Glycine max
agcttcgaaagaaagtgatgaggtacaagccctaaaggcagagcttgaaagagcctgggtagtcaaagagaagttcaagtccatagccatcaaagtctgaagagagtatgatgaactaagggatgtcaatatggccaccgctgaagccttggaacgagaaaccaagaaggcccgaaaggaagaacacgaccaaaacaagttttgaggggctttatagggcagcaatagtgagctcaaactccgaagaggtgaaaggaatcatcacgggtcaaaggcatgatctggaaggacgagctaaaggcttgccttaagtcgaaaagaaattttt

SEQ ID NO: 86834 - DNA, 495 bp, Glycine max
gatatgagttacgaacctacgcactaacattcaaattcttgttgataaagttctttgtgtattatagtaaagattgtaaagctctcaaaacaccttaaacaccctagagaaaatactaagtacttagattgtgtattcatttgtaagacgattaataattagtcagtgagcaaatcaaatacaaatcttttgatttgtatagagctaataatgacttggtaaaacaaagaatattgggttatttcaagcttggtgtagagcttgagttgtagagccagacgtgacaataacaaacacttgtaactttgtgaagttagtaaaacttggcgattagctatgaactgaacgtaatcttaatggcgaagacgaaccggtataaatcattgtgcataattacttgttctttgttctctttggtttaaactgcctaggctttgaattgatttatttgtaactcttttattttgcagaagtgttttatcattgcgcattctt

SEQ ID NO: 86835 - DNA, 328 bp, Glycine max
agctttgcatgtctagggtttctagagagagaaaggtccaagttccatacagttttgagagattttgctgtgtgaagatctgcaagaccgaagcttgaagcaggagccggtttgagagcttgagatgagtttgtgagtgattgtgagatcctagaggtgaaggagacatcctcaccacttgtatttttgcaatctttcatcttgttcttctctttgttgtaaagaaggcttcctggtatggaaagctaaatcctctgttggatcttccctgtaggtacctgatgtaaatatatttctatttatttaatgatgttttgtgtgttctctg

SEQ ID NO: 86836 - DNA, 418 bp, Glycine max
  unsure (1)..(418): unsure at all n locations
atatgcatgtgaattatgaagcatcaataagaatcaagccaaggttattgcgncagcaatcaatggggaaaacacaccaaatgattatgatgatggatggctcanattctcacaaaggtaaactcatcactttcaaattgagctttcaaaactatcatgacatgtagaggagaatcatagaattcaagtcacaaaatgtcaaaaacttttatttcaaaacaattacccatttcttgaacatatcctataattcaaagaanaacatgcaaagtcctacatgcacacagaattgacccaaaatattaaactagaaatccgacgaaactaacaacattaacaaattaccacaactaacaaattatacaaaccgacaaaactagcaaaaccatagaacacttcctccatacttaaacaacac

SEQ ID NO: 86837 - DNA, 327 bp, Glycine max
agcttgtgcaaatcaaatcactcctacatctcatctctagcatgcattttctttctttacccactcctcacgtttggttttttagggaaaacaccataactaaacgcgccgcaagggatccctatcgcaccagatctaaatctagaacgatgggtgatcaagaggagacacagggacagatgaaagccgacatgtcaactctgaaagaacaaatggcctccatgatggaggccatgttaggtatgaagcagctcatggagaagaacgcggccactgccgccgctgtcagttcggctgccgaagcatacccgactctcttggcaacta

SEQ ID NO: 86838 - DNA, 327 bp, Glycine max
tttcgagcgtctcgatatttacggggctctatccgacattcgagttaaaagttattgtcgcttcattattctaagagcttcccttttcaattacgagaatctcgatatattacgggacacaatcggacacccgagttaaaagttattgtcgtttgaatattctcagagcttctagtttcaattacgagcgtctcgatatattacgggactcaatcggacattcgagtaaaaagttattgtcgtttgaattttctcagagcttctggtatcaattacgagcgtcctgatatattacgggactcaatcggacatccgagtcataagtta

SEQ ID NO: 86839 - DNA, 329 bp, Glycine max
agcttgctaacccatggaatctcttaatacctcccacactttttggggtggaccattcttggatggccttgattttctcaggggccacttggaccccatttctaccaactacaaaccctaagaaaactatattatctacacaaaaggtacacttctctatattttcacagagggtgtttttcctaaggactgaaagaacttgtctgagatgtcctaagtgatcatctaggctcctactgtacactaaaatatcatcaaaataaacaactacaaatctacctatgaaatcccttaagacatgatgcataagcctcataaaggtgcttggg

SEQ ID NO: 86840 - DNA, 451 bp, Glycine max
  unsure (1)..(451): unsure at all n locations
tttgacgactgttaagtgagattccttagcattggtctgataccttgcacataagtaagcacttagcatgacatatggtctanttttagttaagtagaggagtgatccaatcatacctctatatcttaactcatccactgatttacctttctcatctaagtcaaggtaggttaaagttgccattggagtagatgcttctttgcatttttccatgccaaatttcttaattagttttgtacaatatttcgtttgatttaggaaggttccatgtttcatttgcttgacttggagtccaagaaagaagttcaactctcccgtcatagacatctcanattccttctgcatacaactagaaatgtgcttacacaaacattcattacgagcaccaaatataatatcatttacatatatgntaacaattagcgactcaactgttactttctttaataac

SEQ ID NO: 86841 - DNA, 213 bp, Glycine max
  unsure (1)..(213): unsure at all n locations
ctaagctttactatgttgtaagagaataggagtgtaagataaacttattcaatatttanagcggatattanaatgcgcaacggaaaggttaagagtatggatagaggagacatacacacacgacttttatactgtttcggcaacaacccgagcctacattcatttctcaagcgacctgcggatctcgagagtgctttcaaccttgtataaatc

SEQ ID NO: 86842 - DNA, 326 bp, Glycine max
agcttggccggggtttttgtcatctggtctaccaatttggaaacttctcgcatgcgctcatggaaagacttgattactgcctttattaggcaataccaatacaatactgctcctgacacaacccagctgcggaatatgagcaagcgagagcatgagttgtttaaaaagcatgcccaacggaggagggactttgcagcgcaaggggcaccccccatggtagaaagagagattatcacaatgatagtagacacgctgccggtattctactatgaaaagttggtgagctacatgccctctagcttcgcagatttagtgttagcgggtga

SEQ ID NO: 86843 - DNA, 411 bp, Glycine max
tgcgttacaacccgtgcacatattataagacatttgctgactgtgtcctacatacatggttgatgccattcgaggagatgtatgaacctacatgcgttcatcccgccacgcatcttgtatacacatcaacgaatacgtacataaattagttgacatttgattatctagcttatgttttattttgttaaattaagagaatttataacactttattttcggccacccctcgaacgcacacactgtgagattataaagggtgcttctatgatagcctgatagatttatgtagatgttgggatgcaatgaataactagctcgtcttgcagcatacaatgatatatgcttcatctagaaaagcattaaaatggtcgaacatacgttcaataccctggtgaataataagttgtgtgg

SEQ ID NO: 86844 - DNA, 325 bp, Glycine max
agcttctcaaggaagttttctcaagaaagcttctcaaggaagctacctagtctataaatagaagcatgtgtaacacttgttgtaactttgatgaatgagagtcttgtgtgacacaactcaaagttcaacttctctccctttttcttccttcaatttcgtgctcccccctttctctttctctccctctttcttttcctccattgaagcatcctctccaagcttcttatccaaggctcatcttggtggtgaagctccttcttccaaggcttattccctagtggatggcgccgcctcttacctcttctcctttgtcttccgctgcatc

SEQ ID NO: 86845 - DNA, 330 bp, Glycine max
atcttgaccattttattaattaattatcctttcctgtttttatgcacaccaacataattatgttatgattttataggataataatacattagtagcttcttgatgatctttcattcaattttaaattatgtccttaaactataaaagtcagtaattatattctttatttcttcttccaattttattaataaggtccttcgaaaaagatagaaggacataattacaatttgttttttcttagagtttaggttctttattttctcgtttcttttaactttcaattcaacataattgatagagtgactagcgaatgccgtttccatttactat

SEQ ID NO: 86846 - DNA, 326 bp, Glycine max
agcttgtatagctccctattttatgggtattttggacagactcttgtaaataaatctttaggttaatgttgcctctagaaaatttccattggatttaatcatgaaatatgctcattttaaggtgaaaaggaagctaagttttgaattgcaaaatgtaacagttgggttaagctcaacagctgggctaagcgcatattcatcgctaagcgcagttttagcgcacttagtgcagaggataatttggcagagcattagcatcaaatccacacactaagtgcgagatcagtgcgctaagcgtagcaagtgccttcagccaggctaagctc

SEQ ID NO: 86847 - DNA, 375 bp, Glycine max
  unsure (1)..(375): unsure at all n locations
actcagctttgctttacattggagagtgaacggtacaagctgtccattctatttactatcgtccatcaatatcccaacttatgctaaattgcctacctcanaatcttcaataggctcaacagaacatgttgggtgttgtcctccaaccaccactagtcatccatcaacaaaaaatttcaagtgctttaccccttctgttgttcctgctgaagttgcaccaccctctccaacttctacaatcaccattcaaccaccaccactgtgcaatcatgagtgacaatgatgaccaaattctaatttctttctttgaacccttagtttcttttattgatgacactaggaggagaacggatagaaatttgattatttcttaat

SEQ ID NO: 86848 - DNA, 385 bp, Glycine max
  unsure (1)..(385): unsure at all n locations
taagcctgaatgctaagtgacagcttatccatggctaagtggtatctattgtctgccagcgcaatttcttacagccttaattgaggttcatgatgctaagcaccattcatggcagctaagtgagattcgttgcggcaatatgagcgctaagcaagtacctctcagctaagcgcgtgctcctctgtgcttaagatgcatcattttanctaatctggctagggctaggcttaccgagagttgcagcttttctaatttgtaggtctcgctaagcggacgtactctcgcgctacgccgaatttctgtgcaaaaaaaataacaatattttgatcttgaatttgaaacgtcggctaagcgcacgtgnttcctaagcaatcctaattgagaa

SEQ ID NO: 86849 - DNA, 324 bp, Glycine max
agcttgcacttttttttctcaaatcttcaatcactagagaccctcacaatttcctcactcataattggtctgccaccacttctgtatgcaaatgggttggtgtcactagtgatgcttaccatggaagggtaaggacattgaatcttggcgacatgtcttttaatggcaccatgccctctcacttgtgaaaccttaccttgcttaataaacttgaccttggcggaaacaaattccatggtcaggtgccagaggaattagtccaattgcatacgttgaagattgtcaacttgatctacaatgaatttattggaaacgcttcataat

SEQ ID NO: 86850 - DNA, 419 bp, Glycine max
  unsure (1)..(419): unsure at all n locations
tgtaactaataccaaccctatttaatcttatgtgttctccttatattgtccttcccattaattaatctaattaaatttgacagctcatttgagttcatgcacctaattttccattaataacgatattaaccgtaacatgaatattgttgcaccttcattaattggttttttttttccttcgcgcgatatgtagttacttgagcttacttgttcatcttcactgaaccatatagtaagaaaattgaagtccactgcaagctagcaagtgtttttgttgacctataanaaaaaaaaaagacaagcacgtgcttgtataaaatactaagggagaatcttcaacgactaatgaagacccaaacaaattaaacccacaaaattaaattacacaccccacaaaagaaattcaatttctaggattt

SEQ ID NO: 86851 - DNA, 324 bp, Glycine max
agcttatcttttctacttttgtgatgctaaaatcattggatttggtgtgtcaattaagagcaactgccattcaaaaactaataaatagtttattgatgtgaagtttgcctagaatagatatgggaagaaacaagaatctactgcacataattcgcatccttatttgaaggtggagtctgaggatcttttacatcttaaaagaattactcatagtggaaaatggttgtccacaacttcaccaaagatcataacatgaactttttccaagccatgcctaatattttccttgccacagaggtatcaatcaggcccaaaaatagtgta

SEQ ID NO: 86852 - DNA, 405 bp, Glycine max
  unsure (1)..(405): unsure at all n locations
ctaaggcanggctaaggcattggttgaatttctctaatagttgtgagcgaaggaactgacgggtccaaattccattcttaagcgataaagtgttcacagggtgcgtatgccttctaatcctactttgtcatttagatttagccaaaaagacggcgaaaatgatcaattgtcacattttgatgccagtttatggctaagatgaactctcgtccaaaaagatcgagaaaacgcttcgctggcataattgaactatcactaaagaaggaaaagtgattggttccaattattcctgataaaagggcatatttatgttgaagataatcggctatctatgggcttgaaggaagagaagaattcacggatagctttggtaactcttttccccacaatgctccagctggattg

SEQ ID NO: 86853 - DNA, 328 bp, Glycine max
agctttcataagtgatttctgtgcagccatctccctaagagtcctctcacgaggtggaggttgaaccatgttttcagtatgaaagttagtagtggaatgttcaaaatcagaatattcagaatgctcaaaatgcacagaatgaccaggatgcacactatgcctaactaatctatgaaatgttctatttatttcaggatcaaagggttgtaaatcacatggattgctcctagtcatgcactatatgcagcaaatagtgtttctcaacaagcacctaacaagggggtaaaactatagctatactcaaacgatatcaaaatgagctgaaatt

SEQ ID NO: 86854 - DNA, 388 bp, Glycine max
  unsure (1)..(388): unsure at all n locations
ctaagcttttagtgaaccctattccataaagcctctcccagtantctcttagttcattatatagctccatatactctatgcaccaaggatcatgctcctttcagtacaagacaagcattttagacaacaattatgattttgaatttcacattcctgatacataaaaatagttttgaaaaccatttccaatagaaaaagagacaaaaacagctaggtattttcttatcttcatttcggtttcatctaattctacctctccctcaattccaactctcacaccactctccaccaactatctatcaaccttgtttaactgcatattgaaaactaaaattacgttttgaaaatcaaaatcaaatatttgacccttaaactacatcattctcat

SEQ ID NO: 86855 - DNA, 328 bp, Glycine max
agcttaaagcaaattctattgacaataatttttaacttggatatccgattgagtcccgtaatatatcgagacgctcgtaattgaaaacggaagctcgtagcaaatgcaaaggacaataacttttaactcggatgtccgattgagtcccgtaatttatcaagacgcttaaaattgaaaacaaaagctcgtagcaaattcaaacgacaataacttttaactcggatgagtgccgtaatatatcgagacactcgtcattgaaaatgaaagctctgagcaaatgcaaacgacaataacttttaactcgaatgttcgattaagtcccgtaata

SEQ ID NO: 86856 - DNA, 290 bp, Glycine max
  unsure (1)..(290): unsure at all n locations
catgantgatacatgatttgtgacttgtatgaatatatctgggcaagattggatgaggggaagtgtgatattcgaaatctgcacttatgcataattctgctgtcaaaatatgtgcagcatgattatggctttgtgcataaaaatgcttgtgtgtggttggctgtggaaagaatagtacacactgagttcttgatgcttgctagtacatcccaacggtcgaaatgtgcgcttatgtactatagacttccagtgaaattctggagtcaattcaaccgttaacgaattggatc

SEQ ID NO: 86857 - DNA, 322 bp, Glycine max
agcttcattgtctaactttctatttttcaacaacaagccccatgagactgagcatatggatgcacaggtcaaagttgattatgtgaaaacgattgttgagcatgggaaggtgcatattgcaaagaagaatgaaagtgatactaagcaagccaacaagaaaaggaaggaagtggtacttgaccctggtgatgatcctggacattttaaggcaaatgttttccaagaaagagggaatgatgagaatcctgaaattggccaaatacaggctaaaggcccaagtggagaaggacgaaggctcaagtggataaggacaaagcccccg

SEQ ID NO: 86858 - DNA, 377 bp, Glycine max
  unsure (1)..(377): unsure at all n locations
ggtggaattcctagagcaattcccttatgttatcatacataaaacgggaaaaggcaatattgtatccgatgctctttctcggcgtcatgcattactttctatgcttgaaacacaattgattggtcttgaatgtttgaaaagcatgtatgaaaatgatgaaacttttggagaaatttttaaaaatcgtgaaaaattttcataagatggtttctttagacatgaatgctttctttcaaagaaacaaattgtgtgtgccaaangtttactataaatttgcttgtttgtgagcacatgaagaggttaatgggcatttggggccaaagacttagaacttacagaacatttattgcctctatgaaaagatggcaaaatttgga

SEQ ID NO: 86859 - DNA, 327 bp, Glycine max
tatcttcataaggagccattttatggtagagtgaaaaatggtggtgaaagtgaactctatcaatggcgggaaactctcccaacttcccttttgctctaagacacacgcccttaaaatatcctccatggactgaatggtccatttagtttgaccatcagtttgaggatggtaggctgaacttagtttaagctgggtccctatcgctttgttcaggctctcccaaaatctagaggtaaacctaggatctctatcagacactatgctagatggcacaccatgtaatctaataatctcactaatatacagggaggtcaacttctccaagga

SEQ ID NO: 86860 - DNA, 385 bp, Glycine max
  unsure (1)..(385): unsure at all n locations
ctaaactggatgatggtctactgggatgatgttagtattatgctatttttagaacacgacagcatgagtgattatagaaacatccttatatgcatcagctggtctgttagatagacccaacacttctacctactgctgtcaattatacttacttgcatttttactattattatcctagacctaagttaattctgtgttatatcaataattatcaatggttctttcaacgatgccttatatctgaatttaacccggtcttggactactnttcctgagatcgatactcctatccatctggtttaagttttaaatacttgacgatccggtgtgctntccggcataccgtatttcccttgaatatatttgtacaaagaaaaagtggaac

SEQ ID NO: 86861 - DNA, 420 bp, Glycine max
  unsure (1)..(420): unsure at all n locations
tcgtccgtagatccctgatgtaagactaggaccgatttagactttcctcttatgtttagactaacttaaactaagctttgtctgtagatccctcatgtaagactagactcatctcaagtagcatacgagagtttagcctaatatagcctaagcttcttttgtagatccttcatgtaagacaaggcctaaactatacagcattattgtatcaacataattaaaaccaaaacttataccgcaaatccctcatgtaagactaagtttcaatcctacttcaatcaagttctaaggcaatactacatttcccaatgctaaagtcacctaactgtgcatgcaaatgggtgatcagaccaatagcatacacacatcangcattgaatgaagcattgaacacagaaaacaccatccattagatattat

SEQ ID NO: 86862 - DNA, 325 bp, Glycine max
agcttatctgaattctttttgcgacttggttgacggaaaaacaattgtcttaccatttgtgattcgtgaattccaagaggggaaatccctttaagtgcaacttgctttattaaatccttcagttcatcgatggtacatgttgaaagaatttgaaatttcttaggattttttcctgtgaacgcgcatccaacaaatttgttctgcggtggcatcttccatttcccgttgtaatataggatcgcgtcatgataggcttgcaaaatcacagctgtttggtactcgaatgggcaccggagtcaaagtttggaagtaaaccccagtatca

SEQ ID NO: 86863 - DNA, 382 bp, Glycine max
  unsure (1)..(382): unsure at all n locations
tctaactttaacgattcagtatggagaataaaaaaatgtatattatctatgtcaaatatcatagctctatgtcgatctagtgtgattaagaccaatacaatatcaccctcaccaagacattattgtttttttctagaaataaaccaataataaatgttttatagaagctctaattaagtcttaaagttcctacgatacaaaatcccaatttctgttactccaatgaaatgccaataaacagaagtttaaatctctgttatatgcaatcacaataaaatgtagagcatcatcatttagtgtgtaaaggatcaaatcatcaacagaatcangaatgtgtcatgccatgaacttttttcgtgtaaaaaaaaaaataaacacacta

SEQ ID NO: 86864 - DNA, 325 bp, Glycine max
agcttgtgggaatcttctggggttgaggatttgtagaggtgcatccgtggtgagtcacttgttcgcggatgatagttttttgttctaatgaaaaggaatgtttggcaatgaagaatatccttcaaacatatgaggcagcttccgatcaagctattaatctagcgaaatcagaggttttctactgcaaaaatgttcccttgccccaacgtaatatgatttcatctaccctaggtgttaccaaagaccttgggtcaggtaaataccttgggataccatctcttattgggagaagtaggaggagtgtgtttggatatatccgggacag

SEQ ID NO: 86865 - DNA, 328 bp, Glycine max
agcttcatgatgattctttattgattcaaggagttgtgatgatgaataagatgatgacgtaaagctcgaaagtcaagatcactttatgataacaaagatgatgacattcaaaattgagttcaagattgagtcaagaacacttcgaggatcaaaagaaaatttgatttcaagaatcaatattcaagattcaagattcaagaataatcaagatcaagatccaagactcaaagattcaagaatcaagagaagacttaatcaagataagtattaaaaagtttttcaaaacattgagtagcacaagttttcacaaaatcattaccaaagattt

SEQ ID NO: 86866 - DNA, 326 bp, Glycine max
tgcgtcacccagcttgttttcaccaaagatctccagagccagaatcctggcctgagggactgggctgtgagccaggctaacgaaagggaaaaaaccgcaggatggcggcagaaggagtgaacaaaccaataagtatataggcacactgaggcacactagagatgaggatagccattagagaggacacagaaacatatcttggatcatggatgaaaaatataaagcagggaaggataaaataaatcaatttgtattctatttgcacactcgtgcatactcatctttggttttctctaccatgaatgtgacccaaattattcaactgt

SEQ ID NO: 86867 - DNA, 389 bp, Glycine max
tgagttcataccaacgctcgaatgcgataatgggatctgctatacacacccagaacaactaccaggtgcttcatgttctaattactctattgtattttaattatttttctgtctaattaattattagtgttagtttcgtgtattagaatacctatcgcatatatgttatatacacattatcgaaattctcattaatcgggagacacgttcgtcttgatgtgcacgataccgtatgcatgaaattaattgatttattaatgaaataatatattttcctttgacaaggagctctaatcataatgcggctcaaatttggaaatgaccgcagaacaatttatgcactctatttatgacgagatctcataagtaacattatcatacaatatgtt

SEQ ID NO: 86868 - DNA, 336 bp, Glycine max
cgagcatacagacttagggtaacctttttaaggaagtagagaaatggccaagacgaggcccgctagttgagatagagagaaagaaagatacccagatgtaaaacatagcctgctatgagagcggcagaggaatcatgaaatagcctacgcagagcgaagggaaccatgaaatgatttgaccagcgcttgggtgcatgaatatggatgttagaagcttggatgacctgaaactgactcaaagaggatgtcatacaggttgaagtaagagaaccgggccacaagcaaaatatgagcaaacataaagatcattggttgctgctatgagacaaagagatt

SEQ ID NO: 86869 - DNA, 270 bp, Glycine max
gcacctaactaacatgggaaatgcttttcatggtgtgtagatatatgtgtgaagaaaaaggacatgaatatctttgccaagggtgaactgaaattgacgtcacattctaaatgaatgtatgatagcacggggattccttttgaatgctagaatgtgcataatggtatgtatcttgccacatatgcataagtgtgagtgaaacaatgaatagtttgttcggatatatattacgagtgcgcgtacgagatctggtaaacaaatggtacgaca

SEQ ID NO: 86870 - DNA, 357 bp, Glycine max
gggatgatcatatcagtccagctgccggcctgcctgctttaaagctctttttcacagaatctatgtgtacaacacccctccattcaatggcttttctaggtttgaaaggtgaaatttataatgaggtgaattggaggcaaactctcaccttacaccagtccattacggcaatctaaacttgccctatctggatttacacctaaaattccaccaaatcaaaatttgactcttcagcacccaattttgccctataaatggctcttggttcactccggacatttatttttctctctaactctagctaacctttctcacatgttctaaatgacatttcaagctagtattgactcactctac

SEQ ID NO: 86871 - DNA, 421 bp, Glycine max
  unsure (1)..(421): unsure at all n locations
tggagacaatatgcaagggaagttctacctcattgatgcgcatatatatgttcgcataaggataagtgtatcctacgcattagtaaccatgtactatatatagaatccaaatgaccacttgtgttcccaaacaattttgtaaaactaagtaattaagggttcaaataaaataaatgatagttgtgatcaatcgcttaatttactaaataagaatcaaagacatatgagttgatatgaaaacaattataataagtagtctacgattgtgatttcacacttaccccaatttccccaattctaattctaacaaccccaaatattatgaattatcgatattcccaaattcaatattaacctttggtcatgatttaataacgctctttgccctaatcaatactcaatngatcatagaaatattgta

SEQ ID NO: 86872 - DNA, 326 bp, Glycine max
agcttggaaggtgcttttctccaccatctattcataacagaacaccgggcgggacactactatcattgagataatctctttgtctgtgcttgggggcgctacttaactgagccaaggctctccatctttgagcgtattcattaaaagattgcggccccctatatgcacactgatggtagatgcactctagacggaaacatatcacatttgaactgacacttgactaatgaaagcaaccattaagtccttacaagaatggactcaaaacagttcctaatttactataaaatccgacagaagatctagcatgactttctaaagaaaga

SEQ ID NO: 86873 - DNA, 326 bp, Glycine max
agcttgtaaaagtccttctgattctatttatgcatttctgactttatggcttgagatgaagttcaaagattggacctcttgctagtttttattgatgaatagcttaaacacttgtgcttgaatgaaacaaaagttttgagactgtggtttaagctgctttccttgatatatgtcttatgcctaacttcatctaattgtacaggttacattttattcttctctttgaacaactgcatgctttgtgaaagacaagtgatgagggcattttggttcatccttttatcatgcaatcaatcaaaactgtaaatttgggggagttcttagtc

SEQ ID NO: 86874 - DNA, 417 bp, Glycine max
cctgaggttcgcacttgcacatttgagaagaaaactcattggaccaaacgctcatgggaatagcccgaagacaattgcgatagtagggtgcatttgatgatagtcgctcatgcagactccttatgatttcttttgaatccaacgatggcctttgttatataaattctttcatgagcagcccatgtcataaagtttcagcgggatcgatagaccaatggcatcactctatgaccttaaatcaagaaagtttcacttggtcatataccaaagtgtaacaattcatggtcattcttcaacggtgcatgcgatcgtgcccatagccatatattttcttgctatgcagaataatcaaagatttttataaagggaaaggggaataccctacgaccaatatttcattgattgattaatgtcaat

SEQ ID NO: 86875 - DNA, 309 bp, Glycine max
agcttggcttgcacaattattggagaaggcggaccatgagctaggtcatctcagctaagaatgctactcgtatcaccaatgaggaatacggccatattcatcctaacagacggcagcgtcaaggcaaaccttgatccctctctttctatcattcgagcggaggatctatcaactctttttaatagccatgaagtgtgggggcacgtccacggagggagcattcgtaagataaaagatttagatgtcctttcaggaacgccctaaacctacgcaactgcacttgatggcaaaagtatctacatgctactg

SEQ ID NO: 86876 - DNA, 301 bp, Glycine max
tgtagatgcatatccttgcttccgacctatagtatagaggtgtgcactctatttattgcatcatccatggaaacaatatgtaagctattgacgaatgtactgcgagctataatgagagttagcaaagaatatgtgtagattcatgactataatctacagggctcgatggaaaacaaatggagatgatgaaaggtaacgctgtcatgtgttagtaattataacgtactataagtgatcagtacttattctttattttgagatgttttgagaattcgattggagcactcgatgggatacatat

SEQ ID NO: 86877 - DNA, 306 bp, Glycine max
tataccgtgcttttcgattattggcgggtaaatattgtctgtgacccatatttgccgttgcatgtgcatccaatataagcttttccattttccatgttgcatgggttaatattgtgttccgatgtatatcggtgtatgcatttttgttaaggtatatgagttttcgattattcgcgggttatttttgtctgtgaacctttttgatgatgcatgtctatcaccgaatacgttatttgtttattcttgagatgttgcacgacaacaaaacatacgcttagacctttgggcattttatcattatgttat

SEQ ID NO: 86878 - DNA, 291 bp, Glycine max
agcttgaatcggacattctgttgataaggtatgagcatttgaagtactcgagaccgtccagtaggccaagttggagcatctcggtatactatcagcctgagtcagaccttgaggtgaaaagttatgaccatgagaatggctcaagatcttcgcctgctgaatggcgagcctctcgacatatcatgcgcttaaatcggatatccgcagtagaggttatgaccattggaatatctggacaggttctgatgtctaattcgagcgagccattatattatgaacccgaatctaacc

SEQ ID NO: 86879 - DNA, 322 bp, Glycine max
tcgatacgctagaaataaacatcgacaactctcgagatattcatatggccatatctcttcacacgatgtctgattctggcgcataatatgtctataggctcgaaattgaacaacttgatctcttgagaaattacaatggtcgtaagttttcacaccgatgtcctactccggcttataatatatggatacgatcgaaaatcaacatcggaaactctttacaaatcctaatggccatatcatttcacacggatgtccgattcgagcgcataatatgaagagaggctcgtaattgaacaacggtagctttagtgaattcaaatgg

SEQ ID NO: 86880 - DNA, 239 bp, Glycine max
ggatgaggccggctcttacctgttgggcgtttgtggtcggctgcgtcgtgcgtgggtggaaaatcacgtattaaagggacctcattggatagctcagagatgcatcctccgtagaagctgcacaagcaagcttccatcacttcatcaaatagttcactctggcatgtagacttggtctgatggaaaaagtgattttctgctaaagtggtggacacgacaacctatagacatgggctctg

SEQ ID NO: 86881 - DNA, 319 bp, Glycine max
agcttcttttggacttttatcaagcaattaactcctgtcgtcagaaccatgctatgtgctcgcgactaggccctttcttaccttcgcaactagagtaacctattgctaccccatagagctccgcgaaatttatttcggccatactcttccttgcgagccctcttggtctcttggtcaagggctcttgcgagaatcgcattctcttcccgtgacccggcacactccttccaaacgtgtgtagcggccaacttgaacttctccttggcaaagctcaccgttcctaactcgctctagagagcctggaacttttcgggctctt

SEQ ID NO: 86882 - DNA, 476 bp, Glycine max
actaagcttgccgatttattcttgccggtcaaagaatctacatgagtcttataacatgcacatttgattatcctgctttgatgaatgagaaagctgcggcaatgaagagaatgacaaagagggatgaacccatgctgagactgtcgttcctacatggccaaacttcccaccagctcaacaatatcaatacctagctgatgtgtcattatttattcctatttcataaccactgttgtcaccattttaaatactgaatatccttaattgtcaaattaattatgcagctttatcatgtgcgcctactggactaattgtgtgttttaatttaatgtcaagagaattataagcaattgggcttgaatccacaattgggcttggacttgaagagagcagacaattttattttatcagatcttatcttatccagaatttatcgtatctagatatagtgcatccaatcttatcttatcttatct

SEQ ID NO: 86883 - DNA, 325 bp, Glycine max
agcttgtaaaagagatttggaggtttcttgtctttcaaacgatgcctaagatcccgcaacctttttggagatcaaagctaaattaggtgctcttattactcaagaaaaaacttacttgcatcaaagatcaaagatacacaggcagaaagttggtgaagttaattcaaaattcttccattcatttgcaacttccaggaaaaagtcaaacttttatttcttctctcactcatcgtaatggaaatgttgtccatgaccatagaaaaaagtgtgatatacatatttcttatttcaataatctctttagtgttaataataattataatga

SEQ ID NO: 86884 - DNA, 313 bp, Glycine max
agctagaagccgcttgcttagtgtgagagcaagtcatggagatggagactcggacttcatcagtaggttagaaaatccacgccagatatttgttttcattctagctagacgctagaacaaataggaccattagcgacaagtatagaatactaagacaataaacaatggctggatgtggtcattatgtagacacggaaaggagattgtaagacgcggttatactaggagaggacataaggaatagctcagaggatgctatagagatcatccatctcataggccctcatacgtgtaaaatatatttcacagggct

SEQ ID NO: 86885 - DNA, 313 bp, Glycine max
agctttaatatgagatatgtcttaaaataagctagcgagggtggcgatacttgtaaataggtaggacgagagctaggaattaaacatgacaagaaaatccatacgcgagatatccagtcaaatgcggactgactttgacaggaatacccgagtggatcaggaatgggttcgggtgcaggtttttcttgataaccaaaaatgggagacagggaatgggatatgtaggggagtcaagggaagggattggaggagacaatacccgtacgtcaccccattgtcatgtctactaaaaataaagcctatgatagatagc

SEQ ID NO: 86886 - DNA, 335 bp, Glycine max
gcgaagagatctatgagggacgccacggctgaatggaccactgtcactccacgagttgatagccactgtttcaggagcgccgatcaccatcaacgcttcgaggccatcaaaggatggtcgctcgttccatatagagagacgcgtcttgctcatggacgatgagaacatggatcttcaagaggagatagctcgccgacaatggacgttgctgggcactcccatcgcttagtttgacccacatatatatctggagttttatgctaatgcttggcccacagtatagggagtgcgggacatgcggtcatatgtgaggggtcagaggagtccctttgact

SEQ ID NO: 86887 - DNA, 326 bp, Glycine max
agcttgtaagcctttgttcgattggcttactgtaggcggttgcttactgggtgctgaatgacagtggatatagatttgaaagagggctggggttcgtcttttagcggagaaataggattttttagaaaaatcagcatcatagggcgtcatggataacatctcgctggacaaaaaagaggattggcgggagaagtgaataagaccactatcttttgagcgatgagtgagctcttaagtgcgagactgccttttaccttgatcggagatgctgcaatgcccacacctgatctgtatagttaatgtacgtgactcaccttataggaggg

SEQ ID NO: 86888 - DNA, 383 bp, Glycine max
gtgccactgctgacggcgacgtatgggatgctaagaacatctttacctatcactcttactaatgaggggtggagagtaatgttaatacaattgtggcatgatgttattatacggtttctttgattacatgggatcagagatcatttaattggggatgctatatgtgcttcttgtaacacctttacttcatttttctgtaaataaattataaaataaattcatttataaataaataaaattttaaaacatgatgaaattcttataatttaatacataaagagaaataactttattaacataatgatttgaaagaaaataaaaaggatattttatttatctatttgataggaaataaaatatgtcttatctatacaataaaaaat

SEQ ID NO: 86889 - DNA, 324 bp, Glycine max
agcttgtgagggttctctatggcgagctgtgagttttttgagacaaattcgctgtgcatctccccaaatttaagactaagctaaggtgaaacggttattctttgttataaccctattacagtggcaaggatatcaaaattaaactcaggggtttattcaaacaaatcattattacttttggctcaacaggggggcaagggataaattcatcacaaggtaactttctggctgaggggctaaaataaaaagaaacatgggcttgatcatatccaccttatgtaaataatgtaacaatgctaagaatgatgcaaaattaataattta

SEQ ID NO: 86890 - DNA, 333 bp, Glycine max
agctttttatggtagaaaggtgttttacacctctatgttggctagagcccagagaaaaaacctcatcttaggacctgaagtggtacagcaactgccgagaaggtgaagttgatccaagaaaggatgaggactgctcagagtagacagaaaagttatcaggataaaaggaggaaagacttggaattcgaggttgatgatcatgtattcttgagagtcactccgtggactggggttggtcgagcattgaaatcccgaaaactcacacctcgttatatcggtcctttccaaattcttaaaagagtcggtcctgtggcataccaaattgcattaccc

SEQ ID NO: 86891 - DNA, 269 bp, Glycine max
acctttggggtgtttctttgaaaaattcgtgccccctttttgcacattgtttgtagttgcatccctatccaagcccttatactgacacagcctagcggaggcaaccattaagtccttccaagaatggactctggaaggttccaagttagtgtaccaggtaacagctacccctgtaagactttcttggaaggaatgtatcagcaatttctcatattttgcgtatgcccccatcctccgacaatacatctttagatggttcttggggcaag

SEQ ID NO: 86892 - DNA, 347 bp, Glycine max
  unsure (1)..(347): unsure at all n locations
cccgggatcttaagcaccgcggctgcaagctttgaggnntctgtttttctaacctagaaaacttgcgctattcatcttttcattctcttctccctttgccaaaaagaattcgccaaggactaaccgcctgaattctttttgtgtctctcttctcccttttccaaaagaacaaaggactaaccgcctgaattcttttgtgcctcccctctcccttgtcaaagaattcaaaacgacacagtctgagaattcttttgattcttcccattcccttatacagaagtgttcaaaggactaaccgcctgagaattcttttgtatccccattcacaaagtatcaaaggtttaacc

SEQ ID NO: 86893 - DNA, 393 bp, Glycine max
  unsure (1)..(393): unsure at all n locations
actcaagcttctagccgaatggacttaccttngaataattcctttgatatcccttacgagccttgtttccctttccttgttctgaagctcactacaagccttaagtgaaaaaccatgatattaccatatccttaaggaattttggagctctggaattgttttgggaataaatgtggggggttttttgtttcattggacaactcgttctgttggctatgcttcatgatgtattttgggccatacttgatgtacattgcatattggttaaatgttggacatgttgaatgaaatgttgtttctcaaaggctaaagagtaaaaaaaaaaatcgaaaagagaaaaagaaaagcaatttagttgagtgaataagatctttaatggctcaagaatgatga

SEQ ID NO: 86894 - DNA, 323 bp, Glycine max
agcttcatatgtcaactcatgatttatgaaattgcattttttaattaacatgtagtttttcttctttatttttactaatcattttattttgtctttgattaattttctattaaggggtcgaagttggtgaaaaaaactgaagatttgtacaaaacttattccctcttcaagggcatgtacgtaccatataccatgtatatttaatcaatagcttcataaaattcatctatacactaatgtatactttcttttttagtgaatttggtaacagttctttgaagcacatactaatattaactttgaaatgtattttaaacagcttc

SEQ ID NO: 86895 - DNA, 386 bp, Glycine max
tatgactcagtttcttggtctttcttggactatatgtagattatattgggtttttgccttaaatggagaaattggatttcagtttgccttaaatcagccaccatctcagttttaattaatggaagccccacaaaggagtttgtcccttctagaggcttgcggcaaggggatcctcttgcacctttgctttttaacatattggctgaggggcttacaggtatgatgagagaggcccttaacagagatttatatagaagcttcttggttgggaagcaaaacctccctataaacatcttgcaatatgcacatgacactgtttttgttggtgaagctttgtgggagaatgttgtagtcttgaaatctttgttgaaagggtttgaaatggg

SEQ ID NO: 86896 - DNA, 331 bp, Glycine max
agcttgccaaccatcatcttttttcttttgaattaacactttagtagaatggacatgctgcataacattaagtgtatcttgagattgttgttgcaaagcttgacaaagacaatcagtaatccctacaatctctttcatcatgtgtaaaatcaatatgaactcaaatgaagacaaaaaattataagcaacatcaataactcccttttgagaataagttgatccatcaactataattctttggagaaccacacaagatgcattgtacattttcatcataatacaaataaaatgaaaatatgaactccaacgagtatctctaactcgttttaaa

SEQ ID NO: 86897 - DNA, 381 bp, Glycine max
agcctgatcgctaagcgacaacttatccgttgcttagcgtgacctattgttgccaagcgcaattccttatggccataattgaggtccatgatgctaagcgccagtcatggcagctaaacgagattcattgcggcaatatgagcactaagcgagtacctctcaactaagcgcatacacccttgtacttaagatgcatcattttagctaagttggccaacgcctggcttacaaagagttgcagcttttctaatatacagacctatctaagcggacgtaccctcactccaagccgagtttctgtttaaaaaaaattgattttgaatttgaaatgtcggctaagcgcacgggtccgctaagcgagccatgttgagaaaccaaacg

SEQ ID NO: 86898 - DNA, 329 bp, Glycine max
agctttatgacgaactattatgacacaacttcattactggtattccgtgtatacaaacgagcttgttgcacttcttctagactggaagtgataacaatgctcttgaacccttacctctgactatctcatcatgccgagactccagaaccccaacaggttttgccttttccatgtactcaaaacaaaactcaatagcttcttctgcaatgtaccttctggacagtgtagattctttgtataacattttaagatcttcatgtatcgctcaaccgagtacatccattgcaaatagatgggaccacaacaattaatttcctttatcagatgaa

SEQ ID NO: 86899 - DNA, 339 bp, Glycine max
ttgcattgaatgagatgataattgttatgtatacataaatggcgttattaaaacacacaacaatcatctaatttccctctcttttatcgcttctttttgtgttaaacattaagaatttaacatcttttgattttttcttacctagtacgtgctaaaaataataaatttattgcatttttggtggcatactttctgtggagacacaacataaggcatggaaaaaagttaatgaattagagaatcgcactcatcaagtgaaaagcactcaacacaatagccttgcttagcgccataagtcacataagaagccaattgttacgtgcatgcgcgcttagtgca

SEQ ID NO: 86900 - DNA, 316 bp, Glycine max
  unsure (1)..(316): unsure at all n locations
tgttcatttttatctttaacanataacttcagatccactcctttttttcactcatgattaaaattgctacaagaattgtgttagaagtgatcgcaaatggtcaaataaatatcttcacacaaacactctcatgtgtttacactctataattttttttactagtgtttcactctttttggcttttttcatctaatagtctcaccacttttgccttttaccactcaatttctccttgtgagctcttatgtaagaacctttggggttgattatacaggacaagacacaacaagggatcaatgagagcttagtaaataag

SEQ ID NO: 86901 - DNA, 395 bp, Glycine max
tgacactctcacaactcaagcttttagcagcagcgatttcaacctataaatatgtttagcgctttgttgcttaaggactggaaagttacaatttgagttttcttatgatcaaatatcttgaataacacaattcaagagagcataagacttattttgattcacaaatcccgccgctactcaacaccacaattcagcttcttcataggcatcatgtatgaaacttataaaacaaaaaaagttcaacaacaagactacttctaggaattgatttagaacatgttatgaactaaataacatgcatgaattagactcaaaattcaaaagataggctaagaatgacaagaatacatgaacaaatgtatctagaattcaatcaacaaagtaaaaattcaaca

SEQ ID NO: 86902 - DNA, 324 bp, Glycine max
  unsure (1)..(324): unsure at all n locations
agcttataagaacaaaattgtctcaatcatttccaaatatgcatgtgaattangaagcatcaacaagaatcaagccaagactattgtgcaagcaatcaatggggcaaaacacaccaaatgattatgatgatggatggctcaaattctcacaaaggtaaactcatcactttcaaattgagctttcaaaactatcatgacatgtagaggagaatcaaggatttcaagtcacaaaatgtcaagaacttttattttcaaaacaattacccatttcttgaacatatcctataattcaaagaaaaacatgcaaagtcgtacatgcacaca

SEQ ID NO: 86903 - DNA, 369 bp, Glycine max
tctagctgtcaacttttagcaggcctactaccatttaacttttcaacttccaactacctttccagctaattttgctgaacatagcctaaatatttatttgtatatataaatatgtcattttttatattttagtccatgtacttttttttcatccatgtaagttattttttttcgtcacttgtaatttttcttcatttttagttcaagcaagtttattttttatttaatttttagtccttgtaagttttttttttttcatttttagtccctatgaactcaacattaacattttttgtaacaatgactgatagccgggactacaaatgaaaaagcacgagacttacaacaactaaaattaaagaaaaataa

SEQ ID NO: 86904 - DNA, 323 bp, Glycine max
  unsure (1)..(323): unsure at all n locations
tatctttctaagattncataattatgatattttcgncnctgggaatggattaccataggatgtaatcgattcccatgggctaaatatgatttctgaaacaatttgccaatttccagagtgaatttaaaagcctgtaatcgattaccagaaggttaaactatttgtaacaacttttagaaatttaaatttaaattttaaaagcctgtaatcgattacaccatttgtgtaatcgattgccagacataaaaattcaaatttcaagtttgaagagacacaactcttcaaaaactaactgtgtaatcgattacaacatttatgtaatc

SEQ ID NO: 86905 - DNA, 331 bp, Glycine max
agcttctttgagaaaactttcttgagaagctagagcttagctacacacacccctctcataactaagctcacctccttgagaagcttccttaagaagattcctaaagaagctagagcttagctacacatacctctctaatagctaagctcacctccttgagatgagaagctagaacttagctacacacccctaataatagctaagctcacccccatgacaaaaaaacatgaaaatacaaaaaaaaagtccttacaacaaagactactcaaaatgccccgaaatacaaggctaaaaccctatactactagaatggccaaaatacaaggcccaa

SEQ ID NO: 86906 - DNA, 382 bp, Glycine max
taaaacagaacaagaggagacctttcagttgtgtgctaataattccatatagcttaaactaaaagaaatttatatccatagctttaaacctcataatcaaattttaaactccattgtctgagccattaaagtaccatatccagaacaaaaacaaaatatctaatttctcaactcaaacagcacaagtgccaacacatttcaagcggctgacttgttcctttactcttatattgggaacagaatttgcaaaacaataaaataaagcaaattacaggcactgcacaaaaaaaatcatattggtaggagttactaatcaaaattatatatactttttaagtaacattactaccaagtgattggacacaagtgattaatgtgttga

SEQ ID NO: 86907 - DNA, 324 bp, Glycine max
  unsure (1)..(324): unsure at all n locations
agctttaactcggattttctattangcgcataatatatcgagacactcgatattgaataacagaagctctcgagaaattcgaatggtcataacttttcacacggatgtccgattcgggcgcttaatatgtcgagacgctcgaaattgaacaacggaagctctcgagaaattctaatggtcataacttttcactcggaggaccgattcaggcgcataatatatcgagacgctcgaaattgaagaacggaagctgccgagaaattcaaatggtcataacttttaactcaaaggtcctattcaggcgcatcatatatcgagacgctc

SEQ ID NO: 86908 - DNA, 316 bp, Glycine max
agcttggcaggctattgtttttcgatagccaggtggtgatgcaccatgagtattacgaggcgctacacagagctttgcggaaggaagtcatgttcagcatgcctcgcctgagctatatccaccctgctgaacgtatcttacagatcgatgtatcattgtctggtgagaagcctaaggagagcctgatagacctgcgccctcagtggagggggcttgcccccgctttacttgacattgtgatgaacttgactgtgcatatggtgagagaaaacaaatgctgcggtcctgattagctactggggatgtacacggttga

SEQ ID NO: 86909 - DNA, 234 bp, Glycine max
tagtagcgcaagcttcatcgacttgagcaaggtttattccagaaccaaactctggataaggaaaacttaccatcttctatgtactacgacgatagaatacaaatatcaagtttgtatggaccatacacacattaatttgagacattctgtggaaaaaacatgttttaccctcacagatttatcagtataattgatttagtgacaatacgatagaataacgtgaacaaaattatg

SEQ ID NO: 86910 - DNA, 300 bp, Glycine max
ctttgagccttaatgaggtccttcaatggtgattcttcaccatggagatgcagcggaaggcaaaagagaagaggataggggaggcaccatccactagggaataagccaaagaagaaagagcttcaccaccaaaaattgccttggataagaagcttgaagaggatgctttaatggaggaaaagaaagagagaagggggggagcacgaaattgaaggaataaaagagggaaagaagtggaactttgaagtgtatctcataagactttcattcatcaaagttacaacaagtgttacacatgct

SEQ ID NO: 86911 - DNA, 381 bp, Glycine max
catatgatttatatgctcccgcttgagggtgagtgtttaatatactagtattgagctatgtttgggagcttagctggcaaggtttattcagaaggtagcaatgaattgtcactgtcgagtagccttctctctctctctctctctggtatcttatatatatgtatcattttgaaatcaatagaagttaagtgagaaagagtgagtttttaccctcaactcacctcaatcttgaagtgcaacaacaacaacaatgcaacaaaaaattgaaaaggaacaaccttaatattcaacaattttcatattgtgttgtaaatacatatttaaatgaaaacacatatatttaatgtattaaaaatattaaaagacaaatgttaacatatt

SEQ ID NO: 86912 - DNA, 334 bp, Glycine max
tgcagctttgtccccaaaggctttttaattactcttccaaaatctaaaggaaacctgtgatctctatcagataccatgctagaaggcacaccatgtagtttaactatctcactgatgtacaagctagtcaacctctctaaggaatatctgatgctaattgggatgaagtgagcagatttcatcaacctatccacgataacctaaatggaatctaaaccttcgagggtcctaggtaaccccacaaagaaatccatagtgatgctatcccacttccactcaggtatctctgaaggttgcaacttcccccaaaggcttctagtgttctatcttatct

SEQ ID NO: 86913 - DNA, 323 bp, Glycine max
attaacaggtttctttaccttatcttccatctgagggtcttcaatgttcttcatgtatctcctcacatgtcttgtgctaaatgttgtttacatgattctttagagtatccaccgattaaacttgctatagaagctacatttgattttctatggttcaaatatcttgctcttgttcttgaaccatgaattatgttgagtttacgttcctttgagatttgacttgctattttttgtggttgaaacctaaaccataaaattcttacaaaaatattaaagtataagaaaacctcacaaatctagagtgacttgttcacctattgtag

SEQ ID NO: 86914 - DNA, 322 bp, Glycine max
agcttgggcacgaaaaaagccttgtctgttcagaagggagggttttcccgaacactgaccttaaaatacaggacatgtcaagtaagtcaaggcttggggtgcgtgtgactgggtcaattcccattcgaagtatcctcttcctaatgtgggtgttccaatagttttttatttcgttgtcggttcttcctggtaaccttgatgctatagctgaccatctaaataagccgttcataaattaaccatattgattagcaattagtataaaacaaccttatattgaagcttaattttttaaatgataatgattgtgataaatgaagga

SEQ ID NO: 86915 - DNA, 335 bp, Glycine max
aaccaccgcggctgcagcttgtaatatggcattgtgtatttgtgcaaacccttctgctcttcaaaatgcaatgtgagtatgagctctccatttatggaaggaattcattctcttcactgttcttttttctctccctctttttgtcttttagttatatttgaactgttggatggagaccataggttacagccttacagggttggttgttgaaagttgaaactgtgtcggatgggtgggaaaggaattgttgtcttcaagtgtattatcctattcacatggttaaagtttctttacaagaataactagactataactaatttgataacaggttgtga

SEQ ID NO: 86916 - DNA, 243 bp, Glycine max
gggcttaaagcttctcctttttccctatgatctaaattactaccggccacaaatcaacggtgtgtttggattgacttttttctaaaaaaaatcaaatattttcttttagaacaataaggggagttttaaaccactaaatgtgataaaaaacttgcttacaaatattacatgggtcaaactaaaatcactaaaataattttttgatttccctacaatataatcactaaaataagtttttaattt

SEQ ID NO: 86917 - DNA, 279 bp, Glycine max
gtggcctcagatatcttaagaagggggggttgaattaagatattccaaactgtttcccctaattaaaaatctatttcactttttactcaagttatgaattcccttaatgacaatcttcttaaatattaactcaaacaaagcaacttgaatatgaatataaagcaataataaataaaggagattaagggaagagaaaatgcaaactcagttttatactggttcggccacacccttgtgcctacgtccagtccccaagcaacccgcttgagagttccacta

SEQ ID NO: 86918 - DNA, 380 bp, Glycine max
ctatcatttcgctgataagcatttgaatattgtagcaccgtttataacaggacgagccaacaactgattcgagctgcacattgataagtacaacattgttagaggaagcattgtgtacgtgaggtgcatgaagtgaccttggggcggcgcatgaagtttcaatgactgtgcacggtgacatcaatggtagactctgatttctcccctcgacgcagtggtttttgagggaaggattgatcaccctttagctcgatatacatattaatgaattaaacatatcaaatacacataaacaattttatatggataaaaaattcgcattcacttcagtattactaaataaaacctattaaaaggatattcgactcaaaataagactg

SEQ ID NO: 86919 - DNA, 331 bp, Glycine max
  unsure (1)..(331): unsure at all n locations
agcttcttgtgtagccgttcttggtgcttanaaaatcccaaaaacaaatccctcttattactagctattttgaattctttagttcctgaatgtacaaccttcaaattgttgctcgttcccctctttcttttctgcaaaaaagaaaatcaaatgctgtcaaaacatggatgaagtcctaagaaaatcaatatcaaagaaaacatggatgaaatcacaattaaaaagcacaactacctatctttcagagtcctttggttaatttgtcttgtctccttatgtggtggggttttgtttaataatattatacttttgccttccaaaaaaaacttat

SEQ ID NO: 86920 - DNA, 368 bp, Glycine max
aagctttgtgagtcttctgtaaggaggatagtgtgtgtgattacggcgacgcctactgtatactatattactcccatgtttaagatgaatgcaacttgcatactgttcacagacagagcatgcatgaagacccttaacactgtaactgctgagatttacatatgctctgaagccactattggcacaaacaagcattgcacgcattttatacgtctcgttggaaaacgcatttgacactacaacccccttatcccacaactttctcagatcttttagcaacggacttagataaacatcgatgtcatttcctggcagtcttgggcccgatatcatcatagacaacatgctgctttttcgcttaatgcaca

SEQ ID NO: 86921 - DNA, 327 bp, Glycine max
gcttgcaaaactaattcttattaggccaattatgagtatagagcaattcattgagaaagtggcttggcctagagcccgaccttcttttgtgggggataatgaaagttttacaacccaggcacctcaacaacatgagccagaaccagaaaatgatcactcatctaaagccaccatctctagagctgttgattttaaaaaaagaatattagagacgagatccaatgaggctgctcatcctggaccagtgccagcatcagctgatgcaccatttccaggagtggatccatcttcacctcagcatgcagcagactcttcaactcctgtctt

SEQ ID NO: 86922 - DNA, 390 bp, Glycine max
  unsure (1)..(390): unsure at all n locations
acccaagcttggagacaataggcaaggaaagntctacctcatttatgcgcatttatatgtgcgcataaggataagtgtatcctacgcattaataaccatgtactaaatatagaatccaaatgaccacttgtgttcccaaacaattttgtaaaactaagtaattaagggttcagataaaataaatgatagctgcgatcaattgcttaatttagttaataagaatcaaagacatacgagttgatatgaaaacaattataataagtcgtctaggattgtgatttcacacttaccccaatttccccaattctaattctaacaaccccaaatattatgaattatcgatattcccaaattcaattattaacctttggtcatgatttaataacgctc

SEQ ID NO: 86923 - DNA, 319 bp, Glycine max
  unsure (1)..(319): unsure at all n locations
atcttatggtgaanaattctatacatcatgatncttttgaggagtatgtaatgggagtgtacatgttctggctctgctgtattctacatgtatttatgggggtatgggttattttgtggagtaatgatattttggatacccaattattttgaaggctaaatattcattttgattttttattttatttattttatttaaaataattatttattttttaaaaattccattttgaatatttatgttatttaaaaatttcaaaataattatttatattttaaaaaaatttcactttattccttatcatatctaaaggattcaa

SEQ ID NO: 86924 - DNA, 239 bp, Glycine max
  unsure (1)..(239): unsure at all n locations
agcccacgcgantgaaagagagtccatagcgactattgctatttttcttgataaaccagcagcgtaaggagaggcagtgaaactgagtcacctaacgcgtctgatgaagcccttaattagtacgcaagaacatcttattagaattgttaataacagatcacttaatttcgagaagaatcactatttgattcaacctacagtcaattcctaccattcagaatgctggttttcataaacat

SEQ ID NO: 86925 - DNA, 340 bp, Glycine max
acctgcggcatgcaagcttatcccccatttttattttagggggagaagtgaagtgaaaaagggttcaccaccttaggcacttctctctctttcgaatttgcttggaaaaattgtttccgtgaagaaaatccaagccgaggtgcttccgaaacgtttccgtaacgtttccatgaggaatttcgcgaaggtttcgaccgttcttcgacgttcttcattcgttcttcatcgttcttcgatcttcaacgggtaagtacctcgaacctagcttttcgattcattctatatacccgtggtggtccacattgtgtttcgtgtatttttattctcgtttcatttactt

SEQ ID NO: 86926 - DNA, 372 bp, Glycine max
ttcttcaaaagttctctgttcatctctacttcttgagcgataaagaagtgattcagctgttaacgccatgaattttagttagaaaataattcagcagagtggaatgttgatgtccgaaatgttgggtcaagtcactctcactccaactcaaactagagaatgagcttttgaaaaaagtgtaattttctaaaaataactaaatgaatgagcttttgaaaaaacaataaaaggtaagaacattctagctacaacatttgcagttaagagcattctggctatcatgtagcttaagcaataggcatacatgtatcagatcttttctatagtaatagagatgtcaagttaaacaaattaaaaaaaaagaggaacttc

SEQ ID NO: 86927 - DNA, 311 bp, Glycine max
agcttgctgacccatgtatatctgtaccctgtaccacacatgatgaggtgctcaaaccttggatagattctatgagagcatgcggctctagacccatatactttccatctgcggggcctaagatgactatattgtctacacaaagggtacgcttctctacacacaacaaatgggtggtctgtctaaggacaggaagaacgagcacaatatgtgctgctggaccatataggctcctgctgctcgctaggatatcatcgtgagaaacctcctcgaatattcctataccatcgcgataagcctaagatatgagc

SEQ ID NO: 86928 - DNA, 313 bp, Glycine max
agcttaaacattattctttgttcgtctcgagatattacgggactcaatctgacatctgagtaaaaagctattgccgcttgaataggctcacaggttcaaaattcaatttctagcgtcctcgatactatttcaggactcaatctgacatcctagtaaagagttattgtcgatcgaattggctcataggttcaacattcaattttcagcgtcccgatatactacgtgactgaacccgacatccgaacaaaaagttatcgttgtcttgaatctgctctgagcttcaacatttaattctgagcgtccctgtatatta

SEQ ID NO: 86929 - DNA, 329 bp, Glycine max
  unsure (1)..(329): unsure at all n locations
agcttgtgtaacttgataatatttttcttctcttccctggtgtagnttcctcttttgaagtttggccttaggtaattaagccaccttagtctgcaactctttccacatctcgcaagacctggcaaattaataacaacaacaacaaagtaaaaccaattacaatggattcatatatgatttagctataatttgtgcatgtgtataattaaacattgaatatatggttcctacaaattcatgtagaagttaaaccaaaccttgaaaacagagaagaagaaaaattgaaagccacattggcgactatattgatggtacatactctcacatac

SEQ ID NO: 86930 - DNA, 387 bp, Glycine max
caccccatctagtttgtgcctcacccactctttctccttaaatctattcttgaagaacaagtgtatctcctccttcacccttccaggttcatcaatccaaacaccatttacaaacactcctctcaaagagttggatctgcagtctgagtttacaactctatggaaaaacttggaattactatccccctctttgatccatcttgaccttgccttttgcctcaataaggacttgtgagattgggcagctgaccaaagctcctcctgatgctttttcctacatagcaactcttgggcagatagctgtcttacatcacctttagcttctagtttgtttaactccttctcaatggttgctagcttctgctgggaatctccaaagtgatcctt

SEQ ID NO: 86931 - DNA, 330 bp, Glycine max
cagctttttaaacctggaaaatttatttttaaggataagagaggcaagttcctcggctatattatcatacagctgggaattgaagtcaacctcgacaaatgcacaaccatactggagatgcatagtcccaccaacattcaagaagtctataagcttaacggtaggctagcatcctgtcataccctaatttcgtccggggacctttgcttgatggcatgcaacttttgtttggtccttatgaggtgcttggcacccatcattaggcaatttgtgaaattctgagacatgccggaaagcaaaagaaaatattgatgcacaatccgtaaggtt

SEQ ID NO: 86932 - DNA, 336 bp, Glycine max
ttcgaccctcctagtatctgatgatcactcgaaattagtgagaaagatcgcttccgcgaagaaaatccatgccgaagagctttcgtaacgtgtctgagacagatttgtgggtgattacctgaagattgtcctccgtgcttccctcgatcttcgtcggtcatcggtcgttaatcaggaagatcccgaaatcgaactttttaattcattctatgtacccttggaggtccccacttatttagcgtacattttattttcatttcatgtactttgtcgacccccttttgacatgctttaatcatctatcgatgtgattatctcgcctaatataaattttca

SEQ ID NO: 86933 - DNA, 321 bp, Glycine max
agcttgaactaaagcaaatattggtgtgaattgagttctgcattattaaactatttgaacaaaaacagaatatttaaagctatagaatgtgacaactatcaggttaaaagcgttagggagtgtcctattgaatttctcttgctgtataaaatgtgtttttctttatttaacgttatcatagtgttcttacactgagaaattactcaaaccatgattcctcacatgaatgagcctaactctctttagcctttgttcttgattcctcaacaaacttgttctaaaaaagttgcactaagcctacagtgtaaaataaactagatc

SEQ ID NO: 86934 - DNA, 383 bp, Glycine max
gtgaaatgcaatcccaaaatcccatgttattttctttattctcttgtgagataactaacttatttgaaataaaaacagacttaacaaaaagattaaaagtgaagacaagtgaaagttgggactctactctcaactaatgttattgggggtgagaggttagagtttctatagacccaagcatgggaattttaggagacaaagagtttctataaacccttacattaggttttctgcttatcacttccatcgggttgactagagtactaattggaatctggatggaaataaaaaaaatggtagagaaagctagaaatgcaaataagaaagttatctcttttttctttgattatatttgctaaagttgagccataaaagtggtaaga

SEQ ID NO: 86935 - DNA, 321 bp, Glycine max
  unsure (1)..(321): unsure at all n locations
agcttggactcatgagnggtatttttttgtctaagnggattggtccttttgttgttactaatgtttttccttatggtacagttgagatcaaaagcaattccataaacaagagcttcaagatcaatggacaccaacttaagccattcctcacaaaccctttctttagtggacatagtggtggaagagacttccttactccaccctactcttcctctaccatgacttagggagtttttctttcctatctccttctttacttttattacatttgtccgattctatttgatggtttaattgcttttaatcttttaattgtgccac

SEQ ID NO: 86936 - DNA, 383 bp, Glycine max
atcctaatttgaggaagaagaagcatgtgtaagattattatatatgacagcttttgaaattttgcatcaaagtctagtctactcgtcacaatctggaacaatttgccacgttggatagtctatgtggcactaaaattgtcaacaatgcaccttactaacgacattacttttaaatttaacggcaagaactattttacaaaacttatgttaagatagagactattttttatatttaaaaaagatagggactaatttgcaaaagaagtcaaaagtcagggaccggaatgcctatatactgctatcccaaggcataaaaattactacgtgttctctccaattcacaaatcaaaagaattttccaattacaataaataattaattag

SEQ ID NO: 86937 - DNA, 328 bp, Glycine max
agcttgtaggattatggttgtctccatcacatgtggtactaggtggcggtctggcgatggtgcacaacaagttttccacatccacaatgcgcgcataaacccaccatcccctgttgcccacctccaactgagctcacgtactcccacgtagcccatatcctcttttctctcaacaccgggtccccatcaatcctcccaagccttcccaacatcaaagcaaaacaacattcaaacagcacaagctatcacagccaagcataacagagcaaaggcagaaaactctgccaaaacaccaaccaaatcacagcttttctcacttatagacccc

SEQ ID NO: 86938 - DNA, 381 bp, Glycine max
  unsure (1)..(381): unsure at all n locations
gcttncacttattagtgcgcaacacctttttaattttcatatcttggaataggcggtattgcatccaacagacgtatgtttacctctacttttctaaacgtttccaagatctctttctctgcctgttccatttttttgtgggaaactgctcttggagggaatggaatagggggaatgtgctgcttctgcacaccagaattacctgtggaagaagattcacctgcacataaattgataggtaaatttttgtcatcacctttttctggagtagagagaaatgtggcaggctcatttgcaaatgaagaaagtgctacgggttgatgtccttgacacctgctttcctgaccgcaatgaaatggcactgacatttttgggattttg

SEQ ID NO: 86939 - DNA, 355 bp, Glycine max
ccggtatcctatagactccaccgcggcatgcaagctttacttatgggcattcgggcttccttcactttcttgcctcaactgtgagctttgaccaccgctctttcttcccgcgatgcttctctttatatccgcctgagtgggtttatagcctaaaccataattcccacgattttctttggcatttatcaagctagttatgccgccgttgtctttgcctaaacccattccgggttcgtaaccgttccccaacataactcgggccatcattagtgctgcatcggacaggcaaggctgcccagagaaggagtccacggaggaaatgctgaccacctcaaaagactggaaagcggtttct

SEQ ID NO: 86940 - DNA, 370 bp, Glycine max
tgataccagatgatgtgaacctatgtatgagctgatcgtttgatacaagctacagagatttggatgacgccacttccagtgaaggaagataactcatggtatacgccacaaggattacctagataagtctgagattggttcaataaggaactcggagagaaactctcaccaaattttatcaaatgccaaaagttcctttattgaaaacaaaaaccaatacttatagtatatctgaacaaaaagataaaaatagacatgggccttctaaacagtttgggccaaaattacaataaataaaaattataactaaaaacatatttaacttgggcttttaaattagattgggccttcaacaacaattaatagtctt

SEQ ID NO: 86941 - DNA, 318 bp, Glycine max
  unsure (1)..(318): unsure at all n locations
agcttgggcatnantantttggtttataangagcgggagagagagatagcgtggtgaatgtcttgcgaaagaatcctgcacaatcataatttttttagatttccatcaacatttaacatctctcatttttttttcttttatctcttttttattatatcataaattatattatatttatatatttttcatttttttttttactttttcttcatatatattaagtgtttatcaaatatgtctctttgtgaaagaataatgatatttaaatacccttaaatatcaaacaccttatcaatacacttagtttatctttatcct

SEQ ID NO: 86942 - DNA, 334 bp, Glycine max
aaccagcgggagagacattaataatttatttgtccacgcatactatttaagataatcaaaatggaaatcatgtgcacgagaacataaatttcttataaaataaccatggaatgagtaatgttttagcatgcacatctcccaaattcgaatataaaaagtattctaaatcattttttcatgtgaaacactctttaatgcaaaaaaataaatttaggagaatgcccaaaatcttattaaccatacatctcataatacttgaatgtcttactattaatcttaagaccaaaatattgataacaatctatgaaaattaacactaaaaaaatgcgtcaat

SEQ ID NO: 86943 - DNA, 321 bp, Glycine max
agcttgatataagcaactgttctcctgatcaactaagtaaaatgcaaggtaaaccgtttctgatctcaatagctcatctataatcgaattttgttacacataaaagaatttcactatgcttctaatcaatcctagaaaacagtctaaaatttgccatgcctttgtcaccacttgatgtatgtaatttgttcacagcccttaaaattttaaaacactggcatgagaatgaaaaacaaaaaaaaagtacatgttaaagggtcattcatttcagtaaaagcttctagtagagttccagactgagatttttcaacacttctactc

SEQ ID NO: 86944 - DNA, 335 bp, Glycine max
gcaaacaacactgactatgagcaacatggaataattcatgaggtaacgtcaccttatacatcacaacacaatggcttggcagaacgaagaaatagaactatccttgacatggcaaagagcatgcttaagcagaagaagctacctgattcattctggggagaagctatgagcacaacaacttatttgttgaacaaatgtcctactaagagattgatagagaaagtcccagattaggtttggtctggaagaaagccactggttagtgatcttaggatctttggatccctatgctacaaacacattcctgatgccaaaaggaggaaattggaagacaa

SEQ ID NO: 86945 - DNA, 275 bp, Glycine max
aaaaaaattttttcttatcaccacaaaggggggggggttgagcaaagaaagcccccaccccgcgaaaaggaagaaaagccgggaaaaaagaggagacccaagaaaaaagccaaggaacaatacgcagggcaagaaaagcaaggcacgggaaaacaaggcgcacaacggaagggaacgacgccacgggaaagctacaagggaggaaccggaagggccgaaaaagaaaagggcagggaacgccaccaagcaaagcgacagcccgaaaggccccgggg

SEQ ID NO: 86946 - DNA, 324 bp, Glycine max
  unsure (1)..(324): unsure at all n locations
agcttgcttctacaatctctttctttntgatgatgacaaacctaaaatcaagaaacacatacaagctctatcttctaatcgatcactcacttaattctccccctttgtttttgagtttaagcttcacttgaagttaagttatttaattatatgagttcttgatttaatcccaattttctctccccctttgtcatcaacaaaaaagccaaagtgcgtatagagacataaaatcatacacaaactcataatcatccaagcattttaatccatacaacaagcaaggaggaaaataattcatacataaactaagcaaggaagataata

SEQ ID NO: 86947 - DNA, 285 bp, Glycine max
  unsure (1)..(285): unsure at all n locations
agctatataagcacttttattcattttttaccaacgnggaacgtgagatacctctccatgtagttggccaacaacgcggttccccaaaagtagtcacaacgtaagactatgcgaataatgtgagccacatattataggtagcgattgctaacaacgtgaaggactcgcctaacgttctactaactgcgggcacctgctatttacaaatgcatgtttatctcattaagctgtcaagccaaggcgttttaatccaaatagtgacaagcttggctttcgctcccctcc

SEQ ID NO: 86948 - DNA, 311 bp, Glycine max
attataaagaaggctctacacgacaatcctgctgttgcgggagatgccccaaacactagagcccttacgaagctcacacttgcagtacatgctaataagtattgggaaaacaacacacattcaactccaaattttcccttgctacattatcatgaacccactcccatggttgaatgcacctaagggagcataaactcttaacaaaacccatacactgtagattcactaggctgaacccttcgtctctgcatcatgaggaaaagctaccatgcctccataagccttttattcctaacatatccacttatcat

SEQ ID NO: 86949 - DNA, 289 bp, Glycine max
gctgtgggagatgtggttactactgtatcaagaaagtgactttgtcaagcagtgaaagctaagtaggatggtcacactcacagtagcctttctcaattcgcttattttcatgtgacacttctcactgagtttaatcatacttcttaccctgcttgtctattttgagtttttatcttgtctaacattccacctttctcatcttgcatatatcagtacgacccttttcagctcgtgtcattgtttttatatattttaaaaagtttaaagatcctctctctcacccacaata

SEQ ID NO: 86950 - DNA, 315 bp, Glycine max
acaaaaactagacgctagagtctgagagagtgcaaggacttgtaagaattccacacttttaatacgagactagcatcttttagtacagcaaaatatagtttactcaacagaattattagatgcgtaaattcgctaaggcttaaacggggttaataaattatcatttacaatttatataaagttcatgagattatttatgtttcgtcaataataaaaattattgtttaaaatataactaaaataaggtataaccgcaaacttaaagaaattaatacttgaaataattatcatgataactcaccaaagaaaaaccat

SEQ ID NO: 86951 - DNA, 330 bp, Glycine max
gcagcttctcgaaatattaacggttttcatcagaccatccaataaaaaagtattgtcggttgaaattgctctgaccataaacattcaatttcaggcgtctcgatatattacaggactcaatcagacatcctagtaaaaagttatcctcgtttgaatttggtcagagcttcaacattcaatttggagcgtctcgatatattacgggactcaatcagacatctgagtaaaacgttattgtcgtttgaaaatcctcagagcttcggtattcaatttcgagcgtctcgatatattacgggactcaatcagacatccgagtaaaaagttatcgtc

SEQ ID NO: 86952 - DNA, 281 bp, Glycine max
attttgtcgggcaggaaaacattagcccaccttggcaaaaaaaaaacatgattcaccgggattgacagaaaaaaatgctggccttagtcggccaggaaagatgaccgatcgaggtctaaataagaagcatgaccggattacgccgatcgaacgtttcctaatagatatcctccaagtattattcagggattgaatggaaaaaacaatagccgacatcggtagttaaaaagccgtgactggatattttttagccaacattgggcaacttttttacaaacgct

SEQ ID NO: 86953 - DNA, 322 bp, Glycine max
  unsure (1)..(322): unsure at all n locations
agcttcatacaataataanattgttcctatatcctaatgtcacatcctatctgagcattgtgttcccgcgtcctctagcatgagattctttatagtcatctacctattttctgcttccccgaacacaagttcaaaatcatcacaggatccaaacacaacaacacacagggagtgagttatcacattcctagctaatagagaaacaagacaattaaatatacatattatataaatgagataccacttgcttaaacatagctcacgtaacttcaccacttcgtcattcaaaattcacttttcaatcatcaatcacattacacaa

SEQ ID NO: 86954 - DNA, 310 bp, Glycine max
  unsure (1)..(310): unsure at all n locations
taaaaacacgaggacgataatggacctttgnagatagatatttgtctgtcctttcgcacaaatgatggaaaaacattgtccgaaactgaaccaaagctaaaaagagtaggaactataataattttgtttaatgaaaaaacaaactaattttaatatcaacgaaaagatataagaaccaaaagtgtaacttattctaaacaatattttgaaaagtatgtttaaatgtgtaattgtgacaaacattataaaaattataatgtaatactacaagggggtgttggtctaagtgaaattttaacatttaaaataa

SEQ ID NO: 86955 - DNA, 323 bp, Glycine max
agcttaataaatctatgtatgtattaaaacaagcctcacgtcagtggtaccttaagtttcatgggataatttcttcatttggttttgatgaaaaccacatggatcaatgcatataccacaaggtcagtgggagtaaaatatgttttcttgttttatatgtagatgatattttacttgcaaccaatgatcaaggtttgctacatgaggtgaaacaatttctctctaagaatttggacatgaaggatatgggtgatgcatcttatgtcatcggcattaagattcatagagatagacctcgaggtattttaggtctatcatatgaa

SEQ ID NO: 86956 - DNA, 381 bp, Glycine max
ccctctatcttactttttctaggatcgtgactcttctttgccatcatagagagcggagcagagagaagaaacactctctggcctctcatcttcaagcttcgatggagatgagcgttgcaaggctgaagaaggacgagatccagaggctgaagaaggagatcaattagctccgacgtccggcgacagagctgcatgactcagagacaagcgcgacgctgaagaacctcctcgaagagggagaaagaatggtgacattcctagagacgagcgcgccagcaccaccatcaccatcgctgatgttattcaaaccctaaccctcctcaccctcaccctcaacccgttttgctcgtcttttcctgtgggaccgccttcaacgacgtc

SEQ ID NO: 86957 - DNA, 345 bp, Glycine max
tttttattttcaaagtttttttctgacccgctggcatccctgagcactgaaacaagggcagctacgttcccatgtacacactaattggtatttcaaaaaactcattttcttatcaacaaaagcttcctacacaccttaacctaaactacatcacttttggttcatacattacacttgacaccaacgtgacgcaacaccccctcatacacctttttaagcgcaacaactcatacccgatctccgacgggctttttctatgaagaggcttattcaccacagactaagctcaaacgaagcctgcaacaaaaaaacgttaccttagcgtacacatttaattaattaata

SEQ ID NO: 86958 - DNA, 327 bp, Glycine max
agcttgtctcagcgtttatgttagacggagaccaacatgctagctatcatcgctaagtaccaagaagagttaggtctagccacgacccacgagcatagaatcgcggacgagtatgctcaagtatacgcggaaaaagaggctagaggaagggtgatcgactctttacaccaagaggcagccatgtggatggatcggtttgctcttaccttgaacgggagtcaagaacttccccgcttgttagccaaggccaaggcgatggcagacacctactccgcccccgaagagattcatgggcttctcggctattgtcagcatatgatagactta

SEQ ID NO: 86959 - DNA, 371 bp, Glycine max
  unsure (1)..(371): unsure at all n locations
tactaaactacctttatattagattacacctcatttctgaacccttaacacattccttcttcagaaatcattctaccctaacattgaacttagcgagagttccacaggctacttggctttctctctgtcgnactcagtaattctctttcacgagggagcaactaaagcctcaacatttcagatcatgtactttgaaattgtaatagcattttccagcatagctattccagaagcatattttatatactctggaatgcctattttggaagacaacttgtgttccagaatgactatttcataagcaaaagatgtcttcaataatacatgttccggagtactaaaaaaatgcttccggattgcttgttttggaa

SEQ ID NO: 86960 - DNA, 326 bp, Glycine max
  unsure (1)..(326): unsure at all n locations
gcaagcttgtgctccaatatgttttatcctattncaaccaaatttcggcaattttgtaagttttatattgtagccaacattaattatcagctaatatataatttgaacagctactaaaccaaattaacttacatcggccacaactgtcgtatggatatgttcaaacatttgtcacctaaaattatctcggttacatttgcgtgtgtgatgaaaaaaccctctttgacattaggtatcccaaattttgccccatcccatggcaactcaataggcttttggtaaacatcaaaaaggttcttaaccaattctcccaatggatcaactgc

SEQ ID NO: 86961 - DNA, 372 bp, Glycine max
  unsure (1)..(372): unsure at all n locations
gctgaattttaagatggagcaccgattatttattttattaaatctgtttntatgccatatttttgttgaatattgttgttcatgtctaaatttttatataggggaatttaatctctaaattttataaaaaatttattttaagtccttactcacgacttgaagagatgtaagcccaagagctaaaaatacttttgttttttttttaaatttaagaactaaattgcatatactaaaaattaataaaaatacaggaattaaaacatattttactgtaaataataatactcaagtgttcctgaggatatagagcttttttttctatgggaataacttaattttgtggacttgtagttgttggaaaagtctacattg

SEQ ID NO: 86962 - DNA, 340 bp, Glycine max
ccttacactcacctgcggcatgaagcttggagaaaactttttttatttttaaattcaactaatttacttttatcaattttgctgtaagttgtactctttttttttcttgctgtaaatgagcgtactttactttctcatttctcttgaagtgtcaattttggaatttttttgtttttatatatctatcattttcagaaaatgagattaattaaccttttgtcaattatatctttatttaccatctaattttcaattaacttagataactattataaagtgaaaatttcctcaaaaaaattataaaagtgaaaatgtacaaaaaaactaatatacatttatt

SEQ ID NO: 86963 - DNA, 380 bp, Glycine max
tatgcaaacggcttaaaataaaagtattaccttcttaatagaaactctgccaatagatttttcccacttgtaatgcaatggcgcaagggagttctttcatgataatcacacatgtttacatcagcaccaaattggagcaacaactcaaccatcagtgcactgccagaatgacatgccagatgtaataatgaccatccacggaaacacctctctgtctcagtagtctcttcaactctcagacaagcttcaagatcatgctgatgccctttggcatcagcagcatggtgagactcatcataatactttgtgtttatcaaatttgatgttgatgtgacaataaggcgatacacttctcgtacatttacagcctgaactgcttg

SEQ ID NO: 86964 - DNA, 321 bp, Glycine max
agcttgtactggtagagtgttttttctatgctagggacctcaaaatcatccatgcccacatgctaagaacccaccttttcttcgacgtgtttgcagccagtcgcctcattgctttctgcatagactcaaccaccaacttgctgcattacgccataagggtcgcgtcccaaatccaaaatcccaatctcttcatctacaatgcactcatacgtgggtgttccacaagtgaaaaccctgaaaactcctttcactattatatcaaagctctacgctttggtctattacctgataatatcacccacccttttttggttaaggcat

SEQ ID NO: 86965 - DNA, 328 bp, Glycine max
agcttttgccttccagacttttttgctctggtaatcgattaccagacagtgtaatcgattgccagaaaacaattttgaaaaaacagcttttagaagggttttgaaatttgaatttaaaagttgtaatcgattaccattgatgccagcaacggaactcttgaaattcaatttgaaaagttatgacccttcaaaacataactatgtaattgattactagaaacctgtaattgattaccagtgaagaatttcaaaaaaatctttttgaaaagacacatttcttcaaaccattttgaaaaggcacgaagggtctatatatatatgtgtgtgt

SEQ ID NO: 86966 - DNA, 389 bp, Glycine max
aagcttgtttcttgcttgggcagcaactgtagcagctttttgtaacctgtcattgagaaatatattgaacacattgagatcaatagatttaaaagacggaaaggttagtcaggttatcattacctcagtttttctataagtagccataatttcttcaggctttctaagtcttggctttaaatcatcattgaaggtcccaccttcaaatagattctccctatcttgtaacttatctgcaggtagaaggaagaaactgtcactaatctttgtagttaaaatgtaatatatgttttgaaagagacttacctttctggctatatttaacatcatgagaggaagtagaagccttatgtatgggctgatggggctcgtctatttcaatgtcatct

SEQ ID NO: 86967 - DNA, 320 bp, Glycine max
  unsure (1)..(320): unsure at all n locations
agctttangaatnntttattttttactttggggcctggagacaggaaaaattatgctgacattcattgagctccttattggggttgtggttattgtgggtgtagctcgctacatcattaaagggtattccgccactggtgtgttatttgtcggtggcctgttattgctgattatcagtgccattatggggcacaaagtgttaccgtccagccaggcttcaacaggctacagcgccacggatatcgttgaatacgttaaaatattactaatgagccgcggcggcgacctcggcatgatgattatgatgctgtgtggatttg

SEQ ID NO: 86968 - DNA, 313 bp, Glycine max
  unsure (1)..(313): unsure at all n locations
agcttgccacccagctcgctattttagcagggntgcttcctccagaagcaacagccttctggaggaatcttctggagggcccaagtgggcctggttgctatttgcacccccatttttactaaatacaccccctgcctttttttggtgattcttttttcgtaaagttacggaaacttatgaatttcgtaacgatacttgttttcattccgtaatgttacggaaccttgcggattacataatcatccccttttttgaattacgaaatgttacggaacctcactaattgtgcaacggtgcttccatttgatttccg

SEQ ID NO: 86969 - DNA, 371 bp, Glycine max
gtgtagtgaggcttgtctacaaatatacatcggtttttctaggattcaaaggttttagattctaagagagaacaaatcctagacttatccaagtgatctttttaatacaattagcttgctcactagcttttcactttcattgcttttgaccttattacatcagcacacctttcctattattggtttttttatatacaacttatgtgttgtatgtgatgatgctttatctctttctttgcatcccaattagttgcactcccccaaatttggggtaaattttccttgaaccatatgctctcctagaatctaaacaaggtatcgggagagaattatttaagttcacggttcaaattttttacgaactcattcag

SEQ ID NO: 86970 - DNA, 296 bp, Glycine max
aatatttacttcaattagtttaagcaatgtacttgtcaagatttggagctactatgacgtatgagttaaccgtcgtcaaaatggactcgagtgatctttgtgatggtgaatggtgctcgaataagtgtgtgagtgagtagtatatgagtgaaaaggtgagttaattaaagtgaatagaattttgtaaaccaatagggtatctagaaaaaaaaaaaattgttgtcgtagaaggatgcattaagttaatgaagtgattttgttctcgccgtatggttttgttctggctgcatactact

SEQ ID NO: 86971 - DNA, 385 bp, Glycine max
ccataatctccaatgtgatgtattgtgctgggtataatcaaataactcgcctaatagagggttagtccatagaggagatcaagcaatgatttctaaataactcttaaaatggatttagttcttcctttgtttgaagcatggtattcttctttttaagtttgaaaacttctcacttatattttttcctagtcctagattagatattttatgtgagaaaggtgttcccactgaagctatatagtagtttgcaaaaatataatttattcataaaagagaacaaaaatgagaattattggagtgaattcttatttaaaatactcaataaattataatactcaataaattatgaaaaaactcacaagcaactatacattatttatcgtct

SEQ ID NO: 86972 - DNA, 329 bp, Glycine max
agctttcaatttaaagggatgtttatgccaagaaacccaagtcgcgggcctatggtttctcgacaactcaatattcatgaaagaatttattatatgcatgatctagagttggtagtcacggtgttcaccttcacgttttggaggcattaccgctagtctaatatgttatgagaaccttaggagttgaatctgaggtagaagagatgggtaggattcttaagaatcttgttatgagtttagtttcaaccgttagaactagcttaataattggagcttgagtaggaaacccctgatgtgactagtgtcctagttagagacttagacattgt

SEQ ID NO: 86973 - DNA, 373 bp, Glycine max
tcggttattattgactgcgatatcatttttgatgatgcatgtgcatcctttataaggctttcttcatcatttgtgattttcgatttcagcttggattggcatgtatgatgacttttgaatatcggggtatatcggagtatctgcttttgttatgctatatgagttttcgcaggccaacaagacaaaagcttggacctttgttgattttatcattagtttatcttttcctataccttgcttttcaatttttggtgggttaattttgtctgtgacccatttttgccgctgcatgtgcatcctttataagcttttccattttccattttccatgggttaattctgttttccgatgtatatcggtgtatgcattttt

SEQ ID NO: 86974 - DNA, 322 bp, Glycine max
agctttgattgggtgagtcttttttttttttgctaggaaaattatgagggattagcagcacgagtaacttgaattcaacgattaaaacgaaaattaagaatgttgagataattgattttggtgtatagtaaaaaaatttctaactctataatgaaccataacgggtgcatatgattctttcttctaggcgtaattctaccatgcaccaagtattatttagtcaactttaattgagtgatcaatctctaattttttaatattctcttatatattgataaataaaaaatattttaattgatatgtaacttttttatctacttaa

SEQ ID NO: 86975 - DNA, 339 bp, Glycine max
taaattgacatgggaacgtagtagacacaaactctatacacaatcaagcatcagttttcccactagagcaagaaaattgccaccattatggatgaaaattcacaagataagaagttggatatagcatcagatctgtagtttgcagcactagtttatgttctacatgctcgctgttagtctaaattgataattatctcactttacaatattgatctattaaaatgtacatgatagctgcaggtaacagtgacatgcaacattacaactgaatcacagtgagaaatccagaaagagcccttcaacttctaattagaaaaagtttacccactaaagcagtta

SEQ ID NO: 86976 - DNA, 325 bp, Glycine max
agcttgaagctcgagaaatttcttttagatgttttgacttttagatgcctaactcctttgagtggcatttatattggttgttatcttgtatgttgtatttgtattgcataattcatcatcatggttagtgtgaagaaaagtttctaagttagaaaagaaattcaagaggaaaaaactcgttgttttaattgattacatgtctatcgtaatcaattacaacaagttgtttgaaacttgaagagttgagtcttgtataagtttaattgattactgatatctcgtaattgattacaccattgtttgagacagtgactgatttattcag

SEQ ID NO: 86977 - DNA, 334 bp, Glycine max
gttgatgcatatcgtgattaaagattaaattgtcaattttcatgctgatatagttgaggagttggcgaataacatcacaaactgtgggagccttggccaattatcaaaagagagccgaattgacttcaacataactggatcggaatggacgtcccctgacataagttgctccacatgagaaaaattatcatcaatgggggacctatctgacaccattgggatagaggaagatggggattaaaagtattcggctatagcttccttaatgacatttggaaaccattggagcagtgggtgtagcaaatgattcaaaaggaacattggaaggttcttc

SEQ ID NO: 86978 - DNA, 267 bp, Glycine max
taaaagggataccccccccacttttccaagattcacatgccacaaatgaagaatatgaaattttatgcaaaactgggcatgcctgcacccatgtggacactcaagcatcaaaattttatgggcaagtgaaacttaggctcaagaaatattttccctattttaagacaaccccagttatcccaaaaatggtcatttattaatttgggcctacattccagatctattttgtgtgtgctaaaaactttttacaacatttaccctttaaat

SEQ ID NO: 86979 - DNA, 389 bp, Glycine max
tccgcagagcttacggtaagatctgggacctatccatggtttatgtctccacagagaccattgcctacctgcgccaatattatgaccagccattgaggagcttcacctttggggacttccagatatcacccacggtggaagaatttgaagaaatcctgtgatgccttctgggaggaaggaaaccataccttttctcgggattttatgcctctttagctagaatttctaagatagtccaaatctcgacacaggaatcagaccacagaaagccagtcataaatggggtggttggagtaccgaagaaatgtttggaagcaaaagcaagagtcttggcacgtaaaagcgaatgggccccgctcatggacatcctcgcacttttgatcttaaga

SEQ ID NO: 86980 - DNA, 325 bp, Glycine max
agctttcataagtgaaatttttgcagccatctccctaagagtcctctcacgaggtggaggttgagtcatgttctcagtatgaaaattagtagttgaaaggtcaaaatcagaatattcagaatcactagcaacagaatactcagaatgctcaaaatgctcacaatgctcaaaatgcacataatgatcaggatgcacactatgcctaactaatatatgagaggttctatctatttcaggatcaaagggttgtaaatcacctggattgcccttagtcatgcactatatgcagcaaataatgtgttctcaaacaagcacctaacaaggg

SEQ ID NO: 86981 - DNA, 344 bp, Glycine max
tgaactaccctaaaccaagataacagggcagaggcagaaaactctgcccaaaacatattcacatattacagctgtccttactcaaatactccagtaacattctcttcattccgatttgataaccgttggatcgacttgagaattttactggaagttcctagtacataaatctacattctgaccgttgggatctgctagaaaatatccagaacccaatatgtactacctttcccataaccgacaatgcacaagcattttctacacatgaacaagaattctgctgcacaaatttgacagcgattttctgcataatatggcagatttcgaaatccatctttcccaca

SEQ ID NO: 86982 - DNA, 325 bp, Glycine max
agcttgtctaccgcactttttatgactaagaccacctttagcacaaaagaaaaagggcatttgattgactgtgttttcaagtaaaaatatagacgttcatgtggcctcattttatcatgccggaaagtttgtcttcttagagaagtgagttgtcaagaataggatgttggacaaatggcctcagttatcttaagaaagggggggttgaattaagatgcaaagactattccccaattgaactatcactctttctttttggattaacaatgcacccttaacatgaattactcaaaagacaaatcaaaataaacttctttaaagcaaa

SEQ ID NO: 86983 - DNA, 297 bp, Glycine max
  unsure (1)..(297): unsure at all n locations
aaagtaatgggtggttgaaacttatttttttgatgattaagcgaggttaaaacataaacgatggggtgaattttactttaaaggtgattaaacaagattacgacacaagaaaataggtgatatttattntaactatgattaagggaaattatggattaaatgattggtcgaaacttgcttaatacaaagaaaaagatgaccgatagtagaagaatgaagatgtagacatgcaaagcaaggatggagccctaaaggtgcataggatgaatataaagctttaaatagaaaaataattag

SEQ ID NO: 86984 - DNA, 321 bp, Glycine max
agcttgtatttgaatgttgttgtttattcacaaaaccaaaatcgaaattcatcttttgaagcaataatacagccaacagaatccagctaatggcataacatgcaggacggctgttaaataccattatttgcccactctgaaccagagagaactcctgctttgattttttgtatggattttgagatacacggggagagacacctctttgtgcagcctcagttgatgccatagtcacaacatgtgcagcttcgtcatcattagcatcaaacattgactttgggtttctcttattaggcaaaacataattttccctatcatcag

SEQ ID NO: 86985 - DNA, 382 bp, Glycine max
cttctagcttcaaaaataatgctagctcctagagtgtgtttgcgtaaatatccttgatttatacgtttttttttacttattttataaacacgtgttaaataaacattgacccatgtttgaataagcttaatttcgcgacaagactcatggttaaacttgcaattttttttattactagtggaaaatataactttttacccaaatggtatataggatagtaatttctttttactgtacaatggataaaaaaatattttttttttatattatgcaggtcatggattggttaactaccaaaaaagggaatggattggttaactataaataagtaactttcacatcttatttcaatcaaaatagatccttttctgcaatcttgttt

SEQ ID NO: 86986 - DNA, 322 bp, Glycine max
agcttgtatccacaaactgtattgagtaaatatagaaaaaagaatttaatattcaacaaatctgtcactgtaaaatcaaaattccattgtcataccttcccttcaacatgcattcctgtaatgtgcagttttgcccacattccaaagcccaacctttttcttagtttcacagcaagtatagcactcatatcatcagccgtgagaaaattcaatcctaactccagaacctacatgaatcacacagtaatgtataaatcaaaatgaacaaaacttcattcacagatgcagaacaacacaatcccttggtatgctgctttaaaat

SEQ ID NO: 86987 - DNA, 372 bp, Glycine max
atttatttgtaagccactcagagttttgtctcttgcatgaccccatgttgtgtattctgcctttatttctttagaaatatatagacttggagcataagatcattagggaaagggttaccaatatataaactaaataaatacacacattatcttagaaatattatttgtgatgtatcgttgatggtaaactaaaattgataaataaaaatattgaaagtaaatcgaaaattcgttatatttataggcatgttatgccttttctttttagttacaaaaattacattttcattctatttttgcatatatatatatatatatatatatatatatcaaaatagattaaattaaactatattaattatatttatttta

SEQ ID NO: 86988 - DNA, 327 bp, Glycine max
  unsure (1)..(327): unsure at all n locations
agcttggcaatngaagctttttctgctgctctccatctcttttatgtaaatgcttcctctttttttcttctttttttgtcaaaagatcaattgatcattcactaaaaatgtataacggcacttacacaagcatagttggtgctaatgagagtgctacaatcaagcaagcatgcacactgaatgctaacaagatagcaatctcgaaaatacaaaaccaaagaatagaaacatataaaatacacatttccctaatctaaagaaacctagaaagtgccatgagcttttttcttttcattggaattccttctgaacatgcacgcgctccac

SEQ ID NO: 86989 - DNA, 381 bp, Glycine max
  unsure (1)..(381): unsure at all n locations
tgatganngaatgagaaaggattatggagttttgttgatgttaaagaaanaagagtgaggttatttggaaagatttaagaattaaggtttgaagaataaagttgtatgatntaagtttgtagaatggagattaagaattaagatttgggaattaagagaagagttaattgagataagtattaaaaagtgtttgtaaaaagtgagtagtanatgaatttttgttaaaaagttttataaaatagtttttaatgtgtggtgatagattaaaagattattgtagtggattagaaatagtataatgattttgaaaaaggtttgaactgaattttgaaggttgtaattgtgtttaaaaagttgtaatagattaaaatgatttggtaa

SEQ ID NO: 86990 - DNA, 317 bp, Glycine max
agcttctaaggagttttttaaaaagcttctcaaggaagctacctagtctataaatagaagcatgtgtaacacttgttggaactttgatgaatgaaagtcttatgagatacacttcaaagttccatttctctccttcttttattccttcaatttcgtgctccccccttctctttttcttttcctccattaaagcatcctcttcaagcttcttatccaaggcaattcttggtggtgaagctccttcttccttggcttattccctagtggatggtgcctcccctctcctcttctcctttgccttccgctgcatctccatg

SEQ ID NO: 86991 - DNA, 342 bp, Glycine max
  unsure (1)..(342): unsure at all n locations
aatatagattgaatactattttnnttttgacttggntaaaaggagtgctgggtggttattagaattgatgaacttaatgataatgtncttggacaataatttttttcgaattaaatgacaatcgatctcgatgtgtttagtcctctcatggaagactggatttgaggcaatgtgaagatcagcctgattatcagtataactttatttgcaccactttacaaaatctcaactcttggagaaattgtttaatccacataagttcacatgtaaccataggcataaatcgatattaaattttgactggatcgagcaacacaatttgttttttgtttttaagaaata

SEQ ID NO: 86992 - DNA, 322 bp, Glycine max
agcttcaacatcagattttttccagggtgctggaactacttcacatggacttgatggggcctatgcaagttgaaagccttggaggaaagaggtatgcctatgttgttgtggatgatttctccagatttacctgggtcaactttatcagagaaaaatcagacacctttgaagtattcaaggagttgagtctaagacttcaaagagaaaaagactgtgtcatcaagagaatcaggagtgaccatggcagagagtttgaaaacagcaggtttactgaattctgcacatctgaaggcatcactcatgagttctctgcagccattac

SEQ ID NO: 86993 - DNA, 288 bp, Glycine max
gcattccccacgaaagtatattatacactggcaatgcacaaaacataggtagatagaattaaggcaccaatgaccttaagaattaatgttctctgattgttgtaatcttgaaaaagggcaagaatgtttgtttgtcttaccaagacaacaaataaaacaacattaaatattgcaacaactctccactcggttttcatgtattgtgccacaccagccctggaaccaagatcgaggacaaaacaaacaatggcagtgaaataatttactcatctagaaaaaacagaaatg

SEQ ID NO: 86994 - DNA, 328 bp, Glycine max
agttacttgatttatttgctttggtctcgcttattacggactgaacatgagaaagtggggttttgagattggaagcttgcgtcctatgaggtatgacgaaatatgaaaattgctgaatgggattgctgagaggtttgactgggataaagtaatgggaggtgataaaattattggactcaaacaggtaagcctgacatttgcatcaacaacatgtgtaatattttcttgcagtttaattcatttgttaaaattgcaacgttatgtgaaccacgggaagcagagcatatcattggagcctggtggtaaatttgaacttaatggagcttct

SEQ ID NO: 86995 - DNA, 325 bp, Glycine max
agcttgaaaaaatgtctctatttctcctccgcggcttccacatatggcgtataaaagaaagaggtcaaggttggcatgggcatgactacacatatccgggatgaattggtacttctgctacgagactaccaagcatcttcgtttggtcataccaagatatgccaggtttaagtcacgacatcatgcaacatcgtttacctctaaatcccgagtgttccccggtcaagcaaaagctgcgaaggatgaagcctgagatgtccttgaaaataaaggaagaggtcaaaaagaaatttgatgttggcttcttggcagtcgcccaatacct

SEQ ID NO: 86996 - DNA, 376 bp, Glycine max
atcttgactcaccataaacctttttccaggtgagaatgccaatccttaccctcgaaagcaaaaaagaaaagaaggaaaatttccaatcaaagagaaagcaaaaagaaaagagggaaaatttacaatcaaagagaaagctaaaagaaaagaaaattcccaatcaaagaatgggagaaagtcaaaaaggaagaagaagaaggaaagaaatctcctgatcaaggatcgaaagaaaacagaagaaatgtgcagaaaggtctttggaccggacaatatctgaacaatacagaattgtcaccaaaggaacgaaaagaaggaaaggaaaccatgacctagagtggtcatcttcctttaattgccaaccaaaatcttgtgtgct

SEQ ID NO: 86997 - DNA, 324 bp, Glycine max
agcttctcaaggaggtgagtctatttatgagaggggtgtgtgtagctaagctctagcttctcaaggaagttttctcaaagaagcttctcaaggaagttttctcaagaaagcttctcaaggaagctacctagtctataaatagaagcatgtgtaacacttgttgtaactttgatgaatgcgagtcttgtgagacacaactcaaagttcaacttctctcccttttttcttctttcaatttcgtgctcccccctctctctttctctccctctttcttttcctccattgaagcatccttccaaagctcatcttggtggtgaagctcct

SEQ ID NO: 86998 - DNA, 343 bp, Glycine max
acctatttttctctggcaaacacaagttttacttaaacaaatgaaactatcatccactgcttaataaaacaggttttatatgaaaaccttgtgttaaaatgtgtcaaatagttgcttaacgaatactagaggatagattaaaagaggagtagaaacattcggtttatactagttcactcaccctaagctacgtccagttctcctttacataattataaaggatttcactaatcaaacagtgattacaaataagtattatttcctggcactcctgcctacacttaataatctctagatcattactgacacacccttatactccccctaaatctaagacacccaa

SEQ ID NO: 86999 - DNA, 327 bp, Glycine max
  unsure (1)..(327): unsure at all n locations
agcttgcanttttttaattttgattcttttaagttttttttatttatttttagttctggtaagtttgcgtttttttaattttaactcttttaatattttaatttttttatttatagtcctcataagatcatgcttataggaaccaaaattataaaaatgcaaacttattaggaaataaaaataagtaaaatatcttacaggatccaaaatttaaaaaatgaaaacttaatgtctaaaagtaaacaaatttttttataggaatcaaaattgaaaaaatacgaacttacatgaaccaaaaacatatttaattcaatagttaacattgag

SEQ ID NO: 87000 - DNA, 380 bp, Glycine max
  unsure (1)..(380): unsure at all n locations
ctctatcgggtcacctagccccagagacccttcgttggtgggtcggaacgcaaatcaacccatgattggtgtgatcgacagtgggagtacgcacaattatgtgcaagcccgtctagtccgtcacctgngcctcactgctcaagccactcagcctctctgcggggtggtcggaaatggaaatgtantgctctgccatcagctttgtgtcagagttactatcaatatccatgacaaggatttcaccatggatcttcatgccttacccttgagtggtgccgacgtcatccttggtgtttagaggctcaaatccttgggtctggtcttaactgattataatgatctcacaatgaaattcttaagtaacggtcacattgtcaaat

SEQ ID NO: 87001 - DNA, 325 bp, Glycine max
tgccagcttgtaccaaaatcaaacttcttatatttttgtctcggagggccgggtcagttccataatatataaagaatctccaaattgaaaacggatgctcggaataaattcaaacgacaacaatgttttactcgaatgttccattgagtcctgtgatatatcgaggcactccaaattgaaaatgggagctcgtagcgaattcaaacgacaatttcttttttctcggaatgttgattgggccccataatatatcgagatgctctaaactgaaatccgatgctctgtaaaaagtttaaggacaatatcattattctatggtgtctga

SEQ ID NO: 87002 - DNA, 373 bp, Glycine max
caacgaaataactttatactctgatgttttattgaatcgggaaatatatctagaagctctgagcaaattgaaatgacaataactttatacacggatgtctggttgagtcccataatatatcgagacgcacaaaatttagatccgaagttctgagaaaattgaattgacaataactttatacacggatgtccggctgagtactgtaatatatcgagacgctgcaaattgaaaacggaagctcatatgaaattcaaacgacaataactttttactcggatgtccgattgaagtcggtaatatatcgagacgctcaaaattgagactagaagctctgagcaaattgaaataacaataactctatacacggatgtct

SEQ ID NO: 87003 - DNA, 291 bp, Glycine max
cgagcatcttttttagaggattttgttttttgccacaacgaagggcgtttttttaacaataccgcgatatctcacttgagcacaactaaacgttcttacttatttttatatttcatgtcccgtgctattaaattaattaagaatgaaataacagtcgaacagacacaagtttttttttttttatcgattttcatattaatcattttaaaagctaaactaagaatgattttttatgggttaataacttatattgacatgcatacaaaattgggtgatatattttaatttatt

SEQ ID NO: 87004 - DNA, 205 bp, Glycine max
tacatcaagaaacgctttagaaagaacatccattcaatttggggaccggcaatggtatatacaaacgaagaaatccctgatcttgatggaaagaaaacacagaaatgtgctaagggcttggacggcaatacctggcatttcagtgtgaaatccaggaacgttagaaagtatgaaaccacgacctaggggggcatctttatttatt

SEQ ID NO: 87005 - DNA, 322 bp, Glycine max
  unsure (1)..(322): unsure at all n locations
agcttctcctttngcttactttcttaaattttcagtatatttttttgaaggcctttttggttgccttatttttcttttttagatttttttttttttgcaaaaggagaagcttcatagaagaagtcattgctccacccaaaccaatattttagagatgcccccttatttttcaagtcaccaagtagtaagcactaaacttttaacacatttggataacaaagaaaatatcaattcagcttaaaggggacaactagaggatacatttaagcaaataatatgggtgtagaaacaaagcctacaaattgtctcaatttgttaaata

SEQ ID NO: 87006 - DNA, 382 bp, Glycine max
aagcttaggacctaggagagcattcattctctcaaattatttacaaacctcaacttagaattttgcacaacaccaaccttattgctttgctaatcttttcagcacatttattttcttttatgatggtttaccccaacttttatcctttaaatcttctctctctttttatattttttcttttctttctctttttttttaacattcatactgagctggagtaataccatattttgtaactcaatttaacttgtgttgtatatttattttcctgcaatataaaatcaccaaaaaacattcccccaaatttgtctagatccatgagtactctcctacaacctaagaaagggtaattagtagatatcacactttgggcttgggttcc

SEQ ID NO: 87007 - DNA, 317 bp, Glycine max
agcttcacaagcaagcttcctttacaaaatacctgcaactctcgctaagcctggttctgggccagcttagcttaaataatgcatcttgattacagaggggtaggcacttagcagttgatggatcgcttaacgctactttggccgcaaggaattgggcttagctggcatgagtagcacttagctcaatgaaccctaatttaggccgcatcaaaatgggcttagcggcgacgtctcgcgcttagccagagaatacaatgcactaagcgagcaggccatcgcttagcccaattcaaatcgaattgaaatgggcttagctc

SEQ ID NO: 87008 - DNA, 382 bp, Glycine max
tccattcccgagagcatatcgcatttgagagtttcagccttcgctttcgcgtagcttaggaaaaacgccatttcttctcctttctttcttccaaaaccatatctaacgtgccaagcactttctccatcacccacaaccaccattagccaccacaaaccgacgttgttctacgttgaaaccctacaccgagaggaacccttcaaccgaaacagaatcttccaacttgccttgcgatttcggtagagaacgaaaccttaatctgacctttcattttccttcgaggcaaccatggatctatgcttgattcttgtgagttgcaacttgtctttgcatcttttctgactttggaaccaccattgcatgttgtacatttcctctaaaa

SEQ ID NO: 87009 - DNA, 324 bp, Glycine max
agcttcatgcaacagttgcttttcaattgcatttgactcattaccaaaacctatttggaagccatttgttgaacttagccaatttttcagagaactaacttcgacaactttaaatgttgagcaactaaaaattatggaaaataacatacttgtgttgttgtgtaagttagaacaaatattcccaccaagcttctttgattcaatggagcatcttccagttcatttaccttatgaggcaagacttggtggtccagtccaatatcggtggatgtatccttttgagatgtataaaatgagtaataatttatacaccattgtattata

SEQ ID NO: 87010 - DNA, 378 bp, Glycine max
aggcctcagcaccaccacgctacaatgtcgtgtttttttgatccgcgcctccgctggtgcgcttgaggcgattcgcggcctccctagcgctcgcaaagatgttgcgcgcgttcactacaaaggtagatttgcgccacgactgtgtgaagcgggagttggaggagtagatctatgcagagagaaggaatggggttcagttggattactcttacagcattgttccagctccacatttttttcttctcccttttctttcttgccctttttttgttggtggtgaaagagaggcctagagaacaaagttcgcattttcaaaattgaagcttttgggtctccgaggtttgatctctgcacaagaaccttgttttctcatctggg

SEQ ID NO: 87011 - DNA, 325 bp, Glycine max
  unsure (1)..(325): unsure at all n locations
agcttgtactnggnttatattgattggatgaaggtaagagtgggtttcgaaatctgcactttatgcagaattttgctgttgaaatgtgcagcacaattttgtatatgtgcagaaaaatgcttgggtatggctggttgttgaaagggtagtacatatggggttctggacattttctagcagatcccaacggtcaaaatgtatacttatgtactagagacgtctagtaacattttcgagtcgatccaacggttaacgaactggaacgaaaagaatgttactggggtatttgaatgtgatattggtttgtgttttgggcacatttttc

SEQ ID NO: 87012 - DNA, 364 bp, Glycine max
cttagatccctcttgtgggactaagccctttttaaactgtcctgctgagcttagactaacttaaaatgagttttgttcgcagatccctcttgtcagactagactcaactcaggcagcttccaaaagtttagcctaatttagcctaagcttcgtccacaaatccctcttgtgagactatgcctacactatgtagaagcaaagcttcatggtgaatcaaaagtgattcaaaagtgttttgatgataacaatgttgatacaaaagatgatgacgaaggtgatgaccaaaagctcaaagatcaatcaaagaaaacttccagtgaatcaaagatcaatccaagaacaactcaagtgaatcaagaacaat

SEQ ID NO: 87013 - DNA, 318 bp, Glycine max
  unsure (1)..(318): unsure at all n locations
agcttgtaactntctgctactttttccagtatatgccaaacataatggctcattgtcgttcatatggccttggcatctctgttagatttacatgatctgctaactccatggatgaacatacaattacactcagacactccttagtattcgggctggtataaaataataagctaaaattactcctttgaggtacccctttgacggagttttagatattctctcaagaaattaaagaaaagaaaaagttacagaaaaatgtggatcacataattaaggcatctaaaagatattttataatctaaagataaaaaaaaatga

SEQ ID NO: 87014 - DNA, 310 bp, Glycine max
tatatacttactacgttcgttcccatgtgtaacgacccaattacctaaatcatcaagattaagaaaagcggttaatttactttatagcaatacacttatcttgaatatatgactctttacataactatccttattattaatactcctctgtcgtctaattgttcgccactacattacctctcttttaattaggggtattttagtctaaaaataataaatgcgagaaacattatagattgagtcttataaaaagaaacaagcatcatttcaaacatgggtgctaaaaataggaacggagggagtatcattt

SEQ ID NO: 87015 - DNA, 273 bp, Glycine max
tatgagaacccttcggtttctcttgcaaccaatggctcaatctttttgggatcttctatcccatgcccttgcagggtaggaatgcatcacattaatggtattaaaacaagctaaacctttcaccagtgagttgtgagtctgctaatgttttctgtgcattctctggttgccttgttgaatacttgatgtttattggttacttttggaacttattcactttgttgtgtttccttatggtatagatatttgattgtctgctataccatgagtttc

SEQ ID NO: 87016 - DNA, 268 bp, Glycine max
ctgctaacagattattgcatttgaaaacgcttatgcgtatgcgtacacatgcatatttgttatcttgtgacaggggcacgatcgttttatgaaacagctaaacaccgagccaaatccaaaggcagagacgaatcgaggtaagcggtaacagggccacaatttgctgcgcaatgtcatttcctgctttcaagtacttatggaccggcaccagtagaggctatgcccatgatcgacggatcgtcggcccatgtccaactccggacaagcg

SEQ ID NO: 87017 - DNA, 286 bp, Glycine max
aaaaggaaatttctatcaatagacctccaatctttaatggagagggttaccactactggaaaaccccaatgcaaatttttattgaggcaatagacttgagtatttgggaagccatagaaatagggccatatatacccaccacagtagaaagaattacaatagatggtagcacatcaagtgaaagcataacaatagaaaaacctagagatagatggtctgaagaggatagaagacgagtacaatacaatctaaaagccaaaaacataataacatttgccctgtgaat

SEQ ID NO: 87018 - DNA, 362 bp, Glycine max
cacaagctgcaggcttttatgttacatactttcttttgaagacctatcaacaaccaaaaaaatcaaatacttgcccctcttggaccttggaataccaagtacaaaattcatggaaatgtaagtccaatgggaggtaagaattggcaatggagtatacataccatgatgcatgactttggacttcgccttatgacacacaatgcaattagaacaaaacttgataacattatgcttcattttatgccaaaaaaaatgttcatgcaaaatgttctaagtcttttcaactccaaaatgtcctattaatccccctttatgagcttcacaaaatatgagttcacacaagaacataatttgttattttt

SEQ ID NO: 87019 - DNA, 297 bp, Glycine max
tacaagctccaggagcctggtgtgattgactatgctcattcttagttcagaatggcttctccaaaagaataatggacaccacattatttagaaaggctcataaggaaaatctacttattgtacaaatctatgtatatgacataatctttggttcaaccttagaaaggacgtgcaagaagttttttgagcttaacgaaaggtgaatttgaaatgagtatgatgggtgagctgaagttcttcctagggcttcaagttattcataaagatgatggaatattcatccatcaagagaaatac

SEQ ID NO: 87020 - DNA, 318 bp, Glycine max
aaaaagaccaaaattcataatttccgtggacttctctagaagaaactttgacctcaccatgatcaccttgggtaactaagaacatatgctccacttgctgcttaactctacccaaaaacactacgttttgacttactattcacaagcaaagctcgctttttaaatcataaaacatttgaaccagaatgataacagaagaaaatgagtgagagagataacaatgaaaaaatctgaaatatagaaagggagaattgtccattaatattctcacatatccactgaaccgggtttttaaattttttaacatggccaataaaa

SEQ ID NO: 87021 - DNA, 322 bp, Glycine max
agctgcgactgaataggaatgtttttgttttaacttcctgctcttattgtggaccacaaagtggtacctgcagatatgtcgcggggtgttaaagaccttggggacgtcatgtggggtgctatttcccataacctagcttgaccaatcccgacccaaccctggcataatcggtcagtgagaacctgtgatgtacctaaatatgcgatcttctgacagtcaacagattaaaggaacaaggaccacttagcaaggaagcttgtggtggctggccagctgtgaaacttgatgatatgtgaaatatggcctttggtaatcattacca

SEQ ID NO: 87022 - DNA, 311 bp, Glycine max
ccactctgtggtctacaaacaagaggtcaaagactgactctgacacgctgtctcacatcaagcttgttggattatggggtacccgtcatatgtggtactaggtggcgatctggcgatggtgcaaatcaactctcccacatgcatagatcagacatgaacccaccattcctagttgcccaccttcaactgagctcacttactcatacataccccttatactcgtcattgtcagcaccaagtccccatcaacccctccaagcttccacaatattcaaacaattcaattccagctatcatgaactacccttaac

SEQ ID NO: 87023 - DNA, 335 bp, Glycine max
aaccctattaaacaaccttgcatggtacttgtttacaactggattacactctcacttgtaaaaataaacttggacacacaatatatgtgaaatctcacactggacaatgaatgaaacaattcttaggtgaaaccaattgattgtcaataaatatgtatgtgagggaaaaatacaatttcccaacttgacaaaagtaaccaatgggcaacgctcatgtctccataattattctaattggttgagggtcatatgagctttgcttatttattacattaaaaagaaaacattaacgggttatggcaaccctaactttggttagaaagatcccgctaatt

SEQ ID NO: 87024 - DNA, 334 bp, Glycine max
agctttgtgcttaaagtgactttttatgtacaaaagtgaactcttgcatgtgatattaatttgagcatgcacctaaatttagggtatgcagttaaccttcaaagcttgttaatcatcttgacaagaaaaatgaatcaacacatggacggtttaataaagagtgactaaatcctcactatataatgtgtgtgtatgaaaaataaatttcacactttattattgtagaatttcaaaccaaaagatatagtgcatttaatacatgaaaattaaatttttatcactaaagttgaagtggtttaaatgcaaatggacaattgaattttacgagctagat

SEQ ID NO: 87025 - DNA, 383 bp, Glycine max
  unsure (1)..(383): unsure at all n locations
cactttatgtgaagaaacacatgcatcatagctatctttctctcgngcacaacggcaaaagatcgagaaacaaatatgagaagaagctaaaaacaaaacacccatgattccatatatcatgtttatagacattttaagttgtttaaagctaaagcaataaactcaaagattctagaaatagtcagtgactatgattacatccttgatgtctatgggtgtctgtttgtcaccgcaatcttaccaagttgacatctcttccctttggtagtgttaaggttcttcaacaatttgggacaaagagtatttcctacgaaactaaaccctaaaaagctataatttctttttgaaacaattcgcaccataaatgaattctaatatgttac

SEQ ID NO: 87026 - DNA, 323 bp, Glycine max
  unsure (1)..(323): unsure at all n locations
agcttatttggaaaaatctgtcatcaactgtgtngntatcaaattaaaattagaaatttacactattgagtgatgtaaaattgtttatgctttattaaaaaattgaagtttaagtcatggacattcatttacattttagatgaaaatttttgttgacatgatcctaccaactacccaatagtaagatggtattattgttagtattataattttgtgagttggattcggtggaaacaggaggcagtggactattcaaaatgaacaaaataaattttcattttgtggaatggacatggctatctttatcgataagtttgcaaagg

SEQ ID NO: 87027 - DNA, 374 bp, Glycine max
  unsure (1)..(374): unsure at all n locations
cttatgcatgtgactaccatggaaatgtatctgatatatccatgagcaggagcgaagagaaaacgancagctgtaaagtttcccgcatgttctattgccgcagagagacatatagattcaagtacaaccattttggatgttcatggagtgaggaaggagactgtctaaatgatctggaaagctgacttccattttaagtaaactgtattcaagaattgctttggattactatgctgctttatgctttcagggtttcaaaaatctcaccaaatatgcgccggaactcatcatacggctgcagaaaatcgatggtgactactatccagaattatgggactttagtcataattattgtggcagtcattagttcttct

SEQ ID NO: 87028 - DNA, 322 bp, Glycine max
agcttggttatctccttcttcatctacatcaagaatcaccgggttgagtcttctctgtggttgtcttactggtttaactccatcctctaaatttattcgatgcatacatgtggatgggctaataccaggaatgtccgccagggtccagcctatagccttcttatgctgcttgagaactgacaacaacttctcctcttgctcatcaacaagggaggcagatataatcactggaaaactcttgctatcatccaagtaagcgtattttaaatttgatggcagaggctttaattctggtgtggtcggctggacagtggtggaaagg

SEQ ID NO: 87029 - DNA, 381 bp, Glycine max
gctatatacaacggagcagaagatacacgtatcaatttatgaagatatttggtcaaaagagcttgtgtctatacaattcatggtcttcatcatgttctgagttatacaaatcattctagaattcaaagatttatgccaagatcattattcacagatagacgttcactcatagagtatggtcacactctcaccggtttttggttcaagctttcctttacaatcaggctgtctagtgactaaccattctattataagttcacactcttgttctttctttgttcaacatgcacttttgcttaaactcatgaaaaggaacacaaattccatcaaaatcatgcattcaacaaaagcatacaccaattttcacagaaagataaaagt

SEQ ID NO: 87030 - DNA, 326 bp, Glycine max
agctttcaacaagagtcttttaaaaaaccatcatgaagcagaaaactaacaaaactacccatcatatctcccaaaaccccatacccacgaaaatcaaaagagaaagaagtccacccaaacctgaaatttcaaagtcccactcgtagccacacacttcacgactccaaaaatgccctcctttcgcgatttggagcagaaatgagcaccaaaggttggagctttgttggggtttcaatggagaatggaagagaagaaaatggcaacgtgagggagagagagagagctgtctgaaaagtgtgggggctgagtgaagagagagaaaagct

SEQ ID NO: 87031 - DNA, 380 bp, Glycine max
actctctggtaatcgactaccataggatgttatcgattaccagtggccaaatacgttttataacagctataaaaatttgaattcgaaattttaaaagctgtaatcgattacacaattgcggtcatcgattaccagcagatagtaaacgttttaattcaaattttaaaagctgtaatcgattacacaatttctgttatcgattaccagacaggaatttgagagaaataatttcaagagtcacaacttttcaaaggctttactcatgaccaccaatgggctatatatatgtgacttaaacacgagattgctcagagattttcagaacaacaaagtgtttatcctctcaaaaagcaatttcattttatcctcttaaagaattc

SEQ ID NO: 87032 - DNA, 322 bp, Glycine max
agcttacctcgaacccaaattgtgaaaatggcagtgagatctaacaaaatgtcacaaaactttaagctttcctcgtacctcaatcagcaatactacaactgaagacgtattattattattattaatattatcatcaataaaacatgaacacccacagaaacttagcatacacgacgttgacctacgtacctcgcagagaaagctttgagctttgagcacccacgagtgtttcagcaccctagtagcaacagtgtatgtagggttttcttcgagcgaggacaatgtgggttttgtggggttcgagtgaggacaatgtgggttt

SEQ ID NO: 87033 - DNA, 380 bp, Glycine max
aagaggatgctttaatggaggataagaaagttagaatggggagcacgaaattgaaggaataaaagagggaaagaagtggaactttgaagtgtgtctcataatactttcattcatcaaagttacaacaagtgttacacatgtttctatttatagactacgtagcttccttgagaagctttcttgagaaaacttccttgagaagcttctttgagaaaacttccttgagaagctagagcttagctacacacacccctctaataactaagctcacctccttgagaagcatccttgaaaagattcctaaagaagctagagcttagcaacacacacctctctaatagctaagctcacgtccttgagatgagaagctagaacttagc

SEQ ID NO: 87034 - DNA, 331 bp, Glycine max
agcttgccctaacctattggttttattctataggaaatagccaaagcaacgtggtttataataggggttaagggagactgatgcccccatataccacatatcctactaagaatgcaccatagttatcatgaaagaacctaccataggcgaaggagccatgaagtgagtttaccagcctggggtgcatgagatatggatgataaaagctgtgaggagcggaaactcactcagagaggatctcatacagattgcagtaagattaccgggccacgggcagaatatgaccaaacataatgagcactgcttgctgctgtgagacatatagattatg

SEQ ID NO: 87035 - DNA, 270 bp, Glycine max
gctaggtggaaccgcgatttttgagatttaaagaagaaaatgggacctgactgggagaatgtgggccgccccatgagtaatactctgcacctcattcacatgggaaatgcttctcaaaggtgtgtacatgtatgaggaaacataatggacatgaaattctttgctaagggtgaaggaatattgaggtcacttcctaaaggactgtatgaaagcacgcgacccccttctgaaagacgaatatgcataatgttcagactcttcgtcatatac

SEQ ID NO: 87036 - DNA, 320 bp, Glycine max
agctttaaagcacatctactttgaatctaggtgtccaacacccctccattcaatggcttttctaggtttgaaaggtgaaatttacaatgaggtgaatttgaagcaaactctcacctcacaccaatccataacgtcaatctaaacttgcccaaactggaattacacctaaaattccaccaaatcaaaatttgactcttcaacacccaattttgccctagaaatggctcttggttcactttggtcatttatttttctctctagctcagcctaacctttctcacatgttctaaatgacatttcaagctagtattgactcactc

SEQ ID NO: 87037 - DNA, 252 bp, Glycine max
ccatgtactaaatatagaattcaaatgaccactttgtgttcccaacaattttgtaagactaagtaattaagggttcaaagaaaataaaagataggtgcgatcaattgcttaatttacttaataagaaccaaagacatcagagttgatatgaaaacaatcataataagtcggctaggattgtgatttcacacttaccccaaattccccaattttaattctaacaaccccaaatattatgaattatcgatattc

SEQ ID NO: 87038 - DNA, 266 bp, Glycine max
atatgaatcggaccaataaaggcgggataatagctggtataataaaactgaacagcagaaacttgatttagctcgattcgatgagtaatactttcaatgcctttttagtctgattattgattaactttttttcattgaaaataagataggttaatgtaatatatacatgatctgtgccatggaaatagtaatgaggtgtgatgtttatatgattcatgaagagtgataatatgttgcgctccgactataacactgtgactgaaaat

SEQ ID NO: 87039 - DNA, 273 bp, Glycine max
agatttgttgaaactgtgcatgcaatagctacatatgtggatgttttagctaatttttaacatttaaaattgtttgttgcataggatctattctttaagagttctgattctatttttttttatcaaactataaactgttttagtcatgcctaaaaataagggattttatgttttgtatatttgactctaactctatttaaagaacaaatgaataacagttatgtatccttcgtaaatatatttggtcttctctattttttttatctaatcttc

SEQ ID NO: 87040 - DNA, 384 bp, Glycine max
  unsure (1)..(384): unsure at all n locations
tgcttaactatgtatgagaaaacttcatttcttgttgctatagacatacatgtgagctngtgacaaatcttctacacttggagtcatcacatgcagtgctcttgaacccttaccacccactctgtcatcatgccgagattcatgaagcccaacaggtttagccttctctaagtattctgaacaaaattcaatggcttcttctgcaatgtacctctcaacaatagatgcttctggacgatatagattctttgtatacccttttaagaacttcatgtatcgctcaatcgggtacatccatcgtagataagcaggaccacatcatttgatttctctgaccagatgcacaatcaagtgaatcatgatgtcgaagaaagcagggggaaa

SEQ ID NO: 87041 - DNA, 322 bp, Glycine max
agctttgtttgggccattttttttgaaggcggacatttggcaaggtagttttaccaaggaatgctactcttaaaacaaaaagggcatacaaccttctccaataaatacaaacagtaatgtaaatgtaaagcaagcttatgcgcatactattttacgaacgttcgcttgctcaagacattctcataaataagaaaaatgcgcccatgtacaatcaaggcaccttcgttacctagattatttatatgtacttccaaggtgtatttgatacctacatttcatgcacttccttggctaaatttacatacatgcatactcaaagcat

SEQ ID NO: 87042 - DNA, 366 bp, Glycine max
tgcaatctcgagcgtcggcacaaagatttcgaccttattggacacacaagagaaaggatggacgtagaagttgatcacagcttccgtactatattccgtagcgtgtcacgcattacggggctcgatcagacaatcgagttaaaagtcattgtcgagtgaactgggctccacaattctgtgttcacatacaatagtcgaggttccatgactatctcaagcaggcctccgaggtaaacaaaatgtttatagtaattggccgcaagttatgtgttcaaatatcgagcgtctcttatatatgactggactcaatcgtatatccgaaatgaaaggtaacttcaattggacctcctcaaaggatccgtattc

SEQ ID NO: 87043 - DNA, 330 bp, Glycine max
agcttgtgtataatgtaattgttattatgatcaaaccaaaaattccaaaatcctgttaggtgaagacacgttaaatgctcatgcaacaactctttgggctttaactatggaatatgcatagcagctcacgcccctacaatccttgtgttgaaatgaaattgtcaattagaagaaagaacaatggtggtaaaggcaaagaaccttagaccacactaccacaaagattgtaataccttgtcagaaaccacaatttcaaaaacttgagctgctacacctataaataatttctcattcaaatcttcaatgagaaaaaatatgtgaaaatcacat

SEQ ID NO: 87044 - DNA, 389 bp, Glycine max
gtctacatgaagagatgaccaagaagatcaaggatgaactacatatccaaggataggaaggagaagatcacagagagctgaattggagcacgttgaagattactgaacaacacacccgggcttagcgcatgctgctaggcttactgcgagctgtttggcttaacgcgagctatcttggcttagtgcacacctttaatgtgaatgtatgaaaattcctaatttttgtttatttgtgtaatgggctcgagcttgatgtaaatatgccttattagagacttagttatcttcttaagcctagttctataaatactctaaaactcttaattgtaggaacttttgatataaatgcaattaagcttgtgcttaaagagagctcaatatattctttg

SEQ ID NO: 87045 - DNA, 327 bp, Glycine max
gcttgtgcctcttcacgtcttgttttgaatgtagcatatacatccaaagacccttaggtgctttgctgatggcttcttctcgttccaagcttcaattggagtcttggcttttacaaacttagccggacatctgttgagtatgtaaacagcaatgtatactgcttcaccccataatgtggtagggaggcccttctccttgagcatctctagccatctccataactatgtgaatctttctctcggacactccattttgttgaggagaatatacaactgccagctgtcgcttaatgccttcatccttacaaaatctttcaaactcgcgag

SEQ ID NO: 87046 - DNA, 389 bp, Glycine max
  unsure (1)..(389): unsure at all n locations
tcaggctgtgcagttgctccacatcgcagcatattagggcatatgtctgngtggcggncggcatatgagcatataccatacagactggcgacaggagcacattttagattcatgggcacttgggctaccatggtaaccaatgcatttaatttaccttccagcttcttagactcacctgacgaagatgaatccctggctactttatgccctcctctaatgacgatagcatcacttctggcacaaaattgctctgagacggaggccatttttcagttaaatttctggcttcagcaggggtcatgtgtccaagggctccactactggtggcatctatcatacttcagtccatggtactgagtccttcataaatatattggaggagaagctgc

SEQ ID NO: 87047 - DNA, 320 bp, Glycine max
  unsure (1)..(320): unsure at all n locations
agcttgatatnnagagttttttttataggccaaccaaacagaggagcgcaaactcaccttagcagccgagccagacactcaaataatactctgcgagtcatggtatatacacgtggaagaaaagagatatttcagccaccttatgtttataagataatggttctgaagttaactttttcatgatggaagtgcttacatctttaaagagggcagtcagacttgtgaacttgttacttaagcgtctggagagatgtgctcatgcgtttcatacaccttggatcaaaggttgatctttctctcaaaccgtgggaggagtcatt

SEQ ID NO: 87048 - DNA, 124 bp, Glycine max
ctatagtgccagataaacagggatagcgctacccctaggaattgtcatcttgtatccactgaacctatatacagtccatttgaaacttagaccatcacccaccatgcatctcaagattataatg

SEQ ID NO: 87049 - DNA, 320 bp, Glycine max
  unsure (1)..(320): unsure at all n locations
agcttgattgaatagtgtaatgattgaacattgtatgcagnggcttgtttggtatggaatgagtgtttgaaattgattgattgagaaaatgtatgaattgaatggattgggatgattagatgattgttttgatcaagtttgcagtcattagaagagaatgagcatattgtcataccctaatttcgtccggggaccattgtttgatggcatgcaacctttgtttgaccgcttcgaggtacttggcaccctttgttgcacaatacgtgaagttccgagacatgccggaactcaaaaggaaacattgttacgcaatccgtgaa

SEQ ID NO: 87050 - DNA, 400 bp, Glycine max
  unsure (1)..(400): unsure at all n locations
gtgacaccctacaaactcaagctntagcatatcgaattatcggactatctcgttttggccctgagttgcttgatctcgggcctcacaccggcaattcgccgagaggtccaagtactacaaccggtttcgatgagccaagctgtggcatatgccatgttgcacgacgaaaagcagaatgatgcgcgaaagtcatttcgaccttcagctggagcttcctcaggttccaggcagcctctattgcctacgtcatcattctcaactcctcctttgttacctacaccaatgcgcactacttcttacaacgttcctttcaaacgtctcacgccggaggaactagcgatacgaccaaagaagggattgtgttttcaatgcaacgagaaatattttagaggacataaat

SEQ ID NO: 87051 - DNA, 322 bp, Glycine max
  unsure (1)..(322): unsure at all n locations
agcttgtaatagacattttttttttcttgnctctcaccccatgggtcttctccaaaaaccttactcgagacacaagcaaactacggtgcttttattattgataaccctgctttctggcaccccataccttcgttactccggcccacattgagtgaagctacctaacactacatgcgcttcatgtgcctctggccgagtacctgtaaactactataagttctcacactgatcgcagtgtaaatgtcccccctgacactgggaacaagggtcggtgactgaattctaaatctcagaacgtctcggaaggtcataatatcgacga

SEQ ID NO: 87052 - DNA, 93 bp, Glycine max
cggactgagactggactgtagttcaccccctaactgaactgggtatctgttttgaacgttatgcgaggctcgaccaggagcattcgtgatttt

SEQ ID NO: 87053 - DNA, 326 bp, Glycine max
agcttgtatgcacatcgtttttgtgtatgatatccactccacaaggtttgaagtataggagagcttcaaccctataacgcaacgtggtggacaaaagtgggcagtaaacttgaatggtcgtcattgtcaatgcggaaggtattctgcgcttcactatccatgttcacacattattgcagcttgtggttacgtgagcatgaactactaccaatatatagatgttgtttatacaaacgagcacatcttaaaagcttactccgcacaatggtggcctcttgggaatgaagcggctattcctccttctaatgacgcatggacacttatcc

SEQ ID NO: 87054 - DNA, 385 bp, Glycine max
tgcttgtggagcttctatggaggctagatctttgttctacaatgacgtccttcaatggtgatttttcaccatatagatgcaccggaaggcaaatgagaagaggaaaggggaggcaccatccactagggaataagccaaggaagaaggagcttcaccaccaagaattgccttggataagaagcttgaagaggatgctttaatggacgaaaagaaagagagaaggggggagcacgaaattgaaggaataaaagagggagagaagtggaactttgaagtatgtctcacaagactctcattcatcaaagttacaacaagtgttacacatgcttctatttatagactacgtagcttccttgagaaagctgtttgagaaaacttccttgag

SEQ ID NO: 87055 - DNA, 326 bp, Glycine max
agcttcaacattcaatgtcttgtgtctcgatatattatgggactcaatcacacatccgagtaaaaagttattgtcgtttgaaatggctacgagcttcaacattcaatttcgagggtcttcatatattacaggactcactccgacatccgagaaaaaaattattgccgtgcgaattggctcaaaggttcaacattcaatcttgagcgtatagataagttacgggacttaatcggacatccgagtaaaaagctattgacatttgaatttgctcagagattcaacattcaatttcgagggtcttgataaattacaggactcaatcagac

SEQ ID NO: 87056 - DNA, 372 bp, Glycine max
ttgatccaaggcaacgacaagaactgtgatcttgttgtctgatctgagccaataatatgacgagacgctctaaattggatgttgaagcactcagccaattcaaacgacaataactttttactcggatgtctgattgcgtgccgcaccatatctagacgctacgaattgaatgttgaagctctgagacaattgaaacgacaataactttttactcggatctctgattgagttccgtaacatatggagatgctcgaaattgagtgtggaatctctgagccgattcatacgacaataactttttacttggatgtctgattgagtctcggaacatatagagacgttctaaaatgaatgttgatgctctcagccaat

SEQ ID NO: 87057 - DNA, 329 bp, Glycine max
agctttaaccgatcgtttatttcgttttctcacctaataaatgataaaatgaatttcaaccgatcatttgtgttgtaatcctgtttaatcactgttaaagtaaaatctaacagatcgttcatgttgtaacctcggttaaaccaaaaagagcaaaataataataaaataatcaaaatatttttgaataaaataataaaaagaatcaatcagacgtttttctttggaagttttcttggatcaattgactaataaccaaagtgaaactaaggctgaaatcaactcacaaaattaagctttgtccgcaaaaatcactgaaaaccgttttaagg

SEQ ID NO: 87058 - DNA, 372 bp, Glycine max
tgtgcgaatcaaatcactcctgtattttatctctatcatgcactctttctttctttacccactcctcacgtttggttttttatggaaaaacaccataactaaacgcgccacaaggcattcctatcgcaccagatccaaatctagaacaatgggtgatcaagaggagacacatgaacagatgaaagccgacatgtcggctctgaaagaacagatggcttccatgatggaggccatgttatgaatgaagcagctcatggagaaaaacgtgggcaccgctgccgctgtcagttcggctgccgaagcagacctaactctcttggctaccgcgcgccatcctgcctaaacatagtaggacggggaaggaacaccctg

SEQ ID NO: 87059 - DNA, 291 bp, Glycine max
agcttgtaagcctatgttcttgtttcttactgaagtcggaagcctcctggatgcagaatgacagcggactagaaaagacagagggctgggagacgtctcttcacggagcagatgagtctatagaaaaatcagcatcataaggcgccatgcataacatctcgctcgacaacaaagaggattgacgggagaagagaataagaccactatcttttgagctctgagtgagctcttaaatgcgagactgacttttaccatgatcggagatgctgcaatgcccacacctgacctgta

SEQ ID NO: 87060 - DNA, 243 bp, Glycine max
atgggcagcaaagaactcctatgacggtatcacgctcactcaatgacgggcgtggagaggaaagtcaacaccattgtggcatgatgttactataccgcttctctgagtacatgggagcagagatcatttaattggggatgctatacgtgcgtgcttgtaacaccttaactccctttttcgcacgatacatttaaaaaaaagtccttttcccctacaacaaacctttaaaaaaggatgaaattt

SEQ ID NO: 87061 - DNA, 320 bp, Glycine max
agcttgcggccgagctctcttttgcggccctggttgcttcatacggaatccctaggctttctgacgaacactatgcttgacggaactcgacgtggctggtctttcttactactctacaggaaggtctgcgtctccaacgtaaatatgaggggattgtgaatacagagcgataacacgcttgaccaatcaggggtccacgggatatattcatcacctgtgggggtaatacgtacgggtgctacataaaccttggcatgagcggtgcaactaaccaccggaacttacagagggcgcaacataccaggatgcaattggcgtca

SEQ ID NO: 87062 - DNA, 401 bp, Glycine max
cacgcgctgcactctgttctcctcttatccttttttatgtgatttcattatatcctcctccaatattggtcgtctctatcctcaaataatatcttatgatcatgtacaacattattgccggatatgaagattggcaacactcctttctaaatgtaatgccaagtggaaatggaagtggtattgctgggaaagctgcgcctagcatgttttgtcctccaaaaagaggaccttcacctctctctactaaccctttaaagaggcctccttatatgggagcttcagacgcttctgatctctcaccaactgatatttactgtctgctacatgaagtatcagcaacggtcggtacttttattggaagacgcgtctgaaatttaggccgattcctacttcctatagca

SEQ ID NO: 87063 - DNA, 284 bp, Glycine max
aatacttttttaattatttagcggttcactttgccaccttatttgttcaactctccttctcataaactaaataaaatcttccgcaatagcttcagaccctaacatgttatcaataatttgtttatatagaaactggtatctttagcttcaattaaactacttggtaataggatcccctcactatatctcaaacacctgtgcatttaatatgtagaaatatatatgattgttttttgtattctactaccctacttttaattaacatgaagtttctttttaattac

SEQ ID NO: 87064 - DNA, 399 bp, Glycine max
  unsure (1)..(399): unsure at all n locations
tattttgagcctcgcggacgagaatctagagggttatttgcagaataagatcattgaaaacagttggtgccttcgttgctagagaaatgattattggactcaccaggttcactaaagcagacttggctttaacttcttttgacagcttcaaattaattgcgcttttcattatcaaattgatatgaagcacatgatcaaaactttcacaggctctattatagtacacagattagcttcacatgaatggatgttctntctaatataagcaatgattttattacatatatgtttcacagtttgaattaaaaaatcacatgtcattattattagaagaattgatgacaaaattggcgaacttattgattttcttgtttcttacccaatagacaaaatgttagt

SEQ ID NO: 87065 - DNA, 398 bp, Glycine max
  unsure (1)..(398): unsure at all n locations
agctacatcatgtggtatatgtgcatctgcatctatgtggtggggcggagcaaactatatcttaagtttttgtgcctcactntacaatacctcttcacggataatcttaatacaagtatcttcgccaacatctggagattttgtttcgtcaaaaatgaatttttggacatcccactgccactatctcacactagacttgtacttgctttgacaactgcaaaaatattccagatctattatcgaattggtgtgaagcacatgatctaagctctcacatgttttattatagaacaaatagtgccgcgccatgaatggatgatcttcttactataagcggcgatgttaagaagacacatgtttctcagtgttaatcactagaatcaacgttgtcttattta

SEQ ID NO: 87066 - DNA, 507 bp, Glycine max
ttacaaccacccccaaacaggaaaggtgatcattgccggatcttaagcgactgagctgcaacttctatggaccagggctgaaatgcctatagtgacatttgccttctttgatatttgcacatgttttgaaacatcacaaaccctacgttgccgacattagttgtagcagctcaattccgccagcatgaatccaatgttggctaacagtcttccacggacaataataaggtatgacaagtgcccctctttacttatactttaattggagaaaaaagggaagtaaagataaagacactaatttcgttcgagcgatctcaccatttgaccgaccactaacaaaagcccagtcagtgaaacctgtcctaagatagggcataagatgtatcacgtacatcaataaaagaccttgaagtctacaaagtaaaggagacattatagtctcacaaagacctgatagtcttgacagataaaagcggagacatgagtgttcgcttgccacgcttgatg

SEQ ID NO: 87067 - DNA, 381 bp, Glycine max
cctccatgtgagtggagcaagaaaggcccacttaccctttcagactgtgacccattcttcgacacaaaagggtgaacaatctgacctttgaaacgctaaaatcctggctcggtaagcgtgtcgctcctatggattcaggtgttcgcgattctctgtcttcacctgggcctgattgccaatgcaagcgatgtatatatcaaaacgctcataataaaaccgcgagcgtggcttataggctggttccattaaattccaagtcgcacgcacaacgatgattattggacttattaatgatgaagtaacccataaccacacagttatggatttctctgcctgaataccctaaccccaatatcttgcactcactatttctacttatac

SEQ ID NO: 87068 - DNA, 490 bp, Glycine max
  unsure (1)..(490): unsure at all n locations
atcctctcagtcacctgcngctgcagctttgccattcgctttgatctcgataatctgctcaaaatcaattagcaagaggtcaatgattgcgcgagttgcttaaacaatcccaatcaactcctcttaccgtggaagaacagataattaggatttatactggaataaatgggtatcttgttcattagaaattggacacgttagagaatttcttgntgagttacgtgctttacttaatacattgaataanacctcacattctacagaaaatcatattattccaattgaaatanaaaagatattanaacatcctaattattagaatttgaaagcgaaattataaatttattaaatgattaatcaatttttttctacctgttcctgttgtagaaagagttcgtctccacaagaactctagtttacttaattcatttggataaagggtatctattcacatagtatatacaaatctaatcacatgtcattggttttg

SEQ ID NO: 87069 - DNA, 314 bp, Glycine max
cttggagtgatcacatacaatcctcttgaaccctttcacccactttgacatcatgctgagactcatgatggccaacagggttatgcttctccatgtattcttgacaaaattcaatagattcttctgcaatgaacctctcaactatacatgcatttggatgatatagatacatatgtataccctttttagaactatatttatctctcaatcgcgtacattcaccgcatataaacgagaccacaacattatatttctatgaccagatgcacaactaactgaatcatgatgaaaagaaagcacggggaaaaaacatc

SEQ ID NO: 87070 - DNA, 364 bp, Glycine max
  unsure (1)..(364): unsure at all n locations
gagatttgcttatcatgagcccgtactctatcatgaagatgagcccccattgcaaaaaccaaatgtgctatctatctatttggaattctttctttatgaaatacgctaaaggagaactaaatatcacacctttctgcagaagaaccattanacggcttatgacagtaccaatgttttgtgtccatatgtcatgatcatttgatgcgctgttagataaaccatatacattgttcatggacctaacaccaatatataaatcgtgattttctgcataataggatatatatccttgctgtggcagaatggcccatggcttattgtcctttgcattatattttcagctatcatttactactgctaattg

SEQ ID NO: 87071 - DNA, 468 bp, Glycine max
  unsure (1)..(468): unsure at all n locations
atctctaagcaccgcggcatgcacttaaattgtcattaatgctttacaaattacttcatatccactcctttttttcactcatgattaacattgctacaagaattgtgttagaagtgatcgcaaatggtcaaataaatatcttcacacaaacactctcatgtgtttacatctataattttttttactagtgtttcactctttttggctcttatcatctaatagtctcaccacttttgccttttaccactcaatttctccttgtgagctcttatgtaagaacctttggggttgattatacaggacaagacacaacaagggatcaatgagagcttanttaataagaacaaacaaagtacaaagaataagggatttaagaaaaatgtttgtttattctcatgtctctatttaaaaacatactctacactctntatctnttgctgaaatccaaatcttaatgcaatatgtgat

SEQ ID NO: 87072 - DNA, 397 bp, Glycine max
ccgcagcattaaacgctaaaatcaagagtagtgtatatgtggctgaccgctggaaagttcaatctgagtaaacttatgatcaataatcgttgtataacacaattcaagagagcatatgacttattttgattcacaaatcccgccgctactcaacaccacaattcaacttcttcatatgcatcatgtttgagacttataaaacaaaaaaagttcaacaacaagactactcctaggaattgattataacatgtttgaactaaaaacatgcgtgaattgactcaagactcacagatggcggaaatgacaagattcatgaacaatgatctaaatcaatcaacaaggtatatcaaacgaactttaacatatggacaattatgactaacatgactcttgacac

SEQ ID NO: 87073 - DNA, 433 bp, Glycine max
  unsure (1)..(433): unsure at all n locations
agcttaacaaaaggcatgcgaagtgggtggtatttctatagcaattcccttatgttatcnaacataataagggaaaaggtgatattgttgccgatgctctctcttggcgtcatggattactttctatgcttgaaacaaaattgattggtctcaatgtctgaaaaacatgtatgaaaatgatgaaacttctggagaaaattttaataattgtgaaaatatttcagaaaatggatgtcttagacatgaaggctttctattcaaagaaaacaaattgtgtgtgcctaaatgttctacaagaaacttgcttgtttgtgaagcacatgaacgaggtgtaatggggcattttggggtccaatagactctataaacattgcaagaacatttttattatcctcatatgaataaagatgtgcataaattttgtgaacattgc

SEQ ID NO: 87074 - DNA, 410 bp, Glycine max
ctgggagaataaatgatgtttaatcactttacgtgagccttggggagcatctgatgttgatggtgcaagtgatgaatttcactccgctctctataatgatggtagagatctggccactctatggacagagatcttggatgaaccgcgttctaaaagttgtgtcaagatgatttagctgtttctataatacattatactcccttctgtgcttggaatactgttcctctcttatgagccgcatacattgcttaccatgccatgagaattaccgtacattctacaatatattccctggttcgggcacaagtaagatgctaagacgattctctgtcctataacatatcattttataatcatcttgtcatcgccttgaaaatgaagccaaatttctgagatttcttgttgataca

SEQ ID NO: 87075 - DNA, 421 bp, Glycine max
atcttgcatctagtctgatttcttttttggcttatctaactaggcgagacacatctctgttggtgcatgcgtcaccacaaattatcacctaccttctcgtttatgtggatcatataattataacaagaagctacacctctgcagctctatctggatgtttaactgtactcttttatcctctcatagacctacgcaccttacatttattactaggcatctgagccaactacaccactactggagctcttttcctatctcagtccagacatattcactgatcttttatccatagtcaatatgcataatgcccaacccaataaaacttatctggcccttggctcaaactgctttgggttgtacacagcctttttgaccgactctttcatatttgagttgagctctcaaatgccacatactcctc

SEQ ID NO: 87076 - DNA, 448 bp, Glycine max
aactaacctcagctgaagacaaaaatctaaaagacatactttcgtttactgacttaggctgagaggaataaactagcatattctttaaaagagaaacgaactgtcacacttttaaaattagagcacttaaatcatggatgtggataaatcaggaaacacaaatatatgttagcccattttttatgtgtccaacactactatatttccataacaaacttacatattcttcttcaggagaaaattctcaggattcaaaggagatgagaaccaagtatgagcctacaaaagataatgcggtctttatcaaagcgaacacactctttatccttacccctagaaccctccagccgagctaggaacaacccagcatatccacacaacctgacctgtgcattcaataatggttagaatctgagaacactgacatcatctaacattcactcatatt

SEQ ID NO: 87077 - DNA, 331 bp, Glycine max
atcctctgagtcacctgccgctgcagctgctgtttagtgtcggcctattttataataaacctttttcttgagaatatagaatcttaggatgaacaagaaaatagctcaaaggcagtggaaaacttatcttcttgcattacatgagagtatctgctgaagctcacaagccaaagaaaatctacttaacatccaagctgtaagtgatagcgatgatgcccagaatgaagactttaagttagtgttaaaaagcttctaatgaaaaatactataccatgcttgatgacgcacgatatgagaacaaatgtgcttgcatgtctaattgaaaatactt

SEQ ID NO: 87078 - DNA, 435 bp, Glycine max
cagcttgatccttgaatcatgtatcttgattcttttaattacactcctcttgaatattgatgtgatgcttgaaatctactttcctcttgaatcatgaagtgatcttgattctaattttgaacatcacgaaccattcttgattgacttgactttttgtgtcacctctgctatcatcaaaacatatttgaatcaatcttgattcatcatgaagctttgcttctacattcgtagagtgaacggtacacgctgcccatccatttactattgcccatcatcaccaccttatgctaattgcctacctaaaatctacatatgctcaaagactagttggtgttgtctcaaccccactatcatccataacaaaaatttaaggctttcccctcttgtgtcctgcaaagatgaccccctaccaaattaactacacattcaccacac

SEQ ID NO: 87079 - DNA, 443 bp, Glycine max
gtcacctgaggatgcagcttcttctttatcttatttgaatcatgcttgttttcgttctgcttcttgactcacccgattatatttaattcctgttagaattaccacatccattgtttgcagactatactgctaaacttactttgagtaattatggtcggtttatttaaatctacatctaaatcgcattaccgcaggcagcgataatttcttcaatatttcttgaccgatacagcaaggctttgataattcttctctattcatgcttgatttgagaaatacatatattatatgcttttctgtctggttgcaatctctggcaaacaattctcaagagttgcggtgcaagcatacttggaaaaaccgagcggagctcattgctttctgatctcttaatgcatttttcggatgcttttgatgacactatttgcttcacctaactacat

SEQ ID NO: 87080 - DNA, 385 bp, Glycine max
actggaacgagaagctccacaatatataaagtttttgttattacgcacggccattatggacaggcacttatactatacttgcaagtgatgttataagctaattaagtaccctataattattatgtacccaaaaccaatttataatgcagccacactattttcacaaatcaattgagcagctggagcgtgatgttgatgcattttgttaatgcaccactaacttatgtctgtgcaaatgtcagaactgtacactgctattgtacgtgcctataaagatatttactttggaagcatcttgactaagttgtgaagcaacaaacttgtcaaacactcgccaatcagtcactggatacactgcttgttcatttaattgttatgatgcata

SEQ ID NO: 87081 - DNA, 359 bp, Glycine max
tgcagctgcaactttctgactgcctataagctgagagttattccttgttagttcacaacacaatgggccacttaactatattccttaaattcctttcctttaacaaatatttcatacatattttatgggcctaatgtatgctggcacaactacccccttcctttgtaatcacaaggacaacctataacgaacttgactctccaacaaaatatactgaccccatctaacagcttaactatctaaagagctacttattctgctgtacaccctccatataaccagccttatcccacacaaaccacaaacctttttgcttttgaacaccttagtcacctcgataacatttacttctcctcccc

SEQ ID NO: 87082 - DNA, 366 bp, Glycine max
  unsure (1)..(366): unsure at all n locations
atatgaactatgcaacttgcggnctacatgaatggccttcacatattatctacatctcaatttcattggccttttcttggcccttcaacctctattcttgaccattaattgtaccacgttatgctgattactgacacctctcactcaattattatagccattagtacttaccgtgacaacagtcttattatcatgcacaacattattctcatcctcaaactccacaaaccttttactatttgtcatcacaggctttgatgactccttgggattttggtccatattagacacaaaactgttggatgactagtcaactatctgcttgccagttgttccacctagacctcaaggttcttcactgctgac

SEQ ID NO: 87083 - DNA, 381 bp, Glycine max
  unsure (1)..(381): unsure at all n locations
atcctcagagncacctgcggcntgcaagcttanacccttcaaaaaaggggccaatttttttgtatattatatatgctcaaaaaacatagtatacaaggatatttaattgatcattgtatatcacagcaaatttgaatatttaactgtcaataaaacaataataatgtgaatagatgatttgtgaataaacagagaatctcattcgtaaatagatctcttaactcctaactccttgagcctaccttgtttatatatgaggagaattagtaacttgctcaaatactctgtgtcagattgcgtggcagtggtgccaggctagcaaacatgttaagaggaacgagggcatggatcttttttatggtatctctgtccaagaccatg

SEQ ID NO: 87084 - DNA, 437 bp, Glycine max
tagtaagaaatgcgcgcttgttgtctataaacatcttgaaagtgagaggacatcgtcctatatggccaaatcattgtccatatctcatgtccaatatattgtctttcaccatacttcataaacaatttctcccaaactatcatgtcccataaaacagcatatttcatgagaaggaattaaacaatgaactaatcacctgaaccaaagacactatgcattgcagtcacgataagattcccaatcgcactttaaccaagtgtagatctattaaagttattggcgaagattctcattaaactgcagatctagtcctagtcatacattttcatggtgcattattactaaatatctgaacaaaacacttttacgcaaatattattagctctaaagagtcatacccatgaaacttaaagagatagactcatcgtaactgtggt

SEQ ID NO: 87085 - DNA, 473 bp, Glycine max
  unsure (1)..(473): unsure at all n locations
gtcacctgcagcatgcaagctatatctntcttctcaattctatcctttcattatatttgagatttattattatctttctattcaatgttaatactcagtgacctatattaacattgctgatttatcacaagaaactagactcgagatgacttatttgttttctttatattatgaaacatgctattatactttttatatcactatgtttaaagtcaaactatttattttattggagtattacattttgtatctaacatattttgtctctataaaaattgattaaaaatctaaatataaagaaaaaatattttttgtttaaattatatattataaaagattaaaaaataaaattggctttaacaatataactcaatttattctacttttaaaaatatatgttattaaaaatgatctaatggatatattanaatcccacatcttatcattctttatgatacaattatgaaattatt

SEQ ID NO: 87086 - DNA, 449 bp, Glycine max
  unsure (1)..(449): unsure at all n locations
ctaagcttctggctccattctcttntatatgtcggagaagctcactttcttatctctcctctagcatggagtgaccacttcactctgattacctgccatgagagccaacttgcaagaagatactgtctcatggattctgccaacattaatagttattagaaacatataatttacctaagatggagaatntggctcactttggtatagcttgtgcgtttcacagctattttcaaagctgaaagatttaaattacacaaataagtatgttatggaatgacactattattaaaatgtatctttccatgtttgaagaataaaaggcaccattaaatttcattgacattgttgacaactaaaagaaatgatatgttgcattatgttaggttgtttacatgaagttcacacagtggactctggtttgaaaagggatcaatttatcttggctatat

SEQ ID NO: 87087 - DNA, 374 bp, Glycine max
tattctgatcaacacatcaccctgcttcacagcgttttctcactgaaggaccaccctaacaattacttgtatcctattcggtaaacgttggatccactccgagaactttctggaaggatacagtgcataaacctactttgtgacccgcgggagctactagtaaacatccataactcattctacattactctgtccacaatgatgcaatacgtggatttttctgcacttgagcagaattctgctgcacaattgtacagcaaaatctgtcctagagcatatttcgaaatcccacttctcctcgttcatcttgaccatatcatcctacttgtccaatacatgtataattatgataaccctaatctacttctaacaca

SEQ ID NO: 87088 - DNA, 374 bp, Glycine max
ctgcaactatcgggagttctataactctttctttgtttaccccaataagtctagttagcaagaagatactgcttcccatgtgaactcatcaggagatgtatcccctctataccactaatgtatgtcttacaggggccaaatatcttatctgccgaccattaatgctggatcagacccccaataatgtagctttttcgttccagagtaggacggtgctccaattaagccacgaacaacaactggtaattaaaatggattacgcaatttcataattaaatctttgctcattcattctgtcttcataagctctcacatcaataccaaagtaacgatgccgagttgttatcatcccaatcactcctctatcgcgaaac

SEQ ID NO: 87089 - DNA, 392 bp, Glycine max
  unsure (1)..(392): unsure at all n locations
agctatcaacaaatgtcttcacanataatcatatcttttattttcctagcgagactacccatcatgtatgcgcaaaccccatactcacgaaaatctaaagagagagaagtccaccctgacctgagatatcatagtcgcactcgtagccacgcacttctcactccaaaagggctctcctttttcgatttggagcataaatgaacaccaaacgttggagctttgtgtggagctccaatggtgaatgacggaagaataaaaacaatgtgagggaaaaggagagagaacttctgacaagttgggctggtgaaaacaaaagactgcttatagtttttataaacggcttctcttttttctatatttattaaacctgcacatgtcctattgagtgacaa

SEQ ID NO: 87090 - DNA, 373 bp, Glycine max
aagagggtttgttttaggcacacttcaacattctgcgtcgactaatgagaaaactggggcccacgaattatggtgagagatgaaagagacactccatgctgagactgtcattcctaaatagataatccgctaccaactgaacataaatgattactcatccaatgaacaaagcgttttaacttatccaccagctcgaggtttccacaaaggccagccttaaattagacacatagactgagtaccgcactgtcaaggacaagcaccaacttcttctcaaactgttaacgccaaccaagaaatgaattttggatcgagaaagccttgtaaaatgaccccaactccagtgttctatgttgacttgctcccatatcta

SEQ ID NO: 87091 - DNA, 72 bp, Glycine max
gcggaaaaaaaccaacggccatagaagaaagggcccacgagcccagaaccaacaacaccactaccaaccaag

SEQ ID NO: 87092 - DNA, 412 bp, Glycine max
  unsure (1)..(412): unsure at all n locations
agcttggntatctccttcttcactactttaagaatcatcgggtagagtcttctctgaggctgtcttactgggttagctccatcctctaaatttattctacgcatacatgtggatgggcatataccatgaatgttcgccatggtccaaccttaaccttcttatgcatcttgagaactgacaacaacttctcttcttgctcatcagcacgggacgcagatataatcnctggataactcgtgctatcatctcaatgaacgtattttaaatttgatggcagatgcttcaattctggtgtggtcggctggacagaggtataaagagatggtttcttcacctttaccttctaaagaaagttagaggtgtgtgtacttactgaaactggttagcctatctaccctataaatcctctctc

SEQ ID NO: 87093 - DNA, 325 bp, Glycine max
ctgaaggagatgcctgagtgtgttatgcaatgcaccaaacaactaatcggcaattgggattgctcatttgccctataaccgccattgaaccctctcctttctgagaaccaccaatcatagttgtcaacaccctttcttcatgatcttgtggctgggtacgcagcacagtctcagaggccatgcaaccatgttcatggtctcacaccatatgcactcctgaactatgacactattatgctgtaacctgctatacgtgtggagatagacattgtctgccccactaccatatctaatgacatgtgtaggagcctacccttccgcagga

SEQ ID NO: 87094 - DNA, 336 bp, Glycine max
agctataatggatgcaaacaattatggttgcttatatgaagctttgactgttgctgccatgttatcaactgaaactacattgctactacggcagaggaagaatgagagtaagaggaaacatacaatatctaaccttcctgatggttttggatgtgtgatcacattcaattgctgcagatatatgagtgctgggatcaaactgatattgacattggttggtgcaaaaataatggcttgaaggtgtgaggtgtattgcgttatgtgacaccagaatgataaggtgagggcaagaagcgagtcttcatgtgtctggctatgcacatgcttatttcccca

SEQ ID NO: 87095 - DNA, 400 bp, Glycine max
cttctagctgcaatgtattccaccttgccatctaggttctttatgtccactcgcgaggccgtgcagctgttgaacaatacatcaccatccaacctggtgcgcagcatcttgggcaacatgacacctactatgtgtaacagtccgtggtgtgaccttatggcctcacgaatggcgatgatggcgatatctaccttcaggcactttactctccaaatcatgcgagcgatcacccaccatttggtgaccgctgcctgcaaagatgccaccttgagcacaaactgttggtgccggggctcattctcctgcataatgacgaaacttctttggagaaagactctggtataatctgtagtgctctgcaccccaactgacctaataaagtacttatcacacctaacac

SEQ ID NO: 87096 - DNA, 461 bp, Glycine max
  unsure (1)..(461): unsure at all n locations
aagctttcgantcattctatgtattccgattggttcacattgcgcttncggcacttatattctcgttttgtgtactttttataccccctgttgacgtgcttaagccattttacttaagacatttctcgcttatcatagtaatacaaaaatatccaccgaacggttgaattgtattatccattaacttctgttaaaataaaattccgaccgctcggtcgtgccgtaaccacgttggaaatcataatgaggtgaaagaatatataatgatcgaaagacatctcttataaaataaagcggaaaatcaatcggacgttatctctttgggattgctcattcttaatcgaattgattaataactatagtgacactaaaggctaaagatcaaattcgcctagtcaagctcgtgcatacaaataggactttgaagtttgtcatttcattttctcactaaataaatggat

SEQ ID NO: 87097 - DNA, 398 bp, Glycine max
gatgggattcaagctatatgctcttgggcttgccatagaagatattgaggaagaacatgaccactttagcttacacatggagcgctctgttcttctgtaacaccgattctacctaccacacatctgatgtcacattggacagagccaaattaatctctggcgtctgtatgaagatagatattaatgtggggtacactatattccacccgatctgttttactgcacaccatgattcatttagacatgggttcacagccttgatctctgctctgtgacatgctatgggagtacaatcagattctagatccctaaagagcttgagcccagccatcaacttggcatatattaagaagagcctgtggaatctagatgagcgcatatggcgatttcaggatcaa

SEQ ID NO: 87098 - DNA, 74 bp, Glycine max
cgagcggcacaaaacacaaaatttcatgtttgaataaccacccagagacgaaaaaggaccacaagctacaataa

SEQ ID NO: 87099 - DNA, 458 bp, Glycine max
  unsure (1)..(458): unsure at all n locations
agcttgacttaaatagaattgaagctctggttttgagaacatatataatagcaccagggttntagtttacgatattctggagagaagaataattttaaggttttgcaattctagtttttattataggtcatgcacacttatcagattttactctcaccaattactctgtatttgttgctattaatccatgtatgcttagtgcttgattaattgtctttgcatttaatttacgttcatgcttaatgatcagattcgttcatgattaattggtgtatgtgttgcttaatcacataatgacaaccttatgttaattttcgcttactaatttaatatatggttggattaagtggatgaaatggttagggataatccttctaacctatgataagagactcgcttgtgaatcaatgggaacaacatgtttaatactgtatttttaataaaattgcttggtgtta

SEQ ID NO: 87100 - DNA, 397 bp, Glycine max
  unsure (1)..(397): unsure at all n locations
cttctacaaccaaagaactatgatctgtattcattccacaagaagtttatgctagctgaggacacacaccccatagttatagcacatagcttattctacaaccccctcaatgaacctctaatgaaatgcatcacacctgtataagcctgatgatctcccttggagcttgtaggccatggatcttcttcatcaatagagtcttttgcttcttgaattttaatggcggcggaatggagaatgagaaagatgaatggagacgcctcttcaagtagaagatgagtctagaagaagctcacaaccatatgaagccatggataatagctngaacgtagataagatgaatgaagggagaggaagagaagagcacaaagattagtgcttcttaagaagtctgaac

SEQ ID NO: 87101 - DNA, 479 bp, Glycine max
  unsure (1)..(479): unsure at all n locations
gctnggantcacattcaacaataactctagtatatctcttctctctaagagataactaaggtcgacagaactccccataattcaacagctggtacatctgttgatccaatattacgcatgcatgaagcaagaaactcagccacctatcccgtatctaatacacctgcgcaagatgcactactaccattgagaagaactgatccatcaacattccattttagccaaagagacaatgggggttgtcattgaataacaattagccgcgatcctaatacatgagtgtattagccttacaagagataacaatctctctaatggctaactgcttaacatcaaaaaaactatcatgcctgaaaaacacatcattcctttgtttcccaatgcgatatatacattcagcanagactttcaccgatgagcatcatatatatgaaatcattcactgaatattggcctccatctatagtgaaaagttgggg

SEQ ID NO: 87102 - DNA, 339 bp, Glycine max
acaccgttccacatccattcgatgcgggtcacgatcaaaatgagctactaatgccaaaactactccaagagagtcttttttagatacacgggaacaggacgttctgctatcaatgccttcatttggagcgaatactttaccaacaagccttggcttatgtgtgtgaatatatccttctgagactatctttgtttcgaagacccatctacattcgatggctttgacaccaacaggcctctgaacgagattccaaactcggttagatgccatagaaggcatatcatccctcatagcattagtccacaaatgtgattcttataactcatggattgtgaaaac

SEQ ID NO: 87103 - DNA, 298 bp, Glycine max
  unsure (1)..(298): unsure at all n locations
cctttgacaaaagactattaaatggaagtggtgtagatttttcacccttgggacgcttatnnnggttggggagacatactcaattcctaataatncacatactcttgctgtcctaatatgaatctgcttagagaagctgcgagttctttaaagatcaactttggggctgtatagaatgagaagtaaaaaagaggaacacttccaagaacataattcaggcagtcagtgttttcaccaaatgagatctatttacccttataaacaaccatatgtgttttaagacatttatactagatcc

SEQ ID NO: 87104 - DNA, 354 bp, Glycine max
caggatgaactcgcacgacgctccggcttaataagtgggacagctcatctgacaaaagtggtattcctacacggctcgtgactattttatgctggcacgattgcccacgaaatgtgtgccgtgagtgagggaaatcctcccatacaggaagtgagcaaagggaaggggcctaggccttttgccctgaggttccttatgctctaaacattagcaaaccccgttctatttacgagcctttaaccaacagtgtatgcctatccgctgaacaattttttcgcaagaatataagacccttctttatagaattacatgttctgaaataaaattacttgcctgaaaattgcataatagact

SEQ ID NO: 87105 - DNA, 404 bp, Glycine max
ctctgatttcatctcggacacacaatgtttgagaaatagtttatgtagaaactgtggttaaggatcctttggatgatctctgcaactataccgagttatgtgagattatatcttctttggtagacgatcttttggtcatttatttcccagagtattgtgaaagctgcgtatgagaacgctacatatgtgtaaaaacgttttaaggttatattaaacacactatccaatcccttctagtgtgttccggtgatttcagaagtgacataaatcaattgccccaaattcatatatctaaaatattgagacactaacttttgtaatacagtaaagttattcgttccgactcacacatacttattcagcaattacatcatagattaaactagagagtagttcaatctctt

SEQ ID NO: 87106 - DNA, 104 bp, Glycine max
ctgacagctctcatacaacatgaaatataaatgatagtgtcatccgtaagacagaacccgtaggagactatgatgttgcacatggaaaacgcatgatggtgatg

SEQ ID NO: 87107 - DNA, 282 bp, Glycine max
  unsure (1)..(282): unsure at all n locations
tgttgtgcacgtnggcgatggaggatggtacttacataatgagattttatgagaatatcaacatgcctttgagatggaggacaagataggcatcgagaggcaaaaaggacatatattgcttgtccacctgcctactacgacacaatgatttctggggatcataatataagcttttacagtgtgtttggcgacaaaattacaattatgacacatccaacttctagaattctacaccttcattctatcgtgtatctcataaattattcttgctaaaaagattaa

SEQ ID NO: 87108 - DNA, 471 bp, Glycine max
acactataaaactaagcttaggctgctaattgcttccgatgctgcatggaatggcatttatctgtatggtgggcagcagacgagcacaaaccacaaaccctctctacaggtacacatttctgaatcaaggcctgccgtgttaccaaattgaccaacgcagacagcttgccttctaacttattattttcacatgatgcatatgggttcgtacctaccttatgcactcctctaatgactaatgcatcatttctggcgctctactgctgggagttggatgccatcttctcagataaatttctggctgtagcgtgagccatgtcttcaatggctccaccactggcagcatctatcatacttgtctacatattacggagtcctttataaatatttcgcagaagaagctgctctcaatctgatggtgggggagactggcacatatcttcttaaatctcttcaagtacacatacaagc

SEQ ID NO: 87109 - DNA, 405 bp, Glycine max
  unsure (1)..(405): unsure at all n locations
accttaagcgactgcagctcagctacttgaaaatgctgtgatgtttcttagtcangccgcaaagatgcatacattcatcctctatatgtgaatcagccaggaactctcaagcatatagctatccaaattgtggcaatgaggaagagcatggatgacctccactgaggaaagagtggggaatcatgcagaagaaatcacccatgaggagtgtgagaaagagcaaactaatccttcagataaccacagccctacgagggttgatagcccttggaaggtggtgtgatcagatacgcaataggaaaaaccctctcacatccttactcattcataccctttataatcgggtcctatccgagcaaactccacaatatccctaccttgttaggcggaatagaatctccaatg

SEQ ID NO: 87110 - DNA, 454 bp, Glycine max
agcttgtgcaaagggacaacaatgtttaagagatatattatatgatagattcgatgttctagagatcaacacagaacgcttggggaagacaatgaacacaattaatcatatttctataatagaccactcaactgttctaagtggaaagaaagaagataattgaacctgaatacaacaaaagggttgtcattaaccttaaaaaagaaacaaatcaaacaataaattactccgctgaaaaaaaatataaaatcgatttgcgtaaaccaaacatacatgcgaaacattaaagatgctctaatattatttataattaatattaaagcattattatgcacaataaaaataacgcgtttaatagtaaaaaaaaagaatgatagaatgtaatgaaaagttcataaatttggtttattcatgagacaaacataacgacaacgttacattagttttgttgcaa

SEQ ID NO: 87111 - DNA, 238 bp, Glycine max
  unsure (1)..(238): unsure at all n locations
tttttcctgggactacatcgatgtcttcaggatatgattgccgaaaaagctgattctaaagaagtggttacttgttcgatgcctcaccttgtctagaggagcagataccagcttgagtgtatctgactactgacgatgggagaggccttcctcactctattcacacatcanatcttagattatcccgtgaactgcgaactattttnttattcttacacgagatgtaactgcgagcctt

SEQ ID NO: 87112 - DNA, 373 bp, Glycine max
  unsure (1)..(373): unsure at all n locations
aagcaccgcggctgcagcttcacttgcgtgttgacatgtgatatgtgtctgttatgactccngattccataaacgtggagagcatatagctgagagaggacctcctgtctctgaagacctctngaaacgtgtataagtattatcataatcaaatcaatgcatgagttcaatattaacctaaagttttgctcgaaaatgtcatatgtcattgttgacacaatggaccttacagaaatgtgatcaactttaatactgaatgaactgtcattgaaataacaatagttagtcttatatgggtatgcttaaaactcttctccacatagatgagagtatgttaattttacatggtggctcatgacacaagtagtctatt

SEQ ID NO: 87113 - DNA, 397 bp, Glycine max
tgatgtgccaaaagtattttttttgtgccctgctattacctacacttgtggagagtggcccctgctagagaacttgttcaaagagattttttcttaaactgttaaacaacgtgcgcacttgttcgtttcatataataactttaactttaaaatgatgcttgctctaatggagacaagctcgctagttcggataatgacacctctctgacacaagtctgactcattgggctcattggtggtcaaactgtacttcgcgattctaacgacctcgatgctccgaaatgcaacattttttacaaactggaccaaagatggacgatcgatgttgtcttctactttggttcatggagaggctgaaccctgcaagaatcttatcaggtacaatgaggctcatata

SEQ ID NO: 87114 - DNA, 406 bp, Glycine max
catagcacaattctcaatctctcacctgcttttcattcccgtaaaagcaaatttctctttgtcatgatggctctgagagctacttttagcgggtttgtttgctcgtatacgaccccttcaacgtaggttcatagctcatttaaaaatagaagaaaatgtttcttcttccaaaacaggacattataacgtgtgcgaccatttgagacaggtgtacaaacactccttttctcctacttgctgaacataaacacctaccttcaccttgttgcactgctcgatgtcaccaatgctcaccatatttaatgccttttgtccattaacatgcttttgttctcggtacctccaagattggtactacatgtgaccacgttgacttacttccaaccccttcaccgaatattcctta

SEQ ID NO: 87115 - DNA, 414 bp, Glycine max
atattattcatatgcaaaagttcttggccttcggtattctacatgattggctctcatcgatctgcgataaaaattgagccatcaatgccagactatccaagtatgtatgtgttgctcacatcaccatcatgatgatatcagaagtccaattgtaactgtctcacatcaaacagaatggttgtgctccctttatgcacacttgctccatatcacatggttgagctggtttcaaaacacccctgcttaatccactaagatcataatatgaccttcacacatggagccgtcatcggtttacttttcgagaatggtcatgctacatagaacacaaccattctaatgctaaaagttaaatttcaattgcctagcctcacattgacgactgttcttactatagcacgagcatggttcata

SEQ ID NO: 87116 - DNA, 451 bp, Glycine max
  unsure (1)..(451): unsure at all n locations
nngctngtattttattattatatgttnntttaatctaaatctaattactctnttcaatcactntactaattagtcgagtatagatcgtattcggtaggagaaataaagtagataaaaatgctgttatttttagtcaatagcactagtggtcagataccgttttgagaagtgacaattattntacttccgtaattccttttatataaacaagtacgacaagatatgattcctacgtgtgtgagttgatttgttttataagccccgtgtttgaagtgatgttacgtgatattatgttcatttcatggcttatatgcatggaaagggtaaagatacattccccacattaataaaatagcgataatataactttacttctctaccatagaattctatatatgatgactttcaaataatggtgaaaacacgtactagctctttctccctgacaaag

SEQ ID NO: 87117 - DNA, 432 bp, Glycine max
tggtatgataagcatgctatgctctctattatctgcatcgactggcaatcactctattaaggagtgactgactatgcgtaatgtgtcataaaactgactgtgattacttgtctctagatagacgataaaacacgggacgaactgatctctgcgttgaacaatagggggtttttattttctcaaattgaaagatttacactagaacgacatgataggattcctacttgcatgtgttatataaaaatgataacctcttggagaaaagagtgtatcttgaatgtgaatatatctcttcgaatctacgctttgtatggtaatatatacgaagaccttcttcattaggaatctttatacgtgacttctctcagaactctaaatatcaatatatgaattctttcaagacaattggttttaacacatactatcattttt

SEQ ID NO: 87118 - DNA, 447 bp, Glycine max
agctctcacacatccaagcaaacaacgttcatacagtacaagctatcacagccaagcgaaacagagcaaaggcagaaaactctgctcaacacatcaaccagaatcacagctgttctcacgtaaagaccacaggaacaattccttcgatcaatctgtaaccgttggatcgactccaaaatattactggaagtctatagtgtataagcctgcattttgaccgttgggatatactagcaaacatccagaactcattctgcactagacttttcacagccaaccacacacaagcatttttctgcacttgtgcaaaattctgctgtacaatttcacagcaaaaactctgcgtaagtgcagatttcgaaaatacccgttctctatccaagtttgcccacataaatcctacaagtcccaatcatgtatcagacatgtctaaaccaaagccaagct

SEQ ID NO: 87119 - DNA, 391 bp, Glycine max
  unsure (1)..(391): unsure at all n locations
ctcccactccaaggaggccttccgatcgaacatacctctcaatggaggaatgatgagtttaacaccttcgctccggatttacctaggaacaccatccttccatcttcttcttcttgcggaggcattatgatcactattctccacgggattcaaccgcttatggctcgcatcataccggtgggatattcacccctccaaacgtagcatctacgcttgcatacgtaactgccacaaccccactccatcattatgatgtagtcctgacaattcgaccaacaaatcaaacgcaacaagacaattatagttgatgattgcataccttacgccctctagtgtagacacacttatggcttatctctaatgaaacactgtnggcatctaacactcttat

SEQ ID NO: 87120 - DNA, 86 bp, Glycine max
aatacgtaaataatcattctggcaaaaacttccacacagaataagatcggctacctccttttaactcacaaagaaaaacctaatga

SEQ ID NO: 87121 - DNA, 391 bp, Glycine max
actaaccgggtctgagcctaaaagctgcgcagaatcttacttgttgtttatgccgaagccgcgcgaagcatatgatcaaatgccgactccatttgcccgccacataccacctgccattggaagcatggtcctatgaaaaccaatcgacttgaatatgagatcactgtctcctttatgctatatatcgttcttcaagcaagggctatatgaactgaaggagtacaccatccaactgggtgcaaaccatggattcattgattcccctgtcgatgaaactgtatcccatgtggatgactatgttgatgaccttatggctgttgtatgttaaaaacagacgccttcacactctgcttgctgcattgatggacgcgggtcgtgttgctgctatcct

SEQ ID NO: 87122 - DNA, 337 bp, Glycine max
  unsure (1)..(337): unsure at all n locations
agcttgctggcgtacctgaagaagctattatgtctttctctatctacacnnncaacanccggggaggccaagagatggttgcattcattctatggaaacaattctaagacctgggatgatgttgttgacaagtttcttcaataatattttctaagtctaacactgcataaggataagttgcaatttcttcattccatcagttccccgatgaatctctgactgacgcattataaagattctgtatcttgctgcggaaaactcccactcatggtgttcagagcctatactgctgaacatcttcattgatggattacaaccgcagtcattgcagttacac

SEQ ID NO: 87123 - DNA, 368 bp, Glycine max
tctcatccaagtcattcacaggcgctgcttacatatggaaccatccacacaaacatgactcaatcattacattggacagaacaagcttttagttcacgcaatcaacactaacataactagaatacagatgacggaaatataacgctaatttattactaataactaacttgtgcaaaattttcagaagcttaaacaaaaaataaaattaaacatgctactcactctatggctaagtttctattaaatttagcactggagaatctggttcatcctgtagaatgggctgctctggctccatggctggtgctgatggcggggaatactcaagaatgggtgctcagaagatatcactggataattgagctcct

SEQ ID NO: 87124 - DNA, 452 bp, Glycine max
  unsure (1)..(452): unsure at all n locations
agctnggtgagggttgttgaaaaccatggaatgttggtcttgttacaagcctacacatcccaactagagaagggtcgccttataaaggaaagaaagaagcctagcccatttacaagggcggngaccacagatggaaagggtccctatctgccacatagctaaagctttgttagccttggatggatgcatgagaatcacgttgttgtgctagatgaagaaaccaaccaagagcagcccagttggatgcagtcgtgctccccaggtttcgaatagaagaattggcagatcatcgagcgacccgagattttagtgtcaaatccaatatccaacaatgagtcctgcgaaagtagtgataccgaggatccatatgttgactctgagcaactattaaatcaagccaacgaggaagaaaataatgattggggactgtccccacatttgagaagaatgtt

SEQ ID NO: 87125 - DNA, 348 bp, Glycine max
  unsure (1)..(348): unsure at all n locations
tcgacgaatgagagtcttgtgagacacagctcacagttcaacgtctctccctttttcttccttcaataacgggctgccgccctctatctttctgtccctctttcttttcctccattgaagcatcctctccaagcttcttatgcaaggctcatcttggtggtgaagctccttctaccatggcttataccctactggatggcgcttcctctcacctcttctcctttatcttccgatgcgtctccatggtggaaaatcaccattaaaggacctcatcgaacctcaaagatccagccttcatagatgatgcaatcctacgacccanagtgtgactntgagcaacattatatc

SEQ ID NO: 87126 - DNA, 431 bp, Glycine max
gcaaaaaacgagtcatcgctcatacaacctttttttgtttttaaggaataactagaactcttctgggactctattcttcatcagagcctcccgtgaacaaatatatgagcatacatggtctgtcgatgtttgcctgcctacaacaagagagtctcaaactatagttggaaagattaattccttgacaggactaaaaactcggtctgggaagatgaacaacttgcgcttgaaacatagacaaacgcaaaggctatggaagaatgagaatagtctcagtggcgctgctgtgatggaagcttgcctgagacgcttctatggagtgtggatcctcgacgtccaaggatgtgctacactggggagtttcaggcgtggagttgctctggacatcaaccagaacaggagagatgaggtgccttccactatcgaattat

SEQ ID NO: 87127 - DNA, 373 bp, Glycine max
cctcccctatcactcttcttctatgacttccgctgcatctgcatggtgaaaaatcaccattgaaggacctccttgaagctcaaagatccatcctccatagaaactccacacaccagctctcatctagtggtattcagagcataacagcttctattatgtgctttttaaacctccattaattatgtgcttcaccttctatcccattgagcgcccttcctttctctccatgcttctcctcacatgtcttgtgctacatattgccaacatgagactgtagagtccccaccgattcatcttgctatagacacattattggattctatatggaccaaattcttgtttctgtctagaaccatgaattgcgttgacctac

SEQ ID NO: 87128 - DNA, 406 bp, Glycine max
  unsure (1)..(406): unsure at all n locations
ttccacctctgctacgcaggatgacacacattgagacataggcgtcangaaaggtattgtctctactcctaatccttatcctattaaaatttcttaagtcaccatcgttcgtccgcttcatatagctacttggtattctcatcggcctccattactatttcgtccactgtctgtgacgaacgtgaacatcctcnctggagacaggctacggtcgatgagatgcatgcacttgaagatgatggtacgtgggagcttgttcctcttgctcttggttagaccactgagggttgctcatgggattacactcgcaaactggggcctaatggcaaggttgatctgtatgctcccattggggctaacgcgtacacacatgtatatggcattgactacagcgacatttcttact

SEQ ID NO: 87129 - DNA, 369 bp, Glycine max
  unsure (1)..(369): unsure at all n locations
tatatcaccatctgcgcgagatgttaatgttgaaacataactttactctctcatctgccctgtgactcatctgttttcctcacaactcagccgattctatcatgaccctctaccaatactgcagaactancaacatgccaacatatctaatccatgcaatgcctccatcgatgggcaagctatggtacaaaaacaacaaaatgcctgatgtgccatccatttcatcttctaaatttattggagcttctgcagatataacagaaacatatggttcttcaattcaacatgaatctactgtctagattataagtcactccattctgactttaatgattttcatcatcataactatctacatgcaaagagatc

SEQ ID NO: 87130 - DNA, 414 bp, Glycine max
gctagcttctttacgaatctgctcaaagaagagaccttatttatgataggggtatgcgaagcctagctctatctactcgaggaagtttgctcacagaaacttctctctgaagatttctcacgatagcttatcatcgaaggtaccttgtctataaatagaagcatgtgcttcacttattgtcactgggatgaataacagtcttgtgagactacacccgaagagaaacataataccctcttactttcttcaattctgtgcacccccctctctatcactctccctgtggggttgcaccattgaagcatacgttccaagccttgtatacaatgctcatattggtggtcaacctcctctcctcatagcatacttcctattgggtggaacccgcttcccctacttacctctgtctcctgc

SEQ ID NO: 87131 - DNA, 375 bp, Glycine max
agctataacctcattgtctctcacagactttagtattgttagccaatccaatccttgtggtcggactctcatccacttatgatagccaccgatgatcccattactgtttgccctaagctctctgtcctttcttcatgccgcatcccatgcctgcgaactccttggagtaccctcgcgtcgtgggcacttgaagccccgtgcgatgaaaggcgcgatgctctcgtctgatggcactcctcttatggggttgccaacctgttttattgtgaggacgggattataacttatacaaccctccgtttccatctaaggaacatttggacatctttctcatgaagatagaacctgagtacttcttccttttacgagggaacc

SEQ ID NO: 87132 - DNA, 432 bp, Glycine max
  unsure (1)..(432): unsure at all n locations
agactcattccttaagtatgagacatgttcttttatatgactctgatggttacttgtggagtggtaattctacttatgctatatcacaaatcgtaccaaactctgttgattagtataccactatagtttctacggagtcacaaaattgtacctcgagcatgagctcatagcatcactttgaagagggagagacccaattgagtaaaaagaacagnaaaaactcaccatattgcagacaacaagccagctatacgattgtaataaacttcagagaggtgtcttccctatatctctagattggctcatgataggtacatatggacctgactttcataaacacacaatgcttaaaacttcatctatttcagcgaaggatctatatgtatcacaacacagggcgctcatttcaacatagttgctctctccacatca

SEQ ID NO: 87133 - DNA, 234 bp, Glycine max
actgagacgcgaactaagcaacgtgcaaacccagcacgacagtttttttttacctgcgcttgacatggcagatacccttgttggtccaccaactaccagggtagacctctatcccgaacgtgacgcggacgactctgccaggacaaagtaacttgcttagagggactgacaacatggcataccatagtacgttcttgtgcatttcggagtgcaaagcgatatgacgctaaacca

SEQ ID NO: 87134 - DNA, 376 bp, Glycine max
  unsure (1)..(376): unsure at all n locations
gatgaaagatgtatgcctatgctggtgtggaagaattctccagatttacctgtgtcaaccttattatagagaaatcgacacctctgaagcattcaaagaattgagtctcagacttcttagagaaaaaaacttgtgtcatcataagaattaggagtgaccattggagagagtttgaatacagcaaggttacttgattctgcacatctgcaagcatcactcatgagttctcttgccgccatctcaccacaacaaaagtgcattagttgaaagaanaacaggactctgcaagaaactgctttggtcatgcttcatgcctaagaactctcctatcatttttgggctgaagtcatgaacacatgttgctttattctacaca

SEQ ID NO: 87135 - DNA, 369 bp, Glycine max
tcaaactaagcgtggcctcacgctctgtaaagctctctcacatgtagatgtaactctatgatcttaaccgatactatgctagatagcacacacacgtaacctgacagacgcactcatatacaaggtgggcaacttctcccaggaaaacctgagttcactgggaatgaaggaatcatacctcctcaactatcccaataacccaaacataatctaaacctatacgggtactgtgtagtcctaccacaaaagacctggcaatgttgacccacttacaccggggtatttactaaatgttggcacattccctgaaagtctctgatgatctatcttagccttcgcaccactacgcatgcatacacaaaatcgcta

SEQ ID NO: 87136 - DNA, 163 bp, Glycine max
aagaaaaaaaaaggggagggaagaaggttaagagaaaagataggtaaaaaaaggagataagaaaaatggggaaaagaaaaggttggctgaaaaagagaaaaagaggaggctaaaacccaaaagaggtgcgggcgaagaaaaaaaaaaagggagcggcaagaac

SEQ ID NO: 87137 - DNA, 243 bp, Glycine max
tacttcgactgcgttgagaaaataatttggaacacaatagtgcttgttgagcacaataccttcgttactctgatggggaaacaaacaactattcactttatatttctgaacagggagagaactacacatgcttgagtatggtcacacctggggacctcgctctctcgtggccttgggggatatatgggaaaaggcttgggagccctgtctatacttaggatccttctagaaagctgagacaac

SEQ ID NO: 87138 - DNA, 382 bp, Glycine max
gctttagtggtaggttttggttacaattgatactaactaccgaggcttttgttgtgcgtattggttgttataagcgtgatagcatattgtgtgtactaacttctatgatatgttgtcatgtataaagaatactaagttggatgacaatattattgctagtgagaaataaaattaatttgtaatgaagggagcactctgagttcattcacccattgcaggaatgtctcagatgacatattttcacactttcctacgttgagaaggtgaatctcatcactctgaattattcgttgctgaaccctctctactttgccatgaaccatcgcaaatatgtgctcatgttattgatataattggaaagtatatttctcttcttgagatg

SEQ ID NO: 87139 - DNA, 406 bp, Glycine max
cccccgaaaggaaaaccaacacgtttttttttgtgttaacccccaagatactttgggatattagagccttgtccatctgcaagacctataactggcatggttgaattttcaagattgacacgagataatgcaaaaattgttagttgtggccgttctacacattttttctctcagacttgcgctaggcataacttgtcggcgaggtttcttcagtgccatatgtctgctgataccttgatcctgtccacatttatgacctgcaaaactatgctgcgaatatattgtgacgaatagagatatatgtcacttatgctatctttgacctcatggttcacttaattgtcatatggccagaacatatatgttgcgctctgcccatataaataatcatctctaaaccttatcg

SEQ ID NO: 87140 - DNA, 366 bp, Glycine max
agctactctttaaacaaatatggcatacaacctccttcaataataacacacatctatgttaatttatagcacgcttatgcgcatacttttttactacattcacttgcactagacattctcataactatagaaaaatgcacccatcgtcaaataagagcgaccttcgtacctagatctttatatgtacttccaacgtgtttggctacctacatctcatgcacttccttggctaaatttacatacatgcatacttcaagcatttgggggaccaaaaattgtcacatgtgcacattcctgtgattcttatacttatgcatatactaactttgtgatgaatcttggctattacacaagaaagtgaacatt

SEQ ID NO: 87141 - DNA, 278 bp, Glycine max
ttgctcacaggttctgtattctcactccgcgcgtctcgatgcattacgggactatatcaaacatgggagtgaacagacattgttgcgagaatatgctcacacattatgttttcaatctaaaagagtcgatatgtgcgctactaaagcggacattcgacgtacaatctatttttgtcgaaacacgccacaatagttagcttcaatcatgagcgtctctagtattacgggactcatgcgatcatccgacctatgaaggctttgatttgcatttcctcaca

SEQ ID NO: 87142 - DNA, 316 bp, Glycine max
ctaagcgaggcgacgagcgcgtactgatgggtccatgaagagccttctttgtttgtaccatgccggtgttgaagagacggcgtgagcatcttcgtacttccttattgcccctggtgtcgagattctattggcattagcatttgtagaggaaacgaagtcaaaaattcctcttttaaatgctacctcgattctgtgccgaggaaacactagatctgcaaagcgggaaggcgtggaacctactaccttctcatagaacaacactggcagagtgtctaccatcatggtgatcatatctctctctaccatgggaggagct

SEQ ID NO: 87143 - DNA, 356 bp, Glycine max
cgggactagcacaaagaaatttttttcgtctgatttgacgttatcaacaactcagaataatttgtttatggccatcctcgtcttttcgaactagccgatggaatgtcattataggtgcacgacccactatttattcgaggtatgtactttctatttgagatcgggttgagatctagagaaaaccaacaactaaactcacccatgtaatggactccatttatctaatgtgctaaaattatcagcacatccactgagatggtctgttctatctaaagatattgtataagcatatggtattcttcaattaaataataagctactcaatcattggtgaatcctaatcaatatctaattca

SEQ ID NO: 87144 - DNA, 253 bp, Glycine max
acaactttttgttcaagcattcaactcagaagatttcaatacttcataactgaaattatagtcacgaatctagtatccaggctcacgatctccataatcaacatcaatactccatactcatgactctcactcaagagacggcctacttcttatacagctgaacacatttttcacaacttcgtatagctcatgatgttctgactaaacgttttaccatagagctctcactctctggtgatcgagcaccatattg

SEQ ID NO: 87145 - DNA, 411 bp, Glycine max
atctcgggcgctcacagccggcaatgttgccgagaggttcaagtactacaaccggtgtctatgagccaagctgaggcatatgccatggtgcacgacgaaaagccgaatgatgcgcgagagtgattttgaccttcaattggagcttcctcaggttacaagcagtctctattgcctacgtcatcatcctcaactcctcctctgttacctacaccaatgcgcactacttgttacaacgttactttcaaacgtctcacgccggaggaactagcgatacgacgaaagaagggattgtgttgtcaatgcaacgagagatattcgagaggacataaatgctcttcttgtctttcctactcattatggaagatgatgacacatcatccgagcctcacgagcaacagtctaccttaccgg

SEQ ID NO: 87146 - DNA, 353 bp, Glycine max
gtggagggactaatagaaagtgaagctatgttttttttcttgaagggaatgacacaggactgttggttatcacttctatgaacaccacttcctttctgaggatactctctggcgacaccacacggatcttggatttgtacgcaacttgtagcaaggccccgccctcattatctgttccaggaaaaagaattggtctatttttctgaccgaggaaagaagtgcacgtcattaatgaatgacatggcgctccgggtctatggtgattataataggaggatatggctccttaagagtgccgagcggaattgatgatgcattacagattgtgaatcaacagatgcccatgcgaaaga

SEQ ID NO: 87147 - DNA, 350 bp, Glycine max
cgagacgctcgaaattgtatgttgtagcgctacacccattcatacgacaataactatttatacgatgactgattgcggaccgcaacatattgagacgctcgaaattgaatgtcgaagctcgtgagacaaaggaaacgacaataactcttactccgaactatgattgggccccctctcattatggtgatgctaaaagttgaatgtggaatcactgagctcaatacaaacaacaataactttttactctgaattctgattgagtctcgaatcatatcgcgacgctcgaaattgaatgttgaagcaatgtaccaaattcaacgacaataactataactcgatgtctgattgag

SEQ ID NO: 87148 - DNA, 396 bp, Glycine max
  unsure (1)..(396): unsure at all n locations
ttagagtcacctgcggcatgaagcnttaccgatcgntaagttcttttctcacttatttaatgatgaaangaatttcaaccgatcatttgtgttgtaatcctgtttaatcactgctaaagtaaaatctaacagatcgctcatgtttgaacctcggttaaaccaaaaagaccacaatataataaaataatcaaaatatttttgaataaaataataaaaagaatcaatcagacgtttttctttggaagttttcttggatcaattgactaataaccaaagtgaaactaaggctgaaatcaactcacaaaattaagctttgtccgcaaaaaacactgaataccgttttaaggtccaacgccttacaacggtcctcttttcttttatcgtgtaacatggacc

SEQ ID NO: 87149 - DNA, 424 bp, Glycine max
tatctctagcatgctttctatcattcattacccactcctcacgtatggttttttatggaaaaacaccataactaaacgcgccacaaagcatccctatcgcaccagatccaaatctagaacaatgggtgatcaacaggagacacatgaacagatgaaagccgacatgttggctctgaaagaacagatggctctcatgatggaggccatgttatgaatgaagcagctcatggagaaaaacatgggcaccgctgccgctgtcaattcagctgccgaagcatacctaactctcttggctaccgcgcgccatcctgcctcacacataataagacggcgaaggaacactctggggcatgacggcaaccctctctgggatacaaccgagcggcttatccttatggattgtcagccaactactcaccacccg

SEQ ID NO: 87150 - DNA, 386 bp, Glycine max
gtctttgaagaacgcagtgtgtctctcatcaataaggccagatatcacatgtctcaatctatttgataatgactgagctatcaccttgtacatacacccaatcatggacattggtctataatcatcaaatgcctgaggatgtttaattttgggaatcagagccataaaagaagcgttactgcctctaaggaagctgccatgcacatgatattcatctacaaatcttctccagtaagtcttcaccattccccacaatgctgtaatgaatgtgaagttgacatccattgtgtccagcacattctgtcccatcacagatccacactagctttttgatctctatatcaagagaggagcgatcaacccctccctctgctcctggtttattg

SEQ ID NO: 87151 - DNA, 317 bp, Glycine max
ttttattaccggtgcagaccttaacggcgatcgctcttcaactcctctctctcctattgatgttatctcactccttccatgcgggcaacctccccgtagatccgccgtcggccattcattctgagaaacaaatatagtatgatcccacacctcttctatcgtctgatgcataagaagtgaaagatatttgttttcgcttgtgagaggaatgaaaattctttctttctttcttgtgctgagatgttatgaagaagcggaaacagaaacgtcgctctctttttagaatcttcccttctttcttcctgccatttcacact

SEQ ID NO: 87152 - DNA, 404 bp, Glycine max
  unsure (1)..(404): unsure at all n locations
ggacacttgaaactcagcttgcaaagtgtngttttcaccttctcgctaatccaatctgttggcttancgagcgtccgctaagtgcaacacttatggtcttaacacgacgaagaacttggaagaagataaattgtacaggttcgctaagtgcaccgcttcatctcactaatcgaaccgcttcagtccatccgcttagcgagaaaggcacgcactaagccaaaattcactattgtgagctcaacggtccataattgcgcttaacgcaagagcactaaatcagattttagagagggagtttggattgggattcagagctttgcatgtcaagagtttctatagaaagaaaggtccaagttccagaaagttttgagagattatgctatgtaaagatttgtagagactat

SEQ ID NO: 87153 - DNA, 367 bp, Glycine max
agctttatagagaggcttgtattgagtttggagctttgagctacagtggtgattatccaccatggaaacgctgcgcatggctataggagaagaggaaaggtgaggcatgcgtccgctatggaatgaaccatggcaaaaggaactctctcaccaccaatgtgccttggattatactctttaaaaaaatgctttagatggccgaatagaaagagagaaagggggagcgacattttgattgaatataagaggcacaaaggtggagcttggaacacgtgtgtgataagagattcgtatttcaaaaatacatcgagtgacacacatgcttctattttttgactaggtgactagcttgagaagatgtcttgag

SEQ ID NO: 87154 - DNA, 410 bp, Glycine max
agaatactcgagcttgccatatgatgtttatgtctaatacactgcgatgcccggtattttggatagaaataagaaggtgctagaccatgttcgtctcgcgtatgcctggacgcgagcgctgtacctatactacaaccgctgtagcgcgatcatcaaccgctattatgagttgggaggacctattacaagtaaacctgccgatgtcattacacacttcagcgcgctagcatatttgttcagcgagaagacagaattgtttgtgctcaacccaacaatggcgctaatgcgagtgtcacttacattcactaagcgcgaaacttgtgctaagaacagattcttggacaaaaggcccttactatgcctcaattgcacagaatgaacaggaggcctcactatactccgtgagccta

SEQ ID NO: 87155 - DNA, 362 bp, Glycine max
agcttccactaggctctctttttcgccaaaaacaccttttgtctgtcccaatatggttctataattatattgatttagctcgatgaatgatttctttttatctctatacagatgctgtttcaatcccaaaaacaaatgagaacttccgcctgctctatgacactaaaggccgattccgtcttcattccatcagggatgatgaggcaaaggtactttttatatggtttatattgaatattgtgattcatttgcaggctaggtgctattatactattattgactgtagctttgttgcgtttagttatcttatatataggctaacaaatgtgttgatgctaatgaaccttttaaatgtcaatttc

SEQ ID NO: 87156 - DNA, 387 bp, Glycine max
  unsure (1)..(387): unsure at all n locations
ntaaactgagctttacttgacatgactaactttcttaaaatgttgataatacatttaataaaaaatccaatgcaatgaccatggtaatcaaaatagaaagtttacttcttatgtaagagttgcagagattcctttctcacttctcacttattacagctagaacctatgtctagctgttgggtctatcggctttgatgtaaaaattcactagcaccctgtatctaatataaaagttgacaaattcagaatttttattttaaaccacgtaaagaataatatgcatatttgacaataaagaccaagagaaactcaaatagcacaatccagtggtagagaagcaacactaattttagtgttcaaagttcgtaattagacatgagaatagat

SEQ ID NO: 87157 - DNA, 384 bp, Glycine max
  unsure (1)..(384): unsure at all n locations
ccatagacccacctgcggcatgcaagctgcgaacttagctatctttgcacttttttanaactatgcatattaacatgtgaagttgaatgtgacataacaagtgccacattataatttagaatctcacaccccatactaacttagaggtttttgtaaggaaccatctttatatacatgcagcacgaatatcccgctcctctgttatgcctctgcctgtctcaaatgtcctatataccccgcccaaatgacagacaaatctattctaaatattatgggatatgcgggctgctctttctacgctgggcattccacgcatcctgaggagaatgaaaactttgcgggctagccttggaccaatggcctgctatatagtgaacttctttt

SEQ ID NO: 87158 - DNA, 396 bp, Glycine max
aactcagcttacgcagcaagcaaatttgaatggtatgggattgtgtattctggattatactggaaaaattgttgctatcataacaaattttcgtcacccttgtttaccggtactagagggagaagtgtggactcttgctttaacaatcactttcttcagcatactcggactacacactatcatttttgaagttgattgcaagatgatagtggatagaatcatcaagagcacaaccatggacaagtctgagttgggtaacattatttaagattgcaggaggttattaattaataatccatcatatgttattggatttgccaagacacaaatcaatggtgttgtccatgaacttgcaagggtacgtgacaccatctttttatgatctctgtactaaac

SEQ ID NO: 87159 - DNA, 390 bp, Glycine max
tacacccgaccagcaggcatgcaagctttcaccatttatggattatcagcttacaaattttaagaacgaaatccaatcgtgaatcaatggaaaagaaatacatataggaaaccatgtgcaaaaaagctttgataaataaatagatcacgaaggtgaaattttagagatggagaaagagtcagagggtggacctgcaaaggataatgcgttttctggattgtggcctcattttcagtggaaacagtcgacatggttgaaggaagatcaggattacgctgtagctccaactattttttgggtacatacaacaatcaaaacaaagaaaaaacactatacaaaaatattatgtctcaccaaaacgtgctgcacatggtcagtttttttaaaagt

SEQ ID NO: 87160 - DNA, 382 bp, Glycine max
  unsure (1)..(382): unsure at all n locations
gtctcataanaaaaagntatttagtcttaacatttatatactaattattatcattagctgttctagcgtagtgaggattataaaaatagtttaatgataaaggaagaggagaaaaggaaaaagaggttctgggtttaaatcatatcatttcacaaacaaaaaaaaaaaatcaacttacatcaaagatcaagaataataattttttttttataatatagcagtaattaaggtatatttttactttgatgaatggggttctcactctatgaaggataaaccactttttatttttttatgactcctaatttttctcattctctcacttaaaaaaataattaatttcaatagcataagttatctgttaatatatcatttctcatca

SEQ ID NO: 87161 - DNA, 357 bp, Glycine max
agcttgaagctcttttgtattttgagaccggagaaaaactgtacggcgatcgctcttcggctcctctctctcctcttggtgattctctctccttccgtggtggccacctgcgcgttgatccggcgccagacatctttctcgcgaaacgaagcttgtgtgttccgacacctcttctatcgtcggatgcagaagaagagaaagatatttggtttcgtttgtgtgaggagtgaaaattctttctttctttcttgtgctgagatgagatgaagaagcggaaacagaaaagttgcttcctttttagaatcttctcttctctctccctcccttttcacactgccggaagtttcacttcattaa

SEQ ID NO: 87162 - DNA, 381 bp, Glycine max
  unsure (1)..(381): unsure at all n locations
acaagatgcatatacaaggaagactgttgattttgagttgntcttgcttctcagatagatcagaattccaaactatacttgagaaagttctgctgaactcatcagttgtttaatctttataacaaatcatgggctattgatcttactgaaataacatcatgggagctcttcatgaagctaatatttgtgtatttttatattttgggccagacagtctgtttgggcccagcccaatgtggttatacctcttggggtttatacatgcatagactcaaatcttaatattttgaatgtaatgttaggatttgagctattgtattctgcaccttccattacattctggaaagcccattccggaatgcaaatttacattccggaatg

SEQ ID NO: 87163 - DNA, 354 bp, Glycine max
tctagctatagagaatttttgttttccacttttgacgccacagcggatgagatggaaactgctgccgggcttagtatggaccatcttttatacccttcattgccattagatcactatccgagttagctggtggagggtctgcattggtcaaccaagcagaagaggcttcctcattatcatcccaaaatgcatttgaaggacatgtcgaaggcatctccctgttaacgcacaaactcctagagactttcttaaagggaaagcgagggtggttcaaataatgtgttaccaattactacaagtcgcgtacactattgtgttccagaacaaaaatgcctcacccaaacccttttaaga

SEQ ID NO: 87164 - DNA, 384 bp, Glycine max
tatttattgagtaagttaaattaatgttgtgttgaaaacatatttatcaaaaacattaagatttggattattccaaaaaaaaaactaacagatgatctagtttaacaatattattatataaaattctcattataatgctcattatgtattcgttagtgtgtgtttgttttgatttctatcacccacaaacggacgttcaaacaaaattaagaaattgttgtttatcagaaaacagtactttaaaatatgagtcaactatatgaaacatgtatataaaatgcccttaatattttgatgtgtcttttttacataatcttatattgtgttcagattagagattataaaatcaatatcaatatcatatgaatttaagtttataaaata

SEQ ID NO: 87165 - DNA, 343 bp, Glycine max
  unsure (1)..(343): unsure at all n locations
aacttcaagnngtttgtactataactaatttanggccaacaaagcatcttgagatgaaagctccaataaactctttttggtaggaatatgaactctatcatgcaaaattgtgtggtcactggaagccatatttttaattaagtccatggcttcttcacgtgtttacaacttaatttttcctcccctagaagcgacgagtaactggtttgactgcggtcgtaacccatcaatgaagatgttcagctgtataggctctacaaaaccatgagtgggagttttccgcagcaagctacaaaaattttctaatgcctcactccaagaattgtccggaaactgacagaat

SEQ ID NO: 87166 - DNA, 379 bp, Glycine max
tgtcaaggaagctacctagtctataaatagaagcatgtgtaacacttgttgtaactttgatgaatgagagtcttgtgagacacaactcaaagttcaacttctctccctttttcttccttcaatttcgtgctcccccctctctctttctctccctctttcttttcctccattgaagcatcctctccaagctttttatccaaggctcatcttggtggtgaagctccttcttccatggcttattccctagtggatggcgccgcctcttacctcttctcctttgtcttccgctgcatctccatggtggaaaatcaccattaaaggacctcattgaagctcaaagatccagcctccatagaatttccacaagcaagcttccatc

SEQ ID NO: 87167 - DNA, 357 bp, Glycine max
agcttagctacactcatatttctaatagctaagctcacctccttgagatgagaagctagagcttaactacacaccccctataatagctaagctcacccccataacaaaatacatgaaaatacaaaaaattccctactacaaagactactccaaatacctcaaaatacaaggcaaaaaccctataatactagaatgaccaaaatacaaggcccaaatgaaggaaaaacctattctaatatttacaaagataagcgggctcatacttagcccatgggctcaaaatctaccctaaggatcatgagaaccctagggccttcccttggatctctggccaatcaacttggagtcttctatcca

SEQ ID NO: 87168 - DNA, 376 bp, Glycine max
tgccttgccctgatttcttccttgtattggtttatgcacatacgcaactatgggccatagtcagagaatttccactctgagaaggttggacttagtacaggatcttcatggtaaatgtcttttgtgtagaaggattccctagattttgcataattccaggggaggactaccctgaatgtagccatcaaaacgagaagttgctgtagctcctaaagggtagaccctcctcgtatatggtgtgtgtttgaagatgatgtttttgaggtttggaggagagggattccatgatgcaaaataccttatgtgacttgcccttttgatgtaattggacaaacatggacctcttctacttcatgggtctcaaataatgaataag

SEQ ID NO: 87169 - DNA, 362 bp, Glycine max
agctttcccacagttctaaatgacattttggactaagagtaactcactctagcctccaaggacaactaaatccagattgagcttttgagatccttaaagcatcgcatttttccactcatatcactacattctcactttttaaccctaggttaactctacccttcatctctatcagttgtccatcaggcattgtagcatacaagcatcacaagcatcatcataaaaaccctaaaacagaatgggtaagcttgactcataccaaacatgacaagtttaacatgctttcatcaaatttcttcacaaataactatcatgaggcgtaaacctagtaaaactacccatcataactcccaaaacccaat

SEQ ID NO: 87170 - DNA, 384 bp, Glycine max
  unsure (1)..(384): unsure at all n locations
tgaacgaatataagaaacatcttcttcgaccttggtgattcttgactccatctcattgaagcgcatatccacttgtaactccaaggtatcaaacctttcaccaacaaaggtttgaagaccatcgaacctatccaaaatattttgaagaagagatgaatcttctccaccatgtccttcttcatcaacatgtcgagcaccctttttcacctaagagccatcatgctctttttgataaccaaaggatgcaatgactaaagcacctattagaaaggatctcttgattggaacataaggttcagaatcaagaggaatgttaaagtgttgaaggaagagggtgactangtgtggatatggaaatggagtatttaatcgcaatgccttatg

SEQ ID NO: 87171 - DNA, 380 bp, Glycine max
tggagcgatgcttctatggatgattagacagttggagggcaagaaagaggggggagcacgaaattgaaggactaacacacggagagaagtggaacttcgaattatctgtcacaagactctcattcatcaaagttacaacaaggtggtacacatggcttctatttatagactaggtagcttacttgagaagctttcttgagaaaacttccttgagaagcttgtttgagaaaactttcttgagaagctagatcttagctacacacacccctctcataactaagctcacctccttgagaagcttccttaagaagattgctaaagacactagagcttagctacacacacctctctaatagcttagctcacctccttgagatgag

SEQ ID NO: 87172 - DNA, 346 bp, Glycine max
agctttttgttgtgacctttatgtaaggattaattagttgttgtctatttaagatttagtgcattagttactaactgacttggatcttatattactaaggataaagttgagtcatctatatcgtcgatgcatgagaataatgatgttattgaaagtgtaagttatttggtgttactcattagtttgattgttatttaaccaatcaggaatgttgtatggctaattaaatacaaatcatattttgatgcagcaatgcttctcagccactattgagtctaattcacatttattgggatctattacaccagttaagcacaatttggcactatgtgatacacaattggat

SEQ ID NO: 87173 - DNA, 384 bp, Glycine max
  unsure (1)..(384): unsure at all n locations
ctcagctntccaaagttntctggttttccaaaccttgattactgtgctattcatcttttcattcccttctccctttgccaaaaagaattcgccaaggactaaccgcctgaattctttttgtgtctaagaacaaaggactaaccgcctgaattcttttgtgtctcccttctcccttgtcaaagaagtcaataagatgcagtctgagaattcttttgattcttccctttcccatatacaaaagatttcaaagtactaaccgcctgagaattcttttgtatccccattcacaaagattcaaaggtttaaccgcttgagaactttgtcttaacacattggagggtacatcctttgtggtacaagtagaggatacatatacttgggttt

SEQ ID NO: 87174 - DNA, 363 bp, Glycine max
agcttccttgggccattttctataatgacaaacattttgggaagttagtttcacaagataagcttatcttaacacaaaaatggcatgctattttctccgatttagaacgaactcatgcacacgtttaatgtaacacatttatgcacaggggtatgtgtaaaatatcctactatttatgtcaatgtacaaggacatccaacacattctagttaccatacatatatatgtattttttaaaagaacacacattctcatgctcaaggcactgcgtcaaaattcacacctaatcacatcctaaatattttgctatcacaaactacctacacatatttgaagcacatatcataagactttcattgtttc

SEQ ID NO: 87175 - DNA, 391 bp, Glycine max
  unsure (1)..(391): unsure at all n locations
ntacatcagaatttagtaatgatccactaacctataattaaaagaacttaatgccattaatctagggaattaaaagaacttaatggctgagtgtaactgaaattgtggcaaccaaaagtcacctccaacaaccatcaagtcagccaccatttggtctctcaaaaagttgatgcctaggatgccaattgggcccttattacaacttgaactaaaccaaactaaagcccttttagttgattaacccaaaacatatttttggtcagccaactttacaaggattgggccattatttagacaaactaaacactctaaaattgagacaaagtggtgccatttagtcctcctccatttgggccatgatacaactcacaaccttggacttttctccttg

SEQ ID NO: 87176 - DNA, 371 bp, Glycine max
  unsure (1)..(371): unsure at all n locations
gcatgcaagcttcaccggatgacgctgttttattttttcctaaccgacgncatgcaaatttcgttcagggattgaattgaaaactcggtaggcgacatctgtcgtgaagtagcgaccgatatttttcagccgacattgcacaattctttttagaaaagctcgctggtcgataatggtctttttacggcagagtaagttttcttgttttggtgttgcataaaaaagttacaatgtacttcggctaggtttttcgtgcgagttcaaccgacattttgtttcggccaggaaaacattagcccacctctgcaaaaaaaatatttgctaaccgtcttcatgcatatttcattcaacgattgaatagaaaactcaat

SEQ ID NO: 87177 - DNA, 389 bp, Glycine max
tcccccaggggagatggaccatttcaagtgcttgaaagattttatgacaatgcttacaaagttgagctgcccggtgagtataatgttagttccaccttcaatgtctctgatttatctctttttgatgcagatggagaatccgatttgaggacaaatccttctcaagagggagagaatgatgaggacatgaccaagagcaagggcaaagatccacttgaaggacttggaggacctatgacaagggctagagcaaggaaagccaaggaagctcttcaacaagtgctgtccatactatttgaatacaagcccaagtttcaaggagaaaagtccaaggctgtgagttgtatcatggcccaaatggaggaggactaaatgacaccactttgttt

SEQ ID NO: 87178 - DNA, 363 bp, Glycine max
agcttatggataatgtggattgctgttatgtggcttatctggaaaatgaggaatgaagtggtgttcaacaatagaaggatggatccagaccgggtttttgaaatgattcagttaacactttgaaagtggttgaaggcaaaagcaaagggattctcaacatcttattatgagtgaaggattcatccaactttatgtttatagtgatgttaagacttccttttaactgtaacgtcttttgtaggtgtattgtgaaactgcatgggcatttattgtaggaagatatgatgggaatttattttgggttgtgtataggctttattccttttagagttatgttactagtatcaatttggtggggtgggg

SEQ ID NO: 87179 - DNA, 385 bp, Glycine max
  unsure (1)..(385): unsure at all n locations
ttacaccgactgcagcatgcagcttttttggggattgttctgtctttgatgtttatggnatgttcttatctcagaaatagtacgccacagagatcattgagagaactggtatggctatttgcagctgttgtcccactcctgttgacaccaaaccaaaacttagtgcatcgaaggattcaccttatgaggatcctacgaagtaccgcagtttagctggtgccttacaatatcttacctttactagacctgacatctcttatgtagttcaacaaatctgccttcacatgcatgatcccaggaacgagcatatgagtgctcttaagcgtattttgcgctatttgtagggtactttgtcttatggtctacacttgtataaatcttcttt

SEQ ID NO: 87180 - DNA, 262 bp, Glycine max
  unsure (1)..(262): unsure at all n locations
gcttatggactactacttgcaatgtcttggatgatgtagctcattattcacatcataatatntgagacaaattgtaaaatggttgtggatattttctaggaaagctctcatggttattcaaaggcttaattaagtttttcatacctaaaaaatatgtcattttcaaattactacttaacatttatttttttcaactaagtacctgaaaaaaaaattgcttcaatttaccacctgtcgttagtcctcttccgttaagtgaaga

SEQ ID NO: 87181 - DNA, 355 bp, Glycine max
agcgtgacgatgttatttactataacccgccggcagcgacggctgcagcaagcatatcagcagctcccatcaagaatggaacacacacctttctctgccaaatatacaaccaccgcacttcaacatggtcgaagcctccaaccaaagtcatgagggggaaaatggatgctatttgtgtttacatgaagacaacaagcacggagtcgctgcacgcatccgagatgaggaaggaatatttgctgccggctgctgctgctcgaacttctgggttccaaagtcagccaactccacaagaggctgaatctatggctctcctatccactagagccctttacataaatcttaacccttcaaa

SEQ ID NO: 87182 - DNA, 406 bp, Glycine max
  unsure (1)..(406): unsure at all n locations
actctatagaataccccagcttcagtagatggtgaaagcgaaacttatgtagttgtctangtatccaatttagccattgatgatacaacttccgagaatgctatctcttcttaagttagtaaggttgaagcaaaccatactcaatggagaatgagcgggaaaaaacgcatttttgtttatagggcaaaaggaaaatgccaacctcttggttcccagttctaaagaaagcttatcgttatgaaaaaccacagataatagaaggatcttgtaaattattctttagaatttttttgtacttaggcatattctttcatgaaaattgcatgcaaattttcccaataataatgtgggcggaaggcatcattgtattttcggtctgattgctaagattattcttaatgcgtgc

SEQ ID NO: 87183 - DNA, 358 bp, Glycine max
  unsure (1)..(358): unsure at all n locations
agcttctnggagttatcttctttgagattctagagcnnagctacacacacccctctcataactaagctcacctccttgagaaacttccttaagaagattcctaaagaagctagagcttaactacacatacctctctaatagctaagctcacctccttgagatgagaagcaagagcttagctatagacaccctataatagctaagctcaccccatgacaaaaaaaacatgaaaatacaaaaaaaagtccttactacaaagactactcaaaatgccccgaaattcaaggctaaaaccctatactactagaatgaccaaaatacaaggcccagatgaaggaaaaacctattctaatattta

SEQ ID NO: 87184 - DNA, 342 bp, Glycine max
  unsure (1)..(342): unsure at all n locations
ngactattctaaccaactttggttctacgggtatataccctatatgtactacccttattgggctgggtcctaacatgcattgcacatttattttaaaattaaggtaaaatatataaaaaataaattaagatagaaaaagtatgagagatttggtttttgaaacgagatatgcataattaatttaagtagaattttaaaataatagattaaagaggggtgggggggggggatatgcataaaattttgaagatatgcataattaatgctaaacaatttaaatttatattttataaacaaaaaacttaaggtgacacttggtttgaatattttttgttttcattc

SEQ ID NO: 87185 - DNA, 355 bp, Glycine max
agctctgtatccttgttatgtgttttgagcttaacgctgacgagcagcctttgaagattctgaggaagaacatgactactctagctcagacatggagtgttctttccttctctaaccagattcctatctcccacacatctgatgtcactcttgacagagccaaactcatttatggcatcatcatgaagatggatatgaatgtggggtacctcatctcccaccagatctccctcatagcacaacatgacacatccagactaggattccctgccttgatcacaacattatgtaaggctagaggagttcagttagattcgaggtccctggagagcttgagtcctgccattaatttggc

SEQ ID NO: 87186 - DNA, 406 bp, Glycine max
  unsure (1)..(406): unsure at all n locations
gactctatagaatacctcagcttaagtgccctcggtatgactntgtctatgctgtttggtttgctagaaactttctctgtgactttgtaaagaagtgtcgtcgataacaatgttcaaaatttgagttcttcttgtctgtgctgtttgggggtttttgtttcgaagaaaccgcaaaaatggaggagagcgtgcgcggggtaagaagtaaagtaagagttcttcctcagctagctagggtataccaaaagtgaaaatgatatacaaaggcggtcttccataaaaaacgtcgttgtcttacttcctcataattacaagtttgccaccgaaagacattctaagacggtcgtctataaccgccttagaatgtacgacgttaaagacaaaatttttctcctttattacaaaa

SEQ ID NO: 87187 - DNA, 354 bp, Glycine max
agcttcatggcatgcccatttcttgttttctgacagggacccgttatttgtcagccatttctggcaagaatttttcaagcttaacggaactaagctccggatgagctctgcctatcacccacaatcggatgggcaaactgaggtcatgaatcgaattgtagaacaatatcttcgcgcatttgtacaccaccaaccttccacttggggacgtttattaacttgggccgaatggtcatacaatacttcagttcattcggctaccggcatgtcaccttatgagattacatttgggaagaaaccaccctgttttccgcagtacatcgaaggcacatccaagattaaggcaattgatga

SEQ ID NO: 87188 - DNA, 383 bp, Glycine max
  unsure (1)..(383): unsure at all n locations
tgcgatattgctttgtatgtagcgtatttattatatgttccagattntttgaatgaaaaaccaccattctaaacagttgtataaaaaaaatcatcattctacgatgattctttcgacgaccgtcgtagaacgcaacatagtctacgacggtcatggggacgagaccgtcgtagaatgcaacatagtctacgacggtcatggggacgagatactcgtagaatgcaaagaagtctacgacgatcatgggaacaagaccgccgtagaatgcagcaaagtctaagacgggcatctggacaagcccgtcgtagaatccaacgaagttgacgacggtgttgtccccatgaccgtcgtagacttcgctgcattctaagacgggtgtgtcc

SEQ ID NO: 87189 - DNA, 361 bp, Glycine max
  unsure (1)..(361): unsure at all n locations
agcttgctngagttatttctatggaggttggatattngagcttcaataaggtccttcaatggtgattttcagccatggagttgcagcgaaagataaaggagaaaaggtgagaggaggcgccatccactagagaataagccatggaaggagaagcttcaccaccaagagagtgccttgaataagaagcttagagaggaagcatcaatggaggaagaacataatagagagagaggggaatgggaattgaaggagaatagggagagaagttgaactttgaagtgtgtctcacaagtttctcattcatcaaagttatgacaagtgttacacatgtttctatttatagtctagcacatgggaagct

SEQ ID NO: 87190 - DNA, 386 bp, Glycine max
tgaggataaagtagaaaaggtagatggaagttttagtttatggcaactgaaagtaaaagtatgtgttaatgagacatcttatccttttgtatatactttctatatcatgattcataaaaaattgaagcccttataaaagagggtgaggaatcaactgttctgataccaaaacttgaggacaatatcccaaaattgcaaaagttgatgcttgatgaggataaggtcttagaagaaatcacagagagttccaaaggtgaagtcttttcttttttatatccaacaatatattagaagttgcttttaattaaatttgctttgcttaagtggtgatgcatctccaatcgttataccttagtcaaaacctctttaaaacttttttgatactt

SEQ ID NO: 87191 - DNA, 304 bp, Glycine max
gcactgtcttgtttattacttaggctagctacacacatgttatgttagtcactcaatgtgaatgtgggactttacaatctggcacaccttgtgtatttaaatattcgtttcatcacgccttttatactctagagcaaagacaggccacattaatctatttagaagggtaagaccgtatgccaaaatttatgaatacaagttccaccataaatctgatagcttgggataagatattgaaacaagtttgtcagctttctgcttgtattgctgttacacctaattctaaagtggtttattacttaac

SEQ ID NO: 87192 - DNA, 376 bp, Glycine max
  unsure (1)..(376): unsure at all n locations
tcttggcagntgctgttggaattctgctctttcttttgaccagcttttctgatccggggacaataaacactgagaatgtttctcactatattaatgcttatccctatgataatattatttattcagagaaagaatgttcaacttgcaaaattccaaagtgagtttgctactattgcagaattttgttgaaatattggttaaatctatttataaaactgtcttaatttttttatgcagacctgctaggtcaaaacactgcagcatttgtgatcgctgtgttgcacgatttgatcatcactgtggatggatggttagtaatctttgaaattctccctctttatttgtgttgttctcatttaatatatatcatgtgttt

SEQ ID NO: 87193 - DNA, 340 bp, Glycine max
  unsure (1)..(340): unsure at all n locations
agcttctcaaggaggtgagtcttattattagaggggtgtgtgtagctaagctctatcttctcaaggaagctttcttaaagaaacttctcaaggaagttttctcaagaaagcttcttcaggaagctacctagtctataaataaaaacatgtgttacacttgttgtaactttgatgaatgagagtcttgtgagacacaactcanagttcaacttctcttcccctttttcttcttcaattatgtgctcccccctctctcttttcctccattgaatcatcctctcccaagcttctatccaagcacattcttggtggcgaagctccttcttccatggcttattcc

SEQ ID NO: 87194 - DNA, 376 bp, Glycine max
gcttgcttgtagagcttttatggaggttggatctttgagcttcaatgaggtccttcaatggtgattttccaccatggagatgcagtggaaggaaaaggagaagaggagaaaggaggcaccatccactagggaataagccatggaagaaggagtttcgccaccaagaatgtgccttggataagaagcttggagaggatgattcaatggaggaaaagagagaggggggagcacaaaattgaagaagaaaaaggggaagagaagttgaactttgagttgtgtctcacaagactctcattcatcaaagttacaacaagtgttacacatgcttctatttataaactaggtagcttccttgagaagctttcttgagaaaact

SEQ ID NO: 87195 - DNA, 362 bp, Glycine max
agcttcctttacaacaatgagaagatatgatgattgatagaagaaatacaagtagtggggatgtctcctccacctctagaaacctcacaatctctcaaaaatctcatccaaagctccgcaagatggcttcctcttcaagatcagctctctctcagtctctccatagccaaaaactctcaaaaaactcccctaaaaaactctcccaaaaaaaaactccacacaccccttcagaaatcatgatttaagcttaaataggcaatcctgtcggtggacgtgcgcttagcgaaagatgagctcgctcagcgcgcatccaccgctaagcgtagcttcagcgcgcttagcatgacaagggaatctggaag

SEQ ID NO: 87196 - DNA, 386 bp, Glycine max
  unsure (1)..(386): unsure at all n locations
tgaatatatttatgtgtcanagtcgctaaccaatcgcctatgtatgaagatggagttgtatcaattcacaatggagatgagaggagatctacatgaccacattaacaagttcaatcaactagtaagtcaactattgaatgcagatgataaactctgtgatgagagcaagcgctgctattgttggtctcactatcaaggtcattcaaagctttggttcacacgttgcttgtgggaagatcaactttgaatttggatgatgtgactgtcgctcttaaagaaaatgagtgaatgatgagaactgaaaatgttgatgatgaacacaatgcaatagctgtggtggagtctgagcgagggaggaatcattcaaggagacatgatgatccaag

SEQ ID NO: 87197 - DNA, 364 bp, Glycine max
agcttccttgaagagaatcttatagtatctagagcttagctacacacacctctctaatagctaagctcacctccttgagatgagaagcttgaacttaactacacacccctataatagctaagctcacccccatgacaaaatacatgaaaatacaaaaaaaagtccctactacaaagactactcaaaatgcctcgaaatacaaggctaaaaccctataatactagaatggccaaaatacaaggcctaaacgaaggaaaaacctattctaatatttacaaagataagcaggctcatacttagcccatgggctcaaaatctaccctaaggctcatgagaaccctagggccttcccttggatctctgg

SEQ ID NO: 87198 - DNA, 403 bp, Glycine max
  unsure (1)..(403): unsure at all n locations
aacatgaaactcagcttgcttctcaatctccctctttttgatgatgacaacttctganatcaagaaacacacacacacacttttttctagtcgatcactcacataaatttccattctccccctttgtttttgaatctatgcttatcttaaaattaagttgattactcatgtgagttcttgatttaatccctatttctctccccctttggcatcaacaaaaagccaaagtgcgtaacaaatttgaagcatacaaatataactaagcatccatacaacattgatggaaaaatataaaccatatcatgaagcaagaaatatgactagatcaaaatatatagaaaaatcacatagtcatataacataattcataattgttcaatcataccatgcaaataaaggaaat

SEQ ID NO: 87199 - DNA, 366 bp, Glycine max
  unsure (1)..(366): unsure at all n locations
tgcangctttgtaagactacnttattcttatttgcactttgtatnacatcgcgaggcgtctagtattactaacacactcaccatattatctgtaacatgaaggggggaacagaaataaaagctaatcaatcataaatgaggcaaacatgtactacattagagactgagactgaaatcaagataataatcactgaagaaggatacaagaatttttggatctcatttcttactaacacctataacaaatgattttatacataaacaaccaaaatctctctctctctctatctctctctctctcaagtatacatagatcaacatcaacgcggaataatcatcactccgtaacgaattacactataaatc

SEQ ID NO: 87200 - DNA, 374 bp, Glycine max
ctctccttcaataaacctctcagatttaatatcctacatatctgatgcgcggacctaatattttctacaacataacttttttcgtgggtcaacacatttgttatgtaagatgttgtaatgacttaatgtgatgcttaagtaatgaagatctcacacttaatacacaaatcttttaggctagactcttatatgatgttttttatttgcttctgtttttgcttttcttttaggtaagaatttggatctttatttatataaaaaaggttctatacatccaaaagaatatcatccgctatttggtgatggtaatcctctaaacaatatatgcatatctttagctatacacgcaaacttggttaattaatcgtgaagca

SEQ ID NO: 87201 - DNA, 307 bp, Glycine max
  unsure (1)..(307): unsure at all n locations
acctgaggcatgcaagctttaagaacctctaattttgttttgcctccacgagnaaggcacgtggccaatttattacctacgctctgcataggaggtcaaacataattcatgacacgatattttctgtataatgtcacatacaatgtatataaaacctctatgatcgattcttgttggtcacttaacgttgttatatgccaaatgggatgcatctaacctgcgacaactgttacataattttgggaattccatttattcatacttggaaaaaaatgaaaaaaaccactcccccctttatttgaaacgt

SEQ ID NO: 87202 - DNA, 390 bp, Glycine max
  unsure (1)..(390): unsure at all n locations
tccctcagagaagagttcttctgctgtngctctttttttcttttattnngcganccattcttagaagtttaactccctttggatctgtgaaaaaattcttcaccattaattaggcattcaagggaattaaatcagaaaataatttaaaaaagaaacagctctcaaaatatttctacccaaaagaattataaaacagttctaaaatgaaacaagtaaaagctacaagacaggagtgacaaagattatcaagaaccatgctataaacatactgacatactaggcagtgatgccatacatttgtcatgttatgaccaatggtgaattgtaaagttctcaatcctcatcatcattaatatctacttccctgttcatataattacggtaaataac

SEQ ID NO: 87203 - DNA, 369 bp, Glycine max
  unsure (1)..(369): unsure at all n locations
agcttctcagctagcgncttttactctttcaacttatcacccgtacaagctagggcgcctacgcccatccagagggagaccccccaagctagggcgtcggccgacaatgcccactttggcaccggttccaacgtgataaggaactttcccccgaggccaacattcaccccgatcccaatgacgtacgaagacctcttgccattcctcgtcgccaaccagatggctgtgatatctcccagaaagatctaccagcctcttttcccaaagtggtataaccctgacgcaacctgcacataccatgggaaaaccccgggccactccaccgaacagtgtctggcctttaaacacatggtccaaagtttgatagaa

SEQ ID NO: 87204 - DNA, 332 bp, Glycine max
  unsure (1)..(332): unsure at all n locations
cctgcaatattcacggggtcaggagaccttggggacgtcaaggggggtgcttttttccaaaaccaagcttgaccaatcccgaaccaacccgggcatagtcggtcagtgagaacctgtgatgtacctaagcaggcgagctcctggcagtcaacagataaaaggaacaaagaccacaaagcaaggagggnnntggtggctggccagctgtgaaacttgattgatatgtgagatatggtctctggtaatcgattaccaagggtgggtaatcgattacaaggcttaaaaatgaagacaggaggctaagatggtctctggtaatcgattaccacggg

SEQ ID NO: 87205 - DNA, 355 bp, Glycine max
agcttctcaaggttgtgagcttatgtatgagaggggattgtgtagctaagctctagcttctcacggaagttttctcaaagaagcttctcaaggaagttttctcaaaaaagcttctcaaggaagctacctagtctataaatagaagcatgtgtaacacttgtggtaactttgatgaatgagagtcttgtgagacatacttcaaagttccacttctatacctcttttattccttcaatttcgtgctcccccctctctctttctctccctctctcttttcctccattgaagcatgctctccaagcttcttatccaaggctcatcttggtggagaagctccttcttccatggcttattc

SEQ ID NO: 87206 - DNA, 396 bp, Glycine max
acttgagctgtagattcttatgttacaatgatgaatacttgtaagccgttgaatgtggtgaaactcggtagtctgccaacaattgagtgcagggctccgtggtctgagacaagactcaatgtaacattctttgtggtctggatctttagctggtgattctcggcatttgcttgtctacttgacgccaagactttgaatttggattttttgctttaagaaaacttgtgggttgttttgacaaaatctactgtctaatcgacggaatatcatttgtgaaaatgctgatcttctaagttcacatagttttatcatcatcacaattatgttgtctgctcaatgaaataggtgttaaaatttcataaaatcacaatggatttctctctgatcatatttatt

SEQ ID NO: 87207 - DNA, 365 bp, Glycine max
  unsure (1)..(365): unsure at all n locations
acctgcggcatgcaagcttgaggattatggggtctcatatatgtggnactaggtggcggtcgggcgatggtgcacaacaagttttccacatccactaattgcgcataaacccaccatcccatgttgcccacctccaactgagctcacgtacttccacgtagcccatatcctcatttctctcaacaccgggttcccatcaatccttccgagcttacccaacatccaagtaactgaacattcaaacaccacataccatcacagccaagaaaacagggcatatgctaaaaactctgacctttacacctaccaaaatctcagcttttctcacttaaagacccctatgacaattcctttgcttcaattca

SEQ ID NO: 87208 - DNA, 384 bp, Glycine max
tatgcatctattatgaactttaaactatatcatatggatgtctagagtgccttcttaaatggtctaatccaagaggaggtatatgtagaacaacctcccgggtttgaagactcacaaaattagaccatgtctatagattaaagaaagcactttatgggttaaaaaaagcacctagggtttggtatgaaagattaagtaaattcctattagtaaaaaaattcactcgagggaaggtagatatcaccttattcataaagaagaaggataatgatatcttattggtacaaatttatgttgatgatataatctttggatctactaatgaatctatgtgcaaggagttttctattgacatgcaaagttagtttgagatgtccatgatgg

SEQ ID NO: 87209 - DNA, 351 bp, Glycine max
  unsure (1)..(351): unsure at all n locations
agcttcctcgggttctttttctgcgagaacaaacanngagagaggagttttacaagataatgcttatcttaacgcaaaaaatgtcatgctgacctctctgattntagaacgaactgacccctcacccagaaacagctgaaacacgtatgtgtggaatatcctactatttatattaacattgaggccattcaacacattctaattgtctttcatatttgcatttgaaaagaacatacattcttacgcccaaaggattgcgttcaaactcacacttaatttatattctaaacatttgctttttagaaaactcctcctattgtttgaaatataattcatccaaatttttttgtt

SEQ ID NO: 87210 - DNA, 383 bp, Glycine max
  unsure (1)..(383): unsure at all n locations
taattgataattatggcttttttttagatntttgtgcttacttgatctatctgccttgtgcaaagcctataggacactacaaaactcaaaatggagcatgtgagtagtccatggaaatctaagaaaaatatattcaattttttcacaaataagcttgggtcaattgataagtgccaaatttcagttgttttttgggattaaattgttagcacttatcctttgattgtaatagttttcttataaactacccttaaatctagttgtttatatatattgtacatttacttatattgttgtttaaatataaaatattcatccatgattttgtaggttttaatggttgtttgttagatctagaaagaaagataaaaggaagggcaaaa

SEQ ID NO: 87211 - DNA, 345 bp, Glycine max
  unsure (1)..(345): unsure at all n locations
agcttaananctatctggatctcttgcttttagaagagaatattcttcatcacatggacatgctctaagatagccttcacaaatagaataacatcatatgcaaaggctaaatatgttataggaaggccatgtctactaatatgaatatgacgcttcactccttgggccatatctatagaaataagaaagaaaagcctcttaatgcacaatacaaaaatgttagtagaaagcataactccttgtcgaattcctctaaaaaaaaaacaattcttcaaagctttacaatcccacaacacctttattgatgccgtttaaaagaaattcttaataatattaacaatattc

SEQ ID NO: 87212 - DNA, 354 bp, Glycine max
aggtaagcgaggtgtcttctttataattgactttgtggattctcttctattaacaatgtatgaatgtttgattcactctgggtaaatagtttatgcaccatttacgcttcttatttgtgttaggagtttgtttgaagtttggagttttaagttattggattggggctagttgtaaatgttgattaggatctacgtttgtcgtttaacttattcatttaaaggctgggtgaacaatgatctcatgcgctttgaaattacttgcctcaatttgcctttatatctctttcattcgttaaaccctttggtatctaatttgacactttactttgtcccttaacttttaattccgtctat

SEQ ID NO: 87213 - DNA, 362 bp, Glycine max
agcttgaacattttttgtcttttaaaatattatttattttttgcccccactaaaaaattttcttagatttgttactgaccactaccatgattctcattataaaggtaagttatttactataaaggtaagttatttgttagaattattatagtacaacaaaatgaagaataaaaatgaagagattgttttaaacttcattttacacttgattaggagagtttaaaacatcaatccaaatccaaagaaagacagtagaatgggtggatgagttctagtttgtgtgcttgaagttaaatgggtatattttgaaaggtaaatgggttcaagcttcttgtttttaacgttaattcaatctaaatatt

SEQ ID NO: 87214 - DNA, 387 bp, Glycine max
ctttaactaaattgtttagtcaaacatgcctatataaaacaagataaaatcaattgcatcaatcagacagtcgcttgatgttcatatataactagagaagttaaatttgtattcttccatccaagtaagtgttcatttgaataagcaaatgctagaaaagaacgattgctaactttaggataatagaacaaaacatcacctgtttgcgagcccgcgacctggcagctgactctctattctttatcatccttctctgcctcctctcaatcaccttctccacagctcccccgttcttccttcctcgcagactgccattaaagacataaggaaccggcgacacagacgaggaatcgccattgctcttcccaatcctatcaccagaggaca

SEQ ID NO: 87215 - DNA, 351 bp, Glycine max
  unsure (1)..(351): unsure at all n locations
agcttttcgattcattctatttagccgnagtggtccacattgtgtttcgttcatttttattctcgttttgtttactttttataccccctgttgacgtgcttaagccattttacttaagtcatttctcgcttaacttaaaaataaaataaatttccaccgaacgtttgaattgtattatccattaacttcggttaaaataaattccgaccgttcggtcgtgccgtaaccacgttggaaatcaaaaagaggtaaaaaataatataataatcaaaaagacatcttttagtaaaataaagcggaaaatcaatcggacgttttctctttgggatttctcattcttaatcgaattga

SEQ ID NO: 87216 - DNA, 375 bp, Glycine max
  unsure (1)..(375): unsure at all n locations
ntgtatcccagggaggggattcaagctaaatgctaatgggcagccattgaagatattgaggaagaacatgaccactttagcttagacatggagtgttctttccttctctaacctgattcctacctcccacacatctgatgtcacattggacagagccaagttaatctatggcatcattatgaagatggatatgaatgtggggtacctcatctcccaccagatctctcttactgcacaacatgattcatctagacttggattcacagccttgatcactgctctgtgcaatgctaggggagtccaatcagattctagatccctaaagagcttgagccctgccattaacttggcatatattaagaagagctgttggaa

SEQ ID NO: 87217 - DNA, 351 bp, Glycine max
agcttgtgcttaatcggtgttatttcaaaattcccgttaaagatgaactgcccttttgttctgcttgttgtatggcaagattcatagatttccttataagctttctcaaactgtacacaattcttctttggaattaatataaaatgatctggggggtcctgctcctatgaattctcattgtcaattacgctattatatgtcatttgttgatgctttttcaaggtttacttgaatatattttctgaagaataactctgatgctttatcagtgtttaaacaattcaagtcacttgttgaattgccatttaacaaaaagaataaagctattcaaacagaatggggaagggaatt

SEQ ID NO: 87218 - DNA, 376 bp, Glycine max
gaggtagaccaaatagtcacgatagaagatgtattaaatagtaactctcgaaaaatattgctttgttatgcacaaaaacacacacaaccttatgctattgtttgctcaagctttttcttggctactagaattatgttagaagcaaggcaatccttctttaaacttggaagtaaaacaataaattacaaactaagtttactatgagaagctatttcttctcaaagggcatgttccgataagtttctttagaaacacttctaaaacaagaaaataagaagaaaaaaatttagtttctccataagataaaattagttcttcattagctaatttgtatatgtcctaactctcatcttttagaaaaactatatgagagagt

SEQ ID NO: 87219 - DNA, 362 bp, Glycine max
agctttgcttgatggacaatatttctttataagttttaagacaaatttcaaattttcaattgtatcctcactcttgaaatggatgttgtacttcaaagaatgttgggatatggaagcttgactagataagtaaagtgaaaagaaaaaagatgttttcctttatgccttgtaaattttttctacattaaaatggacagaagacaaattttgaacttttttttttaaatatcgaatgtaaagtaacttcgaaagtgtaacaactttctatcggtgcaaacactttgaataataattgactacagagtttggcatatgcctctcacgtagaaagatataaggtcttacattagcttattgcacta

SEQ ID NO: 87220 - DNA, 394 bp, Glycine max
  unsure (1)..(394): unsure at all n locations
gaaacccagcttacaattatgaccagttcacaagctcctttataatttctttgatttaactngaacttagagatgaattaaaggaatctataccactgcaattgattctaatagcaatgtataaaagaaagaaaaataaaccttctggtttaataactagaattgtgtcttgagagaatcacaatgacaggatttgacttctactaatcaattgaattatatttggtgtgatttatatatgcatttgttatatatgcatttttatgtcaattatttggataaattatgttgaactaactatataatctgtggatttggataaattatgtggattagttaggattcgaaagctttgttacacaaattatttgagtgtttaatttgacgaataaaa

SEQ ID NO: 87221 - DNA, 359 bp, Glycine max
agcttttggtggcggacggtttattttttttactctataattccttcattttatcaataatagatagagatggatgtcatattacacaaattacattgaagataggcattttctatatcgtgatcgttaacatctatcttgttttagataatgactaggatggatgctttcatttcgtatatttaaaaagtgtatttgaaaatggaattttgaagaaaaagaaaggaggacatcttttattcttttattttaaaaaataattatatagtttttctaaaaataaataaaaaaaattaatatgctaatatacctttatattataaattacaatatttatttaataaattaaaagggaagta

SEQ ID NO: 87222 - DNA, 242 bp, Glycine max
gattaaagcccctgactaaaaaagttacattctatcaagaacaaagaaacgggacgggattaatcctattacactatgaacaaaccgggtatacagtctagtaatccttcgactaagaagtgggactcaaatcatactttcataacttttgactgctgtttattttggaaacaaaacaactaatgaataaaactgatataacgaatactactgctaaaatccagttctatagtagcgctaat

SEQ ID NO: 87223 - DNA, 353 bp, Glycine max
agctggtgatttgggattttatttggtggatccaaggttgaggactcagagaataggggtggtggggacatatgggtaccttgccccagaatacatcaacgaaggtcgggctagcaaggaatcagacatttatagttttggggttgtggctcttgaaattgcttctggaagaaggacttatcaggatggggagtttcacgtgcctctcatgaactgggtgtggcaactgtatatggaagggaaggttctggatgttgttgatgagagattgaacaaggagtttgatgtggatcaaatgacaagcttgatcattgtggggttgtggtgtactaatccagatgacaaggaaaggc

SEQ ID NO: 87224 - DNA, 388 bp, Glycine max
cttgtagtatgatcgctggaatcttgctatgatttctgagttagatgctcttgcatcctcaaacacttggtctattgttgatctgcctgaaggtaagcaaccaattggttgcaaatgggtttacaagatcaagcatcatgctgatggatccattgaacgatacaaggcccgtttggtggcaaagggatacactcaactagagggtgtggattattttgacactttttcaccagttgctaagcttaccacaattcgcacccttctatctgtggctgctattaaggactggcacttagaacaacttgacgtcaacaatgctttccttcatggtgatctgcatgaggaagtatatatggatctgcctcctgggttcttactgcctggttct

SEQ ID NO: 87225 - DNA, 389 bp, Glycine max
  unsure (1)..(389): unsure at all n locations
ctatagacctcacctccaggcatgcaagcttgaataggcaaatgttttctaatattagcaagatntgcgggcacttcaatgactgacatctggaacatttttaagaactgtttctcctgcaatgatatttatgctcatcaagaactcataatagcacaaattataatagtaatgacaactcaaatgaaatgtcaaaactatataaaaaatactaggatatgagaataaggagaagacatgtaatatatatagaagtaatagaaacaaacattggcgaatgaaggttaaatatgaaagactaaaccaaaagaattcttgttaaggattacaagcatacacaagcttatacttcttatagctgacatgaaccatctttgatagatgatcgt

SEQ ID NO: 87226 - DNA, 384 bp, Glycine max
tcaccctcaattcaagaaggaagtgataaagattattaattgagatagacgaagatgatgatttcagtttctttgtaaagaggttcaacaaatctctaagaaacaaaggaaatcaaagaagatcaattttcaaatcaaagaaaagagcataagattcatcctctttttcaaaattttatgaatgcaatcaaccaggacatctaagagttgattgcccaagtttcaagaaaagaatagagagatctgaaaagaaaactttcaatgataagaaagcaaaggaggcctaccttacttgggaagacaacgatatggactcatatgaagattcaaaaaatgaaggtgtaaacctgagtctgatggccaagaattatgaaagcgatgaaa

SEQ ID NO: 87227 - DNA, 368 bp, Glycine max
agcttatcggtcacatgacttacaacatagtacatttaaccaggtaatgaaggaggttctctgttagggagtaaaaaagttgacatcggcattttgaatttaatatcatccttaatgtttccttgattgtagacaccaattagagtccagtctataatttccatggaaatgttgtgggcccacattgcttctacagaacttggtgcaggacatttcaactcgaataaaatctcagcttcattccattcgtgctctgaaaatattccctccgctttgcattctagatcacaccagagtatcgggtcccatgttctaaatatgtaattacatgaagaactaaattgcatagtgccattgatgagtacgct

SEQ ID NO: 87228 - DNA, 357 bp, Glycine max
tgccgttggaaattactatattgccactgtcttctagggttgctgaagtggcacccgccgtgccggcgtcccacacggcggagccggagccgttgacgaggcggaggtcgccggagcggaggaactggagggacccgccggagtccacggcggcgccgtttccagcggaccaaacgacggggttgccgccggtgtaggcgatggcagcgatgaaggagggaggggtggttggtggctggacggggatgaataggagggagaaggtgcctttgggaaaagaccacgtttggttggaagaataatctgaaaggtagaacctgggtttttggtggtggtaactgtgcttgttgctaaaac

SEQ ID NO: 87229 - DNA, 359 bp, Glycine max
ctgcagctttcttgattcttatatgttagatgggatgccaccgtgttcggggtcgttaatccagatttccccttgtacataaagcacgaagacctctccgaaatcgcacacggtggtcaatgtctcagcatatcagtgttacagttgtggattatgtaagtctttttataaaaggcttttatttacctaagttatggctttcaattcataaatatttaactttgacttaacataaacaggcatctcactgaaacatgtatgcgagcggggaattctgatatctatggattcctcgagcctcagtccattcagaggtctgggcaatcgcagtttgaatctgaaagttacataaagagttg

SEQ ID NO: 87230 - DNA, 372 bp, Glycine max
tgtacaataattaaccgtttcctcgttttttttacggaatgtatcacctaattaatcacttgaggtacggtggtgtgatttctctatataacacttttctctgacaaatgacaatagatctgggtttagtcctttcatgaaagactggatttgatgcaatatggttgcatacaagctctgtctcatatatctccctattttagttgttagagtagttgtctaagtcatataagctcacatgcagttgctgccgtagtgcgatatttaccttttgcactgaattttgcaacaatgttttgcttcttgcttctttttaaaattaggttttctgcaataagaacacaatgtcttgaagtgaattgtctatctgga

SEQ ID NO: 87231 - DNA, 356 bp, Glycine max
  unsure (1)..(356): unsure at all n locations
agcttatgaaactttttaatgttttcttactaannatggttatttgatttttatattaatttcttttatgataaactcacccctcgcaatttttgtattgtgtggttggttcttgtgatgatcgcgaactcttgttcgtgagagtagaatgacaaaagtagagtacgagaagtgagattcttttgtggagccgccgagctgacgtgatgacgttgggattattttgggagagagttgtgtttgtttacaatataaaaaggactctccaaaattcatctcaaatcaaaatctaagtatttcgggtcactaaatgaattagttttgggtcaaaacaaacctaaagctccaaaatgagt

SEQ ID NO: 87232 - DNA, 383 bp, Glycine max
  unsure (1)..(383): unsure at all n locations
ntcaatgttctaaagcaaaagctatctaatgtttccatacttgtgttgccaaactttaaaaaatcttttgaaattgagtgtgatgcttcaaatgttgggattggggctgtgttgatgcaagaaggccatccaattgcttattttagtgaaaagttaagtggtcctacccttaactattcaacttatgataaggagttgtatgccttagtacgggctttgaaaacatggcaacactacctttatcccaaggaatttgtcattcatagtgaccatgagtccctcaaatatatcaaggggcaaggcaagcttaataaaaggcatgcgaagtgggtggaattcctagagcaattcccttatgttatcaaacataaacagggaaaagg

SEQ ID NO: 87233 - DNA, 352 bp, Glycine max
agcttttcatttgttcctgttttgaggagcatacaacctatctcactcaattcacacccacggaactctggcacaagagacttgatcattgccatcttgaaagaatgctaaacatggaaaaaaggaaatatgcataagaaaatgtgaataagtttcaaatggaggaatgcaaatctgctagcacactaatgaatcaaaaggacaagttcaaaaaggaagaaggtgttgataacattgatgaaggatattgtgggagcttgattggaagtccaatgtatctcacttcaacaaggtcaaaccttctatgttctaaaaagaacaaaactggaatttttgttgacaatcaagtagc

SEQ ID NO: 87234 - DNA, 378 bp, Glycine max
  unsure (1)..(378): unsure at all n locations
tcttggtctcactgggttttcatttttttttttatntaataaacaatttaatttgttcctttatttgattcaatctcatcacactattaataaacaacgtcaggtgaatttggaccaaagagaccaaattgaatgatttgaaattaagcaatcaaattaaagattttattattaggaggataaaattaaataaaataaataatgaatgtgacaaaaagataaaattaagccttgaaaaatttatcttacttcagataagtgatatataaattggttgtaataacatatattcaaccattattttatttttttgaaaaatatgggatcaaacctgaacataaaagtttgggtaccaaaattgctgaagcactatgctaa

SEQ ID NO: 87235 - DNA, 332 bp, Glycine max
  unsure (1)..(332): unsure at all n locations
agcttgacangagtgttgttattgncatttttctaaaaccaaggaacccatctggcagcagaaagcgggagagatctttgggcacagaatctgagtgccctctggagtcactttaaagaccatatctttaatcaatggggaaaaaagcccctaatgaaggaaataggcctttctggcaaactcggcctatatagacttcaaaggatggatatatcaattaatgcacataactttacagattgtttaattctgtatttcttggcgactactggtcaaaagaattggagaataggatattggactgcacatggggagggatggaggaaatgcta

SEQ ID NO: 87236 - DNA, 384 bp, Glycine max
ttgggaggaagctccatgttgagatgagatcttaccttatgaattgcttagaatagaataaaagcgagatgcttacaccaacatacacgcaccgagtgagtgatagagagatataactttcacgtcaatctttctcagtgtcaactagtctactctagtcacataacaattacaatgtattgcttgatgacagagaacagaccacacccctcacccaactctgatagtaccctctcaaccatttctcctctcttgtatcgtgaaacaaagaaatacgcccaacacattattccaacctgaatcttattgaaaaaatggccaagagatcagattttgcccagaagctccttgatgatctgcggctaaggaaagaacgaatggctt

SEQ ID NO: 87237 - DNA, 360 bp, Glycine max
agctttgacaaagaatattttttgattttaccccacggataacggggcatccctacattgaatagcatatgaaacaagtccttcagtgaatcagagtatagatgaggcttacgcacacacctacttgcgccacagatttattgatgtatgataaaggaggagggctgtttgaatcacgattattcaaccatctgagggggaaaatgaaatcatggttgcatgtgcaagtagcatttcaaaaagtaatttatcctccttccaaactaatgagttcctagctttagtgcaattactgtagcaatataagcaaaaaaagctataggcttcattctggattattttccatcccttttttatata

SEQ ID NO: 87238 - DNA, 389 bp, Glycine max
aaaacccagctttttgaggttgtgaaatgatttataagttttagattatttgtaaccaaggaagaataatgtattaatatcttctcagacagtcaaatatttaatagaaataatagtgttagtctgataatcataattaagcttatgtactaaaaaaaaatatattagtgacgaagcaccttacttgtaatttagaaaattttagttactaaaatttttgtgatgctattattggaatagaaacaaactgtggagagagataggaattaaagtgtgtgagtgcggagggaaacggattgggaattgagtacttttggaacggtggtgaatatacaacatatggttattgtatatggatgaggaatatgtatctatttatttattgtatc

SEQ ID NO: 87239 - DNA, 348 bp, Glycine max
agctttaagaaaatggaagtttaaagtctttgttagtatagtagtatgtttttgtatgttggcaggcacgacaataacaagttaatttatttgtaagtagattagcaccaaaattttgggtaacttgtttgaaacaaatgctaaacgagggaaatgaatgtttttattaattcttagactgtctatcttgtggatacaagtacaaaatttgtaggaccaacccttctcatcatagagtgactgagtcacatatgtatgcacaaaactaatgtcattcgatttagtcaattgacctactgtagcattgaactaagtatatatatgtatgtttagtttactatgtcttta

SEQ ID NO: 87240 - DNA, 92 bp, Glycine max
tccaccatagacataataagttgttgctggataatatgacgaaccacactggataacccctacaaaaatttactaattcggggggggggggt

SEQ ID NO: 87241 - DNA, 261 bp, Glycine max
  unsure (1)..(261): unsure at all n locations
atattaattattgaaattgataaaaaaatttaaaataacttaaatgacatatttttttaaaaatgtgataagaaaatcaaataatttttttaaggataaaagctcttaagttaaaacctaccattttataaaacactacttcaagttgtatttgaaaaggtttgaaattacttatttgaaaaaaangttaccaaanatatatatcctttaatatagggataaaatttataaaatataggttaaagtttaaacttttaatta

SEQ ID NO: 87242 - DNA, 375 bp, Glycine max
  unsure (1)..(375): unsure at all n locations
ngtatacccactaaaaatactaatatctacttcaacttccatggatgaatatccatggatacaagcttctttnttaattaaaaatgaaacaatttattttatatatatatatatatatatatatatatatatttataattatctcttaagacctcaatttctcttatcaaagtttatgttgacttgattagttgaccttgtttagattctagttagatattttgttaaattaaaatttataccgcgaaaagttagttacagatctcctcccctttcttaatctaaacaaataaaaatcttttttttttcaacagtgtagtaagagttgttaacaacaagacaggttgaatacagtcaaagttgttaatcttctct

SEQ ID NO: 87243 - DNA, 323 bp, Glycine max
aataaacttatgtgaatagaaccttaaaaaaactcacttataagttaatcattcttatccaatgatgagtgtgtaacgaataggttcaacaatttaatgcatgtgttagaaagtgttaaagggcatgttactactaattcacttttattttttatatttttttatgcagcagatacaagaaattataagtgcatttttattcaaatcagaatccctgcacatcaacgtacatatataactgcaccaatcacttaaaacaccaacaattaatcagaaaacagagatgaattctctgactaggaagcattaattattattaaaaa

SEQ ID NO: 87244 - DNA, 391 bp, Glycine max
tgcagggaaggcgaatatcttgcgatgcaaaatttttagaacatagaactttctacgggtgaaaatgcactgtgcaaaattaatactagttaacaaaccaaataaaaacgaacaatttctttaagataaacttagatacagtttaatacgtggttgtgatactattgctaattaaagttacaaatgagtagtatccgtatagcaaagattgatactaatttttaaggtgagatttcactttattaggaaaaataccaaaagttccataaccttttatccaaaatttagcccgggtttttttgtttccttctgcatctaaaagtatcaaattcctcctgcacaaccaagaaagaggcattcaaatgacatccattttactgtccttaactgt

SEQ ID NO: 87245 - DNA, 247 bp, Glycine max
  unsure (1)..(247): unsure at all n locations
agaagaggcaaattngattatcctgctttgatgaataggaagcttggggaaaatggatagaataagaaggagggagaaacccatgttgtggcaaccgttcctacttggccaattttcccattagcccaacaatatcaatactggccaatatcagtctttttcattacccaccacccttccagccaagaacccccaatcattcacaaaggccatccccaaattgggcacaaaatccacccgatgcaca

SEQ ID NO: 87246 - DNA, 392 bp, Glycine max
  unsure (1)..(392): unsure at all n locations
agctgcctgctganaacacatncagnccccacatatacaggaccttgaataccatctagacctttcatgttaatctgcaaaaagacaaaaaaagataggcgaaatgatcaaatatttctgccaacaatgttaaaagaatcctgtttgtggtgagtttcttacatcaaagaaaactgtgttcctgttggcataacgatcatgtgtatcaataccatcaaatctttgaggaaactggacatagcagaccttcttcccagtttgggggtccatcaaaaagcacatggcctctcgggcagccttgctgttattgacatagtgatcacaatccaagtttagcatgaaaggagcatttgtgagaacggcagatacccgaacctataaatgacaacact

SEQ ID NO: 87247 - DNA, 362 bp, Glycine max
agctttggaaagtgctatttttcaccttctcgctaagccaatatgttggcttagcgagcatttgctaagcgcaacactcctaggctaagcatgaggaagactctggaagaagatgagcggtacaggttcactaagcgcaccgcttcagttcatccgctaagccaaaaatcactaatgtgcgctaagcggtccatacgtgcgctaagcacacgagcacgaacaaggccacctatttaagcctaaaatcagattttgtgaagagagtttggactaggatttacagcttcgcatatctagggtttctagagagagaaagggtcaagttccagagaggtttgagagattttgttgtgtgaagatct

SEQ ID NO: 87248 - DNA, 391 bp, Glycine max
  unsure (1)..(391): unsure at all n locations
tatgcgcctatntccttacaaacgttctcttgctcaagacatttaaccgaaaaatgcacccatatacaatcaaggcagcttcgttacctagattatttacacgtacctccaaggtgtatttgttacttacatcacacacatctccttggctaaactcacatacatgcatactcaagcattttggggcaccaaaaattgcacatgtgcacatcttggcatttctaatacctacatacgcaaacttcatgatgaatcttgactatctacacaataaggtgctacatttcatgctcttttttttttcaagttttcgctacctaaagccgcatgcaaattcaagcatattttcctttgctgactaaaattgcattcaaatttaaaaggtatattt

SEQ ID NO: 87249 - DNA, 366 bp, Glycine max
agcttgaccttctacagggatatcacttttattcgcatgcactctgaggacatcccgaaaatggcttttcgaactcaccatggccactacgagttcaaggtcatgcccttcgggttgtgcaacgccccatcctcttatcacgcgaccatgaacttaatattccgtccatacctttgccactttgtcgttgtcttcttcgacgacattctggtatacagtggttcattagaggctcatctgcttcatttggagatgactttccaggtattacttgacaaccactttgtcctgaagctctctaaatgcttctttgcccaaccgcaggtcgaatacttggggcatttggtttctcagaagggggtcaaa

SEQ ID NO: 87250 - DNA, 384 bp, Glycine max
  unsure (1)..(384): unsure at all n locations
ctaaacaaacattttaacatcttgaataagatcatgagaatctcaagaaaactcatcaagttcatttagttgactntgttatggaaaccacttcacctagtaatgtacaagacaccattgtctgtgaggaagtcaaggagttattaaacgaaaatgtatctagtagacacaccacttttcttaaggattttcaagacttagaagaaaaggtgaaatccttaaccatgactcttgaagattcagaagaaaaacacaaggaaatgctaaaacaaaaacctttacttcaaaaagaatgcacccttgccaatattgaacttgataagctaaaaaagaagaactcagatctttggacaaaaagatattacaaaaagatgtcttttgatt

SEQ ID NO: 87251 - DNA, 358 bp, Glycine max
agcttataaacttatctagttctcatttttgccaaaatactaaggagagaaaaataagctttgcttccacatcttctcactaaacatggttagctcccatgaaaatattatccctattttccaactctaattgtccaaaagtatttaagcattaagttattctggcaccttctgttgctggacttctagaagtttcatttccaaggagcaaatttgcttgaatgtttcatatggaatttgagttttgcttacattgtgttccttttacccgtgtaaggatttctcagaaaattgcatgatgatggttttattgttgttttaattttggaataaacagaatattgtaagtgttaaattt

SEQ ID NO: 87252 - DNA, 383 bp, Glycine max
  unsure (1)..(383): unsure at all n locations
tgcatgcaaactgttttttccgttctattntgttttaaaagatgaaaatcgatataaaagtgaaaaatttgaattaaagtataatgtaaaatgtgtgattttcactataaaaaaatacaaattttctctgtaatattatttccatttttcctttcaaacacactattaaaagaagaaaattaagtagtgaaagcccaaccgattgaatttgtctttactcggttcaaaaacaacagttgcgcgacaaagaatgatccatgggtcgttattcaccactaataaagtcgtgttaaatacctaaagctacataaaccccatttctatttcgtggatgttgtctacaccaatcaacaccaagttataaagtcgtgttaaataaaatc

SEQ ID NO: 87253 - DNA, 354 bp, Glycine max
agcttgctagatattctattatttatgctggatctttgagcttcaatgaggtccttcattggtgatcttgcaccatggagatgcagcggatgataataaagagaaggtgaggggagacgccatccactatggaataagccatggaagaatgagcttctcctccaagagagtgccttggataagaagcttagagaggaatcttctgtggaggaaaaaaatgagagagagaaagaaaaagggggtgagcatgaaattgaaggaggaaaagagggagagaagttggactttgtagtgtgtctcacaagactctcattcattatagttacaacaagtgttacacatgcttctatttat

SEQ ID NO: 87254 - DNA, 368 bp, Glycine max
ttctctgctagactaggacaccctagtgttgttgtcatgatacatgtatcccaaatctgcaaaattccaataatcaataaaaatacctcacatttctgttcacattgttgtcttggcaagtcacatagactggcttcttctccttccctaactggctattctaatccttttgagcttgttttcacagacctgtagggccctgcaccttttttatccaatactggttacaagtattatgtttcttttgttgatgctaataccagatttacatgaatttatctactgaaaagcaagtcataaactctagatgtgtttaagcagtttaaggctatggtcaatactcattttaacttttctataacaacaat

SEQ ID NO: 87255 - DNA, 354 bp, Glycine max
  unsure (1)..(354): unsure at all n locations
agcttctccccctattttctataaatagggggagaagngaagagaaaaagggttcagccccttaagcacttctctctctttcgaatttgcttggaaaaattgtttccgtgaagaaaatccaagccgaggcgcttccgaaacgtttccgtaacgtttctgtgaggaatttcacgaaggtttcgaccgttcttcgacgttcttcattcgttcttcatcgttcttcgatcttcaacgggtaagtacctcgaaccaagcttttcgattcattctatgtacctgtggtggtccacattgtgtctcatgtatttctattctcgtttcatttactttctatacccccttttgatgtgctta

SEQ ID NO: 87256 - DNA, 383 bp, Glycine max
  unsure (1)..(383): unsure at all n locations
tgggatctgaacttttgtggtccttgagtggttgtgaggtggnggctgagtctaatagtgagaggggaagcacgagagagtggaaggagaaatgaaagggatttcaaaggaggcagagagtgtgtgagggacgaataagctataaatttcataggacacaggacagtgacaattttataattatgagaacaaaaacgatgatggttttatgtgtaaaaacgtcatcgttttcgttcctcctaattacagaattgccaccgtcgtacattctaagacagttatgcaaaattgtcttataatgtgcgtcataaaaaaatttcatctccttaaatacaaaattgttaccgtgtgacattctaaaacgattctgcataaccgtctta

SEQ ID NO: 87257 - DNA, 358 bp, Glycine max
agcttgagcatatctacacttatttctttaatagctaagctttccctcatgcaaaaatatatgaaaatacaaaaaatatccctactacaaagactactcataatgcccctgaaatataaagcttaaatcctatactactataatggcctaaatacaaggccaaaaagaatgaatacctattctaatatttacaaagaagagtgaacccaaccttggtccatgagctcaaaaatctaccttgaggtgtatgaaaaccctagggccttctttagccgccctagcccaatcctctcgaaatcttctatctaatacctttgcgggggtaggattgcaacatctccttccccttggaaaggat

SEQ ID NO: 87258 - DNA, 377 bp, Glycine max
tttgtcactccatccatatttggccttgacattaactagacttaacaccgccgacaatagcgtcaaggaattgttgcaccccggatacaaaggcttctttgagtcactctacaatctttcatacacaagggcatgtgcttgctggaaagactcttgtccaaggtcacgaatcatatcctccaagcgatctctcatttctagttcaaacggttcggattgctgcccatgctgcatgtctgtcatttcaccatgccatatccacgtcgaataatttcttttaattccatcacacaacagatgctcttgtatgtcatccagtatttgccgtcttccattcaaataattgatgcaaggacaataatattttccatcttcat

SEQ ID NO: 87259 - DNA, 361 bp, Glycine max
agctttgatggcttatgatgttactctttacattcgaatttgaatgtcaacgttcaaaggcactggtaatcgattaccaaaacattgtaatcgattacagctttttgaaattaattggaacgttgtaaattcaatttgaaaactttttcaaaacaattttgctactggtaatcgattacaacaatctggtattcgattactagagagtaaaaactctttggtaaacatgttttgagaaaaatcatgtgctactcaatttttgagaaaaacttttcatacttatcttgattaagccttctcttgattcttgaatcttgagtcttgatcttgattcttgaaatcttgaaccttgaatcttgat

SEQ ID NO: 87260 - DNA, 342 bp, Glycine max
ccagctcaatgttggcctatttttattttgaaaagcttatgcaagacaagagattgaaaaatagaacctttgatcgcactcttatggggtaataacaagggctctccttccaaaacagtcttttatgccttatcggaaatgattaagtaatataaaaaatatttattttcctttttcatttcaatttttaattttattggattacatattatatctattatttttctatagaatgggaatatttccattttttatataaattggcacagcttgtttaaaaattatcaaagtactatccttataagaaaaaattacttgtaggggaaatcactctcttaacgc

SEQ ID NO: 87261 - DNA, 348 bp, Glycine max
agcttcttcttactcacttgttcacgcaggaaatgaaacttggtttcaatatgtatactcctgccatgtgccacagatgcttagctaaatcaattgctgatttgttatccatcaacaacctcatatgactgcaatttctcaagttcagttcttccattaaagcttccagccatagagcttgacacgctgccatagcagcagcaatatattctgcttcacatgttgacaaagtaactatactctgcttctttgagcaccaagagattggtgatgttccaaatttgaaaacatacccagcagtgcttttcctatcatctttatcaccacaccaatctgaatcactataac

SEQ ID NO: 87262 - DNA, 179 bp, Glycine max
gcatgtgtaagaaaacattaagtagctttgttctgtttcttggagtgtggacatgcatttgttggatgctcaggtgtacaatagatgccacacaacctttggtgattggctgccatcacattctgccgttgaccaatggctagctgtctcacaagggatgtcaattctataagttattc

SEQ ID NO: 87263 - DNA, 377 bp, Glycine max
tgtctaccgcactttctatgacgaagaccatctttagcacataagaaaaagggcatttgattgactgtgttttcaagtaaaaatatagacgttcatgtggcctcattttatcatgccggaaagtttgtcttcttagagaagtgagttgtcaagaataggatgttggacaaatggcctcagttatcttaagaaagggggggttgaattaagatgcaaagactattccccaattgaactatcactctttctttttggattaacaatgcacccttaacatgaattactcaaaagacaaatcaaaataaacttctttaaagcaaaagataaatagcaataaaagaagtttaaaggaagagaggaatgctaacttgatttat

SEQ ID NO: 87264 - DNA, 359 bp, Glycine max
agcttgctctaaatttacattgatgtttgtatttgtgggaggaggttatatgccatttttgttttaagagtaatgtcccactggtaaaactaactttccaaatgtttgccttcgcaggaatggccccgaggaagcttgcctcaaagaggtccaggaaggacaaggcggccgaaggaactagttccgctccggagtacgacagtcaccgctttaggagcgctgtacaccagcagcgcttcgaagccatcaagggatggtcgtttctccgggagcgacgcgtccagctcagggacgacgagtatactgattttcaggaagaaataaggcgccggcggtgggcaccactggttactcctatg

SEQ ID NO: 87265 - DNA, 388 bp, Glycine max
tacctcattctcaatttcacttttcaaacctagaaaacccattgaattgaggggtgttggacacctagattctgtgttgctgtgctgtaaagcttgattttgggttagacatgattgatacatgatttgggacttgtaggaattgatttgggcaagattggatgagaggatgtgtgattttcgaaatctgcacttatgcagaattttgctgtcaaaataggtgcagcaggattttggctttgtgcagaaaaatgcttgtgtgtggttggctgtggaaagtctagtgcagaatgagttctggatgtttgctagtagatcccaacggtcacaatgtaggcttatgtactatagacttccagtaaaattttggagtcgatccaacggttaa

SEQ ID NO: 87266 - DNA, 363 bp, Glycine max
tcaagctagagatctatctatttttctattatctttgatccatactaagcatgtatataagaaaacttaaactatatcaaacatcatgcctagtctaaaacaatcaatacaaatgtcatatctattaaacttgtttgacattataaaattatcaaaccaaaactaagacctaaagacaaatcttcaaggcttcaagctttgatccaacaaggtatacacttaagctcgaatacaaatagatatctttactaagcaaaaaaataaactttctaagttctagtgtttgagcgtcgagacttttagcacttatggttttttattgttgtatgttttatttttgtgttgataaacttttataggctt

SEQ ID NO: 87267 - DNA, 388 bp, Glycine max
tctagagagttctacactactctagagttctccagaacgttctagaaaattctaaacttttcaagagagctccagaattttctagaacctctccaattaaggagggatcccaacaattacttattagcgatttttttaaaattataataaataataaacatgtagccgaaaacatgttttcgacttgggcttaggttgaaagttctgttaattggcccaatgcatcttttgcccaggcaatgccgtaaacaccaaaagagtgaatggaataagattcttcttatttctacactaccactaccactgccattgcggtaagattcacagtcatcattatccatcacacttcacaacttctaagtatgcgactttgaaaatggggtatttt

SEQ ID NO: 87268 - DNA, 309 bp, Glycine max
ggaagcatgacaccaattcttatgtacaacacagggtggttatgactccaatttggtggcacttgtggcatgaatgaaggggaacaaaaagacatttatttgtattataaataggcaacggtatatcatattcaatacaataaggaaaaagctactttcacaatttttcgtgacactatcgaaaaatcactttaattataatccatacactatatttttcttgaccaagactttctataaaaagaaaagattacctatatatctgaattggtagggcagacccaccatgacctaaaaagcgtaaattaa

SEQ ID NO: 87269 - DNA, 212 bp, Glycine max
  unsure (1)..(212): unsure at all n locations
agcttcgctataanaggaatgtattattttaatctatgccaaatgatacatggatttcagaagtgtttttaattttccggtaccatttggaaaatcggtgaattgaagcttcaaggctagcagaatatatcatatgttagggcgaaatccaccgcttcataaagggagaatgttccaattaaaaagaacttgagcgcgttataattgaaaaa

SEQ ID NO: 87270 - DNA, 393 bp, Glycine max
  unsure (1)..(393): unsure at all n locations
actcagctgccctgctaaaacaatctctctaattactggtgtcactacttcctgagtccccaccatagccatggtcagcactntcaaacaagaaaggatggttgcagcacttctttaattccaccacaatatttaaaagaaaaacctgatatttagcagaaaaagattagagataatcttttaagagaaaataatatagaaataaatatacattatgaaataaaacttctaataattttgtcagtccagatgataataaacagatgcaacatttcatatatcttctccctcttctttctattcattgttggtgtttcttttattcataatatattctccctctaattgaatatattaccaaaattttaaaaaaatgtacctcagctccttgat

SEQ ID NO: 87271 - DNA, 365 bp, Glycine max
  unsure (1)..(365): unsure at all n locations
agcttagtcttttggaaatttttttatattaaattntgncaatccaaccattcaatgatgtaatattatataaatgatcatgcattccaaattttaaataatccataaattcataagtatgtaatttaataattgacatattttaaatagcttgttatatgtaaactaccttcacaagcaaaatgtaattttcataatggcaattgatgtttattattgtttactgacctctatgcagatcttccccctgataaggaaccactagattggaatactagaatgaaaatagttgtcggtgctgcaaaaggattagaataccttcatgataaggcaaaatcatgaacaatttctttaattccaaccaa

SEQ ID NO: 87272 - DNA, 337 bp, Glycine max
atattccgagtactttggatttggtaccaacatgccctcctggattccagcttgtaaattggcgaagggaagaacgccccggcatttacgcaacaaacataatggaaacctttacgggtttaaaagctctatagttgggcctaggctttagagttttcattttgttaaggctttgtgtcttttgtttttgaatttataatacaaggatctttcttcatctgttcctggtctttacccattctcattcatttgcatgtttacttctttttctaaaacggcagattcgatgacgagtcccccgaaggtactaatacctgtgacccgtctatcaactttg

SEQ ID NO: 87273 - DNA, 356 bp, Glycine max
  unsure (1)..(356): unsure at all n locations
agcttgctaggtttgcttcttggagnggggaactatgagcttcaatgatgttcttcaatggtgaattttcaccatggagaagcaactgaaggcaaaggataactatgataggggaggccccatccactatggaataagccaaggaagaaagagcttcaccatcaagaattgccttggataataagcttgaagaggatgctttaatggaggaaaagaaaaagagaaggtggggagcacgaaattgaaggaataaaagatggaaagaagtggaactttgaagtgtatctcataaaactttcattcatctaagttacaacaagtgttacacatgcttctatttatagactatgtagctt

SEQ ID NO: 87274 - DNA, 383 bp, Glycine max
  unsure (1)..(383): unsure at all n locations
tcctcaacagttgcatgcagngtctcgtgctcattcttcagtcatgcaaattaggggatgcaacatttgtggtggggcccataagccaggtatgtgcatgaaccaagacaattcatccaaggaagtcaactacatggccaatctcaatcgtcaagggttccatcaaggaggacctcctagagacaatcagggaggaaatttttgtcaaggccaaaggctagagatttcatcctaggaacaacttcaacaacgatcaagatggaccatccattctaccttccaatcaaaggcccgacttgtatgagatgaccaccaagctagaagacactatgactcagtttatgcaagtttcattgtcaaatcacaagagcattgagtccgcc

SEQ ID NO: 87275 - DNA, 355 bp, Glycine max
  unsure (1)..(355): unsure at all n locations
agcttggagnatgagggagtgttctttatgatggntccgcatccacctacttttttgagtagtttccttttagcagatgcttcaggagttgtaactccgagtttggttcatttgtaattttgttgcttcaggttgttaagccccttatattaccaaaaaaaagaaatatcatagtatacaatattatacaaattctcttttttctttattctttccctgtattccaaaacacaaaaatttctcatatttgagttgaaggagcactctgccctagaggagtactctacatttgagccaaaggagcactttgcttatttataactaagtgttcctttatatgcttcactaactatct

SEQ ID NO: 87276 - DNA, 380 bp, Glycine max
  unsure (1)..(380): unsure at all n locations
tgtcaaacctttaagcctttgctacccttnttgactaggctagcaagaatagctaatgtccgagatggtaatctgcacaaagtaatgtgatagtttcaagatattaatattctttaatatcagagaaagcccataaaattgtatcccaccttaaaaatttgagaataagattttgtttgttaaacattgggagaaggaaacatattttaaaagaacctggatgtgtcctacatataaccaaggacatgcatcagacgcataagaaaactactaaaattctataccattgtctttgcaacggccttaaagactccagtctcatgcttctcattgactgggatcttcaaactaataatatgtcagtcaagctttttcaattc

SEQ ID NO: 87277 - DNA, 346 bp, Glycine max
  unsure (1)..(346): unsure at all n locations
agctccttctatttatagccttcatcttcaagtatatgttggctcttgacggatggattcttcactctggttcttcgtctaaagnctgtggtcattgaaccatccaatgcttgcattatatgcatgcttcttcttcatgcagagttcatgcttataggtcgacatgtcttatacttcattaaaaagtcacttcttgcattaaaggaggtttgcacatgcaaagtgcgcattttggtgaaaaataccaattccaaatggtggccttcatttattcttcataggacttgaaagatcctaggagaatgttttatacaagagagaatttcttccacaaagttttaaatga

SEQ ID NO: 87278 - DNA, 401 bp, Glycine max
  unsure (1)..(401): unsure at all n locations
agtgacactatgaaactcagctattcttagaggactcgctntctcgtttaatcatgttttgtagntgagtccggtcgggagccatgtcagagttgtactgatactgcctaaggaaggcggtaatcagatccttcccaatgcggatgcgggaagcttctggattagtgtaccagatgaccgctgccccagccaggctatcttggaagaaatgcatcaataacttctcgtccctggaatacgcacccatcttgcgtcaatacatttttaggagattctttgggcaagtcgtccctttgtacctattgaagtcgggtactttgaacttcggagggatgacgacgtccggtaccaggcatatgtcggtcatgtctgcgaacggataatcactgaacccttcaaca

SEQ ID NO: 87279 - DNA, 358 bp, Glycine max
agcttatcaaaatggggggggtgcatatagcaattttgaaattttgaattggaccttccaaagtgtatttcgaaggaggattgcttctggaggaaataacccaagtcgcctaggcaagctagacagcaacctcctccccctttttcctataagaaggcaaaaggggggtgttcaaagggttccggattcccctggttatatgtttcaattgttttgggtgaaaaaaattgtttccgggaagaaaatccaagccgaggtgctttcgtaacgcttccgagaggtttccgtaagcaaatccgtgaaggttttaatccattcttcgtcgttcttcatccgttcttcgttcttcaacgggtaa

SEQ ID NO: 87280 - DNA, 380 bp, Glycine max
  unsure (1)..(380): unsure at all n locations
ntgagattaacctcaagctgggatgtccaagcttcttattccatacccaatgatgctctttgactgagagtaagaatgacatcttttgactggacagatcaccaattcaagtcttatagagatttccttgtatcttagcaaagaagagtgaagagttgtccttattctagatgatacacatatccttattaaaggtgacattgtatccactgtcacataatttatttatactcaatatgcttcaatcctttaaccagtaaaacattatctatagtaggatagggagaaatgcatactttacctacaccagttatcaaacctttcttattccctcaaaaagtgaccaccccactagacatagggcttagggattggaacgc

SEQ ID NO: 87281 - DNA, 365 bp, Glycine max
  unsure (1)..(365): unsure at all n locations
agcttggaggacctacttgttcttatgttttcatacncaaaattccagcagctatgatgcttattaaccttatccaataagaaatcaagggttttattagtcaccttcttatgtaagagagggacccccaaatacttacctaagtcatcaatacattggaggtcgctcctactaaataaatctagtttaatcttctagttaagatcgctggagaagtaaatgtgagttttccccatactaactttagccttataactctcacaaaataatttcaaagtaagctagatggcctcaatatgatcaataaaagcttctgcaaagagaaaaaggtggtctataaaggctagatgcgaaattagggaggt

SEQ ID NO: 87282 - DNA, 370 bp, Glycine max
tacacaatagcaaggagctcaaatcattttactatatatgattaggcactttcaacaagagaggtatttttggcttacatgcacctttaccattggctatgtttataggattacgaaaagcatgacatgcatctcaaccagatgtttaaaagatattaatgataacgatagatcaagaagcagaatcttggcaatgaaaccagccgcaacaaagaaaaggcaaaccaatcaaaatctacaaatagttaagctgttacaacaaaattcattcgacttcaaaatttaaaaactatcgcaaccatttacatcacaataccttcctaggtcagacaattcaatttgtttttaatagagaatatcaacaaaatta

SEQ ID NO: 87283 - DNA, 349 bp, Glycine max
agctgtgagtctaaagaaattgtcaggcgctcaactcaaacagagagcgtcagaacatttagcctgaagacttctagtttctgagtaacgagagcatcatgcagaaaataataacagagaaacttcgggtgatgggtgcttagaggatagtcagaatagatgcattgcttcaaaattgtgtcaatccagcagacatattgaagtctttctcgatgaatctaatattccttttaatgatactttgatgcctcaagatacatttggaggtgaaaattcttagcaactacaggttgagtcaattccacatgttgcacttacagatggaatccagcataagatttctggaagt

SEQ ID NO: 87284 - DNA, 389 bp, Glycine max
ctatagaatacctcagcttcaccaccaagagagtgtcttggataagaatcttatataggaagcttcaattaaagaaagtcgtctttaaaatgttgccagtatttacaaaaatgtcaccgcccccaaacaaagacggttttgtgacgatcgactttaaatgcgcgtcgtggaatacgctatttttagtagtgttagctaaaaccatagtgatggaagcttgcttgagaagcttctatggaggctggatctttgagcttcaataaggtccttcaatggtgattttcagccatggaattgcagcgaaagataaagaagaagaggtgagaagatgtgttatccactagagaataagtcatggaaggagaagtttcaccaccaagagagtgtct

SEQ ID NO: 87285 - DNA, 353 bp, Glycine max
agcttatacaagaaagaggacttcgagccattgggcaattcgaactggtgtatggacgagtcgaagtcgaggcaacaagagttctggacttagcgtaatttctgaacaaatcttcaccaagttcagttcgatttcgagtaatgtggataaccgttctaaggagcagttatgtgcatgcaaggtgtacgtggcaggacacttggcattaggatagtgttcgaccgttagggcagtttattttcgaaaatctatatatagcaattttttagtcagatttcggggtcgcaaatcatttatacaaatccttatatactcaaagtacccagcgcagagagaaacgagtacgcaaggag

SEQ ID NO: 87286 - DNA, 375 bp, Glycine max
  unsure (1)..(375): unsure at all n locations
tcatttcctttctgtaattgcttattgtatntgctgagttcaagagtactgtccacaatgaaatgaggtctgtagtatatcatacatggttcttcaaatgaaattatattctatgagtatagatacattagattggggatgctagttacttttattctaccattaacattttccgtaagctacgtgtaatgagtataaaattttcttaattttgatgtctaaggatctggaagcggaaccatgcaagtttggagtattgagaccaaaaatgaggtattctctattttctactataatatgattctgctattttttttaaaaaaattctaataggatactttaaaatgaggcaaatgtttaaaccagcatctgtag

SEQ ID NO: 87287 - DNA, 359 bp, Glycine max
agctttttagttttagcagatgaagtttatttcttggccacctcatagactcctctaaggacaatagcatcatttcttgcactaaattgatgggagttggaagccatcttctcaatcaaattcctagcctcagcaggagtcatatcaccaagagctccaccactggtagcatcaatcatactcctctccatattgctaagtccctcatagaaatattgaagaaggagttgctcaaaaatctggtggtaagggcagcttgcacacaatttcttgaatcttttccaatactcatgcaagctctctccactaagttgcctgatgcctgaaatgcctttttttgatggcggaggtcctatatg

SEQ ID NO: 87288 - DNA, 225 bp, Glycine max
tcaaggatggattctaaatcaagctcatttcaaatgagacatcataaaccatacataccattcatttcgcaccccaaaacaatatttgtaggcatcaaccacctaaataaagcattcaatcaaagtaaagtttgtcttgcctatcaaactcggtgagttagctctgggatgaataagagaaataaaggaggagactttggatgtcaatatgaaagcgtgcctcaa

SEQ ID NO: 87289 - DNA, 360 bp, Glycine max
  unsure (1)..(360): unsure at all n locations
agcttgtcatgcagaanctatcttgattttcttgtggnttacaagtatattataatatgcctaatttaaaactagattttcatgtaatgtcataactttacattaattaatatttacgaatgtaggtgacttgtggaactattggtctttctacagcaacagtaaaacttgttaatattgatggtagcacacatgttgcttgttctattggtataggagcagtggattcaacttacaaggccattaatctcgttgtgaaggtttgtaatttacaaacatttttcactattaagtccttttcattttaagagctttatcgaacatatttcaacctatataaacatttagcccctattgtga

SEQ ID NO: 87290 - DNA, 365 bp, Glycine max
cgtgttttgatgatttctatagatgatgacaaaggagatgacaaaaagctcacagatcaatcatagaacaactcaagtgaatcaagaacaattcacgagttcaagatagaatcaagacgaattcgagactcagtaagatagttaagagtcaagaatcaagattcaaggttcaagatcccaagaatcaagatcaagattcaagactcaagattcaagaatcaagagaaggcttaatcaagataagtataaaatttatttctaaaaaattgagtagcacatgatttttctcaaaacatgtttaccaaagagtttttactctctggtaatcgattaccagattggtgtaatcgattaccagtagcaaa

SEQ ID NO: 87291 - DNA, 354 bp, Glycine max
agcttagtgcttgtgggagttttgtttattcaaccaactcaaccctatgaaggaccaactcgtacttacacacttaaggacttacaccttacaggtttaatgcttttgggactatggatcatccgactaactcataccaatgaatggttgactcgtatataccactcaaatgacattgttagtccgttctaacttgcatttctatttcacacgttcttccattttcttcatttcaagctcagattgcttgcaattttcttcatgggcattgttgaacattctggtaaagttgagcaaagttgtgattattgaagaaaaaacatacattaattagttggcacgaggaaacaatta

SEQ ID NO: 87292 - DNA, 402 bp, Glycine max
catagcttcttatgtcctcaggttataaatgtgcctcatttgaaagatatgaaaagagaaaagagaaaagaaagtcaaccaatcaaagattggaggaaagcaaaagaaaagaaaagaaaagagaatagaaagtcaaccaatcaaagattggaggaaagctaaagaaaagaaaagaaaagagaaaattaaatcaaccaatcaaagattggaggaaataaaaagagaaatagaaaaagaaagaaaatacaaagagtttctttggaccagacaatgtctgaacgatgtgcagaattgttaagaagaaaagcaacaaaacttttgtttgaaacctgaaggatgcctgaagcagtcacctccctggttaccaaccaaatctttgtgtctgcgctcatttcgcgttgg

SEQ ID NO: 87293 - DNA, 366 bp, Glycine max
  unsure (1)..(366): unsure at all n locations
agcttatgcgcatattnccttacaatttttctcttgcacaagacattctattatccgaaaaaatgcacccatatacaatcaaggcagcttcgttacctagattatttacacgtacttccaaggtgtatttgttacttacatcccacacatctccttggctaaattcacatacatgcatactccaagcattttggggtaccaaaaattgcacatgtgcacatcttggtatttctaatacctatacatacacaaacttcatgatgaatcttgactatctacacaataaggtgccacatttcatgccttttttttcaagtttttgctacctaaagccgcatgcaaattcaagcatattttcctttgctg

SEQ ID NO: 87294 - DNA, 412 bp, Glycine max
atggacctctgaaactcagcttctcaggaagctacctagtctataaatagaagtatgtgtatcacttggtggaactttgatgaatgaaagtcttatgagatacacttcaaagttccacttctctccctcttttattcgttcaatttcatgctcccccccttctctctttcttttcctccattaaagcatcatcttcaagcttcttatccaaggcacattcttggtggtgaaactccttcttccatggcttattcccttgtggatggtgcctcccctctcctcttctcctttgccttccgctgcatctccatggtggaaaatcaccattgaagctcaaagatccagcctccatagaagcttcacatgcaagcttccatcagagttagtgcaactcgatgtcaaaacaaccttt

SEQ ID NO: 87295 - DNA, 370 bp, Glycine max
  unsure (1)..(370): unsure at all n locations
agcttgattagtaggggactttttgactcttgccgagggtgacagacactccgtagaactgacagaagcccgtaatcagagctggaaacctcaagaccctgttgaacttctccgggtccactgggtgtcttgcgagcacgatccctgcaaatagtggatggtataagaaatcagttgaaccatatgcatacttacctatgtcgggacgacacagaccaactgatacatccgcagggggagatcggcattgcggtcgctgggcagaaagttgctaagtagcaacgtcatccatatctgtgtaagagtggtcatgttggtgtgcatgatccacacttgtctctntgcagcggcacgggtgaaatcttgcccc

SEQ ID NO: 87296 - DNA, 362 bp, Glycine max
aactgcgtaaacaaattgagagaatcttaactctgctggatgtataatgacatgactaatttgaagttgaaaaaagcttgaacaaaattactatgaatggagataaataatttgaaaaaatattaccttgttgaaatgatatttttgttagctttaaattggaaaaaaacaactattcaatttacatttgggaagagggaggaaaattacacatgcttgaattgtgtcaaaactgagtacctttctctcttgttgcttgcgggatttatgggatctgttttgagatttttgtaattagttggaatccttgttgaaagctgagagatcattttaatgctatgtaaaagttatatgttaaaaat

SEQ ID NO: 87297 - DNA, 358 bp, Glycine max
  unsure (1)..(358): unsure at all n locations
agcttgncataggctcaatttttttctccaaatcaatgaaggtcctagtcaccattattgacaatcaacttctttttcaaagaatcataatatatgaaaatttaacttaccaacttgggcgtaacaaatgcaacacaccttctccgaataaaaccaaaacttaataaagcattcataaatcaatattagttccttccattccacaattaccaacaataatcaccactctcattatgaacttgtacaaagtacaaacaaaccaagaatacctgatcttagcatctgcacaaaaagactcaatgcttgagaggcataccctctctgggaataagctgatatcatagccgtccacgacacc

SEQ ID NO: 87298 - DNA, 382 bp, Glycine max
  unsure (1)..(382): unsure at all n locations
ntaagaggagttgcaagagaaatgtcaacaatctcaatgtggctaaaactggagtcattgtatatgcaaaagtcccttgcaaatcagctatgcttgaagcaacaactgtacaccttcaagatgacagtcaagaacagccactgaacaattggctgatttcaacaagattcttgatgatttggaaaatattgaagtaaagcttgaagaggaggataaagctctcttgcttctaaattccttaccaaaatcctttgaacatttcaaggatgcaattctttatggcaaagatcaagacattaccctagaagaagtccagacctcaataaggaccaaggagatgcaaaaatagcaagactccaaatctgaggataatggtgaaagc

SEQ ID NO: 87299 - DNA, 358 bp, Glycine max
agcttttcaaaatttcagataatgacatactcttgttggaaatcaacttggtacaaaattaaaagctttaaggactgacaatggcctggagtttgtttcagagcagttcaatgagttttgcaggaaaataggcatcaaaaggcacaaaacagtccctcacacaccacaacagaatggtttagtagaaagcatgaataggaccattttggaaagagttagatgcatgctactaagtgcaggactgccaaagaccttttggggagaagctgcaaatacaacagcatatttgattaatagatgtccttcatcagccttagatttcaagacaccaatggaagcttggagtggtgaaccacct

SEQ ID NO: 87300 - DNA, 382 bp, Glycine max
tctttgggatggcttatttccctagtggatggtgcctcttctcacctcttctcctttgtcttccgctgcatctccatggtggaaaatcaccaataaaggacctcattgaagctcaaagatccagcctccatagaagccccacaagcaagcttccatcaagtggtaatcagagcacaagagcttcaagtaggtgctccttaaacctccattaattttttttgctttaccttctcttccattgttggttcttcatttttttctccacgtatctcctcatatgtcttgtgctaaattttgttaacatgattctttagagtttccaccgattaaacttgctatagaagttacatttgattttctatggttcaaatttcttgttctt

SEQ ID NO: 87301 - DNA, 345 bp, Glycine max
agcttgaccaagtttttttttatcttatgcacaaagacctgtgatggcccaagtcagccctacgctatcctgggtgagctacggtcttgactaattcatataagaccatattgcccgcgtccttggtatctacatgcaatcttgatcaaaacattaagtgacttcttgctttgcactggaactggtgccatatactataattcgactagcacgactcctaatatcatattgaatgatattactcggactaattagggtctgacagctgcccctccttacttatgtcttattgaaaacgaaaaggttagtaaagataatgacacttattgcatttgagcgatcgtg

SEQ ID NO: 87302 - DNA, 381 bp, Glycine max
tgtatgattatggggtacccatcttatgtggttttatgtggaggcccggcgatggtgcacaactagttttccacatccacaacgcgcgcataaacccaccatcccctgttgtccaactccaactgagctcacgtactctcacgtagaccatatccttgtttctctcaaaaccgggtcctcatcaatcctaccattcttccacaacatccaagcaaaacaacattataacaggacaagctatcacagccaagcataacatagcaaaggcagaaaactctgccaaaacaccaaccaaatcacagtttttcttacttaaagaccccattaacatttccttcgttccggttcagttaaccgttggatcaacttgaatatcctact

SEQ ID NO: 87303 - DNA, 356 bp, Glycine max
  unsure (1)..(356): unsure at all n locations
agcttgtgncactttttatttttacagtcaaagagccattcacttagcaaatcaccaaatgtaccatgagaggacaaagcacatagatgtgaaactacacttcatcaaagatgtgagtgaatctgataaggtgaaggtggacaaggtttcaacagaagaaaacccgactgatatgttcacaaagtccttctctaatgtcaagttcaagcactgcctggacttgataaattttgaagatgcctacagcagattggtagaagtgcagccctgaatcgcatgataaacactcgctgattcggagtcaaggaggagatttgtggcttgtgactcaaaatcacaattggcacaagtgataa

SEQ ID NO: 87304 - DNA, 384 bp, Glycine max
tcatgcttaactatgtatggcataacttcattactgttgttcaagacatacaagtgagcttgtaacaaatcttctacacttggagtgatcacctgcagtcctcttgaacccttaccacccactctgtcatcatgccgacactcaggaagcccaacagctttagccttctctaagtattctgaacaaaattcaatggcttcttctgcaatgtacctctcaacaatagatgcttccggacgatatagattctttgtatacccttttaagatcttcatgtatcgctcaatcgggtacatccaccgtagataaataggaccacaacatttgatttctctgaccagatgcacagtcaagtgaatcatgatgtcaaagaaagcaggggga

SEQ ID NO: 87305 - DNA, 354 bp, Glycine max
  unsure (1)..(354): unsure at all n locations
agcttatatgcattatgnatttttannncagnagnnactactgaggggggaatggggaaaatagtttattgttgaccatatttgtgttggtagtatgaatgaaactgaaataaaaactttgttgttgatactaagagagtttttaaaatcaatcaattgaatttggggatatggtctgtgatttttgaaagctctgtttctcattatgaggggttgttttttgaagttattgattagttgtgaaaatgatgctaactgctatcttgggaaagttctttttttcctgtagactgtaggtataggtaggccctatttttttagtaatgaaattgacttatgtatgcaatttacata

SEQ ID NO: 87306 - DNA, 374 bp, Glycine max
ttgatggtgttgagaagaaatcacatgtttgttatcatcaaaaagggagagaatgtgaatgtatgtatacatgattttgatgatgtcaaaagaagaatcaaacaaggctcagaagaatcaaacaagcctcattttacttcaagattaatacaagattgtttcaacaaacaaagtcttgattcaagatttcttcaagatcaagccttgcctcaaaatgaaaggtttcaagtcattcaaggcacatgtaatcgattaccaatggtttgaaagtgtgtaatcgattacacatcatatgtaatcgattaccagagactctgaacgttgagaattcaaattttaaatgaagggtcacaactgttcaagaaaaacaactg

SEQ ID NO: 87307 - DNA, 351 bp, Glycine max
agctttaaagcacagcaacttttaatctaggagtccaacacccctccattcaatggcttttctaagtttgaaaggtgaaatttataatgatgtgaatttgaggcaaactctcacctcacaccagtccataacgtcaatctaaacttgcccaaactggaattacacctaagattccaccaaatcaaaatttgactcttcaacacccaattttgccctagaaatggctcttggttcactttggccatttatttttctatctagctcaaactaacctttctcacatgttctaaatgacatttcaagctagtattgactcactctaacctccatttaccacagaattccgactta

SEQ ID NO: 87308 - DNA, 375 bp, Glycine max
tggagacaataggctaggacagttctacctcattgatgcgcaagcatatgttcgcataaggataagtggatcctacgcattagtaaccatgtactatatatagaatccgaatgaccacttgtgttcccaaacaatcttgtaaaactaagtaattaagggttcaaataaaataaatgatagttgtgatcaattgcttattttagtaaataagaatcaaagacataagagttgatatgaaaacaattataataagtactctatgattgtgatttcacacttaccccaatttacccaattctaattctaacaaccccaaatattatgaattatcgatattcccacattcaattattaacctttggtcatgatttaata

SEQ ID NO: 87309 - DNA, 349 bp, Glycine max
agcttggaaggttttcttatctcacaaaatatatgtatgtgcggttaggtagtgaaaataccaaagatatgcatgtttgtagcaaaaaataccttacaaaacatatatatatatgtttaagtagcaagataccttggatacacatgtatataacaaaaatacctcaaaaaaatatatatacacatgtttaggtagcaaaataccttatgaaaaaaaacataaacttacaagagcaaaaaatatatctttcggctgaaaagccagcacgcttttgaaaagaaataacttccagcttttctttgaaaaaagattcaccgatcaaaacaaagggttttttagaaaaaaatgt

SEQ ID NO: 87310 - DNA, 351 bp, Glycine max
  unsure (1)..(351): unsure at all n locations
agcttgtgctgtgaatgtggttaagacttacgtcttttatccgnnggggcctcaatattggaagcacttggagggtcggggtagccagacgttggtgtatgctcagattgatcattgttggattttctgggcatatgctattggcctaagatagattctctgtcgactgttctgcacacttaatttcgaggacttacacgaatatttggttgtggaaagtcggtttgtaactttagagcagttttgaaaaacaatctgaacacaattatgtgatatgataacatataggtatatttggagcactttttttgtcagtgctgtgatttcttagctgttcactgactttactaa

SEQ ID NO: 87311 - DNA, 383 bp, Glycine max
gtctacttcgtcgaataaagataataccaatttgtgttattgtatgcgcggggtcaaagtcccacaaggatactctccagatattaagagcctcgtgcacctgaaggagctttaactggtatggttaaagtttcaagattgtcacgtgttaatgcaacaatcgttagttgtggccatacgagacatttttcctaacaaagtcaagttagccataactcgcctgcgtttttttttcaatgccatatgtagcaaagtccttgatcctgtcaagtttgatgacctggaaaacgacgctgctaatatattgtgccagccagagatatattttccttctgctttctttgacatcatgggtcacttaattgttcatctggtcagagaaa

SEQ ID NO: 87312 - DNA, 386 bp, Glycine max
  unsure (1)..(386): unsure at all n locations
tgctctanatttacattgatgtttgtatttattggaggaggttatatgccatttttgctntaagagtaacgtcccactggtaaaactaactttccaaatgtttgccttcgcaggaatggccccgaggaagcttgcctcaaagaggtccaggaaggacaaggcggccgaaggaactatttccgccccggagtacgacagtcaccgctttaagagcgttgtacaccagcagcgcttcgaagccatcaagggatggtcgtttctccgggagcgacgcgtccagctcagggacgacgagtatactgatttccaggaggaaatagggcgccggcggtgggcaccactggttactcccatggccaagtttgatccagaaatagtccttgagt

SEQ ID NO: 87313 - DNA, 341 bp, Glycine max
caaattatgattttttttttacagaggacggattgagtccattaatataacgagacgctcgtaaattgaatgttgaagctctaaggcaattcaatcgacaataacttataactatgaggacggatggcgctcgcggacatattctagacgctcgaaaatgactgatgaatctctgagacaattgtgacgacaataacttgttactgggatgaatgagtgactcccgtaacatatggagatgctttaagatgaatggggaaactttcatcgaatagaaaaaacctgaacgctttactcggatggctgactgtgtctcgtaacatatgggtacctgtgaaaaa

SEQ ID NO: 87314 - DNA, 390 bp, Glycine max
  unsure (1)..(390): unsure at all n locations
tcaacattcaatgtcaagcgtctcgatatattttggtactcaatcagacatccgagtaaaaagttattgtcgtttgaattggctcagagcttcaacattcaatttcgagggtctcgatatattacgggactcaatccgacatccgagaaaaaaattattgtcgtttgaattggctcagaggttcaacattcaattgtgagcgtctcgatatgttacgggactcaatcagacatccgagtaaaaagctattgtcatttgaatttgctcagagattcaacattcaatttcgagggtctcgatatattacgggactcaatcagacatcccagtaaatagttattgtcgnttgaattggctcagaggttcaacattcaatttctagcgtgtcgt

SEQ ID NO: 87315 - DNA, 76 bp, Glycine max
gcttgtgtcgttgtgcccagcagggcgaagaatgtatctatgatcacaaacgacaacaacgagcttcatgcttggt

SEQ ID NO: 87316 - DNA, 362 bp, Glycine max
ccgggatcctctaagcccctgcggcatgcaaactttgatcgtgtttacaaataatcacctgatggacatcatcaaaaagggggggaatgtgaatgcatttttatgatgtcaataaaagaatcacacacggctcattttgctttaagaataatacaaaattgttttcacaaacaaagccttgattcaagatttcttcaagaccaagtcttgcctcacaatgaaagggttcagtcattcatggcacatgtaatcgattaccaatacatgtactctaataccaatgggttgaaagtgtgttatcgatcacccctcatatgtaatccactaccacagactctgaatgttgggaattcaaattttaa

SEQ ID NO: 87317 - DNA, 379 bp, Glycine max
tgtgcatccaataccttgatgaggatgtcccttatgttcttaaaactggactgattcgtttgcttccaaagtttcatggccttgcaggtgaagacccgcacaaacatttgaaagaatttcacattgtctgctccaccatgaaacccccagatgtccaagaggatcacatatttctgaaggcttttcctcactcattagagggagtggcaaaggactggctgtattaccttgctccaaggtccatcacgagctgggatgaccttaagagagtattcttagaaaaaattttctctgcttccaggaccacaaccatcaggaaggatatctcacgtattatacaactcagtggagagagcctgtatgagtactgagagagatt

SEQ ID NO: 87318 - DNA, 354 bp, Glycine max
  unsure (1)..(354): unsure at all n locations
agcttgtaggagtatagaattgtttcctctttgcatgcagnggcaaaggatggtaggtctaatcgagggcttagagaccatacgagaatcctatcgattgctaggattgggagcgattacatgaatgatatgctcacgattgcacgagataccaataaattgatcttgttgccgtacccgagtttggccctggcaccattgttggatgccatgcacgctttgtttgactgcttctaagtgctagacaccctctgtccaccatacgggatgcctcctagtcgtgccggtacttcacacgatccttagtctctctttccgcgaactcttgtgccatctcggacatcataatgagct

SEQ ID NO: 87319 - DNA, 395 bp, Glycine max
acctatgaaactcagcttaacctaaggataagggacttacttcgttatgatcctgagttgctggatcttgggcctcacaccggcagttctccgagaggtccaagtactacaaccggtttcgatgagccaatctgtggcatattccatgttgcacgaggaaaagcagaatgatgcgcgaaagtcatttctaccttcagttggagcttcctcaggttccaggcaggctctattgcctacgtcatcatcctcaactcctcctttggtacctacaccaatgcgcactactttttccaacgttccttttaaacgtctcacgccggaggaactatcgatacgactaaagaagggattgtgttttcaatgcatcgagaaatattcgagaggacataaatgct

SEQ ID NO: 87320 - DNA, 355 bp, Glycine max
  unsure (1)..(355): unsure at all n locations
naagcttgactaattcagaatatacaggttatttcagagacataaatggaataagattggagttttcaaatgcttggaagcattcaaaattctcattagaaaagaactccatatctatgaattntgggtctacaatggaacgagaagaaaagaggtttgtgtaccttgtatgctgttcctcttatgaaaataatgatccacaaggaatggagggaggaattggggcttcctgtgatccaaaatgccgctgactccgactcgaggttcctttccgcttttttgatggttctgccatttgaagagtgtttttgggatttcaatcggttcaaatgaaagagattgaaaaaagatgaag

SEQ ID NO: 87321 - DNA, 376 bp, Glycine max
ttgagccaaaatcctgactcaccataaacctttacccatggtgagaatgtcaatccttaccctcggaagcaaaaaaagaatataggggaaatttccaatcaaagaaaaagagaatgaaaatctcctatgaaagcgaaaaaagaaatgaatgaaaattccccaatcaaagagtgggagaaagctaatagaaaagaaaggaaaatttccaatcaaagaatgggagaaagtaaaaaaggaagaagaagaaggaaagaaagctcctgatcaaggatcgaaagaaaacagaagaaatgtgcatagaggtctttggaccggacaatatctgaacaatacagaattgccacccaatgaacgaaaaaagaaggaaagggaacca

SEQ ID NO: 87322 - DNA, 356 bp, Glycine max
agcttatgcattgctgcttattttatgaagagaaggatggtaagccttggtacttcgatatcaaatgatatagcaaaaacaaggaatacccgcgggaggcctctggcaatgacaagagaacattgcgaaggttggcggttggcggttggcttcttcctaagtgggaatatcctatacaagaggaaccatgacatggtgctatttcgatgtatggacgtcgaagaggctaagcaaatgctggtagaggtgcatgaaggatcatttggaacacatgccatgtcccggaaaattctgagagcgaggtattattggctcactatagagagtgattgttgcatccatgtgagaaaatgcca

SEQ ID NO: 87323 - DNA, 386 bp, Glycine max
tgtatacatgattttgaaatttatgatcctcataaaactatgagattgggaaacaaaaacttcctcatcaatatatccatttagggaaacactctttacatccatttggtacaacttaaaattcattattcaagcataagcaagaagtaaccttacaacctctaatctagctaccggtgcatatgtctcatcaaagtctataccatcttgtgggttataacctttggctacaaggtgagccttgaaaacctattttcctagttataacactattttcatcaagcttgttcttaaaaacctatttagttcctatgatgttcaagttattagtacttgttatcaattcccatacatcattccttttaaattgatttaactcatcatgc

SEQ ID NO: 87324 - DNA, 354 bp, Glycine max
agcttgtccttttggaggctttcgaatttcctgtgcttgcgcaagggttataagctgcaacgcctgaacctcacggggtatttcgggcgtgaggcccgaaatgaagcaactcaagaggaattgcgcatgaagaccaacgattctggtggctaagacctcgaagtcggacaaatattgagccaccgggccggcctgcgtcaacttgaagagggagcccgtacggtcctcgtacgtggaggcggcaaatcaagtttgcaaggcgtggaggaaagagggccacgatgtcagttgaccattgctggtcatccactggaaccacgccagtgctcgaccctccatgtagaaggcaacaat

SEQ ID NO: 87325 - DNA, 384 bp, Glycine max
ttgaggcttatataacaaggatttctctttttctattattctaatcaagctatgccacatgtctccatttgagtggagcaaaaagggtccactttctcttttgatggtgactcatactcagccacagaaagtaagaaaatctgacctttgaaacgctaaaatcctacctcggtttgcgtgccgtttctctggttccagttcctcgtgtttttctgcgtacgtcggggccagttttcgaaagtacgcaatatatatatcaaaacgctcagaataaaacccccaacatggttcacaggatggtttcataaaatctaagtcgcacccacaacgatgatttttaaactaattaattaaaaattaacccataacctcccagatatggat

SEQ ID NO: 87326 - DNA, 319 bp, Glycine max
  unsure (1)..(319): unsure at all n locations
agctttaaccgttcgaanatttcgannncacacccaagaaatgataaaatgaatttctaccgatcatttgtgatgtaatgctgtttaatcactgtttaagataaatctaacagatcgttcatgttgtaacctcggatcaaccaaaaagagcaaagtaatcataaaataatcacaatatttttgaataagatcataaaaagaatcaatctgacgcttttatttggaagttttcttggatcaattgactaataaccaaagtgaaactaatgctgaaatcaactcacaaaattaagctttgtccgcaaaatcactgaaaacc

SEQ ID NO: 87327 - DNA, 377 bp, Glycine max
  unsure (1)..(377): unsure at all n locations
tgtgcgaatcanatctcttctgcattttatctctagcatgcattctttctttctttacccactcctcacgcttggttttttagggagaaactccataactatacgcgccacaaggcagtgcctatcgctccagatccaaatctagaacaatgggtgatcaagatgagacacatgatcagatgaaagccgacatgtcggctctgaaataacagatggcttccatgatggaggccatgttatgaatgaggcatcttatggagaaaaacgtgggcaccgctgccgctgtcagttcatgtgccgaacatacctaactctcttggctaccgcgcgccatccttcctcatacatattaggacggggaaagacacgcttgggca

SEQ ID NO: 87328 - DNA, 346 bp, Glycine max
  unsure (1)..(346): unsure at all n locations
agcttgtgcnatctttcctattgaacaaggcccccgtctcttctagaaacttacctgcagaataaaatctattttgctttaacaggccgtatattatgctattataaggatagatttttcctatagagccttctttgctttcttgcatcaactccgaagtagaaaaaccatgttcaatctctgcttatgaacacaaacactgtattattgagtcaaaagctacacatgtccatatgagcccatatatttccatatcattaagatgatcaagaaccttcccattcctacacagagcatgaagcaaagagatgtgaaccatagggtttggggcaacccctcttgactt

SEQ ID NO: 87329 - DNA, 315 bp, Glycine max
tgctgaatcacctctttgagaattagaatgctatcaccgacgagatcgtcctaggagaaagacgcctgcctctcatcaataagccagataccacatgtgtcaatctatttgctcataacttaactatcagctttgtcatacacccaaccaaggagattggtctactatcatcaaatgcctgaggatgatcaaattttgggaagtagagccagaaacgaagctttactgcctctagggaagctgccgtgcacatgaaactcatctgctgatcttctcaacactgttttcaccattccgcaaaaaactctaaagaaa

SEQ ID NO: 87330 - DNA, 356 bp, Glycine max
agcttgtactccagctcctttatttgggatatacaacgattaatcgccaatgaactagtactactctggtttaactgtatgggaaaatcgtgaccccagacccaaaatttacacctcctatctgcctgaaaattatacgacagaggcaaatcacagacgacaaacaggaagttgaagcacaaaccagaaaccatcatacatataaaaacaacacacactgaatcacaccagaaaccatatttgcaaagggaaacttttcttaccttacactcaacacatcgtcaaaatatcttgtcacggtgcttcttggttcgagatgttagatgaatcgtgggagtatttcacaaacaatggac

SEQ ID NO: 87331 - DNA, 374 bp, Glycine max
tgctgaaacattctatacggagacttagaagttaaagtcatatgacacaacccgaaggttttttctctaccgatggggctcacttggtgtgcaagctcaagaaaacaatatatggactacaacaggtcaatagtatttgaaattccgtagtgtcatctcatcatttggctttgatgagaacagtatggatagatgcatataccacaaggtcagggagagtaaaacaacattatcagtcttatatgtggatgatatacttcttgcaaccaaagattttgggatgttacatgacataaaacaactcctttctaaaaagtttgacatgacggatatgggtgaggcaccatatgtcattgcatagagacccctacaaa

SEQ ID NO: 87332 - DNA, 331 bp, Glycine max
agctatgtccgcagaaactttttgtaattttatgcctagactaaacaacattattgtaacaacataattaaaaccaaaacttaatccgcagatccctcttgtaagactaagcttcaatcctacttcaatcaagttttaaggcaacagtacattttccaatgctaaagtcacctaactatgcacacaaatggatgatcaaaccaaaaacatacaaacattaagcattgaaggaagcattgaacacaaaaaacataatcaattagatattaagtatttacaccagctgttcattagaaatccccaactagggtgtttagccagccattacaaa

SEQ ID NO: 87333 - DNA, 373 bp, Glycine max
tgccatggtggttgctaacctccaagcccttttgtggagtctgggtccaagcttgaggagtctgagatcagggcgttcaaagagagggatgccaacacggatctatatgaggagctgctactgttcacgaaggaagccatggagcaacacggaaagggcttttacaaaggtcatcaggttggtcaagttcttccacaaagatcttgactttggtctttgtgatccatttaacgacgtgagggacgatgaactgcttgatgaaaaacaagtggatgtcgcggatgacgatgccatcgaagagcaagatgttggggccaatgtttaagctgctctttctttgttcttttatatactagagtttgggccataatgg

SEQ ID NO: 87334 - DNA, 284 bp, Glycine max
aaagtgcaatgggtgaaaactttttcacacgggatgcttcgaatacatatcgccagtcacatagtagaggacgcaccagaaattgaacaacgaaaagctctcgaaaaattcaaagggacataactttgtacactgaagtttgaataaggcttataatatatcgagaagctttgaactaaacattcgaacctctcgagaaattcaaatggtcataacttttcacacaaagggcagattccagcgtataatatgtcaagaagctctgaattgaaccacggaatctc

SEQ ID NO: 87335 - DNA, 388 bp, Glycine max
  unsure (1)..(388): unsure at all n locations
actcaagctagagctaatcaagtcactcccgcattttatctatagcattcatagtatgtnggtctcgtcctttgtcacgggaagcccgaaggagcatatcaccttcttaattgtacacatggggcactgcgcccccaaatgcgcacctaagaacagataaatatccgggctctcgtgtccgtaaaatgcattcatatcatgcaccacataatcatgccttcataacatcataatggacatatcctgcatttgtccgttatcatattccagcctcacatcctgcatgagtcatggcatcatcatgcatatgcgttcaacaaactttttgatctgcagaattgcataccatctgttttcatgtatgctcatccttgcgttttcctataca

SEQ ID NO: 87336 - DNA, 350 bp, Glycine max
  unsure (1)..(350): unsure at all n locations
cccgggatccttaagcactgcggctgcagcttcacacagcgctttctcttggcctaaataatngatttattcttactacttgggaagaaaggtcgggtctctatatattttaaataataattttaaaaaaagaaaaacttaaaagttaaaaaataataaaatcatataaataaaagtaactaaccatgtaagagattaatgttggttggagatctgagaacattattgtgagtatacttttaattaatattctattttttcgaagaattaatcttaagactttttgactatgaagatattttattataaaagaagctaataatataaaagtatgggatatttattaaaga

SEQ ID NO: 87337 - DNA, 340 bp, Glycine max
gaaaacaacgaaactttttcacgatgggcattctgaactataccgaccgacctttttttcttgggctccaatccggaattgtttgctttaagatattgaatatgtgggtgctgaatttgaatctacccatatgctcaccaatttgtgtacgttaaaacccatttactataccttgatggagccatttaacattcagtataaagggtaaagaccatggttttggtatgtgatgggcacaaaggatctctagaggtgttccgacaatatactagcagcattgaattttttttaattgctactcactctgtattttcaacactcctggtgttgagctattaat

SEQ ID NO: 87338 - DNA, 328 bp, Glycine max
agcttcaacattcaattaggtatcgtctcttaatattacgggactcaatcagacatccgagtaaaaatttattgtcgtttgaattggctcagagcttcaacattcaatttcgagcgtctcgatatatgacaggactcaatcagacatccgagtaaaaagttattgtcgtttgaattagcttagagcttcaacaatcaatttcgagcgtctcgttatatcacgggactcaatcagacatccgagtaaaaagttattgtcgtttgaattggctcagagcttccacattcaatttcgagcgtctcaatatattacgggcctcaatcagaca

SEQ ID NO: 87339 - DNA, 375 bp, Glycine max
catgctctaacaaaaaggctcagatactgggatgtctgattgagtcctgtcatatatcgagacgctcgaaattgaatgttgaagctctgaaccaattcaaacgacaataactttttactcggatgtgtgatagaggccggtcatatatcgagacgctcgaaattgaatgttgaagctctgaaccaattcaaacgacaataactttttactcggatgtctgattgaggcccgtaatatatcgacacgctcgaaattgaatgttgaagctctgagccaattcaaacgacaataactttttactcggatgtttgattgagtcctgtaatatatcgagacgctcgaaattgaatgtggaagctctgagccaattcaaac

SEQ ID NO: 87340 - DNA, 336 bp, Glycine max
  unsure (1)..(336): unsure at all n locations
agcttggtggagatngagcatatttgctcttgagtggcatggattgggagagttgagacatgaaatgtaatgcgacttgcgaatcactacaaacaaacaccaaagcctttggagtggaatcgggtttgagaataatagaaaaaaaaaaaacatgaaaatgaaaaacaaattgaaggagcgtgcaatactacaactgtacaactaagggtgtgcgtgggttgtctttgtttgtgggtggggcgtgcatgctcacgcgtggtcgggtacctggataatttggtttgcaagtattttgtatttgctccaataagtacgtcgttcgaagacttattttat

SEQ ID NO: 87341 - DNA, 302 bp, Glycine max
gagcccagttgtgcgcggccaactgggatgatgactttatgccacaactgccgttgcagctaagtcacttgctccatagcccaaccttcacctaataccacatgtgaaagggaccccatagtcctacaaactcgatgtgaggacgcgtagaagggtgacacgtcctacttatattcgttgaccatacagcggtaccgacagatatggcgcgcgagccacgataccatggggacgttgtgagcgtggcaaatgccgcgggccatgctcgaccaaatccgacgccacacccgcagggtcaggca

SEQ ID NO: 87342 - DNA, 326 bp, Glycine max
  unsure (1)..(326): unsure at all n locations
agcttaaccattttgagcagtatctaaacanggngtttaaccactcaagacagaaggaaaacacaatctttgaatgcttaaccactataaaggcagaagcaacacaacaatgtttaaccatccatggtagaagcttgacatcaatgcttaaccaccatggacagaaacttaatgaccctttttttttcaatagtagaggttcttgaccagattgaaccccagggacaacaattgcttcaaggatagagacaaggaagaagttgctggacaacaggatcaacaaatgacctaaagtagggttcgtgaccagtttgaacccctaggac

SEQ ID NO: 87343 - DNA, 369 bp, Glycine max
tgcatgatctacatctccctctttatcaatcaaattcttcttgatatcatccaaatcttcatgatttacaaaaaggtacgtattattgcattactttccttaattttttaaatagtgatcaaggggttcccatggaccctaagagaataaaggacattcctgattggcccactccaccaagtataacggaaatctggggctgccatgacttaacaaacttttgcacaaggtttgccccatatttttctatacttgtaacaccactcattgagttggtgaggaaccatgttccctcatgggaagatgtccatgaaaagggttttcagaccttaccctactctaacatatccgacaccactaatacatatg

SEQ ID NO: 87344 - DNA, 325 bp, Glycine max
agcttgagctgatcgctaattttttgacgaactaggtctgttttgtgcgttaaatgaactgttttaatcttcaacttttttaaaaaaagttttttctgcaagttcttgcatcaattttcattcaaagcacttataaatcttctttctcttgactcctgctagtcaataattaaaatgatattaaaattctcattattcaattaaaaacatcagtaaagtagataaattataattatttttaatcaaaattgactatcaattaaacccaaatttctcaattatcaaaattaacacttttcacgacgcgacctacaaaaacggttgg

SEQ ID NO: 87345 - DNA, 368 bp, Glycine max
  unsure (1)..(368): unsure at all n locations
tcagcctcttcgaccccggagacgccgactccgcagcgggcggcgacggccgataaccaacgtcgatctcggcgttctccgaaacataacagtctcgcagcaattggtgatcaagcatttctacaccgttcgaagaatgcaagaaaagcaaccggttaaccggaaccgctacggtttacatctcatgaatcctctccttcagcctcaaaacggtgtcgctgttcacgtccacctcgagagggatgacgtgcgttttggacgcggttttcacgttgagctgaattttcgtgtgcgtggaattgacaactaagtacttactattctcctcctttntgggggtcacttggaactgaatgcgtgtgttgtga

SEQ ID NO: 87346 - DNA, 323 bp, Glycine max
agcttcaaacttttttttacttataatctaggtatccaaaacccctcaatttaatggattttcaaggtttgagaagtgaaattgagaatggggtaaatttggagtaaaacctcacctcacacaagtttataacatcaatttaaacttgctcaactggatttacacctaaaatttcaccgaatcaaaatttgactcctcaacacccaattttaccctaggaatggctctttgttcactttggccatttgtttttctctcttgcacagcccaaactttctcataagtcctaaacgacatttcaaactaggattaactccctttaa

SEQ ID NO: 87347 - DNA, 375 bp, Glycine max
ctaacagactggctgagattctgttgagacataagcgcttacacaatgaacgaaagctggagttgctgcacatgatgtccaacgttatgtcaaagaataagatcgggctgcacaatgcacaaggcaagataaagtgtcaaatgaagaattgaagctgcaggattcacgatgtcggatacaatgtccaggacatcctgcctgaaaatactggaattgctaaaagcattgaagctgcatgatccacgatgtccgatacaatgtccaggacatcctgcccgaaaatactggagttgctaaaagcattgaagttgcaggatccacgatgtcggatacgatgtccaggacatcttgcccgaaaatactggacatataaat

SEQ ID NO: 87348 - DNA, 317 bp, Glycine max
  unsure (1)..(317): unsure at all n locations
agcttantaaaattcatatattttattttctngaattactagctgagggtgaatatataaaattaagagcttttcatgcagggatttcccatatgtctaatgcatgatatatgattttaagtgacaatattgttgttgctctaagttccaagtagaataggagccttgcaagattgaccagccaagtattgagaagccttgcaagcctttaggaggatgcattaaagtggtataagtcaacatcgaaattgtagttgatagtgattgttagcaatatgctcgaaacccatacaagcaagcccaagaggaatacggcg

SEQ ID NO: 87349 - DNA, 354 bp, Glycine max
gaactgaactgacggagcacatgccgagctagctttatccggtctggagcgctatgacaatatgaatgatatattttattacatcggtttgggttgtgatgccgcttaatattgtgaatttgtttggagctgactgtgggaacctttttatgttattaaaacgatggaactacatatgcctactggagtgagcgagcaatccttgatgtggcctgctactaggtaagaccctatctcctggagggagacatatttcggggccttacgctctgactaactgtccatagctaacttgtgcaacagagttgcgctgatgcgtagtattacgcgaaaaggaattaatatacttttctt

SEQ ID NO: 87350 - DNA, 327 bp, Glycine max
agcttgctctcttatggctttttgcccggcggcaggttttgctatccgagttcgatataggctacggcacccaaaaggcgataaaaggaagcgctttggtagattatttggctctgcagcctctcaacgactatcaacccatgcattccgagttcccagatgaggacatcacggccttgtttgaggaaaagttatacgaggactgggacaagtggatcgtgtggtttgatggagcggcaaacgttctatggcatggcattgaggcagtattggtctctacgtgtataccctaatttcgtccggggacctttgctcgatgacgtgcga

SEQ ID NO: 87351 - DNA, 307 bp, Glycine max
  unsure (1)..(307): unsure at all n locations
agctttctttnagttcttctcgcnaaaaactgagctccggggtggtgcgagcccttgatggtactcggcgggaagtgatgggggaaatcgacgttcccattcagataagcccccacacttgcaatgtggtgtttcaagtaatggatataaaccccgcctatagctgcctcttgggaagaccttggattcatgccctgagagtggtcccttcaacgctttaccagaaattgaagttcgcactgggtggacttttaatgatactgtccggtgaagaggatatgttattgagctgtccctcctccgcacc

SEQ ID NO: 87352 - DNA, 266 bp, Glycine max
ctactggttgctatgtttcctaagaacccgagttgagtatcgctaccccatagagcattcgggaaattttgttgcggccgtactcttccttgcgagccctcttggtctctagacaagggcttttgcggaaattgcattttcttaccgtaacccggcgcacttcttccgaatgtgtgtagcagccaacttgaacttctgcttggcgagttatggctttcctaactcgcttttgagagtttggacttccttgtcctcttccggcgctt

SEQ ID NO: 87353 - DNA, 315 bp, Glycine max
  unsure (1)..(315): unsure at all n locations
agctttgcatccttatgatgttctatgnggaaaatgatgttggcaaggcatttcgattaaagtgttcattttttaacaccattgcacaaatttgggctagcttcctatttttcaaacattactccaacaaacccaccaaagcctctcagattcccagctctaattacggctctttgtgtccaccaaggagtaactttcaatcgtcttccccttctcaacctcaaggagccaattaacttgcactatattgatcaacattgttgcaatcctatggaatttgaagaaaagcaaccccgaatcccttttgctattgaa

SEQ ID NO: 87354 - DNA, 369 bp, Glycine max
tagccaaaacatatatttatcaaagagtacttgcttctccataatgaaccttaagaaaatcgctaagtatattagctactcacctaaataacccaatcactgacttctaccactgttaggaaggtcaaccactgtattttccacagaacctaagcatttaaataatagaacaaaggattagacaaaatccccaattagcaaacctagggttttgagaaaatcacaataatctctaacacttagcttctaactctttttctcacagcccatgcctaatcagtgttataacatactcatctagcataacgggtcataaacatttaccttaaagagatcaaatagaaaaaccaaagaaatgcgtagtgtttt

SEQ ID NO: 87355 - DNA, 334 bp, Glycine max
agcttgcctgtccgatgcagtagtaatgattgtctgagttatgttggggaacggttacgaacccgaaatgggtttaggcaaagacaacggcggcataactagcctgataaatgccaaaggaaatcgtgggaagtatgggttaggctataagcccactcaggcagatataaagagaagcatcgcgggaaggaagagcggtagtcaaagctcgtggttgagacaagaaggtgaaggaagcccaccctgccacataagtaggagctttataagcacgggtctgggggacaaaagtcaagtggtcgcgatatatgaagatgatgttctgagtacattg

SEQ ID NO: 87356 - DNA, 382 bp, Glycine max
tgagtaaggcacccctttggtttgaagactcgttcttgttgagaggcatccacataaagttctccacagaaaatgctttatcttgggaggtatacgaagattccatatagtggaccagcttccttgaactttgagagcttctttgttcaccatagtctccattaaaatatgataatctgatcaaaccgagtatgtccccatggtactaactttcaaaatcaaaatatcagaatcatgaagattgaagagtggcatcatctttatttcttgggaatcttctttattgaaaaattgatcagtaacctcaatgttccaactattgctttcaacatcaataagcgaatgtactgtcaaatgttcaagaccaaaaagaggtaaggac

SEQ ID NO: 87357 - DNA, 332 bp, Glycine max
  unsure (1)..(332): unsure at all n locations
agctttagatgaggangaattgttaaaatattgtattaatcttgaaaagtttttaaggtttaatgaatactctgatattgatggtcttgatttattttcagaattgaaagtactaagagaagtgttaagagaagaaattagcacaccaatagaagtattgagttatattaaaactttagattcttttccaaatgtttaaattgcatatagaattttattgacaatccctgtaacagttgctattgctgaaagaagtttttcaaaattaaaattgcttaaatcatatctaaaatcaacaatgttacaagatagattgaatgagttagctattt

SEQ ID NO: 87358 - DNA, 383 bp, Glycine max
caaacttcccactctctcacaatcgaaagtcgagctccagaccatgctacctgctcaaggaactgctctacatttgtaattggcctttggtgggccaattcttgcaggctctgcataataataacctgtccctggaataagctttgcaacataatgactgcagtttgggagctctgggcatctggtcctgttgatgcatatggaggagatggagtggatgatgaagggatgtcatttgctctggccctggttttcctttttcttgatgccatttgaaataaaaagaactcacaattcacattagaccaacatttattcaagttaataaaccacaaagaaaagttgagattaactatgagtgcttagtggaatatggctcgctt

SEQ ID NO: 87359 - DNA, 328 bp, Glycine max
agcttcaagaaaaggccaaatttattctgttttcaggcttaaataggtggctttgttcgtgctcgtgtgcttagcgtgattctgaaccgcttagcgcgcatttgtgaattttggcttagcgcatggttttctcactcagcggatagactgaagcggtgcgcttagcgagatgacccttcgctcagcgaatatgcacagctcatccttcttccagattcttcctcgcactcagccgagatgtgttgcactcagcggatggctcgctaagccagaagattggcttaacgagagggtgaaaatcagcacttcaaaacttgcctaattaacc

SEQ ID NO: 87360 - DNA, 397 bp, Glycine max
gactcttaaactcagcgtgaaatgaatccatcagtatgatgaagctattgatgaaatcaaactatctttgctagagctattgaagaaatcaaactatctacccatgatgatagagaaaaactcgccaatggcaggctagaaatgggtctgacagttaatgatatgatgagtcattgaaaaaagcttattgctcaggaagaaagttcacaaagtattgctagctcaactttgtcctacttaaaataaactgaatgcaattcgtcaacaaattacagacattcgatcatctaaagagtcgaatgataaacaaaaagaaatgttgtattcggtagctacttacaatgcattaattttcaatgaacatctggaaaagaagctataagaaattattttgaac

SEQ ID NO: 87361 - DNA, 327 bp, Glycine max
  unsure (1)..(327): unsure at all n locations
agcttctcgatatataaggttctcgaatttgacatcngggggaagagttatgaccatttgaatttctcgagagctaccgtagttcaatttcgagtatctcgatatactattttcccaaatcggatatccttgtaataagttatgaccattcgaatttctcgagatcttctgttgttcaatttcaagcgtgtcgatatattatgtcctctaatcagacatccgagtgaaatagtatgagtagtcgattttctcgagagtttccgttgttcaatttcgagtgtctcgatatattatttccccgaatcggacatccatgtgaaatgttat

SEQ ID NO: 87362 - DNA, 362 bp, Glycine max
tagccctgccccaccatatatttgacggacttctgaacactatgaatgacaaattccctgggaaacaggtagtgttgccatgttttcaaagcccgtactaatgcatacaactcctaactataagttgaatagttaaaggtatgaccacttatcttttcactcaaataagcaattggatggccttgttgcatcaacacagccccaatcccaacatttgaagcatcacactccatttcaaaagatttttgaaagtttggcaacgcgagtatggcggcattagttagcttttgcttaagaacattgaaagcttcttcttgtttctctccccatttgaaaccaacattttcttgacacttattgag

SEQ ID NO: 87363 - DNA, 324 bp, Glycine max
  unsure (1)..(324): unsure at all n locations
atccccccttgaaggaagagatttctcttcttgagctcatancatgggcttgaaagaggagttagctgcttgctctagggccaatataaacttgtctcatcgtttatgcganacagagaccaacatgttagccatcgtcagcaagtaccgagaagaactaaatctaaccacggcccacgaacataaagtggcggacgagtatgcccaattgtatgcagaaaaggaggctataggaagggtgatcgacttgttacatctagaggcaacaatgtggatggaccaatttgctcttaccctgaacgggagttaataacttccccgatt

SEQ ID NO: 87364 - DNA, 320 bp, Glycine max
  unsure (1)..(320): unsure at all n locations
agcnngaagatatgcttttttttgaaaaaaagaagaagggggagcacgaaatggaaggaataaaagagggagagaagtggaactttgaagtgtctcataagactttcattcatcaaagttacaacaagtgttacacatgcttctatttatagactaggtagcttccttgagaagctttcttgagaaaacttcctttagaagctagagcttagctacacacacccctctaaaagctaagctcacctccttgagaagcttccttgagaagctagagcttagctacacacacctctctgtagaagcaagcttcatgatgaatc

SEQ ID NO: 87365 - DNA, 370 bp, Glycine max
tctagacattgctctgatgtaattggtcatatacttcttgcatggacatgacctaatgttcattctccatagcatcatcagagtgttatggttctgtctcttagacgagtattgtctaaccttgttgtctgggggatgcccttgtttggaccttggttaatgagtcaccaatggttgaggatccaatcccatcatctactctgagatccgaaataaaatcattcaactctgatctttttgtattaagcttgatgtcatcaaacttcacattgatagcttacttaataattaaggttctagagtcgtatattataagcataatgtctctttttgcgcattatgttttgtagatgtttcactttactacatt

SEQ ID NO: 87366 - DNA, 325 bp, Glycine max
  unsure (1)..(325): unsure at all n locations
agctnagcccttaggggattgaccttttcaggtctctgagaggatcaataataatgcctataggttggacctcccaagagagtatggagtcagcaccacttttaatatttctgatttaattccttttgcaggtggagctgatatagaggaggaggaaccaacagatttgaggtcaaatcctcttcaagggggaggggatgatgcaatcctccctaggaaaggaccagttaccagagccatgagcaagaggctccaagaggattgggctagagttgataaagaaggccttagggttctcatgaaccttagggtagatttttgagcc

SEQ ID NO: 87367 - DNA, 376 bp, Glycine max
cttcctctctaagcttcttatccaaagcactctcttggtggtgaagctcctccttacatggcttattccctagtggatggcacctccccctacctcttctcctttatcttccgctgcatctccatggttgaaatccaccattaaaggacctcattgaagctcaaagatctagcctccatagaagcttttcaagcaagcttccatcagtctatctttctgagattgtagatagtttcatgttgaatggtacgaagacttagcaagcgtttgatgatagagtagctgtcagcatccttggtgaggcacgaatagacatcatcaaagtgatacatcctgactaaatgcaacacttgaatgaagtcatggtgatcagtgt

SEQ ID NO: 87368 - DNA, 320 bp, Glycine max
  unsure (1)..(320): unsure at all n locations
agccanacgattgtattggttgtttaaacataactactgtatttgtctaattataattgaagcatctaattctaaaaaaatagttactataagtcaaaaaatgtcaaatatttacagatttatcgtacttttttatatataacaataatatagtctgaatataacattccgtataaactacccaaagctcctaagtttttatgtctaatctttaaattaaccttttaggttttcaaaaccaattttgtttattatactttgtcgtaattaagatttaagatgctggctgacagatttacaacttatcttgagtccacgtg

SEQ ID NO: 87369 - DNA, 376 bp, Glycine max
ctggattaaaatacaggagtgtattatattttattgcgggccgaaaatacaagatgtagtcatttcttataaccatgcgatcattacttaattatgagtgtcttactataaaatgacaggaatagacattaaatacataagaggctgtgatatatacgcatgattgggtcagaatgtatgggacttgaagggcggtccaaagctgcagaatctgtggaaatagatgtgggcccaattctttgaagaactcattctctttcatgctaagctgtctcctatatggacacttttcaaaatcctaaaataaacagtatgtctgcgcgtgttcttgaaccttttatgtgccccagcagattattgtaatattcatccatgt

SEQ ID NO: 87370 - DNA, 320 bp, Glycine max
  unsure (1)..(320): unsure at all n locations
agcnncaagaatcttactgttctgctttatcngagtggagaattgtccatgcagctttacactctaacggagcttcccccatctcttgaaactcttgaagccacaggctgcgtatcattgaagactgtactgtttccatcaattgctcaacaattcaacgaaaataggagagatgttcgcttttggaattgcttgaatttggatgaacattctcgcaaggctattgggttaaatgcacgtattaatgcgatgaaatctgcgtaccaacatttatctgcaccggatcaaaattacaataattacagtcgcaagtacagatt

SEQ ID NO: 87371 - DNA, 338 bp, Glycine max
tttctcttatctgcaggatttggagctcgcgttgacattcaaaagatgagttcaatgcgttgtcacacgtggacgataaatctaggtcaatcatattctctgatgccactgaaaattcccttatctctttgcatgactcatgggtgagatatctaacagagcttatgggggtcttgctgagaacttttctaagggaacagtatgttacagacaatctctcaagcctgttgagagagaaaatagatggagtcacactagtcaactgatgacaacaattgatctccagcacttcaagatttgtgggttatgaaaggtctggccgctcgttcaagttttga

SEQ ID NO: 87372 - DNA, 332 bp, Glycine max
agcttcaagaattttactgctctgcaatatctgagtgtagaattgtccaggcagcttcacactctaacggagctttccccatctcttgaaactcttgatgccacaggttgcgtatcattgaaaactgtactgtttccatcaattgctcaacaattcaaggaaaataggagagatgttcgcttttggaattgcttgaatttggatgaacattctcgcaaggctattgggttaaatgcacgtattaatgcgatgaaatctgcgtaccaacatttatctgcaccggatcaaaattacaataattacagtcgtaagtacagattttatcaggtgaa

SEQ ID NO: 87373 - DNA, 361 bp, Glycine max
gttttgaagcttgaaggcaagctttcgatgtctctttctcttagctgcaggattttgagcttgctttgacatccaaaagaagaattaaatgcattgacacaagtggacgatcaatctagttcaatcatattctctgatgccactgaaaattcccttagctctttgcatgacatcagggtgagatatctaagagagcttaggtggttcttgctggtaatttttctaagggaacagtgagctacagacaatctctcaagcctgttgagagagaaaatagatggagtcacactagtcaactgaggacaaaaattgatatccagcacttcaagatttgtggcttctgaaaagtctggcagctcct

SEQ ID NO: 87374 - DNA, 320 bp, Glycine max
  unsure (1)..(320): unsure at all n locations
agcttgttaacttttgacattctatgactnagnccaactggacaagtaacatgtctaaaaacctctttaaggataagctcaatatactggtattcaagtatactcccgttcctgctgggagttaaggtgaagttattacactaaataactcatggatgacatttataggtttacctgaatggatagatatacaatgatttaccaaccaaattggattaagatttaaaaatatattttgttgatatttttttcattgacttgtaactttaaattccatgagattctttcaaatcttacaacatcattaaaatgtaaacaat

SEQ ID NO: 87375 - DNA, 358 bp, Glycine max
taagctgcttcactgcaactgatcttttatttgaagagtatccatggggaaccttcacctgacaaagacactgacaaagacttatcttctccttcttggacaaagtatggtcggctgggggcaagtaaattatgttcccatcagaccttggatgcaactgggctcttatacccatatcagctagatcttgacgggtattcaagccatccttcgtcttgccttgaatgttaaagagcgtaccaatcacattgtcacaaacatttttctccacatgcataacatcagatacaatgtctaacgtcaagatcacaccagtacgaaagatcaaagaacatggacctcttcttccatatgcaac

SEQ ID NO: 87376 - DNA, 318 bp, Glycine max
  unsure (1)..(318): unsure at all n locations
agctttactaagcaaagagttttcaangaaaattccttcatctgacttagcatcaaactttcctaagttttcttttccattgtttaatacaaaacacttgcaaccacaaatatgaagatgtgagatgtttggtttcctaacattgaacagttcatacagagttttatttaaaatgggtcttattaaagccctattcatgatatagcatgcagtattaatggcttcagctcaaaaatattttagaagaggagtatcatttaataaagttctagcaatttcttccaaagacctatttttcctttcaacaactctattttg

SEQ ID NO: 87377 - DNA, 314 bp, Glycine max
tgagggcgcaaatattctaagaaaggggggtgaattaataaattgcacactgggtgcccttattaaaaatctattttactttttacccaagttatgaatttcctttatgacaatcttcttaaataattattctaatgaagcctcctgaatatgaatataaagctattatatataaaggagattgatggaagagaaaatgcaaactcagtatgatactggttcagtcacacccttgtgcctacgttcagagccctagcaatctgcttgagaattccactatgttgtggagtccttttacgagttctaatcacact

SEQ ID NO: 87378 - DNA, 328 bp, Glycine max
agcttttgttctcttagaggatgaaaatctggatttttgcaacatgtttgctcttggaattgaacctgaatatgttacgaacccaaatctatggccaaacaaaccagaaaaattcaggtaacatatatactacttccatatatttttagcacgaagcgtggttccttaggtggtttagtgttgttctcgaatcaaagttggagttttacttcaaaaacatatgctaaccttaaatgtaaatatttattacacgaattatcaacatgaaactccagctttgattggaaaacaacactaaaagtacttaagtatctaacgaaccatatct

SEQ ID NO: 87379 - DNA, 383 bp, Glycine max
ttagacctttgatcgcatgttggcatcacccacattcttgttcttgttagcttcaaacttatcaattgctacctgcagttcattagtgcctccaacagccctcatggtgtagaagtaggcaccaaagacaaaagttgtcaaacccccaacaactaccaaattctttgccttatgtggaaggctcctatatcccaaaagtccagccatcttgatcaatgggggaaaaagggttagcacaatttcacacaattacaattaccctttgctgatgcatgcatactgatttttataggttcaatgctaaataaaatcctgaattaaaaatgttttaaaatcaattacaaagttcaatgctaataaaatcccgaattaaaaacgttttt

SEQ ID NO: 87380 - DNA, 344 bp, Glycine max
  unsure (1)..(344): unsure at all n locations
accgccgcatgcaagcttgctaacccanggatgtttctaatttcttccacactttttggggtgggccattcttggatggccttgattttctcagggtccacttggaccccatttctaccaactacaaaacctaagaaaactatattatctacacaaaaggtacacttctctatatttgcatagagggtgtttttcctaaggactgaaagaacttgtctgagatgtcctaagtgatcatctaggctcctactatacactaaaatatcatcaaaataaacaactacaaatctacctatgaaatcccttaagacatgatgcataagcctcataaaggtgcttggtac

SEQ ID NO: 87381 - DNA, 378 bp, Glycine max
tctgcggacttcactttcgatctcaactgtaccatattgaaaaacattagtcaccacaaaaggaacaatccactctgacctcaacttaccactcatgagtctgaacctatagttatacaataaaactttatgtccaaccacgaagtccttcttagctattaagctgtcatgaaacttcttggtcttttccttgtgaaatatggaattctcataagcttctaaacggatctcatctagctcactaagttgcaacttcctttcctttccagcctgatcaatagagaagttgtaagtctttacagaccagtatgctttgtgctctatctctacaggaagatgacatgccttgccaaagacaacccgataaggagacattcc

SEQ ID NO: 87382 - DNA, 337 bp, Glycine max
  unsure (1)..(337): unsure at all n locations
gactctgcggcatgcagcttagatgatnatcttatatttccaactttntgtatgtttaaatgtattgctcgtaatattttacatttctctagttttatttcctttagaatatggactaggttagtaatgtcccatctcatgaatgttatcccacttgctctttcttttcatttagtttatgcttattattttgggcttttgctttaggttgttgctcatatgatgcctgatcttccaaatgttggtgttgaaagggacatggaaagtttccgggagttttttgagagtcccttgtttagagcagatgggcttaaaatatatcctacacttgtaattc

SEQ ID NO: 87383 - DNA, 326 bp, Glycine max
  unsure (1)..(326): unsure at all n locations
agcttgccgccacggagtttttttatgctctngngggnggaacaagctacaaaaggagagagcaagaaatgaagagccaatggttgatacatggacagagatgaaaaagatcatgaggaagcggtatgtgccggctagttactcaagggacttgaaattcaagctccaaaaactaacccaaggcaacaagggggttgaggagtatttcaaggaaatggatgtgctcatgattcaagcaaatattgaagaagatgaggaggtaactatggctcgatttcttaatggtttgactaatgatatccgtgatattgttgagctgcaggagt

SEQ ID NO: 87384 - DNA, 368 bp, Glycine max
acacgagctctcagattttaatggttttactgatcacacaggagtccgattgaggggcatcaatatgtcgaagacactctaaattaaacaacgaatacactttagcaaatcataagctcgtaacttggcacacggaattactattcaggcgcgtaatatattaagacgctccaaatcgaaaatcggaagctctcgagaaattcaaatggtcataacttttcgaaccgaagtccgatttaggcgcataatatatcgaaaaggtcggaatcgaaccacgaatgctctcgagaaattgaaatggccataaattgtcacacggaagtgctatttaagcgcataatatatctacacactccaaattaaacaac

SEQ ID NO: 87385 - DNA, 249 bp, Glycine max
ataacttatcacacgaacattctattcatgcgcataatttattcacaagctccaaattgaaatacgtttggtctcgagaaattcaaatgttcataacttgtcacacaaaagtccgattcatgtgcattatacatcttgaagcttgaaattggacatcagaagcttttgacaaatttcaaaggtcataactcgtcacacaggaaggccgattctggcgcttacatatcgagacgctttaatattgaatac

SEQ ID NO: 87386 - DNA, 321 bp, Glycine max
  unsure (1)..(321): unsure at all n locations
tgtctcgcgagcctttgctgttcaatttcgagcgtcttgaatagtatgcgcctgaatccgacttgcgtgtgataagtcttgaccatttgtgattgtcaagagcttccgatattcaagttagagcttctcgaaatattatgaacctgaatcggactgtcgcgtgacaagttatgaccatttgaatacctaaatagcattcgaagaacagtctctagcgtatcgatatattatgcgcctgaatccgactgccgtgtgacaagtcaagaccatatgaatttcttgannncntccggtggaaactcctagcgtctcgatatatta

SEQ ID NO: 87387 - DNA, 338 bp, Glycine max
  unsure (1)..(338): unsure at all n locations
ttaaccaccgcagctgcaagctaaaatcttacctatgtgaaaannagcatatatgaaattatcctatcatatcctaaattatccctagccttagttttcctattttcccattatctcttaggattggttataacatttccttatcttatcatgatatgattttttcatacttaggactgtgattagtataaataaaggttagtgctcttggttttataaacatatcacatcaacatactgtaacacatatcattacataatagaatagaatattatacaaagcctttcttttctctattctatccttcaatgtctaaaactccacaattaccaacaat

SEQ ID NO: 87388 - DNA, 372 bp, Glycine max
taatcttacaagacaaaaaattatatagtatatacttaacatttgattgatattggttatgtggaataaacttgcaaattttctaaaagagaaacgacaagtctcactttatcaattagagaactaaaatcatggatttgaaaaaataatgaaacaaaattatattacagcctattgtttatgtttccaacataatatttgccataacaaaattaagattctactacaagagaaaactatgaggatttaaaggagatgagaacaaagtatgagccaggaaaagataatgcagcctaaaccaaagcaaacacacaattagcaatagcctatagaaccatccagcagagtaaggaacaacccacaatatccaca

SEQ ID NO: 87389 - DNA, 322 bp, Glycine max
  unsure (1)..(322): unsure at all n locations
agccagnaaattgctcccctttatttaataaagnncagaccagtgtctatgcaagatgcaaactccattctccacctttgggtttatttctcacttaataattatcatcaagtttaaatgacaataaggtcaacaatcaagacctgatttgatgagttgcgagcaactatacaatacaaatagtccatgtgccccttgaataccattttcactttaccagtttcctagaaacattaacatgttagtctagtatcaacacaaatatagttataaataaagtcatccaagaattatattcaccttccatgaatacataattaca

SEQ ID NO: 87390 - DNA, 367 bp, Glycine max
atggggtacccatcacatgtggtactaagtggcggccgggcgatggtgctcaacgagttttacacattcacaatgcgcgcataaacccaccatcccctgttgcccacctccaactgagctcacgtactgccacgtagcccatatcctcgttactatcaacaccgggtccctatcaatccttccaagcttgcacaacatgcaagcaaaacaacattcaaacagcacagctatcacagccaagcataacagagcaaaggcagaaaactctgccaaaacaccaaccaaatcacagcttttctcacttaaagaccccagtaacaattccttcgatccaattcgttaaccgttggatcgactccaaaatttt

SEQ ID NO: 87391 - DNA, 317 bp, Glycine max
  unsure (1)..(317): unsure at all n locations
agctnctaaatatgtttatcacttcngccgctgctaatgtgatcatgcaagaagcacggaataaggactgtatagcttctattagaagcgttattgatttcaacttccaggatgtagatgagcttgtacgtctgatttggaccgcaacaaaagccataagtcgcgctggtcttggtggtactagagattaacttgatcctgtatataatttatttttttggttttactgagatggcattgtgaaaggaagaggctaaaagatatctaccaagactagcacttagaaactcgctaatgtggcaggttgaaggcgatct

SEQ ID NO: 87392 - DNA, 388 bp, Glycine max
tcgacgctccgtttaccatatttggcttatattctctgaaatcatagaacacgttacttaaacaaccattcagaggattgggtcctgtccccacgcttataaacacctcgtctctatactgaactcatctcacaaagaacaccaactgtttcaacttcgaactcccgaaatcgaatcaaactttcccaccattactcactccgaaacacacctcaaccacttcacagcaccacccattcaaggtttcctacctcgtaagcacttgtggcttctccgtagaaaccgctctcaagatctccaagttcacccaattcaaaacccccgaaaaacccgattcaatcatcgccttattcagaagccacagtttctccaacacccagataatcag

SEQ ID NO: 87393 - DNA, 307 bp, Glycine max
agccaaaaaatttttacgtgtgtaaaaggaccccacccacgtttatcatcaaattaaaaacttatcaaataacggtttaaacgacatcatcgacctaaaacaaggctgtcaaaatatattttctttctaccaaatgaaaacaagttaaacagtggaactacataaagttatatattcataaaataatgcaaataataaataatcccatgccccaacgtcaaatcctattaaaacattgtgtaccaatgtactccatcacaatgatccctaaaacaacccacttaaccatatgctttccctaacacaa

SEQ ID NO: 87394 - DNA, 368 bp, Glycine max
tggagatgctcatgttaatgttgttagattttaaaagaattatcttagtcgaaacgaatgaagtgttgtaatgctaccagttctattggacgaaagaagcttgagtgaattgagtgaaccttaactctgctaagttggcaagtttccattgtattcgagcaagctgtgtaaacactccttgagtaattagaatacattttctatcaagcatctatcgtttgtgaaagtcaggagtgacttaatgacaaagaatacttggatcttaatcttagggagagattaatgatagtgctaggagtgacctagaaaatactcgttatagccagaagtaacatagataatacttaattgtaatcaaagatatgatt

SEQ ID NO: 87395 - DNA, 248 bp, Glycine max
gacccgcacgcatgcaagctaagaaattgtatactttttatgttcaagaagcgaacctataagatctacatattccttctcccaccattcacattacgataataaatctttctattcgaatggactttaattgtaattatttttctcaatgtacgttcctgccgggtcttgaaattgaattttatttacactcaccaacatctgttgatacaatattatctgaaattttagggggtattaaaatatac

SEQ ID NO: 87396 - DNA, 315 bp, Glycine max
agctttctgggggtattatttcacgaacttgaataccccgtaaacgacatcatggtcataatcgtaacaccggaaattcaagcgatagcacaagccggcaaggcataaacaataaggccattcttactaataaataactatatccaagcaagaaaaacctggtcatttgttacttgaggacagcctctagttggtgttggtggtctgttaacattcaactcctatatacggtttttacccaaaacaagaaaatgtatgaataccaaaaaagtaaagtgcaaaaatatagctctagtcccataatactgcaaaatg

SEQ ID NO: 87397 - DNA, 260 bp, Glycine max
tataaggtagttttacaaaggagagtttataatctatttttaacaaacatagtcttattttagaggttggcggttggtgatggatgttatggaagtattgatggtaatatatgctcagattaatgtaatgcttattaattgtgctttatgtggatggtatttgagaaacttatttgacttttttaatgaatagtttgtttaaagatgatgtcaataacaataaattttttgggggattttttaaggtttgaaataaaaag

SEQ ID NO: 87398 - DNA, 315 bp, Glycine max
agctttgtacttgaaaaattttatcttttacatctccaaatctttgagtggcatttgtattgatttttgcatcttaatctatatctttccatatgtacatcatgcatcatcatgcagaggtaggaagattgtttctaaagttagaaacttctttagtgcataaaattctctattttaatcgattaccgggctattcgtaattgattacacaattcgtttgaagcttgcaaagagattttcgttcgatttaattgattactagttatccggaattgattatatcgtccagtttagagcatgtctagttttttatga

SEQ ID NO: 87399 - DNA, 365 bp, Glycine max
taaggatggaatacttacttgttggagattaataaaagtgcaaaacggaatcgaagaatgccaaatagtatagaccctaggggttcaaactcataaattccgtggctatggcttttgaaaggggggaaaagaagtttttgaatgcaaaaacgtcccccctttcgtcacttttatattttggtgcagggtttgctcgcccaggcgacctcaactcgcccaagcgacctaacctgcactttttttttttggagaggaacattaaccatgtcccctccttccttatgggttaacgttttgcctaacttgaacttacttaagttagaattaggcgttgattacttatttttaaaacaaacaaatagtaa

SEQ ID NO: 87400 - DNA, 328 bp, Glycine max
  unsure (1)..(328): unsure at all n locations
agctntaaaatttgaattattatgttcagaaactgctggtaatcgattaccatatatgtgtaatcgattacatagggcaaattttgaattcaaattttaatagctgttgtaaatcagttttggccactggtaatcgattaccagagagtaaatttcttgtaaaaaactttttaacttaattttcttggacaaaccttttgctaattcaattggaattcccttcctatttaatataccctttctaagactctatagactgtcttgatcatccatcttgaatatatttaattgctttgtcttgaataaagctttgagacgcatgtgatct

SEQ ID NO: 87401 - DNA, 404 bp, Glycine max
  unsure (1)..(404): unsure at all n locations
cagtagactcttaaactccgctntgctctttaatcgctgatggaggaagttgtaccaatgttgcaagatccaggctagtgtccaaactgaatttggatactaagccccattctatgccatacagacttcaatggcttagtgaagatgaagaggtaaaactgactcatcaggttgaggagtgtttaaccattggaagatacaatgatagtgtgttgtgtgatgtggttctaatggaggcgactcatataatattgggaagaccatggtagtatgataccaaagcatgatggcttcaccaacaagatttctttccagcaccatgaccagaagattattcttaaacctctatcccctagagaagtgtgtgatgatcaaatcagaatgagagaaaagagagaacaaga

SEQ ID NO: 87402 - DNA, 368 bp, Glycine max
  unsure (1)..(368): unsure at all n locations
ncaagctnttctttctcaatcatttctgtctacntgtactaacaattctaattggggaagttcacanttcttggttcttcctttgggtctaacatanccatactttngctcaaacnnttatgaaaagaaaacacnnaaactccattcacaatcatgcccattcaatccnnaaaatcaattcatananncaccaattttctacaaaaagggatannaaagtgtttcacttgcattaatcatgaacagtcaagttaaactattccatatgncttcaaaacaaacataccaactattcacaaaaagtataagtgtataattataaacagaaaccaaaattactcaaaacaatgtactgaactaatatagtt

SEQ ID NO: 87403 - DNA, 381 bp, Glycine max
agcttctacaatctcccccttcttgatgatgactaccttgaaatcaagaaacacatacacacattttttcctagttgatcactcacttaattatccatattctccccctttgttattgagtttaagctctcacttgagattaagtcaattacttatgtgagttcttgatttaatccctatttctctccgcctttggcatcaacaagaagccaaagcgcgtaacaagtataaaacatacatacactactaatcattcacaggacattcattgagtgattgtttgtttgtggagaaaagggagaatctcaagtatactttgtaaagtcgagctagtctgagacccaacatgtctttcacgaaatttgactcacacgttattgg

SEQ ID NO: 87404 - DNA, 330 bp, Glycine max
agcttcagcctgattgctattcgatatcttatccgtggccacgcaggacctattatcgccaaacacaattccgtacagccttaattaaggcccatgatgctaagtgccagtcatggcagctaagcgagattcattgcggcaatgtgagcgctaagagagtccatctcagctaagcccatgctcctctatacttaagatgcagcattttagctaagctggccagagccaggcttagcgagagttgtagcttttctaatctgcagacctcactaagcggacgtaccctcgcacttagccgaatctctgtgctaaaaaaaatctgattttgaa

SEQ ID NO: 87405 - DNA, 377 bp, Glycine max
ttatgcaagggaactctttgctattactgattctatagcatatatcaggccttatctgcttggtcacaaatttgtcatcaagacagatcacaagagcctgacgtcactcactgatcaacgttgttcacacacttgagtaagaaaactggttgcataagttgattggatatgatatcaccattgagtataagctcaagataagagaatgtagccactgattctctttctagatcctttatgatggctatatctcaacctaagttgtaactgattctacaattgagggaagcccttgcacaggacaaacaattgagtctaattatgcaactttgtttgcagaataagcctccaaatccgagttattcggtttctgataa

SEQ ID NO: 87406 - DNA, 293 bp, Glycine max
cccctgagcgaattgacgcagtgtattcacaaaaggaaggaccaaagccattgagggcagtgatgactaggtctaggtcatcaacaaagtgaccgatgagagaaagtttgtccgcaatgattcggattgaacgaagatagtcaccaacactataagtgcttttggaggcgctggaaagatgttccttgagaaacatcacccaagtacgaaagtgattgccatagtgcttgtatatccgtgtccaatcatcggcagaagatgttgcggaagtcatgacaatttgtgcatcaggg

SEQ ID NO: 87407 - DNA, 230 bp, Glycine max
caagttactgatctggagatatttaaagccttaattagcattggagacttgaaatctcccgagatcgatggttatggtgcgaatgtttttaaggctacttggaatactataagaactgaagtgactgctacagtaaaagaattatttgtacatggaggtaaattgcacgctactaatgttggctccaaaacatgatgagacaaaaacaattcgagaacatcgaccaattg

SEQ ID NO: 87408 - DNA, 290 bp, Glycine max
agcttgtagaagcaaaaggccagctatggtgttcaaggtggattttgaaaaggcctatgactcactctcatgggtttttttggattatatgctgcaaagaatgggtttttgccacaaatggagacactggatgtctgcctgtctcaagtcagctagcatttctattcttatcaatggcagtcctacaaaggaatttgctcctactataggtttgaggcaaggggatcctttagcccccttactctttaatataattggagaaggcatcacaagattgatgagggaagcag

SEQ ID NO: 87409 - DNA, 387 bp, Glycine max
tgtaagattatggggtacccatcacatgttgtactaggtggcggtcgggcgatggtgcacagcaagttttccacgtccacaatgcgcgcataaacccaccatcctctgatggccacctccaactgagctcacgtactcccacgtatgccatatcctcgtttctctcaacaccgggtccccatcaatcctcccaagcttccacaacatccaagaaaaacaacattcagacagcacaagctatcacagccaagcaaaacagagcaaaggcagaaaactctgccaaaacaccaaccaaatcacagcttttctcacttaaagaccccagtaacaattccttcgatccaattcgctaaccgttggatcgactccaaaattttactggaagtc

SEQ ID NO: 87410 - DNA, 294 bp, Glycine max
  unsure (1)..(294): unsure at all n locations
ttttaatctagnattaaaaccctcattagtggattttcaagggtgagaagtgaaaatgagaatggggtaatttttggagcaaactctcatctcacacaagtctataacattaatctaaacttgctcaaactggttttatgactaaaacttcaccgaatcaaaatttgaccgctcaacacccaatttaccctaaaaatggctcttgctttcacttaggtcactcattttcctcatttgttcagcccaagctttctcataagtcctaaatgaaattttaaactacgattaactcac

SEQ ID NO: 87411 - DNA, 371 bp, Glycine max
  unsure (1)..(371): unsure at all n locations
tggaaggatgcttcntgtttgattagattgaggagagaaagagagaggggggagcacgatagtgaatgaatcgcagagggagagaagtggaactttgaagtatgtttcacaagactctcattcatcacagttacaacaagcgttacacatgcttctatttatagactatgtagcttccttgagaagctttcttgagaaaacttgcttgaaaagcttctttgagaaaacttccttgagaagctagagctgagctacacacacccagctaataactaagctcacctccttgagaagcttccttaagaagattcctagagaagctagagcttagctacacacaccccctataatagctaagctcacccccatgc

SEQ ID NO: 87412 - DNA, 313 bp, Glycine max
agctagagattatgaagtgttgtatggtgaaacttcctgcttttattgttgaccacagagtggtacctggagatatgtcgcgggggtcaggagaccttggggacgtcaggtggggtgctattgcccaaaaccaagcttgaccaatcccgacccaacccgggcatagtcggtcagtgagaacctgtgatgtacctaagcaggcgagctcctggcagtcaacagataaaaggaaaacaagaccacaaagcaaggaggcttgtggtggctggccaactgtgaattttgtgtaatatgtggatggtggcctctggta

SEQ ID NO: 87413 - DNA, 370 bp, Glycine max
  unsure (1)..(370): unsure at all n locations
tgttgaaattgccatgttttgatgagttatacatacctattctgttntagggtttttatgaggatgcttgtgatgttcatgtactgaaattgcttatggaaaactgttagagatgaaaggtagagttaacctagggttagaaagtgagaatgtggtgttatgagtggaaaaagagtgaggctttgagagttgaaaggctacatctggattctatagtaaatggaggttaaaatgagttaatcctagcttgaaatgccatttaggacttatgagaatggttaggctgcgctagagagaaaaacaaatgaccaaagtgaaccaagagccatttctagggcaaaattgggtgttgaggagtcaaactttgatt

SEQ ID NO: 87414 - DNA, 322 bp, Glycine max
  unsure (1)..(322): unsure at all n locations
agctagngcatttcttatccttatgaggatgtcccatatgttcttaaaactggactgattcatttgcttccaaaggttcatggccttgcaggtgaagacccacacaaacatttgaaggaatttcatattgtctgctccaccatgaaacccccagatgtccaggaggatcacatatttctgaaggcttttcctcattctctggagggagtggcaaaggactggctgtattaccttgctccaaggtccatcacgagctgggatgaccttaagagagtattcttagaaaaaaatttccctacttccaggaccacatccattagga

SEQ ID NO: 87415 - DNA, 336 bp, Glycine max
gctgagctgtcttgaaagaagtgcattaacagcttttcgtccatagaatatgcccccatccttcggcgatgcatacgaagatgaccttttggacatgtcgaccctttgtatttatcacaaactggtactttaaacttgggaggaatgatgatgtcatgtaccagacacagatccgctgaatgcgagaatgaatacttgctgaagccttttaccgctctgagcctctcttcaaggagatcaatctttcacttgtcttttgcaatgggaaccagttcctttatgggtgcggatggaaacaagaaattgcggactatgtttggctggggcaacccaaga

SEQ ID NO: 87416 - DNA, 319 bp, Glycine max
  unsure (1)..(319): unsure at all n locations
agcngcttgtatgcttctatggaggccggatctttgagcttcaatgaggtccttcaatggtgattttacaccatggagatgcatcaaaaggcataggataagaagagaggggaggcaccatccactatggaataatccaaggaaaaaggagcttcaccaccaataattgcctttggataaaaagctttaaaaagatgcttttatggaggaaaagaaagagagaaggggcgagcaccaaattgaatgaataaaagagggagagaagtggaactttgaagtgtatctcataagactttcatttatcaaagttacaacaagt

SEQ ID NO: 87417 - DNA, 278 bp, Glycine max
aacaaatcttctcaaggaagtatactcatgagaacttctcaaggaagatatttattctataaatagaagcatgtgtaacacttagaatagctttgatgaaagaaactcttatgagataccattcagaagttcacttctctccctcttttatcccttcaatttcaggctaccccattctctctttcttttccttcattaaagcatcctcttcaagcttcttatccaaggcaattcttggtggtgaagctccttttttcttggctgattccctagcggat

SEQ ID NO: 87418 - DNA, 329 bp, Glycine max
  unsure (1)..(329): unsure at all n locations
agcttcnggtttatatgattttcagatatgtgaatcgattgtagagctaagatgcattcaaaactgtattaaaaaatggaatattcttcgaattgaacattaattatatgttacaagtcctgcttatatggatttttgaaatatgcatttataataatggtttttgccttttaggtaacttgcaatgtacatttgtaataacttaaatcaacttagtttaatagcttatttaactaacaatcattaactcgaaagaaaatatgagaaaaaaaaagctgatatccagtaagctgctctcctacctatgtccatcttaacacaagaaaaat

SEQ ID NO: 87419 - DNA, 365 bp, Glycine max
ctattcaagacacagcaattaaagatatttatgatggatgatcaagacaggctatagagtcttacaaagggtatattaaataggaagggaattacaattgaagtagcaaaaggtttggccaacaaaattaagttaaaaagtcttttacaagaaatttactctctggtaatccattaccagaggatataatcgattaccagtggctaaaactgatttacaacagctattaaaatttgaattcaaaatttgccctgtgtaatcgattacacatataccttgtgtgtttagaacttgtaaaaggaatttacaagatagtggaactctcaagggggtggcttggggactggacgtatgcacaagggtgt

SEQ ID NO: 87420 - DNA, 361 bp, Glycine max
tcaagaattatggcctcattaaactacttgtttcccgagggaaattctataaacaaacctcccatctttaatggagtgggttaccactactggaaaacccgcatgcaaatctttatagaggcaatagatttaaatatttgggaagccatagaacaaggaccttatgttccctctaaaatagccggaagtgcaacaatagaaaaacctagagcagattggactgaggaagaaagaagattagtacaatataatttaaaggccaaaaatattattacatctgccttaggaatagatgaatactttagggtttcaaattgtaaaagtgctaaggatatgtgggatacactacaagtaacacatg

SEQ ID NO: 87421 - DNA, 317 bp, Glycine max
agcttttagtaaactagactccttgtttaacatggtaaccgaactggccatgaataaaaaatctgtacctatcgcaagactctatggtttatgctcctcttccgaccaccatatagacctttgcccttctgtgcagcaatctggagcaattgaacagcttgaagcttatgctgcaagcatctacaatagacctcctcaaccttagcagcaaaatcaaccacagtagaacaattatgacctctctagcaacagatacaatctcgaatggaggaatcactctagtctcagatggtcaagccctcatcaacaacaatagc

SEQ ID NO: 87422 - DNA, 337 bp, Glycine max
tgaaaagaggaagtgtaaaatggtgaaatttcctgcttttattccgtgaccacagaggggttcttggagatatgtcgcgggggtcaggagaccttggggacgtctggtggggtgctattgcccaaaaccaagcttgaccaatcccgacccaacccacgcatagtcagtcagtgagaacctgtgatgtacctaagcaggcgagctcctggccgtcaacagataaaaggaacaaagaccacaaagcatggaaggctagtgtggtggctggccagctgtggatcttgtgtgatatatgggttatggcctctggtaatcgattaccaatgatgggtaatcg

SEQ ID NO: 87423 - DNA, 321 bp, Glycine max
  unsure (1)..(321): unsure at all n locations
agcttgttgncaaattgaactacaataacgttttactcggatgttcgattgagtctcgtaatatatcgaggcgctggaaacttaaaaccgaagctcgtagcaaattcgaaggacaataacttttcactgggaagtccgattgagtcccgtaatatatcgagacgctcgaaatttaaaaccgaagctcgcagcaaattctaacgacaataacttttcactcgggagtccgattgagtcccgtcaaacgctcgaaattgaaaaccgaaggtcggagcaaattcgaacgacaataacttttcactctgaagtccgattgagtcc

SEQ ID NO: 87424 - DNA, 380 bp, Glycine max
tcagttttaaatctcgagcgtctcgatatattacgcgactcaatccgactttcgagagaaaagttattgtcgttagaatttgctacgatcttcgattttaaatttcgagcgtctcaacaaggtacgggactcaatctaacttccgagtgaaaagttattgtcgttcgaatttgctacgagcttcgattttaaatttcgagcgtctcgatatattacaggactcaatcggacttccgagtgaaaagttattgtcgttcgaatatgctacgagcttcggttttaaatttcgagcgtctcgatatattacgggactcaatcggacttccgagtgaaaagatattgtcgttcgaatttgctacgagcttcggttttaaatttcg

SEQ ID NO: 87425 - DNA, 319 bp, Glycine max
agcttcacaagggcgcagtttattatcattggcagcagcaacaagctcccttggtgcccctttgattcatttttttcgcattcctttcatcccactcaagtaagtgccatctccatctaattttgccttttccttgtgatgtttggtgctttgtttgtagttttctttgcaatgtttgtgaggtaagttgtgtgtgaacccatgatcaaaatgcttggattggtggctgtaatggatggctctaggcctatccttggttcttttgtgaatatgtatgacaagttgatccttatccctcatttatacatgttttaacatg

SEQ ID NO: 87426 - DNA, 365 bp, Glycine max
atgtctgagtggactcggccagagattgatcatcctcttcatctcgaaaggctactaagtgccaatgagctttggatagtctcatgatatcttttcaccaggttttggatgcttttgaatgaatggaatgagctttgatctgggttgatgatatgtttttttgagagattcaggatcattgagatttacctcatcctcttgaacttattttgatactttacaagctgtatcgtccattaggcatagattgacgtcttcttcatcagacgaggtatcatctagattttcccaggtgctcatgagacctttcttctatttgggcttgcagtttcctttctgccgtgagccttttccaattatgggca

SEQ ID NO: 87427 - DNA, 341 bp, Glycine max
  unsure (1)..(341): unsure at all n locations
cacctgccgcatgcaagcttatacaaggccttttttttcttccatcanagnatnnggaaggagctcttaatcttctttcttttcttgttttccttaccaaattcatgaaagcttctcattcatggttccaaaatttcattttcactcttagaagtttgagacatcaagtacctaagctctttgtccatctgagtcatttcgtgtagcttcattcagtgtaaggggagtctttccacttcttgaaccctaaccttgtctttggaagctaggcttcattgcatgttgttttgatgttcaaatatttgtagctacctccctggctagaactagaggatatgttg

SEQ ID NO: 87428 - DNA, 373 bp, Glycine max
catcagctataaatataaaacattttctttcaactacgttaacattcccgtctagttggagcatataaattgtgtgcttcaagcttggaacatataaagtggatttaggacctctcatagacttggtcaggatgtctgccagccggttgttggagttaataaattcagcactgatttctttggactgcattttcccccaaataaaatggcaatcgatctctatatgtatagttttcacacaatacatgattataaacgatgtgaagagctgcctgattattacaatacaactttcatttgctgaacatcacgaaattttaattcttgaataagttgtttaatccacaccaattcagaagtaacaagagtcata

SEQ ID NO: 87429 - DNA, 352 bp, Glycine max
  unsure (1)..(352): unsure at all n locations
cctgcacgcatgcaagcttatagaaaaaagcnagatttatatgattgncatacgtctcttaagtttttaattggacaccttcaattttcatctcacaagttatgtggtatgtcaaaataagctttgcaaaacctttttcaaatgctcctatatcgtggataatattgcattgaagtggtcatggatcaaaattacattggagatggaacctatcagcgtatccttttgccattttatttctatttcttgcggaaaattcgataccctaattcaagttaaagttgtctttagtgtgtaaaatatattccttgaataataatatcttggtcatacactgatttaatccctatta

SEQ ID NO: 87430 - DNA, 379 bp, Glycine max
aaactcagctacgcctagtctattacacgcgttttattgtttttgatccataaagccatgcttttacaatgtaagttctgctctacagtacgctgctgaactttttggtggaaactcttaaaggtcatgttttattcttactcaaagatattatttgcacatttgtttaagaaacatggagcgatttttcgaggttttggtctctcctgggtgtccatatgtgggacaccccataatgttgctaggtcgtattggtccatctcactacatcttctttatcatggtatccttgtttttatccactgttttcatttgtagaagatgagttggtctttgtgtttggaatgatatcgctgacttcttacaaatacaggtgtct

SEQ ID NO: 87431 - DNA, 348 bp, Glycine max
acctgccgcatgcaagcttgtagaggagctttttttttgttattaaagagggagagaaagagagaggggggagcacgaaattgaaggaagaaaaagggagaaaagttgaactttgagttatgtctcacaagactctcattcttcaaagttacaacaagtgttacacatgcttctatttatagactaggtagcttccttgagaagctttcttaagaaaacttccttgagaagcttctttgagaaaacttccttgagaagctatagtttagctacacacaccccttttataactaagctcaccttcttgaaaagctttcttaagaagattcctaaagaagctagagctta

SEQ ID NO: 87432 - DNA, 376 bp, Glycine max
gctctagatgatgcatgtcattgtttggtttttttcaaggataaaagggatgccccacattatctccatgacacaaatgcaaaaaggaagatttggaaattttatgcataactggtcatgcatgcacctatgtggacgctcaagagtcaatcactatggtcatgtgatgctctggctcaggattcatttactctattttaaaacaacccaatgtttacacaatatggtcatttatcaacttgtgcattcatgcaaatccatttccggcgttcggggaaatattcacagcattcaccctatatgtgtaaacacgattcttttttattcaaaaatcgggcatgatcaatgaatctttttttcaaagaaaagttggaaa

SEQ ID NO: 87433 - DNA, 320 bp, Glycine max
  unsure (1)..(320): unsure at all n locations
agctnngnatgttcttaaacatgctccaagacagtggttggataggctcaaaggaactcttttacagcttgggtttgtggccagcaagtgcgatccttcgttgtctgtttattaagacaaagggcacattatctacattcttgtttatgtagatgatattattattactggtacctccaatgtagtaattcagcaactcaccactaagctgcattccaatttttctcttaaacaattgggaaaacttgactattttcttggtattgaaatcaaatcactggctgatgggactattctatggactcaaagcaaatatacaa

SEQ ID NO: 87434 - DNA, 371 bp, Glycine max
tgtgtttgcgaacggacttttttattgcttgagtctcacacgttggctaggggtgtttgactgatctgaacgcacttggagggttgtttccgtacctccacccaagtgcccagagaatttttttgacaaaaactggtggaagggaaaattcatgactgagcacgagggagatataatagtaatttatacatgttctaatgaaaatcccatcatttttaagttagatctgacgttattggaatgggaagagatgacaacactggatggagtaactctttttgctagtttcttgtcttctcatgcaaggactgacctccatggaatatatgagaaacagtgtcttcttctctaaagttcgttttatggaaagc

SEQ ID NO: 87435 - DNA, 322 bp, Glycine max
  unsure (1)..(322): unsure at all n locations
agctngnnacttttattattattagtttatggaaaatctaaaatgatttttttgaagaagctaaatgatatagttaattttaacttgcagaggaaatttattttattttatcttcttattttctagcattttgataactttaaagactttttatcaattgaaaaaaatgataactaaaatactcattcgatttagtgtggtcatttttaagtttttttttatctataaatgttaattattagtttttaataacaaaaatattggaatttattattatctttattttctctcgtattcttttacttctaccagtaaattattt

SEQ ID NO: 87436 - DNA, 373 bp, Glycine max
ttgatattgggaacattaattactaccatttacccttgcgctatgggaaatgggcagtgacatatgcagttagtaaccacaaccattgcagtgcttctgtttagaattaatgagtgagagtactttctaaaacattgtaattttgtttatgttaatgtgaattaacaaaatggctatattttgatccaaaacatgcctgctttcttcttagcttccacttcccattttgtcatgcattcaaccatcctgtcctctctaattatggttagcaacaagttgcagttgcaaccttagtcagctgtctgaatttatgaactgtataccatggttcttaagtgtgttttgtcatattgtgattgatttaacaacctag

SEQ ID NO: 87437 - DNA, 320 bp, Glycine max
agacagagttttcttgttgttcacacagctccccttatctctaacacaagtaaccattacataaataaatgaagtaaataacaattaaaagtgaacattattgaaccaaccttttgcatatcaaacataatggaaaaggagtcatccttccactcaagcacaaatttcaatgcttcttttagtaatattaacaaatacctccattaggctttattctctatcttaaccactgcaacaacaatagggaacatcctcctgtttacatctattgaataacaaaaattaagttacctccaaaaggaccttttaagtggcatcca

SEQ ID NO: 87438 - DNA, 345 bp, Glycine max
tggactgaggacgtattttttatgtttttttaacgcccccctgagtcgttagcagaagtaaacattacttagacgaaacgaagtacacatcaattaatggtgaacgtttatgcacctaccttttgcatatcaaacataatggaaaaggagctatccttcctctaaagcacaaatctcaacgcctgttttccgatcaggagcagatacctgtaggaccctttattctctatctgagccactgccactactattagggaacatgctcatgtgtacaattattcgataacaacaatttaggtacctaccgatggactttttatgcggcgttcatgtaatcaaaccatg

SEQ ID NO: 87439 - DNA, 324 bp, Glycine max
  unsure (1)..(324): unsure at all n locations
agcttactctcttctttactaaaaccaggtccagnatgatttaatttatgcattgtaaaaaaaccatctactgaatcaaccaaagtagcaaactttggtgaagtagacatggttacacccatgcaatcatcactagtgttatcaggaatgtcaagggtaggatcaacaaaagtatgtcccttggatccatcatgctcatttgagatgatgctctcacagacagaggaatcatcagatgaatcattataacccgtggaagctgagaatccagaaaatgagttactggacaattcagaattagaatctgttatatttccctctgca

SEQ ID NO: 87440 - DNA, 374 bp, Glycine max
tgtcctacgagttgttctattttttccgtctttacctcattttagtgattccattatttatgtctatttattgaaagtttattttcttgataggttttaaatgaaaggtgatccatcgagatttataatacatgagttgacacatgcgagcttatactaattttaatggaagaacttccttgtttaattttatttcatagattgaaatcgccaaaataattttatttcaacttatataaatctctcatgaagtttaattttgtttcattgtttgcaattgccacaataatcatgaactgatcgtggtaataaggttgcttctatgcgtgcagcagtaaatgacactttccctgaaccacatcgccgcttactgc

SEQ ID NO: 87441 - DNA, 314 bp, Glycine max
  unsure (1)..(314): unsure at all n locations
tgcaagctngnggttgttttgacatttggtatacatncaagccctttataaattaaacaccaatttgttgaaccttttccatattttccataaatttgaaaaatcttgtgaaacaaataggcataatcagttgataacatgacccttattcaattgctataaagcaaaaagggttgaaaaggtgaaagttacacgttgcaattgaaatgaagcataactacataatacatgtttcaatgtcagtattgtttacccgctatggtaactgcatttttttattagcataatataatgcatttgataactttattaat

SEQ ID NO: 87442 - DNA, 356 bp, Glycine max
cttgcggcttctcaactgttcttcccagctgtctcttttctacgcaagtgttcttcttcttcgacgcaagtggttttcttcttctttgcaattgctcgtgttttactccatcgaaagacgctcttcttcttccctattttaaaatgtttgcttctgcaacctaatcacgactgtgggtctccatctaaggatgttctttgtgctctgttgaactccatcaaaggatcttgttcacactttgtttttctccatcgaaagcacgctttgcaactctttgttgtaatgttgatggaaatagctctttgtatcaatataatacattctttgtaagactctggcacgtattcaaaagttgg

SEQ ID NO: 87443 - DNA, 329 bp, Glycine max
agactatagaaccctcaagcgtttggtgtttggattagtttacacggtttttgcatggaaacggcggcgaagccgtgtggtccgttctggaccctttccgatgttgacaggaaaatcgtagttgtttgtgatcggggttggggccggtgtcttcccgtataccaagttccggttaggggatgatattatattacctacttcgtgtcctgtccggtgtaattatatatatctcattttgtagtttgaactattttggagagttttatgtcagggtgtgagcaaatagcaggtgatatgttaaacgctgttttttattctagatgaggttt

SEQ ID NO: 87444 - DNA, 318 bp, Glycine max
  unsure (1)..(318): unsure at all n locations
agcttttttggctgaaatgtatgagncaagagtggaaagtttaatgttagaggataagttgaaggcttgtcaaaggtcaaagaaaagtttgaccgagcagctgagtaataccgaagagaatatgttgacaatcatcgaccaatataaagagaagctaaacctaactgctagccatgagcaaagactagaggacgagcatgcaaaggtatcggctctacaagtggaaagggaagcaagagagagagtgatagaatcattgcacgaggctatgaagtggatggatagatttgctctcactctgaataagagtctagagct

SEQ ID NO: 87445 - DNA, 366 bp, Glycine max
tatagttacaaatgaacaaagtgtctctattgtgcacaatataccaaatatggccctatcgagcacgataagttgtttattacaaacgaacaaatgaaatgagtatgccatgacaggttaatataccagtctacaaatgaacaaagactcaacacaagatgaaaatgtaattttgcactaattaatccaacaccataattgcactttattcatttacaagttatagccataggctagcacaaggtagcagttaacttgaaacttgtgagtcatccacaatagatagagtaataataggccatagcatacagacaactgccactagatgaaaaactaacctggtaaagtccatgaaataatccagct

SEQ ID NO: 87446 - DNA, 330 bp, Glycine max
agcttccacatcaagcaagttcatctcaaagctcttatgcaaacaatagaattcaaaagttggagaatttgcttggaaaccttgtagctgtgcttaaagtacgatttgcagaagatccacaaattaatcaagtcttagaagctatagatcaagaggtatgaatttataattctacttattcaacgatttaactatgatatgatactttacaaagaaaaaacattcttttaatttaggtacctacaaatggttctaccagtaaagatcatcaaactacaaacaatcttaactagaggtgagttgaaatttatatggtaatgaagatgcgag

SEQ ID NO: 87447 - DNA, 375 bp, Glycine max
agtcggtggtggcctggcgggtatggaggtcttgcatggtgttgaagtgcaagtcggaccactttgatacgtgtctaagaggggaagatcaaatgaaagttcaatcaaaagctaaggcaactattcctactgaaataatcttctctgccactccatttattcatgaatgcttatataatagttcttgcctacaagatattctgctcgagtttgctataacagaattttgaatttaacagctgaaggaacacgcgaggaaataagactaaggagtagcttctataatggcgcccatgcttcacacgaagtcttccaggtatgtgggtctgtgggtcacccttttgggcctgttagagctgctaatgatgatgataa

SEQ ID NO: 87448 - DNA, 331 bp, Glycine max
agcttgatgatcggagtgatttttcatgtgttcattggctatgatgcaagctcaaaaggctacaaattgtacaatccaaacaatggaaagacaattgtgagccgagatgttgagttctacgaagaaggcacatggaattgggaggagaaagaaaacacttatgattttttcctgtactttgaagaaataaatgaaaaaccttgacttccatgaaataaatctagaacttttaccaaattcttttaacaatgaagcctcatcatctttcgaaaagagttcaagtgaaaagccaagaaaaatgagaaatattttagaattatatgatgaaact

SEQ ID NO: 87449 - DNA, 382 bp, Glycine max
tctgccaacaagatcaaaggaaggtgggactcatgtgatctacaagcacttgatacgtggattcttaggaaagtcctctaagacaacaccccatatgccatgtctctcatttggtcccatgactcctatctgatggccctgcatcaccaataatttaagtgcccaactaatggttccatgcatatccttatgtctatataaatattcatgggcgcaagcattgaggaccaacacaaatcattcacatcataaagtgtttgaaattcaaaattctcaacacttctcttcaaccattctcttctcagatcaatacaacaatgggatttcgtttacctggcatcagaaaggcatcaaaagcggcggacgcaccaaaaggctatct

SEQ ID NO: 87450 - DNA, 333 bp, Glycine max
  unsure (1)..(333): unsure at all n locations
agctttaaaatttgaanaatttttctggttttctattaccanccatgtgtaatcgattacacattataaattttgaattcaaatttctagtgactattataaacattttcagctgctggtaatcgattaccggagagcaaatctcaatttgaaatgatagaattctttggtcaaaccttttgttttttcaatttggaaacttcttccaaaagattctagaaatcaacttgatcatatatcttgactttcttggattcttgtcttgaataaaacttagaagcacttgatcctttagcatcatcaagacatcaaaacatcttgcttctacatatg

SEQ ID NO: 87451 - DNA, 341 bp, Glycine max
cttcaagtgcaagtgaggtttaattgaccatgacatcaatttcttgaattgttgtgaggtctaaatagtactcattgaatatattgctgcttcatctgtgtttacactgtaacataatacacagaatttgatatgaatacaaatatttgtgaagcactatacgcatgttggcttatatctatctcggaagcgtaactcttgcaaagggtatgaacaacgatgagcttgttaggatggtaaaggaagaacagaatgctggaaatcttttggatggtctcattaccaagctccatcttacgagaaactacatgactttaatgtgcatgctgctatattatctt

SEQ ID NO: 87452 - DNA, 271 bp, Glycine max
aagagcagctttctctcttctcacgccctacgaatccgacaagaaatcatggatttctcttgtgtaaaaaaaggatttaaactcctcatcaattgccttcgaacatatcaagatctaaaacacactcatcatgtgactatttgaccatggagcacgtcaaccaaccgtaaacgtcacgggtgcatcatcaatctaataatcctaacctaacactacgaactaaaaaagtggattcttacagatccaaaatgagaaaaaaaaaatccctaca

SEQ ID NO: 87453 - DNA, 296 bp, Glycine max
aattgtgcttgctttttgttatggaggaaccgactccatgtttgaagcatatcacgcctttatattcaacctagtacgagaaggccaccttatgggatatcaatctcctaaaatattggagtgtgagacaagaggctagtatttttgcatggccccttccaattatttcatagccttctatgactttgttatcaatcagaggcatattttccgttcttttgagcaggaaaattcaagttggactctccttttctcccttcttgttaacattgatgaaacgccactatgctcgtttt

SEQ ID NO: 87454 - DNA, 320 bp, Glycine max
  unsure (1)..(320): unsure at all n locations
agctgtgaaatttatttatttattctgacagngacaaccacatataatacggcgactaatgattagatgagaacgaccctatgagaagccggaaactgagggaaaatcagagtaagaccctaattaaacctaaaacaaggaaacaagtgagcaagtcttttttttttagtgtgagggatcaacacgcaattttttctcttatttatttctttcttaacccctcaacaaattttatatcttttaggttattgaaaattgttatagaacattaagagtttattgtttttacaaaatagaaaaattatattttaccttgaata

SEQ ID NO: 87455 - DNA, 374 bp, Glycine max
gagatgccctaaagcagcgcttttcacatttcttaccatgtgcccgagatagcatgcacactgtcggtaccaacttttcaatgttatgagtataagtagcatccatctgttgtattttcatgatgtcactagaatgaatctgcatggcagattgacatcagctaatttataggttctaagaaagggagaggaggaaaaccaatcaataaatcatttttgaaaggctgaatttcacccatggaaggacctataggtattattaaaaacagaccagacctaactcacttgcagaagctagctcaattgacatcttaatacaccccctaacccaagattggacatctagagcacccaacattaagactgagtagatt

SEQ ID NO: 87456 - DNA, 234 bp, Glycine max
  unsure (1)..(234): unsure at all n locations
catgcaagccacnacttttttgtgctttgcaggtttcccccaccnacctgtttgcaacgcgtagctctgaccactgttctttcttcccgccaggcttcttttcatatccgcctgagtgggcttaatgcctaaaccatacttcccacgatttccttgggtttttatcaggctagttatgccgccattgtttttgcctaaacccatcccggggttatacccggtccccaacataac

SEQ ID NO: 87457 - DNA, 356 bp, Glycine max
acaaaaaagagggcctctcaaactccttactttcatacgggaattctatcaataggactccaacctttaatggagagggttactcaccactggaatacccgaatgccaagacttattgaggcaatagatctaactattcgggaagccatacaaatagggccttatatacccaccacagtggacagagtttcaatatatggccgttcatcaagtgaacgcatacctatacataaacctatagatagatggcctgaagaggatcgaaaacgagtaccatacaacttaaaagcccaaaatataataacatctgccctgcgaatggatgaatatttcatggcttcaaattggaagagcgc

SEQ ID NO: 87458 - DNA, 325 bp, Glycine max
  unsure (1)..(325): unsure at all n locations
agcttcgnccttatatcccttttgttgganaaggcccaattgagacagccctcttaggtttagactatcttaaactgagtttcgtccgcagatccctcttgtaagactagactcagctcaagcagcttatgaaagtttagcctaatttagcctaagcttcgtctgcagatccctcttgtatgactaggcctagactaaacaacattattgtaacaacataattaaaaccaaaacttaatccacagatccctcctgtaagactaagtttcgatcttgcttcaatcaagttctaaggcaataatacatttgctaatgctaaagtcac

SEQ ID NO: 87459 - DNA, 374 bp, Glycine max
tttagcacacagaagaagaataagatgttttaagagattcaaaggctgttaaggatagcattgtaaaggttgttcaagattatttaaatgcaaaacaaagccttgcttttatagactcttcatgtctggtcaagagaaccattagaagagttatgacttttagaaaaacttaaaaccaatttgaaaaagtcaaaaaccatttgaagagttacatcttttgatttgttcagaaactatcactggtaatcgattaccaaattagtgtaatcgattacacaaagcttttttgagaaagaatgtgactcttcactttcgaattggaatttcaacgttcaagcacattggtaatcaattataaaaacattgcaatcgat

SEQ ID NO: 87460 - DNA, 372 bp, Glycine max
ttgacaaacaaccatgccatatcttggattatcaatagtgttgcaaggccatcacaggatggttattcctcatacagagacaggggcagctgagggatgatgaatttttgcacttccttggacgaagcagagccgtacaactaagatcggcaaacttgtgatctatccatcattattgattttaggtattctattattctgttatatgccttgtgatctgacattatctgcttcgccatattatgtccattgtgattgaacagcacatgcagttatctgtcgcatagagagaaatttaccgcttgcggcatatggtcgtacttactttacgatgatatgtctgaaacacaaaaatgtgtcagtctggtgtac

SEQ ID NO: 87461 - DNA, 333 bp, Glycine max
  unsure (1)..(333): unsure at all n locations
agctngancttttagtnnnttatctttaatcttnaanccctgaacgaactattcaagtttgtaattcgaactttaattatcttttaattcgttcctaaagatagatcgccaaatctgttgctaactgcacattaatctgttaaagatataacagatttatgtgtccagtattttcgggcaagatgtcctggacatcgtatccgacatcgtggatcctgcagcttcaattcttcatttgacattttatcttgccttgtgcattgtgcagcccaatctgataccttgacataacgttggacatcatgtgcagcaactccagcttttctttattgt

SEQ ID NO: 87462 - DNA, 371 bp, Glycine max
ctgcttggagcttcaatggttatatgaagattatgaaaatggctacgcgagggagagagagagctgtctgaaaagctttttggtcttaaataaaagggttttctctttttctattattttatttaagcaatgccacatgtctccatttgagtggagcaaaaagggcccactttccctttttgactgtgacccatactcagccacaaaagtgaggaaaaatctgatctttgaaacgctaaaatcctgcctcggtttgcgtgccatttctctggttccagttcctcgcgtttctctgcgtccgtcggggccagttttcgaaagtaagccatatatatatcaaaatgctcagaataaaaccccgagcgtggttc

SEQ ID NO: 87463 - DNA, 301 bp, Glycine max
ttgccaccattccatatttttacaatctttcttcagaggaaaacactacttatgaagggggcgcaccttttgctgatgcctaataatcaaaaccttttcaatgaagccccagcaaacactgtgcaacaaatggagaagaagtttaagcggtatgtatatgttattttaacatgcaggcctaattaatatacacatatcaagaaaaattaaaattaggggcaaaatcatttatgtatattttttttaaaacaactggctttaaataatttgggatttcaatattaataatgaaaattaattt

SEQ ID NO: 87464 - DNA, 348 bp, Glycine max
aggtgtgacaaaagtcaactgctatgagatctacacaggccatgtaaattagtattcctgatgaaaatgaacccactaacccttccatgactaaggcatttgggctactatcatcataacctgtaagtgataataatgccatccccaaaattattcctattggtgttgacactgcgaacatgaagcacatgtatgtaattgttccaaagctaaatcccgcctgtaataatatcatcatgcaaaggtttggattggattaacatcgtgcttctaagaaaataaagataaaatacaatcgtctccactattatatatgtaagaaataacgatttagtacttttaaactta

SEQ ID NO: 87465 - DNA, 313 bp, Glycine max
accgcagcatgcagcttttataccaaagtttgttatcgggaaagaaacgcatgttaattctttcgcgacacctggaaacttaccccgggctcagactcaaaatagagcggaggggcggcccacaccaacattgtaaagataggaggatcaatttgtcccaaccgtctgagcaccccacaaaaagcaaaatttgtaaacccccatgacatgtcaagaataactgtcgaatgcaagctgaacgatggaaataaccaaaatgttcaaacaataacccactccttggacttattctattattccaacaaaaacatgc

SEQ ID NO: 87466 - DNA, 355 bp, Glycine max
tggagctgttttcttgccatgtggaacttatgatcatgcatacgtagaacataatattgcgaaaaagtatagctagcggcatgctctgagtctaatgttagaactctacccagatgtgtctttctcaccggttgatgaaattacgaatgcttgggtgacaatcctaatacataacaggatttgtatagaatgcacatataatttgcacttacatgcataacaactcattcaaatgtcattgggcagagaagagaataaaaatgacactatccatgcgtcaaaattaaaccaaaaagtgcggcttaactactgtttaatccctgtatttagggaccatatcttttttaatccctaa

SEQ ID NO: 87467 - DNA, 329 bp, Glycine max
agcttccttggggccattttctaaaaagacaaacattttgggaagttagtttcatcaagaaatgctaccttcaaaacaaaaacgacatgcaatctcctccaataaacacaaacatcaatgtaaatttaaagcaaactcatgcacatatttccttacgaacatacattcgcacaagatattctgccaataaattgcactcatgcacaatcaggtatttctaatacctatacatacacaaatttcgtgaggaatctgggctacccacacaataaagtgctacacttcatgcttattcaagtgtttttttgctacctaaagctgcatgcaaa

SEQ ID NO: 87468 - DNA, 382 bp, Glycine max
agagatgaggaagtgttgaagggcgaaacttcctgctattattgttgaccacagagtggtacctggagatatgtcgcgggggtcacgagaccttggggacgtcaggtggggtgctattgcccaaaaccaagcttgaccaatcccgacccaacccgggcatagtcggtcagtgagaacctgtgatgtacctaagcaggcgagctcctggcagtcaacagataataggaaaacacgaccactacgcaaggaggcttgtggtggctggccacctgcgaattttgtgtaatatgtgagatatggcctctggtaatcgattaccaagggtgggtaatccattacaaggcttataaatgaagacaggaggctaagatggtctctggta

SEQ ID NO: 87469 - DNA, 329 bp, Glycine max
  unsure (1)..(329): unsure at all n locations
caagctngccacccagctcgcttattcgagtttgttgctncctccagaagcaacagccttctggaggaatcttctggagggcccaagtgggcctggttgctatttgcaccccaatttttactaaatacaccccaacttttttttggtgattcttttttcgtaaagttacggaaacttacgaatttcgtaacgatacttgttttctttccgtaatgttacggaaccttgcggattatataatcatcccctttttgacttacgaaatgttacggaacctcactatttgtgcaacgatgcttccttttgatttccggtgtgtcacggaattt

SEQ ID NO: 87470 - DNA, 342 bp, Glycine max
cggctatttactcacttattagctgcggccgaaagcacgttttgcgcagggattaacgtcatggtccgcgctcacaagatctgtcatactgacttttgagtcacgctgaccggcggaaatacccgagtgggtatccgtataaactttttgctgtctgcaagacgaaaagcctgataacacgcaaagactaatgtactgttctgggcccttcgtcaatctcggatgacaaacccgttgacacgcggagatttacatcatcttccgcgctcacaagatctgtcatactgactataaagtcacgctgacgggcggaaatatccgagtgcgtatccgtataaattt

SEQ ID NO: 87471 - DNA, 361 bp, Glycine max
  unsure (1)..(361): unsure at all n locations
cggtatcctatagatctcacctgcacgcatgcaagcttagcaagtgttcctgatatattgatttcgaagccaacgntccaatatccaaggtagagaagcttaaggctactcattgttgatagagcatcgaccctcattgttcttgttcgaagaatgtcatatggatcttcaattattatgacctcaacattttctgctaccttgaacattgcaaagaggaaaaaaaatgtgagatctttggaagtatttacaaattctagaataataggaggactttatatttataaattattctaccttattatctgacataactttgtgaaaatctttaatatcccacaacctgctccacttccatggc

SEQ ID NO: 87472 - DNA, 333 bp, Glycine max
gcttcatggcagaaaagggctaaaaagaatgaacgataacagtttcatgagaataagtggattctaattggattggatcatgcaaaagtctctttcttagtattggatctataaaggtcaatacctgtcacaatagtcacagagcgtccgtcggtgcaaactatactcattattatatcatcttgtaagtttcaagctaatatcctgattcttgagagagtacattaatattgcatttaagcttatttagcgaaagaatacaagaagagggaaaataagtactgtatgtggggatatatatataagccatagtacatgtccgtggtcctcact

SEQ ID NO: 87473 - DNA, 349 bp, Glycine max
  unsure (1)..(349): unsure at all n locations
acctgcacgcatgcaagcttttccgtttaatgatctanttacatgtttaatnngcagacgaaattgatataatgtgtgttccaatataatctaatgaaaaaaaaaaataaagattctgatttttttgtaaaattatttttttcttaaacatatttttcacctaatcttcaaacattcacttaagatgtgtgtaaataataaaccaagcatacactaaatagattattaagatgaaattgaatgttaaccgaagaatagtacatacaatttataaagntatgtatataagttttgtcctttatacttttatgatttttttatattcttaatttattaaaaataaacaatt

SEQ ID NO: 87474 - DNA, 330 bp, Glycine max
acgggaatctcaaggcttctcgcactgctaatttcttcacagatgagcaccatgtcttcatgtggatgttgaatgtatccttgcggaacgcttaaaaaactttgtctacccaactcttgcactgatggcaccaaaagagaagcggcccatggtttcatgttgatctcttccatggcctttggctagctcgaacactgggggtctcatgtcctctgatgatcttctcaatgtaataacgaataaatagagtcttctttccacgctctccaagaaaagatatttttctttttaatgtaccctgacggtgtgctataattataacacaataat

SEQ ID NO: 87475 - DNA, 329 bp, Glycine max
  unsure (1)..(329): unsure at all n locations
agctttattaggttgaaaggttattctctttattattatatcnatggaacgggaaaatcacattcatggtttctattgcacttatgcctactcattgtaggtggttcaatatgtggtaaatttgataaaatcttgtggatccgttagtaacaaaagtattgtcatgtaaatacatatttaagtcatctaggggaacgagactaaagtccatcaattagtcacaataacagacacccatctttgtgtgattggcgatcccataaatggagtttaatgggtaacaacaaagttgtttgttgactaaagaataccaaagttattattttcgc

SEQ ID NO: 87476 - DNA, 383 bp, Glycine max
tctacgaatttattataaacctaacgatgttcatttcaatttaaaaatataaatgagagaacttgtacaagagaaatcatttattattataaaaaaaaaactgttatttataatcctacttgctacgagcatgtaattaagaaagtgaccacatgctgtcatcatcatattgtatccaaagagaaacttcacagacacattcctattcctaaaagttttctaataacttattataaatctaaggtttttcaatctaattaaaataaattatataagactgagaattacttatacaagaaaagtattttttatatattaatcctagctagctactatgacaatgacgtttttctaataatctcattacgtacgtgaaggttaat

SEQ ID NO: 87477 - DNA, 339 bp, Glycine max
cccggtgatgcttagacccacctgcagcgtgcagcgcacattttcctttatgacgcaaccctagcctgcaagagcaagagagaagagagctctgttcggcccctttttttgtggaaaacgatgaacacccctaggcctatagggtcgctgtattgccttatggggggggtcttaatcctacttggattaaagctcaattaagttaggtgccccaattcgaaaccttaatccatcattaagactcatgacacttatatctagcttaaactcttttttaactattaattctaactctaactaagtcttgttatttaataaatcctcttttaaatgagtgtt

SEQ ID NO: 87478 - DNA, 327 bp, Glycine max
  unsure (1)..(327): unsure at all n locations
tggatgctagcttcatgagagaatgagaagtggagctggcctgatgaaaaaaatcagccaactgatgattcgaatcatgaaaagttagttgatcatcctcctttatgcggcactagattacttgctaacatatatcaaaggtgtaatgttgctgtgcttgaaccancatgatatcatgaagcagaaaaacatcctaaatgaatggatggtatgcataaagagcttgccatgatcgaaaaaaatcagacttgggaattagttgaaagacatcaacatcagaaggtgattggagtaaagtgggtgttcagaaaaaacgagaatgtatat

SEQ ID NO: 87479 - DNA, 320 bp, Glycine max
  unsure (1)..(320): unsure at all n locations
catgcaagttttttaattatntagagtatgttatactctngnnggaaatcaacttgtttcaaaattaaaagctttaaggactgacaatggcctggagtttgtttcagaacagttcaatgagttttgcaggaaaataggcattaaaaggcacaaaacagtccctcacacaccacaacagaatggtttagtagaaagcatgaataggaccattttggaaagagttagatgcatgctactaagtgcaggactgccaaagaccttttggggagaagctgcaaatacaacagcatatttgattaatagatgtccttcatcagcct

SEQ ID NO: 87480 - DNA, 384 bp, Glycine max
cactaagcttcttcttacatggcttatttacctagaggatggagcctcttctcacctattctcctttgtcttccgctgcatctccatggtggaaaatcaccaataaaggacctcattgaagctcaaagatccagcctccatagaagccccacaagcaagcttccatcaagtggtaatcacagcacaagagcttcaagtaggtgctccttaaacctccattaattttttttgctttaccttctcttccattgatgcttcttcatttttttctccacgtatctcctcatatgtcttgtgctaaattttgttaacatgattctttatagtttccaccgattaaacttgctatagaagttacattagattttctatggctcaaatttc

SEQ ID NO: 87481 - DNA, 292 bp, Glycine max
agacttttaatttacttaagctaagctaatattttctcaattcattggctctctaaatccattcactttctttaagattctgaacagcaagaatatatgtagcagctaaattcaaatggtttattgcatttgagatttgacaaactttgggtagaaacagctccaagttctcatcatattttacacctcagttattgttttccatactttgtcacttgaattagcaatgtcaacttgtcaatcatgtataaatgagtgttcccttgctaatcaaatttactgaacgaattat

SEQ ID NO: 87482 - DNA, 378 bp, Glycine max
tctccatgacatacattcttcaatcaaaatcaggactatcaaaaggagagttatttataaattggaaagacaatcatgatttttcaagtcaaattgcatatattacaagttagatgttagggatagcttaagtcaaggagtagatattagaagctacacacgatttacgattatcaaaagttgcattgctattgaaatgtgaagatagacacatcttgcactttagaagtacacaccagttagagatgaatcaatgcttagacaacactgatcctgatgtcattgctttttgtgatccttgatacagcctaagtcataggaactcaaggatacaattatcctagttgaaaaaaagccaacaaccaatattagaaaaag

SEQ ID NO: 87483 - DNA, 324 bp, Glycine max
agcttcaggggttgtgtcattccataatagtcaccctggatcagcatcttttcagagaagaatgcgaactgtggccattgtttgggagacatttcactgtttaggaacaagacaagattgtgggtcggataattggaacaacaggtgctgaagttctccaatcaatgttaccatgggtaacgtctgcacttactcaggatgaacaaaacaaaatgatggatacatggaagcaggcaactaagaacactatgttcaatgaatggcttattgaatgctggaaagagagttcagtgtctactgctcagacagaaacatctgatcata

SEQ ID NO: 87484 - DNA, 377 bp, Glycine max
atggcataaagtctttctaacattaccaatatttttcctcatcctcagcccataaggactcaagctgatacggctatatacggagcacgacccccatataatgcattggctattcacagaaacaaagcgtgagtgggttcattgcagcagcagcagcagcagctgtcactgatcaatcaacaaatttctccaatcatctttcggcaatattccatgatgatttctggaaatccagcttctgtctttaggaataacgatatcggttaactgtcgcctcaaactagcaatccactcagcgttgctcaaatccatggtggaaacaccacaggtggaagccgtcttaatcgggatactgctactacaacttccattaccca

SEQ ID NO: 87485 - DNA, 326 bp, Glycine max
agcttatgtggggttcaatatttacatatctatatcttattttgtgaaaaacttaaaatatgtaacttaaattgttaacagaagctttgatatgcacattcggctttcttcgcagtgaacaaaaccacacaacaagattctttatatgacataaaacaagcagctgccaatggctcctgcaatttaaacaatagtgtcgtatgaataacataaacatcctttatagggatacaataaatatattttacttactaattcaaataagctccaagatacacgtctcgctgtgattccataagccatttctcaatgtattcttgacatgg

SEQ ID NO: 87486 - DNA, 371 bp, Glycine max
tgctcccttcatcaaaccatttatataacaaaggaccacaaattctataaaaaaaaaatggagatttatacaccggactcatgctactaataacatcaatcataggttgataatatgtcgagttaattgcattaaatggcactataacatctatcatccattttgcaatggctttgtcacacttttctacaattttcttattttgcaagacactcttcaagctaggttgagctttaggagatgttctaggcatgaaatagtcatctacatgaatagtgttctttcctttttgagacttggaagaaacaggtgattttggagttcttcttaaatgctccactattctcacaaggacttcatacattttaaat

SEQ ID NO: 87487 - DNA, 312 bp, Glycine max
  unsure (1)..(312): unsure at all n locations
agctttaccaactttttttttaatataagnggaaactagggggttacagttgataattattacgggtgtgcaaacaggtgtgggtgtcaataatctttatatttctacgctttgaacattatatttgggaaagtattcgaatcaaatgtgcttctgtgttgcatggatctgtgaaaatctggtttttatgatctacaaattgatgaagggcaaaacgttactgagtgctttggtatatatactctgatgaattcccttgtttggttatttgcatttttttccttaaagattctgcccattatgaataaaatc

SEQ ID NO: 87488 - DNA, 218 bp, Glycine max
aggtgtgtgtcacatacagctctagctttctcatagtagactttctcaagaaagcttcctcaaggaagctacctactctataaataaaagcatgtgtgacacttgttctaactttgatgaatgagagtcttgtgagacacaactcaaagatcaacttctctccttcttttattacttcaattgcgtgctccccccttctctatttctttgctccaata

SEQ ID NO: 87489 - DNA, 335 bp, Glycine max
acctgcagcatgcaagctttttttttttcctctttctagccacgtatctatgtgaggttctagtggagattaagcattaaaacctaattcattataagtgttctactttttaaacctattggccatataccaaaatccttattatatctaaccgcaaattaatttgggtttggtattctaccatttcctttaatgtacttgtcatattaatttaatataataatgactcatgttatcaatagagatttgaatgcaaaaattcctaatgtataattggtgatagggatgggcaaggaagtaacatccaacttggacccctacaaatcaattaaaaa

SEQ ID NO: 87490 - DNA, 363 bp, Glycine max
tcatacaattaatatagaacctatatcctaatgtcacatcctatcagagcgttgtgttccagggtactcaagcatgaggttcttcatagtcatccacctatacatatgctcccccgaacacaaagtttaagatcatcacaagatccaaacacaagcagcaaaccaggagtgggctatcacattcctaactactacagagaaacaagacaacatatagtagccaaatacaatttacttagcatatctcacattatttcatcactttgtcattcaaaattcacttttcaatcatcaatcacaatacacaagaatcacgcactccgatcaagacataataacacatcaatttcataataaacaatt

SEQ ID NO: 87491 - DNA, 328 bp, Glycine max
  unsure (1)..(328): unsure at all n locations
agctttttggagtagaaacatgggaacatttcattntatttcaaaaaaagaagtcgttttcagtcaaggtctgagagaccataccagtttcctaacgatttctaattatgtgggccattaagtctatcatatgcctacaattaccgagaagcccatgaatctcttccggggtggagtaagggtctgccatcgccttggccttggctaacaagcggggaagttcttgactcccgttcaaggtaaaagcaaaccggtccatccacatggttgcctcttggtgtaaagagtcgatcacccttcctctagcctctttattcgcatatacttg

SEQ ID NO: 87492 - DNA, 391 bp, Glycine max
  unsure (1)..(391): unsure at all n locations
acactatctaaaacttacgctttataacgngcagaaacttctggtcatttattacacagtgcaaatgttgaattcaaattttaatagctgttgtaaatcagttttggccactggtaattgattacatcctctggtaatcgattaccagagagtaaatttgttgaaaaagactttttaacttaaatttcttggccaaaccttttgctacttcaattggaattcccttcctatttaatataccctttctaagactctagagactgtcttgatcatccatcttgaatatctttaatttctttgtcttgaataaagctttgagacacatgtgaaactttggcatcatcaaaacattcagcttgatcctttgtctactatctccccctttttgatg

SEQ ID NO: 87493 - DNA, 331 bp, Glycine max
agctttgaaccaaaccaaactctgacatgtatcatgtctagccattctacaagcgttgagccaaaatcctgactcaccacaaaccttgacccagggtgagaatgccaatccttaccctcggaagcaaaaaaaagaagagaaggaaaatttccaatcaaaggaaaaaggagaaggaaaatttccaatcaaagaggaagcaaaaaaggagagaaggaaaatttccaatcaaaggaaaaaagagaggaaaggaaattcccaatcaaagagtgggagaaagcaaaaagaaaagaaagaaaattcccaatcaaagaatgggagaaagaaaaaagaa

SEQ ID NO: 87494 - DNA, 391 bp, Glycine max
ctcttaggccctgctagaacgtgcgctgcccagcttgctgatattgaataccgttaacgtgtctactatcattgttatgatctcccgttccgtgattggggggcgcccttgagctggcatattcctccacccttgggcgtatttttgaaagttcatgtcccgttatgcacatgttctgtaggtgcatcctatgtaaagccatatcaaaattgtactgatactgcctaacgagagccaccattaggtccttccaagaataaactcgggaaagttccagattagtgtactaggtgacggatgccccagtaagactttcttggacgaaatgcgtcaataatgtttcatctttcgcatatgctcccattttcttgtactacacctttaggtgatt

SEQ ID NO: 87495 - DNA, 292 bp, Glycine max
  unsure (1)..(292): unsure at all n locations
aaacaancacaagcaatttaacttaactaaatgcaagaaaaacaaaattaaaaagggttgggttgcctcccagtaagcgctcttttaacgtcattagcttgacgcaaaagttccttgtcagccccgatcaatcttggttctctccttcagaaccttctctttactctccttcacctctagacaaaaattttggtccaacaatgacctttcttcatcaaatagcttaaagctaatcttttggtcttcaatacccatttttagcttcttttttcccatgtctactacacaagtt

SEQ ID NO: 87496 - DNA, 393 bp, Glycine max
  unsure (1)..(393): unsure at all n locations
ctcaagcttatgcgcatatttccttacgaacgtcctctagttcaagattttctanttactacgaaaacgcacccatatacaatcactgcagcttcaatacctagattatttacacgtgcttccgacgtgtttttgctctttacatcacacacattttcttggctaaatttacatacatgcctactccaagcattttggtatatcaaaaattgctcatgtgcacatcttggaatttttaacacctatacatacacaagcttgatgatgaatcttgactatctacacaataaggcgctacattccatgctcctatcaagtgcttgctacctaaaaccgcttgccaatataagtgatattttcctttgctgactaccattgtattcaaaataaagg

SEQ ID NO: 87497 - DNA, 338 bp, Glycine max
  unsure (1)..(338): unsure at all n locations
gcatgcaagctttggagaaccaagcctatcataattttttacgaaananagatgggaatagaggttacaatggcggtaatgacggaccgaggcaaaaccgggttgagggagtaaagctcaatgttcctcccttcaaaagtagaagtgatccagatgcctacctggactgggaaatgaagactgagcacgtatttgcctgcaatgactacactgatgcgcagaaagtcaagctagcagcaactgaattctccgactatgcccttgtttggtggcataaataccaaaaagaaatgttgaaaaaagaacggcgagaagtaaatacatggactgagatgaaa

SEQ ID NO: 87498 - DNA, 381 bp, Glycine max
  unsure (1)..(381): unsure at all n locations
tctcgacatattatgtgcctgaatcggacatccgngtgttttgttatgaccatatgaatttctcaggagcttctcgtgttcaatattgaccgtcttgatatgtgatttgcctgaaaaagtcattcgtgtgaaaagttatagcagttgaatttctcatgagcttccgtagttgaatttcaagattgtcgacatactatgcgcccgaatatgatatgcgtgtgaaaaggtatgaccatttgaatttggcgagagtttccaatgcttaatttcgagcgtttcgttctattataagcctgaatcagacgttcgtgtgaagaggtatgaccattttaatatctaaagaactttcatagataatattgagctcctcgacatatcatg

SEQ ID NO: 87499 - DNA, 300 bp, Glycine max
tgcaaacttttcacaggttttattttttgcaccggctgagcctcaatgatctatggcctctcaaattcttacccctctatgttttataaaaaaaagggggacaaaccctaggatttccactctattgattaacattaaacgactacattgccggcactccaaaatggtcaaatgactaaattaaacagaacacacactctgagggaattctctgaaaagattgcaaaagaatgatatggtggcatggactatcacctctttaaaaaggacagtcaatttgtgttttccaaaaaaaaaaaa

SEQ ID NO: 87500 - DNA, 354 bp, Glycine max
ccttattgtcagcagatgaatatgaatctttggcgccatcatggactcctctaaggacaataacatcatttcttgtactgaattgccgggagttggaaaccatcttctcaatcagattcctagcctcagcatgagtcatatcaccaacagctccaccactggcagcatcaatcatactcctttccatgtagctaagtccatgatagaaatattgcagaaggagttgctcagaaatttggtggagaggacaacttgcacacaagttcttgaatctttcctagtactcatacaagctctctccactaagttgcctgatgcccaaaatgtcttttctgatggcaatggtcctagatg

SEQ ID NO: 87501 - DNA, 297 bp, Glycine max
agcttggagattgctcactttttataaagacaactgtttaaaggtttgacagattagtgttatctataactaacgtgaatttgaaagaaaaactggccgtaaagacgcggagatttatactatggaggattagcacacctgggcctatttatatgagaccgacttcattgagattaaagagatatagtgtctaccatatcttatttgagctagctcctatttacactggagagaattttgcacaacatttgacaatctttataggagctggagaaggggtgaacatctctaattgat

SEQ ID NO: 87502 - DNA, 373 bp, Glycine max
tggacaaccggcagaaccgtaagctcagtgtttgcgatgaccgctccgtatttctttaagagcctactgatgaccagtcttgtgctcaacaacggcacagcatttgcacacattggcactgactactagacgtattgacggcgaaagactgggcatggactgtagaacgccactcaatggctctgaagagaaaaatggactactttcatcatgaggagcactttgtgcattgtacccgagggcctggaatataattaaaggctgggtatgtttgtggaggctctgctaatcagcctagttggggattagttagggaatctggggagaatacatctgatatagtagagttgatgactgtgtcaaatgctgactc

SEQ ID NO: 87503 - DNA, 318 bp, Glycine max
agcttgaagtttcgtgccattttgttagatctcagtgccattgtcactgtttgggttcgaggtaagcttggtctcttttagatttgtagtttagttaagaaacatgttgaagtttgtctctgttaagaggattataaaattcccacctgaaattctgataccaagggacagatgtcgtacaggatgtcacgacatcacgcttcagaacatgcagtttatatgtgtccgtatgaacagattaaacaagtaaataacacaagagaattgttaacccagttcggtgcaacctcacctacatctgggggctaccaagccagg

SEQ ID NO: 87504 - DNA, 355 bp, Glycine max
gttatcaatagtctcaaatagtgtgctgctattatgatgtggttgggttaagtgatcactggggtggctgctgatcactatatgaaacacattgcaccatttttctgtgttgtgataatatgtggcgaaattgcagctgaatatgagcaaaattgcagaggataacgcaactatgtcctattaacactttgacccctccgttttctggctagtgtttgatagcctacaccctaattttgaatgcatttgttgtgtgaaggcagaaaagtaatgtcgaatatgatagcagaggagctgctggttatttccaagatgcaaaaagtagtgttgatgtataattttgggtaagtaattc

SEQ ID NO: 87505 - DNA, 290 bp, Glycine max
ccgatggcaactgtcatttttttcgatcaatatccgcgaataatattttttttgccgaaatagtctaatgttttccttgctgaataaatgggaacatgccagtttcggcccaaactaaaggtcggtcgagctcgaacaaaaaaacctaatcgacctacattgtaaattttttatgcaacaccaaaacaagaaatttcctctaccgtaaaaaaaatattatcggccaacgagcgtttttaaaaaaaaattgctcaatgtcagctgaaaaatatcagtcggggctactttac

SEQ ID NO: 87506 - DNA, 394 bp, Glycine max
  unsure (1)..(394): unsure at all n locations
ggacacttgaatctcagcttgtggaaggctctacatgtatcatgtctttgcttggtttggntcaagggtaaaagggatgccccacattatttccatgacacagatgcaaaaatgatgatgtggaaattttatgcagaactggtcatgcatgcacctatgcggacactcaagtgtcaaattcttatggtcatgtgatgctagggcttaagatttatttcctctattttaaatcaacccaatgtttccaaaatatgatcttttatcaatttgggcattcattcaagtccatttcgggcgcccggggaaatttcacagcattcacccttcaggtgtaagacacgttttttttctcttcaaaaatgcggcatgatcaaggaatttttttttctaagaa

SEQ ID NO: 87507 - DNA, 355 bp, Glycine max
tgagcaggatgccttaccggatgaaaagactgagaggagggcggagcacgtcagtggatgctctaaagtaggagacaagagcaactcttgagattgggttacaccactctgatatattcactttacaaccagtgatggacatgctactatcgatagactaagattatgtgctcataagctctattgatgatactctcttgacaaccaatatgacaaaactttcttgagaagctatagcttagcttcgcacacccctatcataattagctatctctttgagagataagctagacctaccttccaccctgtatactgcatactcactctctgcgaacagcatgagcatgcattatat

SEQ ID NO: 87508 - DNA, 170 bp, Glycine max
  unsure (1)..(170): unsure at all n locations
agcttttaatactttctggtttaaaacanacaggacgtccaaatcggcaattatttccttcggggggaaagacctacccacatattagattagacaatagacctaaatacatttaatttgcaaaaatgatctccaacatcaacaacaaatcgacactgtcccgaaaaaaa

SEQ ID NO: 87509 - DNA, 326 bp, Glycine max
gagtgtggagaattatgaatcacccaaggcaggggacgcccaatattgtacttggtcgtagagggtacactctattgcaccaatcctggtggatcacgtgggactatgagtgagtcagcttcttgtgaatcgttgtatgcatgattatgatgatgccacagaaaagtccaatcgcgtctggctctaacgatatcatttgcttctaattcacttgaactgcttgcacatgcatatccttgtttcatgattcactattgaccttgatttgccttaccacactgtgctcgcaagacctgtcttgctctgataatcgacactgaagtgac

SEQ ID NO: 87510 - DNA, 337 bp, Glycine max
  unsure (1)..(337): unsure at all n locations
agcttacttcaagtttttttctttagcacaagaagcttcaagtgttgatggtattgagcccacgagtatgacacaaacctcgggaatttgaggggcaaattcctttccaacgtggaagggaatgatgcaatccttacccccccaaggggcctttgtggttgaaagacttccatattaaattagtgcctttaaaatctcaaagganaggacccgaagggttcttcatgaagcccttaaggtagattttcaaagcccatgggcttatagtatgaacccgattatttttgttaaatattagaataaggttttttttttgtctggggccttgttttttggc

SEQ ID NO: 87511 - DNA, 364 bp, Glycine max
ccccatgttgaagttgcttacaattaaactggtcatagcactactaattggtctccttttgcagatggttatggttttaacccactaacttcttttgatcttatggctatgcctaatgtttctatttttaagcataaagaatgtcaagtaaaagcggtctatgtgaagaagcttcatgagagagtcagagatcaaattgtcaggaaaaataaaagctatgctaaacaagccaactaagggagaaagaaggttgtcttccaacctggagattgggtttgggtgcacatgagaaaagaaaggtttatggaacaaaggaaatcaaagcttcaaccaaggggagatggaccattttaagtgctcgaaa

SEQ ID NO: 87512 - DNA, 443 bp, Glycine max
gcttgactgagttgtagatttgggttgagtttctttttcatgggcagataatcaaatatggctgtgggtcagatgtgtttgtgcagaatggccttgttgcattgtatgctaaatgtggccatactggtgtggcaaaagtggtggttgatgggttataccatagaacaattgtttcatggacttccatcatttctggatatgcacagaatgggaaagctgtggaagcattgagatgttcattcaaataagaataatggtgtgaaccagattggattctctggaagcattctggggcgttactgatgagatgacttatacagggaactattatggttgcatcaaagggtctgagagagcctgttgctatcttctacactcttatctaatggggtgggcagtgcaaattttttgataatggacacaactgatatgtgatgcatgat

SEQ ID NO: 87513 - DNA, 292 bp, Glycine max
  unsure (1)..(292): unsure at all n locations
agcgacgcacgaagttagaactgacttggtgactcannggtgtgtggttttttctaacagcgacacttatnaaacgggctttcgctctatatcatatgaggacatatacctcaaagtagtgttacacaatagttggccattgaacgatataacagaggtgaaataaaactaatactcttctataaaaaatcagcgaacaactgtcaatctagaggaggctctaaagtgggacacaacagtcatcactaacatagtaattatttcttagaaaatatggagttttaacaagata

SEQ ID NO: 87514 - DNA, 392 bp, Glycine max
  unsure (1)..(392): unsure at all n locations
agcttatgcaangggaattctatgctatnactgatatcaatattctaattcangcattatctgcttggncacaaatttgtcatcaagacagatcagaagagcctcatgtcactcactgatcaaggttgttcacacacttgagtaagaaaactggttgcataaattgattggttatgatttcaccattgagtataagtcaagaaaagagaatgtagccactgattctctttctagatcctttatgatggctatatctcaacctaagttgtagctgattctagaattgagggaagcccttgcacaggacanacaattgagtctaattattgcagctttgttgcagaataagcctccaaatccgagttattnctgttctgataagtngttgtatt

SEQ ID NO: 87515 - DNA, 503 bp, Glycine max
  unsure (1)..(503): unsure at all n locations
ggatccttaagcacctgagctgcagctttaagaatatttttatatatatagtttttttaatatatcctattatccattaacagtggttgactttgttgataaatcatacggacacatttgaaattttaattaatgtataagaatatattcagttagctgtgttgtttatccctgaccacatggtatgtatatattataaggataaacacacacaggcacactatcatatacatactatatgtagtttatataatcaagtcatcttacaataataatatgattggttgagagagttttgaagcacagatagcgcattcttttattataaaatccaatagtcatatggtatttacaagaatgatacgtttattttataggaaacaagaatgatagnttatcgttccatttcttttatttcgaaatattattaaatggagaaatatacttttacttgaaaagaaaattatctcttctttattactttctcttcaaaccattatcaa

SEQ ID NO: 87516 - DNA, 441 bp, Glycine max
  unsure (1)..(441): unsure at all n locations
agcgtaggaaccctctattctatatgtatcgaataagagtttattatctctatctcacanatcactaatcgtcagtgtgattgattttaatatagaagtgcacctatgaaaaaagattcaatgaactgaaaaactatcaaagatacttgatgtaaataatggaacgtccagatacgtggtgtgcaatttacattccgaattatgagttctctagaactctagccaactgtgtgcttatagtaactaatcaagatacttcattgcattagaaattaatgagagcaatatctctatcgattcacaccctaatgggttctgttgcaattctcatcttaagagctattgtagctcctaaaatgactaatgaagttcaaagcgacacctactgatttatagactcgctatgataatgtctctagatactcactctatatgataata

SEQ ID NO: 87517 - DNA, 439 bp, Glycine max
  unsure (1)..(439): unsure at all n locations
agcttgctaacccatggaagctcctaatatctcttacacttttttaggtgggccattcttggatggccttgattttctcagggtccacttggaccccatttctaccaactacaaaccctaagaaaactatattatctacacaaaaagtacacttctctatatatgcatagagggtgtttttcctaaggactgaaagaactcgcctgagatgtcctaagtgatcatctangctcctactgtatactaaaatatcatcaaaataaacaactacaaatatacctatgaaatcccttaagacatgatgcataagcctcataaaggtgctnggtgcattagtgagcccaaaaggcatcactagccattcatacaaaccaaacttggtcttgaaagcggnnttccactcatcaccctctntcatcttgatttggtgatacccact

SEQ ID NO: 87518 - DNA, 137 bp, Glycine max
  unsure (1)..(137): unsure at all n locations
acaccgcaacacaataaccaccacccagaaaggagtgactgaacggacaanacgcgagacagaagacaagaaacattgaccggcgcacaaacacacacagaacaaacaaacgacaaaaccacaccgaagaacgaaaa

SEQ ID NO: 87519 - DNA, 166 bp, Glycine max
aagagcggacagaaccaaacgggcacagaactatttatttgacaaagacgcacaccgacacataccatatatgtggtgcttggaagaccaccaaaggcctatatagaagagacccgaaacatgaaattgctgagagaatatcagaacacacaaggcgtaagcccac

SEQ ID NO: 87520 - DNA, 445 bp, Glycine max
agcttggagaggatgcttctatggaggataagatttatggagagaaagagagatggcggagcacgaaattgaacgaagataaagggagagaagttgaactttgagttgtgtctcacaagactctcattcatcaaagttacaataagtgttatacatgcttctatttatagactaggtagcttccttaagaagctttcttgagaaaaattccttgagaagcttctttgagaaaactttctttagaagatagagcttagctacacacacccatctaaaaactaagctcaccttcttgtgaagcttccttgagaagctagagcttagctacacacaccccttcaataactaagctcaccttcttgagaagagaagctagagcttatctacttacccctattatatctaggctcaccgccatgacacaatacatgaaaatgacaaaaaa

SEQ ID NO: 87521 - DNA, 260 bp, Glycine max
ctttgtaatgttactgttaagaatcatcaaagcaacgaggagcatacaaatagcaacatagtatgtgttagtttcgtctgcattatacaatattttaatggacatatatatatatatagctctatctgtatacatatatatctatatatattatcatgacagagaggactcacaaatctgtacgttagtactgctcagcgagtactgtcttgctgctatttagatttacactcaattatactgatattatattgaatatt

SEQ ID NO: 87522 - DNA, 361 bp, Glycine max
cgcacaatcttcgcgtgatgatatctactctatattgtttgaagtacatgagaccatcaatcctataatgctacgtggcggacaaacacggtccgctaacttgaatggcaattattgtcaatgcggaacgtattctgcgcttcactatccatgttcacacattattgcagcttgtggttacgtgagcatgaactactatatatacatgttgattacaccaatgagcacattttaaaagcatactccacacagtggtgacctcttgggaatgaagcggcaatccctacttctgatgaagcatggacactattccctgagccaactacgattcatgcgaaaggtccgcccaaatcaacaacga

SEQ ID NO: 87523 - DNA, 529 bp, Glycine max
  unsure (1)..(529): unsure at all n locations
tcttaagtcacctgcggcatgcaagctngcatcttgagcatttcaccttcacacaatgtatgctctgattctgtttcaacttgtagcatgttgagtactttggtcattggaagttgttctttgcataaggatgcaaaactactctgcatatctaattccaaccttaccagtttgaccatactcaatctccttggaagacaagattgtgatattgcactttctactccaaatatattttttcttgtaattttgccgttttgttcttgcaaaaaaaattattttagtccttactaaaatatgtttgttttttaaagcgttttagatactatttttttaccgttgatagtgcaatctaaaatattttaagaatganaaacaaaacaaacatattttctaagaattaaaatgaaagaaaaaaatactgaaacaaacaatgaanaaaccataaaattataaagatgaagaatgtatttaatctctttttttttcaatactgagtcttgaattcaagaatatccattaaattatg

SEQ ID NO: 87524 - DNA, 289 bp, Glycine max
  unsure (1)..(289): unsure at all n locations
ctcagntctccctccttcaaattcacggcgcgtcacgaagcctcttcaaatttcgccccaaaacccgaaacagcgtgtcacgtgagaacacaccacactctacccgactcatcatatttataaacctctttctttccgtacccttattcggaagaaggatcgaataatctcgattctctttggagggtgctaccaagtgcactctctctctctctctcatttctctatgctaacgnagagatccagaaaccatttccgaaaccacatctctactttcctctgtttccgc

SEQ ID NO: 87525 - DNA, 249 bp, Glycine max
cacaggacatgaggaacgctgaccacaccgggagagtggaccgtcattacgaacatacgacttattcacctggttttgataatctctaatatggaagacgcatagtagagagataagccccgatgattggatgctctatgcaaaactgacctcggcagatgattatcctgccccaatgggcgtatgaatatgttgacgacctggccttcaaggaatctacacctgctagtgacgaagctctcttaaagc

SEQ ID NO: 87526 - DNA, 498 bp, Glycine max
  unsure (1)..(498): unsure at all n locations
agctnntaaatggaccctttgccttccnctntatgtattttctatgtcctttactaaaatgtcngaaaacctttcggattgcacgacaactagtgttaagcagctcaattcggctagcaagaatcaaaatgtcaacaaatgatagtccccggacgaaattaaggtatgacacacccctatgttttaactccgaatgacatgtcggagtgttgaaaactacttcccaagattattagtgatcgtgttaagcagctcaattcggctagcaagaatcaaaatgtcaacaaatgatagtccccggacgaaattagggtatgacacacccctatgttntaactccgaatgacatgtcggagtgttgaaaactacttcccaagatgattagtgatcctttttgcgaatatgggatgaattngttgtgatggtgaaacttggatacttgagaaccgaccatgagtagatggtgggtatgcacatgttgtacctaanactctcaag

SEQ ID NO: 87527 - DNA, 82 bp, Glycine max
ccctcacttgacggcacgacaaaggcctctctcagagacaacacgcgagagccacaaggacacagcggccatgtacacctgg

SEQ ID NO: 87528 - DNA, 459 bp, Glycine max
  unsure (1)..(459): unsure at all n locations
cctcaagctngcatgaccaagcttcttatgttagtcctattgatgctcnttgactgagagtaagcatgacaccttttgacaggacaaatcaccaagtttaatcttatagagagttccttgttagacgatacacatatccttgttaaacgtgacattgtatccattgtcacatgattgatgtatgcttatcagattatgcttcaaccctctaataagtagaactctatcaatgggaggataaggaggaatccagaccttactaacactagttattagacctttcttggtaaagaagagtgaagagttgtccttgttctacacgatatatatatccttgtgagttgattcanagaaggcaatcatcattctcttctagtactcatagatggctcccttgaacatgggagacttgttcatagcagacccttcttccattgtttaagaatntctatctctact

SEQ ID NO: 87529 - DNA, 215 bp, Glycine max
attaaggagctgaacacaaagccgaacacggtgcaagacaccgaaacggcgcaggtggggcgagggagcgcccaaggtgaaaaaggcgagaaaaaaaacaaggggtggggagcccaaggaaaagaggatatgaaaagggatgagctgcggcatacggtaatgcaagcttgccatgaagccctctccggttaggtataaacaccaaaacgggaacg

SEQ ID NO: 87530 - DNA, 483 bp, Glycine max
  unsure (1)..(483): unsure at all n locations
actctcgcacatcgtcagggtaccaccttcgatttctatttttgcactganctangcgacggggactcgacatatctcgcgaacttcctacttgacaaggctactacccttgacactgaacaacctctcttgccaacaagctggctcacagcttgtgacgcttatgaactgtccaacggtcacaaaatggacgtgcgcaaagacgtgccactcctatgcacacatcatccctctatggcagtctttggatatgaacacggacacgtcaccctaagcagtcgagcttctatgtcaacaggttatctctaaatacctcattacttgaatattaatgatcatgttgcaactcccttatcaagtggcaagcacttaattatattctataagagatgaattatctatcatttacacatctcagcaacgatagttacaccactactataacgccacaaacaatgacccgaagctccccttcactctata

SEQ ID NO: 87531 - DNA, 265 bp, Glycine max
attcttgcataaaacacaaattcttctaaacatgggattcgcggatatgatatagcctacgtgtcaatctttacatttaaaccataggccacaaagttatccccatattattttaccattcgcaagcccgttgaacgcaacacttgatatgtttttgtaacactgacctacgtaaaaaatcttctactcttaccttacgttacgagagtcaacgtgtagtgacggagacttctatcatttggcggctaatatgatgcatatactc

SEQ ID NO: 87532 - DNA, 313 bp, Glycine max
  unsure (1)..(313): unsure at all n locations
tggccatagcggctcanctgntacacccggatcatataatattcattctttacattgtgctctggtactacaggacaatgttgaggcaactactgaagtttcaaagacttaatgaaaaaattagaaagtgctcttacatgacactactatcatgtgcctatgctggaattggaaatgttctcaaggtaaaatcttgtgatgaactaagtatgattttttttaagaatgaaacttttgctacaccttacaatgtttataatagctgattgcggatgcatgttctatattaactattggttggtgcttctttctt

SEQ ID NO: 87533 - DNA, 467 bp, Glycine max
  unsure (1)..(467): unsure at all n locations
atccttaagcaccgcggctgcagcttgccgttagtcagngatggaccattcatattcaaagngctcgtcgataatggttccagtttaaacgtgatgcctaagagcactttggagaaattaccattcaattcttcccacttaaagtcgagttcaatggtggttcgtgccttcgacggcacccgccgagaggttaggggagagatcgatctcccagtacagataggccctcacacctgtcaagtcaccttccaaataatggatattaaccccccctacagttgtctgttggggcgcccgtggatccactcagtgggagttgttccctctacactccaccaaaagttgaaattcatagtggaggggccattggtcatcgtgtcaggcgaggaagacatcttggtgagctgcccgtcctctaagccttatgtggaggccgcagaggagtcattagaaaccgctttccagtc

SEQ ID NO: 87534 - DNA, 252 bp, Glycine max
ccaacgactcggagagatacttgtattgcgtgctatcctggatgttgcatcttagggcatatgatatatgcattacactatgcatcatcatggtcagtgcgaacaaaagttatacagttagaaatattttttcaaacgcatagactctccgctctaatcaactacagggtcatcgtaatcaactacaacaacctattaggagcttgaacagtcatactcgaacaattgacttggatacaactatgtcataat

SEQ ID NO: 87535 - DNA, 416 bp, Glycine max
  unsure (1)..(416): unsure at all n locations
agcttaccaactaagctaccaaaagagatataattatattaacatncaacactaacaagtaacaacttgtgagagataaaaccacagtaaatacttcatagatatcagtccaatgaaagaaaggtcatgtagagaggcataacataagatacaaatataccaggaatgcatacaacaacaatttgaaattagattttgaatcaaagatataaatacctgagttcgaggcttcagcacaattgactttccagcaatgaccgcaggaccactttgaattacgaaacagcaatgaccacaggatcaacagtggctaaaatcgctcctaatggaatttgaaaatagtatggcagcatatatttaacgtcatcacaataaaataataaaggctaaatgacactattaataatatatttgat

SEQ ID NO: 87536 - DNA, 508 bp, Glycine max
  unsure (1)..(508): unsure at all n locations
cgcgcaagtgcaagtataccctatgcaatagtaacattgtgatttcataagtcacgatattgaacccaaaggaatagttgtattcccaattattaaacttattaaacaaacagtagaatggattacaaacaggatctaaatatttttgtggttgtggtttttataagaaagcagatccacacatatagagaggagttttagttatgataaaaatggcatgaggttatgactcactagtaccaattttcctccaaccctagtctaatgaaattacttccctaggtaattattggtttccaaaatcaactaaaacttatgatcaaggtcagaagatgctctgtgccttatatcaataccccaatgaccatggatctatcattgtaagtcaaaggataagattaattctacggatgattaactaaagaataactaatctatcaaagaatacccaacagatntgatcatgcaacttgggataaaatattctctacctagatctatcaattac

SEQ ID NO: 87537 - DNA, 301 bp, Glycine max
gaatcacacatctgtacctgtcgcaagggtccgcggatagcgctcctcggccgaccaccatacaaacctttgtccttcctggtggactcggagcaattgatcaacctgaagcggatgctcgaaatatttacaatcgaccttcttaaccacatgtgtatatcaaccactacagacctatatgacgttggagacaatatcgggcctgcatgatgactaccctactctatatggtaagacatagcatcgcaactgcagttgttcgtacatgcaattgttgtagacctgttagcatacattctcc

SEQ ID NO: 87538 - DNA, 502 bp, Glycine max
  unsure (1)..(502): unsure at all n locations
ggatcttaagcacctgcggctgcacttatggtgacagtncatatagattgttattggatttattactggggcaacacctcttactgagatttccaagaaaaatgtagcatttaaatgggggaaaaaacaagaacatgcattcactacacaacactctccattcaaagtagtgtatgattttaatcccttggctactcttgattntttaccattgcctaacatttttttattttaagcataaggatgcacaggctaaagttgagtatgtgaaaagattgcatgagcaggtgaaggctctaattgcaaagaagaatgaaatttatgccaagcaagccaacaagaataggaaggaagtggtacttgaactangtaattgggtttgggtacacatgaggaaggagaggttccctaaacaaaggaagtcctaacttcaacctagaggagatggacctttccaagtattggagaggatcaatgacaatgcttacaagaatgatatttc

SEQ ID NO: 87539 - DNA, 487 bp, Glycine max
  unsure (1)..(487): unsure at all n locations
agcttattctacaccttanaatgaggtcttgatttttgcacaaaagagacagcttgctaaagaaaaatttcatgcagatggaccttcttctagtaattctgacttagcctcctatccctcttccattcccatctaaagcaattccaaacaaaaaatggaagaagcggaaaaggagatcttggagactttaacgaaagtagaggtgaacatacatctgctatatgccatcaagtagattccaagatatgccaagtttctaaaggagctgtgcactcacaaaaggaagctcanaggcaatgaaaggattatcatgggtagaaatgtgtcagcattgataggtaaatctgttcctcacattcctaagaaatgtaaggacccaggtagctcttgtataccttgcattattgggaatagtanatttgagaatgcatgctagatctacgagcatcatgtagtggcatgcctctatccattttcaatctttatc

SEQ ID NO: 87540 - DNA, 474 bp, Glycine max
actatagaaactaagctcgagatgaagaagtgttgaagggtgaaactttctttgctttatttttgaccacacagaggcacctgtagatatgtcgcgggggtcaggagaccttgcggacgtcatgtggggtgctattgcccaaaaccaagcttgaccaatcccgacccaacccgggcatagtcggtcagtgagaacttgtgatgtacctaaacagacgagctcctggcagtcaacagataataggaacaaagaccacaaagccaggaggcttgtggtggctggccaactgtgaattttgtgtgatatatgggttgtggcctctggtaatcgattaccaacggtgggtaatcgattacaaggcttagaaatgaaacaggacgcttagattgtctctggtactcgttaccaaggggtgaatcgataccaggcttgaaacgaggtcaggaagccatgagagcttctggtaatcgatta

SEQ ID NO: 87541 - DNA, 333 bp, Glycine max
  unsure (1)..(333): unsure at all n locations
actcaatcatgtgatgactttgaatgtctaaagttaaagacaacatagcttcaccttgaatagtatgaggctatccaanaacaaccttaagatgttgctgcgcctcattaagagattgaatttttgagagaaactatatccaaatttgttggatgcattgagaaacttaacaaaatgttaagatacaacaaatgtccaactaacaaatcgagatatggataaaatggaaagaagtatgttcatgatgaagaaaccatagtatgttatttctatggataggttagagacatgacgaaatatatatcttattaggttaatcttaggtaactatca

SEQ ID NO: 87542 - DNA, 358 bp, Glycine max
  unsure (1)..(358): unsure at all n locations
aagaanccaaccgagcctcgcattgtaatctcgtctagtcactcttacaacaaaatctaactgagcgttcacgttgtaaccttggttaaaccacataaggagaaatagtaataaaataatcaaaatatctttaaataagataatctaaacaatcgagcagacgtttgtctatgaagtttccttgattgaatcgactaataaccaaagtgaaactaaggctaaatcaactcacacatcaagttatgtccgctaaaagcactgaaaacctgtttaaggtccaacgcctttaacggtcctctttgcttttatcggctaacattgaccgttcaaaagcataaaatcaacacatcactttact

SEQ ID NO: 87543 - DNA, 479 bp, Glycine max
  unsure (1)..(479): unsure at all n locations
gtgatccttcagtcacctgcggcatgcangcttctatggaggctaaatcnttgagcttcaattaagttcttctatggtgattntccacccatggagatgcagcgaaagataaaggagaagggtgagaggagatgccatccactatggaataagccatggaagaaggagcttcaccaccaagagagtgccttggataagaagcttagagaggtatcttcaatggaggaaaagaaagagagagaggnggggagggggagcactatcttgaaggaggaaaagagggagagaagttgaaatttaaatggtgtctcacaagactctcattcatcaaaggtacaacaaggtgtacacatgtntctattatagcctatgtagctttcttgagagacttccttgacaaacttctttgaaaagcttccttgtgaagctatagcttagctaccccacccctctaatacttagctcacctcttgaaagct

SEQ ID NO: 87544 - DNA, 474 bp, Glycine max
  unsure (1)..(474): unsure at all n locations
agtcacctgcggcatgcaagcttcctttcctacccgcttgctcctatccttcttgttggctgcactaccttctgcaacacttgcttggtgtctctattaaaaacctctgctttcccattagtttggggatgataagcttgatgtaagctccattggagcttgtaggcctaggatcttcttcatcaatggattcctttgcttcttggaagatgaatggcagcggaatggagaacgaagagagagaggagacgccacttcaaggagaagatgagtctagaagaagctcacccgcataggaggccatggataagagcttggaggaagaatgagatgaatgaagggagagggagagaaaagcatgaaattttgtgctctaagagagctctgaaatctgaagtttaattttcaaatgatcaaagttcanaaaatgcacacatatggcctctatttatagcctaagtgtcacacaaaatt

SEQ ID NO: 87545 - DNA, 249 bp, Glycine max
tgatagcatttgtgcagaataattatgattctgaacaacaaagcctgtgacgattactatggaccagcttgcttgaacaatgctgacagactgcaggctctgtaataataccagaagtgaatcgatgcccacacgggttgaaactactgcgaaacggtcgattgaattgtactgtaaccatgccatgtgcatataattccactacggactgctaatcaagtctaagctgagctcaaaataatggtatca

SEQ ID NO: 87546 - DNA, 401 bp, Glycine max
  unsure (1)..(401): unsure at all n locations
ccagagncacctgcngcatgcaagctcaagatgaatcagaatgattcaaagagttttgttattttatagatgatgacaaaaagcaaagctcatatgtcaagaacactgcttgatcacaaagatgatgatctcaagaggcatacactgagttctagattgagtcaggatcactctctggatcaagaggaaatatgatttcaagaatctagtgtcaagattcatgttccacgaatcaagatcaagattcaagactaaagattcatgaatcaagagacgactcactcaagataagtattcaaaagtttttttaaacaactgagtggcacatgagattttctcaaaaaccttttaccacagagtttttactctctggtgatcgattaccagattatggtaatcga

SEQ ID NO: 87547 - DNA, 237 bp, Glycine max
  unsure (1)..(237): unsure at all n locations
ttagagtcgcgctgcacgcactgcagctnntacatagcatgacacgacngcattataattatctttacatacaccngcaacacggggcgggtcgttgttataacctaccaatgcgaatccataatgtagaggattgaaagctaatagtaagtattacttgttgttagacgggggtggaggacgtacataatactgtcgcatcgcgtttncgaacatgagaataatagctatgacttt

SEQ ID NO: 87548 - DNA, 325 bp, Glycine max
  unsure (1)..(325): unsure at all n locations
cctctactgctngggcctgttcccacaaagaaccacctgttgaacattgaagatgcacacaaaacccacagactctcaacatcatagtgcactgtaccatgctataagcactaattaattctactctcaagatacaaaatcggaaaccatcgtcagtatattggtatcacgaggatgttctctcatcaaatcaagaagataatgtctgattaggtactaagagggcattcatcaatcataaataagccaacaagcaatcgtactggaaataagatttataacaactatgaacttgcatacatacaactagattgcttcaatgtgc

SEQ ID NO: 87549 - DNA, 446 bp, Glycine max
  unsure (1)..(446): unsure at all n locations
agctngctggagaatcctttcttnccatttattgaactatcccagnnngtgagagattatactttcatctaccaggtgaacattatattatctttaatgatgacgaagatatggattctttactttctaagccaagtgtaaaagaatctatgtttatttcctagttgaaagcaaataaaatcttcaatgaagggaaaatcttacatatgcatagtttgtcacaaagtttgtctacattgcaaaaacaaaaacgatgttgccaacaaaggaaacaaggctatagtatctgtcataccctaatttcgttcggggactattgcttgatggcatgcaacctttgattgatcgcttcgaagtatttggcaccctctgttgcacaatatgtgaagttccgagacgtgccgaaaatganaaggaagcgtggttacgccatccgtgaaatccgt

SEQ ID NO: 87550 - DNA, 309 bp, Glycine max
  unsure (1)..(309): unsure at all n locations
gacgaatgtagagagccatacatctggctagaatgacatggaatttatatcaaccttgcttactgcataagagtatcttggatgaactcatagttgtagctattgaagaccatgtntcgaagttggagctgatgttgaagaccacgtatggaagctggagctgttgctgtatctatatcaaagtttgatgacatggcaatgcctcaaattcatgtggctaaagtagaccggagtgtatactatatcttgccctcatatccacatcgtgactagtgtacaaacgtaatctgacttccaatgacgattgat

SEQ ID NO: 87551 - DNA, 412 bp, Glycine max
  unsure (1)..(412): unsure at all n locations
gatccttaagtcacctgcagctgcagctgaggtaaatgatgcctggtttatctgnttcttaactggccatgaataaaaaatctgcacctgtcgtcagactctgtggtttatgctcctctgccgaccaccacacagacctttgcccttttgtgcaacaatctgaaccaatagaacagcctgaagcttatgctgcatacatctacaatagacctcctcaacctcaacagcaaaatcagccacaacagaacaattatgacctctccagcaacaggtacaatcccaagtggaggaatcatcccaaccttagatggttgaatccttcacaacaacaggaactacaacaacaaccttatttttagaatgtagtgggccaagctaccatactgttctccaccattcagcaacaactaca

SEQ ID NO: 87552 - DNA, 339 bp, Glycine max
cagccttcgggatgaatcttatggatggcccaagtgggcctgcttgctatttgcacccccctgtttactaaaagcaccaccatttctatttttgtgcaacactctttaccgaacgatacgaaactctcctaagcttgcgtaacgagtacttatattctcttccgcactgttatgaatacataccgactatgtattcactcttatctatctctcgacgaagtcactgacactcgctggttgcgcacaaaccactctattgtctatattctgcacaatacggaatctgacgaatcacgctagcctactacctgttgatggctgagatggatcaggacttca

SEQ ID NO: 87553 - DNA, 274 bp, Glycine max
  unsure (1)..(274): unsure at all n locations
agcttcttatccaatgctcatacaggaggtgaagttactttttctctggcanaccccataatggatggcgcctcctctcatcttttctactctgtctctccgcgcatatccatggtggaataacaccattaaaggaccccattgaagctcaaatatactgcctccgtagaaaccccacaagcatgccatcttcacattatatacgcatacactatatacactacactctttctttttaaacatgatatcgtgacatattatttttaagaccaca

SEQ ID NO: 87554 - DNA, 435 bp, Glycine max
gcttgcctaaaaatgctatgagatttgtattatttataataactgacatagggataggaaatcgaataaatagaatgagaatagaaatggatagaatagaagtgaggagtacacttagtaataaaggatgtgggattgaaacgtgggaaaaataagatgcataatgagatatttataatgtattattaattaaactaactagctaggcaatgataaaaaaagaaaatcacattgaagtataaacgatagagacaataaagaaatacaataaaataaagagctattcactaatatgtataatgattcttaattttttatttctttgtcttttattgtctatgttttctttattatgatttttgattttgtttctctttgctatttttgtcaaagtcaaaggattgactttgacttaatcaacacttgttgacaagt

SEQ ID NO: 87555 - DNA, 349 bp, Glycine max
atggatagggttaccactactggaaaacccgggtgcaaatttttatcgaggcgatcacatctaaatatctgggaagccattgaaacagggccttatatacccaccacagtagacagagtttcaagtataatgtagttcatcaactgaaagcgtaaccatagaaaaaccataacatatatggtctgtagaggattgaacacgagtacaatacaacctaatagccagcaacatactaacatctgtcctaagaatggatgaatatttcagatgttcaaaatgcaagagtgcttatgaaatgtgggacactcttctgttaacacatgactgaactaccgatgtcaaaagatct

SEQ ID NO: 87556 - DNA, 372 bp, Glycine max
  unsure (1)..(372): unsure at all n locations
agctngatatcttttgaatntggaacatgtgatctcagacaattntccatcctcaaactctctagtactttattgatatattctttctaagacaagcctaacagttcatgtgatccatctcaaaatatgtctattcctgtgacatagcttgcctcactcgtgaatgtatgaatacatgattttgatgatgtcaaagtagaatcaaacaagggtgctttacaggagaaacattgcttcaagattaatacaaggttgcttcaacaaacaaagctgtgcttcaagattaactaacgatcaagccttgcctcacaacagagtgtttccaagacatccaatgcttccgtgatcgattaccagacagtgtaatcgatt

SEQ ID NO: 87557 - DNA, 239 bp, Glycine max
  unsure (1)..(239): unsure at all n locations
tcgataccaaagatnatgactcacgtgatgactaagagctcatagatcaatcnacgaacctctcaggtgaatcaaagatcaatcaaagatcaactcatgtgaatcatgaacaattccagagttcaagagtatgaatcaagaagaattcatgactcaagaagagagtttagagtcgagaatcaagattcaaggctcaagattcaagatcaagattcgagactctcgattcacgaatcttt

SEQ ID NO: 87558 - DNA, 420 bp, Glycine max
  unsure (1)..(420): unsure at all n locations
agctntntacgacgcgtgaataggacggttctactaatttcgttcttaacaaatgaccggtnggcatttttgtaaataacagtacacgaaccattcaatacgaagacggttattttccgaaccggcgtcatagattgggcaagtttaaaggtagcccgtgagccacagccactgaagaagttaagcttcaaatatgtgaagcttgctctcgatctcatctctcccattcacctttcactcgtgcactctataactccacgctcctatcaatgctcctctacggcatgttcctgaatgcccccattgggaaaagaggttctagtgctgggggcctatggttagggtttgtgagagatgttggatgctccatgcattgatgagtcttatcgcangctgttggaagccattcgagcacagtga

SEQ ID NO: 87559 - DNA, 435 bp, Glycine max
  unsure (1)..(435): unsure at all n locations
agcttgaatgaggaagtgtggaagggtgagactttctacttttattcgttgaccacagagtggtacctggagatatgtcgcgggggtcaggagaccttggggatgtcaggtggggtgctattgcccaaaaccaagcttgaccaatcccgacccaacccgggcataatcagtcagtgagaacctgtgatatacctaaacaggcgagctcctggcagtcaaccgataaaagaacaaagaccacaaagcagggaggcttgtgtggtgactggccagcaataagtcttgagtgagaattgggatatggcctctggtaatcgattaccaagggtaggtaatcgattccaagacttaatagtgaagacaggaagctaagatggccactggtaatcgattaccaacggagtgtaatcgattaccacgcttganaatgagatc

SEQ ID NO: 87560 - DNA, 399 bp, Glycine max
ctaagctttgccgagatactgtaaatctggacttagcctggtaattaacttacttatgccattgcctcccttgcccagtattatgatcagccgatgaggtgcttcacctttgggaacttgcagctatcacctatggtagaataatttgaagagatcctaggatgccctctaggggggaggaaaccatacctcttcacagggttctatccctcattagctagaatttccaagatagtccaaatctcggcgcaagaattataccataggaagcaagtctaaaatggggtggttggaataccgataaaatatttggaggcaaaagcaagattcttggcaggtaaaggcgagtgggccccgttcatagatattctcgcactgctggttttcggaggagtcctc

SEQ ID NO: 87561 - DNA, 428 bp, Glycine max
  unsure (1)..(428): unsure at all n locations
tcacctgcggcatgcaagctntgggaatagcattagctgggaatcttgattcatgtattgtttttacaggactactgtggccacaatgcaacaatcatgtggtactcgtactgacatgacctagcacgctagcaccatggtttcacaagacggcaagatgcccatcgtacttatactctgatgtgagttttcaccatggatagcatctagttgtaatggacgaaaacaaatggcttcagcctgtatcaatgttataaaaaataaaagattattgtttgttttgatcaagagtgaaataaaagtgatagaaacaggagagaaagatcctcatgtataatgatagaaataaagagagaaatagagaaatttgtcttcaattggttagatgggtagaatataaaaagcgaaaaataacaaacgatatgagt

SEQ ID NO: 87562 - DNA, 470 bp, Glycine max
cagatgtcttgacatagtatcatcacacaggagaattctttctttctacccctcatatctcccaaaaccccatacccacgaaaatcaagagggaaagaagtccacccgaacctgaaatttgcgagtcccactcgtagccacgcacttcacgactccaaaaatgccctcctttcgcgatttggagcacaaatgagcaccaaagggtgaagctctgctgggcaacaatggtggatgggagaaaagaagaagaacgctgcgtgagagagagagctgtctgaaattgggctgagtgaagagagagagggttgcttttttgggttttaataacagggggttctctttctctattattttatataagcaatgccacatgtctccatatgagtggagcaagaagggcccactgtctctgtttgactgtgacccatactcagtcacaaaagtgaggaaaatctgaccttagaaacgct

SEQ ID NO: 87563 - DNA, 433 bp, Glycine max
  unsure (1)..(433): unsure at all n locations
agcttgttaatttatgaccgaaatggaaaagcttgttcttgattttattangtcgggaaccatcatgtggttccgtacgagaacaatatttcttaaataccgcaacaaatagctgcggttacaaatctgtcgcgacattaaataataatcttttgtttccttatctcggcaatttttctaactgccgtattttaaaacaaattattatttcctgatttgcggcggctacagcctgttgcaaatggtgtttggcggtttctgtaattgccacaataagagctcccaacaatctgaactttcataattagctttaacaattgttgtataacatatttttcttaatgtgaggagttcttaaactccattgctttgtgacatattcagccctgtccacctctccactcaaattctaatgctgtggagagaattcctc

SEQ ID NO: 87564 - DNA, 386 bp, Glycine max
acgccttacgactgtggagctctatacaatatataaactgtactggataccttataactaaacctggatttcaatactctattatgaaattaagacatttactttccttatttactacaacaaataagttaatcgttcaaattaaatgttgaattgctgtgaacgtgatgtgcatgaaaatatgtaattgtgacatgagcttattagaaataattaatgagatgaaaataaagaattatttatagaatgaactatgagcttattctaggccaacataaattaccaaacactgtttgttagtatcatatacacattgtatgatcataatcaggtatatctttaatatcaaattataaataaaatattagttcacactcttatttatt

SEQ ID NO: 87565 - DNA, 492 bp, Glycine max
  unsure (1)..(492): unsure at all n locations
atctctgagtcacctgcggcatgcaagcttagttgagaatgttntcagctaaccttgactatggttatnnttttactaattntaattaaggctattntntgtcaacctcaattanggctcttttcttttttgatatcagttggggatgcttttggtttatttttagtcgacttcaactagcaatatatttggtcaaccttggccaaaacaattttggttgacctcggctaggactattttcaatcaccttagtcagaactatttttggttgaccaaaacctgagtgttcaaaaagtgagtcataatattgaaacttatcanaacaaggtgtgggaaaaacaagccctattcattacgggttggaatgtactatagagaactgggctcttcttcgtttatgctaaatacaggcattaccaatatcgagggtccattgctctgacttgaatntatcatcacatantaaaatcacgtcttatgctgcccctcata

SEQ ID NO: 87566 - DNA, 411 bp, Glycine max
  unsure (1)..(411): unsure at all n locations
gagagagagatctagacttgtgggagcacgggattgaaggaagaatagaggaacagacagtgaactttgaagtttgtctcataagactctcattcatcaaagttacaacagagtgatacaccatgcgttctattctattagactaccgtagctttcttcgagaagctttcctgagaatacttccctgagaagttagagattagttttagacacccctctaataactaagctcacctgcttgagaagcttcttgagaagattctaaagaagctagagcttagctacacacatcccctataatagctaagctcaccccatgccaaaatacatgaagatataaaaaaagtgcctgcttcanagactacttcaaatgccttgaaatacaacgctaataccctattctactagaat

SEQ ID NO: 87567 - DNA, 461 bp, Glycine max
  unsure (1)..(461): unsure at all n locations
agcttcaactggtgaaacgccatanggtttttgttttcttgttgatcactntcttagctgaaaatgtaacaaagcatgattatctttaccaaactaacgaacatggtgtcaattgatttgcagcttctttactgttgatggtattctcaaaaatcatgaacaagtatgacaggggctcatttggttctaaaatattatctatggccgcaagggtcttcacttatgtactttactactaactattaataaccattaactaatgactgaatctgtaataccataattttctctgttatgatgggctctggtcataccgtacaacattatgctgccttgtggagagactaagtaaaggcctatgaaacttttattgtcttcccccaatcttgtgcctatatattataattcaacgtcgacgatcactataagctgtaaccatgatggcatgtactgattcatga

SEQ ID NO: 87568 - DNA, 464 bp, Glycine max
gcgcgtattctgatgatgcacaggactcaagacacgtattcttatgcaagcaagttacaagaatcaaagagtgattctatcaagactcctgtaaagaggcaagagaagactcatgatatgcaagaacgttgcgaaaagcatctagataagcatcaaaagatctctttcataagaggagattgaatagcacaatatgtccggtagaattttgcaaagaaaaatcttttaccatcagattctactctctggtaagcgatcaccagacggcaataatcgattgccagaagtccaaacgatactataactgtcttaccgagtagtaatcgatcaccaatggttttaaacgtgggatgtcaaatgcaagagcacaacttgcataaacatttcaagtcgtgtatcagtacacatctttgtatcaataccagtgttctgacgttgtttcaatctaagctgacagtcacatt

SEQ ID NO: 87569 - DNA, 436 bp, Glycine max
  unsure (1)..(436): unsure at all n locations
atccttagagtcacctgaggcactgcaagctttttggagtaganacatgggacctactcattntatttcataaaggaagtcgtatctagtcaaggtcttagagaccatacaagtttcctaacgatttctaattatgtgggccattaagtctatcatatgctgacaatagccgagaagcccatgaatctcttctggggcggagtatgtgtgtgccatcgccttggccttggctaacaatcggggaagttcttgactcccgttcaaggtaagagcaaaccgatccatccacatggttgcctcttggtgtaaagagtcaatcacccttcctctagcctctttttccgcgtatacttgggcatattcgtccgcaatcctatgctcgtgggccgcggctagacctaactcttcttggtacttggcgatgataactagcatg

SEQ ID NO: 87570 - DNA, 323 bp, Glycine max
cttcacggggaacctcttggaatgctcaagtggacctgattactatttgcaccccctgattactaaatacaacccctcgccttttttgctgattatgtgttcgtaacgttacggaactttatgaagaatggaacgatacttgttctgtttccgtaatgtggcgaaaccgtacagattacacaagcatcccttctctggcttctgaaatgttacgaaactattcagattgtgcattaacacttcctcttgacttgcggcgtgtcacggaaattcacggattgtgcagcaatgcttgcttatgacattcagcatgtcacggaaac

SEQ ID NO: 87571 - DNA, 344 bp, Glycine max
  unsure (1)..(344): unsure at all n locations
agctntctcccaagtcctaaatgacatttcaagttattattaactcactntaacctccatttaccacagaattcagacttagccttccaaccctcaaagcctcactctttttccactcataacatcacattctcactttctaaccctaggttagttctacccttcatctctaacagttntccatcagcaatttcagcatataaacatcacaaacatcatcacaaaaaccctaaaacagaatgggtatgtntaactcatccaacatggcaatttcaacaagctttcaacaaaagtcttcacaaataatcatcacacagcagaaacctagcaagatacccatcata

SEQ ID NO: 87572 - DNA, 429 bp, Glycine max
  unsure (1)..(429): unsure at all n locations
ttagacctcgattagtcatgantcctggcctttgtcattgtcattanaaacgatcagtatcggagaataatatttatttggcctacatgggctaatgctatcctggatgaataaattggaacatgccatttatggcccacacaaaacgtcagttgagctcgcataaaaaaaaacatagccgacctacattgtaaattttgtatgcgacaccaatacaagagaacttcctttgccataaaaaaaacattacccgccagcgagtgttctttaaaataaattgcgcaatgtcggctgacaaatatcaatcgggctacttcacgaccgatgtcggctaatgcgtnttctattcaatccctgaatgaaatctgcatgatgtctgctacgaaatgttcgattggcgtcatccggtgatgcttcttttcttgacct

SEQ ID NO: 87573 - DNA, 432 bp, Glycine max
  unsure (1)..(432): unsure at all n locations
ctaagctacctgtcgagcatatggcgggactctaatgacttatggttcattgttccctcagctcacacttctgggggattactatgcttatggaatatttctgtccttgaagtacacagcatggtgaaaggcagcaacttcctaatgcttgcatgtagatggataaagcatgatcagaggatatacattgttaatatatatgctccttgtgacctacacgtgaagagagctttgtgggaagagttgaggcagctaagaatctctcacactgatggtctttggtgtttccttggcgactttaatagcattagacgccaggaagacagaataggcacatctagaatgggaaatagctctgatatctttgaattcaataactggatttctgatgtggaactgtangagatcaaatcttatggtangagatctact

SEQ ID NO: 87574 - DNA, 459 bp, Glycine max
  unsure (1)..(459): unsure at all n locations
ngctagattacaataagtattgtcctaccacttcttttttctttatattctctaggccactactgacacaccattagactcttcctgaatttaagacacctaagtattatttgacactaagcaactcctatatttcataaacaaataatgtttgattgaatacacatattcaaatcactaaacaaagaagataaacgatgaaacttgaatacaaacgaacaactttgctatgcaaaagaagaactaattaagcactgttgtgtataatccaatgacttgatataatctcactttagaatagtcttgctttccacttcaaatattcattctcttatttctttcatttgatagcacaccctttgttgtttttataaacatcatgaaatatctattaaaggattaatgcttgttaagtctggaccatccacttaccactagatgaccttgcatacctcggat

SEQ ID NO: 87575 - DNA, 490 bp, Glycine max
  unsure (1)..(490): unsure at all n locations
tggacttacctagcaataataccatttattttccttttgatcctnganncccttgccttgttttgaagctcactacaagccttaaatgaaaaaccatgatatcaccatattcttaaggaattatggagctttggaattgttttgggaataagcgtggggggttgttgtttcatcggataacatgtattgttggctatgcttcatcatgtattatgggccatactcgatgcacattgtatattgcttaaatgttggacatgctgaatgagatgttgttactctcatgcttcgtacataaaaattgaataagaagaggacaagcaatatagccgagtgaataccatcttacatgacaaaagaatgatgagactctnggctctactcgtatatggaaaactttatctctacttcttttattatcatatattccttaaatgcacttattcgcattgcttctctattcctttggattccccacttattccatatt

SEQ ID NO: 87576 - DNA, 362 bp, Glycine max
  unsure (1)..(362): unsure at all n locations
agcttaaagactaactcaatgttatattagtgtttatgagtataacacagagatggagatttccttgaattnggctcaaattaacgagtctcaagagaccaccatgagcaggttgttgcatggtctcaatatggagatccaagacattgtatagatacaccactatgcctctttgaggatctcattcatcaagctatagaggttggacatcaattagagaggaaacaaatattctagaaatccccctatgactcttaaacttggaaggataacgagacattcacgaacgaggaacgatcttcattcaactctcatgacaatggcgtggcccttggtaaaataattctaaccctattctcact

SEQ ID NO: 87577 - DNA, 306 bp, Glycine max
cataaaactaagctttatattttgccgctgcataaaagggatctcctgttgttcgacgcatgctcttgggttgttgcatcaactcatgctcacttcagttggttaatgctaataatgccaaacagagcaaattgtttgaattgtcatgaccatatcatatgctcatactacactgctaataaaatgcctacatactgtctgaaaggactgcttaatctaactactgcttttacttaacaatacaagtttgttaattaagtaagagctactaataacattcaggataatgctatcctcgaactacac

SEQ ID NO: 87578 - DNA, 413 bp, Glycine max
  unsure (1)..(413): unsure at all n locations
agcttcaccacttccgactatatttncatctggatcacatataccctcttgtgcttggcctggtatgtataatatctcaaaaaattgctgtctggtcttatgtttgcatatcctgtttctaactggcatgttcttttcttctgtacctgcaaagaaatatttacttgctgagtggcttctaactttaataatctctaacaatctttaattaaggaatgatgcccattgctgattgcatgaacaaatgaattgtaatccttccaatcctttgaataaactcttatgctatcatgcatgaggaatatagagcaattctattcatatgccgacatatataaattcttgacccatccaatatgttattaacttattatctatttatatgaagtcctggttgaatgttcatttcatga

SEQ ID NO: 87579 - DNA, 370 bp, Glycine max
  unsure (1)..(370): unsure at all n locations
gacacatcaaactaagcgatgtggacatctctgttgactaaagagattggtgttctctttggatggagtatcctatctattgtacactattctgttagaggctgattaatgagatgcggtgtgtaccaccttaacggagaataaacaggtaatcggtttatatatgctgatacatgggttagtacgctactatacaatatttgggaagatatacatattcatatttctgtctaactactaaacttaaggtttcaattnctatacttacacatatcctacttaatttctatacttactcttgatacagtctggagagatgactatgattaaataatgagataggcacatgagatgacggaggagcaaaaag

SEQ ID NO: 87580 - DNA, 444 bp, Glycine max
  unsure (1)..(444): unsure at all n locations
agctntataagcgcgggtttgtgagacaaaggtcttgcgttcgctatatgcgaagatgatattccgagtaccttggatntggtacgaccatgccctcctgatttccagctgggaaattggcgagtggaggaacgccccggcatttacgcaacaagcataatgtaaacctttacggttttaaaagctctatagttgggcctaggctttagagtttttccttttntaaggctttgtgtctttggtttttgaatttataatacaaggatctttcttcatctgttcctggtctctacccattctcattcatttgcatgtttacttctttntctgaaacggcagatccgatgacgagtcccccgaaggtactaatacctgggacccgtctatcgacttcgagcaagaaaatgaatcanacggaagatgaaggaaatgaggatgtgggac

SEQ ID NO: 87581 - DNA, 260 bp, Glycine max
  unsure (1)..(260): unsure at all n locations
atatgcgaacatgatcttccgagtacttaggagaaggcactaccatgctctcctgatttccagatgggaaacaggcgagtggaggaacgccccggcgtttacgcaacgagcatgatggtaacctttacagtgtttaaagctctatagttgcgcctcagcttaagagatttgctattttaaagcattgcgtcttgtgtctntgaacttataatacaaagagcgttcctcatctgatcctaggctcgacccattctcatgca

SEQ ID NO: 87582 - DNA, 411 bp, Glycine max
  unsure (1)..(411): unsure at all n locations
agctngatagatttctagtgtcacctgagtggatcatcttatttgtctgaaccatgcaatgcaccttggacagatatttctcagatcattgtccacatatccttatgtcgaaagttattgattggggacccaaaccttctaaggttctggattcttggcttctagacaggtcctttatagagttgtgcatgattgctggtcattcacccaacaaagtggatgggctggcgaattatagatacacattacattatagaatgatagagagtgagagagagagagagagactaacagagagcgagagtggaccaccgtcaagaatagaaagagagggaaatcgcgagcataactaaatgtgagagcggattccaaacacactactgcggaaatgtgcttcgacaggatagtaac

SEQ ID NO: 87583 - DNA, 222 bp, Glycine max
ctctggcagacgatgagttatacaagtgtctctgagtcgaccgcttcatctcactaggcgatccgcttcttttcatccactcagcgactaaggcacacacttcatcataattcgctattggcgctacacggtccatagtcgtgctaatcacacgagctcaatccatgccacctatataagctgtgagtcagatttagaaatggtagttggactgagattcag

SEQ ID NO: 87584 - DNA, 409 bp, Glycine max
agcattctcacaagggagagaaaaaaacatacaacgtattgtgatatattttactcttattattcttcgtaatggcaaaacataaagttaattcccattaatatactatatcatatatgtataggaaatagttaaaaaaaaacatctaaggcctcagtcattggccttaactgcctaaccatataaacgaccttgacttgccactaccctttctcttcatcaagcatgaaaactaaggacatgctctctcaacatatgatgcatttgcatgttagctccaatcctccttatgctggtttcatataagtcaattttgatgcgtccataagacataatgttggaagtgggatgggaatggatatatatgtagagtgttagtggtactatgcaaaggaatcatatatttgtg

SEQ ID NO: 87585 - DNA, 299 bp, Glycine max
  unsure (1)..(299): unsure at all n locations
gctccntcgcgggatccagcgagcacactaagatgtcaagccccgcgaacttctcattgcctggcagataatccgacatgacgctccgaggcaccggccgtcagccgaaagcttgtatgaagatacacaacaccgagagaagaaaactctctactgtcatcagaacacaagagctaggggaggtccatcaacaaatgaggatgcggttgtacaccggacaacactgcgctgagtggttcaatttggaagtctgctccagccaccaaatggaccgtggaacgggtggtaacatgccagtc

SEQ ID NO: 87586 - DNA, 503 bp, Glycine max
  unsure (1)..(503): unsure at all n locations
aagtcacctgcggcatgcaagcttaaggtagttgaacatgttgtgaattattctgaagtttattttgngngncganggcggcaaagtttcgttatgtacgttcatctaaaaatgagaaaactaattagttgtcttagaataaattaacaacactgcgagataaaaattattatatctaagttatataatacacataaantaaaaacagtacggtgatggagatgagagacatatagacatacataataaacataacataattaaacacgaatatcgagacatactataaaatactattgaaacacataaatgacgacactaatgatagttcgaaagatagtgtgcaggagacatgtcttcttccatttagggtactagtttgctagaaatagccacaaattatattaggcataatcatttctagtaattggattctactaacatctctaacacgtgctgatcaatgttcaacctctattatatcttattggattaaattttct

SEQ ID NO: 87587 - DNA, 423 bp, Glycine max
tggacaatgtgctattgtgattacgaggcaaatacaaagaagtacaaaaagtcactaagccttgtgtggtgagtggaataataacacactcaccaataggaagattagggcgtccatgggcattggctccacttgagatcaaacccgacccgagtatatagaataaactttttaacgttcaaatagacctaatttattcaactaaattcgacataaattgttgggcacgagttcctatatgtagaccctacccatccatataatatcatttcatgaacaggattaatactattgtgatctaaattgatcatatagacacaatacattaatgcttactcactcaattattggttcatacttcagacccaccccactatgattttcatctcaaattacgttgtactcttattgatatattaagtg

SEQ ID NO: 87588 - DNA, 311 bp, Glycine max
  unsure (1)..(311): unsure at all n locations
gagcttctagccaaatggacttaccttgaagtaatttctttgatattcttnttgagcacttgttccctttgcttgttttgaagctcactacaagccataagtgaaaaaccatgatatctccatacaccttaggaattttggagctttggaattgttttgggaataagagtggggggttattggctattgtataatatgttttgttggatatgcttcatgaagtattttgggccatacttgatgtacactgtatattggttaaatgttggacatgctgaatgagatgctgtctctcttatgctgcttacttg

SEQ ID NO: 87589 - DNA, 393 bp, Glycine max
  unsure (1)..(393): unsure at all n locations
agaggagatctgtgttatcttagtgagagtgaagctcactaatactcgagtgagacaagaacaccctggctgtatcacatgacgtttacaacctctgtgagttggcctcgctggaaagagtgaggggttccttcctttcatgatcacccgtgttgcttcaaaccacaaatccagaaaatccagctctgcccagaagtatctcggggccatgactcccattgtacgcactcaaattaagcgattctngagcctgaattgactttaaaaacgagacctttcacctcgttttggaatcacctcattgggagacctgtagcttcagatattgccagttctatatcttctgccaaccaccacttaacctacattataccatgccattcattcatttta

SEQ ID NO: 87590 - DNA, 408 bp, Glycine max
  unsure (1)..(408): unsure at all n locations
tagcttgtgtanaatgttacctatctcatgtttaatttttatggcccgcacaacctactggaggagctgctgctattgccatgctaatcgctcctgatgctcccatttcttttgaaagcagatagagaggaactcatatgtctcatgtatatgatttntacacacctaatcttgccagagaatatccagtaggcttttgaatccctatttcatgttctgttataacattngacttttgggatcataaacattgaaaaactactaacaattattttcctcgttatgaacaaaattatccttgcgagttgcactttatttattgttttgaaagccatgaacgatataacatgacctgtcatgccatttacttatcacacttcctgctgatcgtgttcacgatgcctactg

SEQ ID NO: 87591 - DNA, 422 bp, Glycine max
  unsure (1)..(422): unsure at all n locations
agcttgtaagaagtataacaatataggagtattgttttggttgatngataagggacttagatttaatcatgggttaaggagttgtacaactgatagagatatatcacacttagtgagggatgcttttgaaaataagaacgagataaatgtttattttcatcatgaagtagatccaattttagaagaagtcccatagatgttgtacttgggatgtgattcaattccacaagctgttgagaatgaggatgatttagatgatgtacatgttgttggccatgaggaaggtaagttntaattcatctgtacttggtccaacatggttaccataattaattaatatgattaattnttacttgatcaccattgatgcaaatgttggtggtggagggagagaggttggtgctggtgatcatgttggtgct

SEQ ID NO: 87592 - DNA, 441 bp, Glycine max
ttgtggagagtcaacttgtgtttggatggctcgctacttgtcgtctcactactatggatcggacgaagaagatggtgcgttttgacgatgaagccagaagattatcttgcagggctacttcataagagacaagcatcattctccagctttggatgcatcatccaatgagcttccatggaaccaacaatgtgaattgactcgaatcctcacctcacccctgttcccgcgaatcctaatatgccggcggtactagaccaacatgtttctctctttcaatctagaaaggggttactactgaaccgcaatcatgaccatgtcatcaccttgctttccaagtcagaactagagagtgtgcacccttattgtatgcctattaccataacgacaagattgaacatctactccaagaattgttgttagagagtgtcatttgctactttg

SEQ ID NO: 87593 - DNA, 464 bp, Glycine max
  unsure (1)..(464): unsure at all n locations
agctntgagcanattctaatggaaatttattcttactatatgtcagattgagtcccgtaatatactcgagtactgctccgttaatatgaacaaccgatacagctggggttgcagatatgcatatacccataatagactctttatacctcgcgatgtctcgatatgagatcacgtaatctatcgagacactcgaacatgagaacataagctcatagcgaagtcaaacgacaatcgattctttactcgaatgtcccatatgagcccgtaatatgtcgagacactccaaattgaaaatatatgtctctatcatactcataccataataaatgctgactcagatgtccgattgagttcctctaaaactcgagatgccctgcattaacaacagaagctcctagaaaatgtagacgactactacttcttatacggatgcgctattgacgctctgtatatataaagatgct

SEQ ID NO: 87594 - DNA, 415 bp, Glycine max
gcttaccgaccacgatcaacaaagcactttctacacctactatatgttgattacaccaacgctgttatcggtatgttgcgacaatccttcaataccttatttacacattctgagaggttggttgtcatgtgaccatatctacgtccttcttatcataagccatgcgccatttttccttagaaatgcaatcaatccatgttgtaatggctggactcaatcgacgaaatatttctaaattatgatcaaatgtatgcttgcaaggagtgtagcctgcataagaatagttagcaacaacaatgtaagtatatatgatacttaagctaacatcatattataaatgaagtcttacccaatctcgttaacatttactatttgttggatggttgaatttgcgactgacattgcttgctatgtg

SEQ ID NO: 87595 - DNA, 438 bp, Glycine max
  unsure (1)..(438): unsure at all n locations
agcttcttataatctgaaccatnntatctttattcactttttgagcnntattcagaaaattagagtttatctcttttatcttagtgagagtgattctcctaaattcttgagtgattcaagaacaccctggctgtatcaaaggacttttacaacctttgtgtgttgccctcgccggaaaaagtgattctttccttcctttcatcttcacacttgttcttttaaaccacaattccagagaattcacttctgcccagaattatttcgtggccataactcccatattacgcactcaaactaagtaattcttgagcctatattgaatgtcaaaacgagactctttatctcgttttggaatcacctcatttggagccctgtaacttgaagcattgactttttatatttctgtccgccaccacttacctacgtttaccatccatt

SEQ ID NO: 87596 - DNA, 357 bp, Glycine max
accttacgaccagaagtgtttctactaaccactgcgaaagtgaagataatttcagataggatgagaactgctcacagcccgcggaaaagttatcatgattacaggacgaaagatctgtacccccaggtgggagatcaatgtattctcgagactcactccatggtctggggttggtcgaccattgaaatcccgattactctcacctccctatattggtcctgtccatactcttcagatagttggccctgtggcttaccaaattgcacttcccccgactctttctaatatacacaatgtctttcatgtgactcaactccgtaagtatatccgtgatccatgccatgtgattgaattgga

SEQ ID NO: 87597 - DNA, 377 bp, Glycine max
  unsure (1)..(377): unsure at all n locations
taagtcacctgcagcatgcaagcttattaattataataagagaacattgtattttgtttaatcgatncatgtttcctttgatgagactaatgctatttctccaagaaaggatattntagatgatagtgcagaatctttataacaaatgcacattcatggacaagattctaaaggaaagggagaaggaagcaatgaagatcctccattataagtcaaagcacataatgatcttccaagagagtgaaaagcttctagagatcatcccattgacaacattattggtgatatctctaaaggggtaacaactagacattctctcaaagaactatgcaataacatggctgttgtatctatgattgacactaacaatttaaatg

SEQ ID NO: 87598 - DNA, 421 bp, Glycine max
  unsure (1)..(421): unsure at all n locations
ccgctcttggtgcacagnaaanacccttatcttatttctcttatcaccagacgaggcgaagtctgatagctactgaatgtacaacactacatgatgtcgctcgttcccatccttattctctgcataaaagagcaccatatgctgagaaaacatggctgaagggctaagagaatcaatatcatacctcacatggatgaaatcacaattaagagctcacctacctatctttcagagtcctttggttcatatgtccagcctccttatatgaggggggaaaggggataatactatacttctgcttccaaataaacttatgactgattctgtttcattaatgcaactatgatgttatgtatcaaagatcttgagaatcaatagctccactactgctgatcctatccatagcagaataatgtcggag

SEQ ID NO: 87599 - DNA, 232 bp, Glycine max
aaaacatcagataatagactcttctctcaaaaatacaaggcaacaaatggtatataagatatgaaatataatctcgctatgacgaggtggtgactttattgtatattaaaatagcgcccgattaattgaagtataggagtaacacattcactagactgtcaatggtattaaccattcatcataacgctggcacggaccttaatcatcgctaatatacaagacgacaacaatt

SEQ ID NO: 87600 - DNA, 335 bp, Glycine max
tggacctatcgagcacgatgtgatgttaattacaaacgaacaaaagatatgagtctgccatgacaggttatctacacatctactatgaaccaggactcaaatcacaagatgaaacatgtatcttatgcgctaatcaatacaacaccataattgcacatcattcaattgcaacttatatccatatgctaacacattgtagacagaaactagaaacttgtgagtcatgcgctctagatagagtaataataggtcttatcatacagacaactgcctctaagtgataaacgaagcctgcaaagaccatgaaatagagcagcttgcatcctctatactca

SEQ ID NO: 87601 - DNA, 447 bp, Glycine max
  unsure (1)..(447): unsure at all n locations
agcttcatgatgatgaatcaagtatgattcaagtttgtttgatgatgacaaanagcccaaaagaatgatgtcaagattgagtcaactagttcaagatcaagattaaagaanagacatcaagaagaatcaagattcaagagaagatgaattcaagattcaagagaagaaaccaaaaagcaacaagtcaagacttcacaagggaagtattgaaaaagaattttcanaaaccaaacatagcacagttttgttttacaataaaagtttttccaaatttttctaagttacctgagtatttactttctggtaatcgattaccaattccctgtaatcgattaccagtggtaaagtttgatttcaaacgctnttaactggaattgcaacgttccaaatgttttttaaatggtgtaatcaattacaatatatgggtaatcgattatcagtgtatct

SEQ ID NO: 87602 - DNA, 438 bp, Glycine max
  unsure (1)..(438): unsure at all n locations
agctngtgtgtatggacgggttgttacatcgcctataaaatanttatatgagatcctatatnaggccatgtttcttatagtatcttccttaaagaaaggttaatttattttcttaaatgtatttccatattaatatcatacatgtatttataattactcatccagtcattctcttattacacaaatgcaatgtntaatgtaaaatactaaagaacacaaacggaaggtgatgagttgaggctgaggtgccctctccaactaaagtgattagatattttattatagaaaatctcacatgtcaatcaccagtcctaactctgttaattatttggaaaaatggtacgcgcatgggaatattattattatcattatgattataaataggattactattattattatcactgacgctttgagttccatcaaaatatgatgcac

SEQ ID NO: 87603 - DNA, 421 bp, Glycine max
  unsure (1)..(421): unsure at all n locations
atccacgactagttgatacatcaaccctactgctttatatgatcgggtccncacaaagaanaatatctcagttacctatgggtggtggcaagagaaaaaataccaattgtccactccaattggaatgttgtcctggatgatctaaagaagctaatttgggaagacatcttggtaagtccttttatataagactatattaagnaataagagaaatcgctcaagttggcacaaaaatcagtgtccaggagaataaaaagtgaaaggaaagtgtgcttgttgttttggctcanaatttgcgctataattggtgcctatcttataccaatcctagttctgaaatgtcaattgataattatcgtgaaaacaagtgccaaaactagagggttcttgagtcttttttttatagtggttctactctact

SEQ ID NO: 87604 - DNA, 264 bp, Glycine max
ttttatccacaataaataataagaaaataatccactaatttatattctaaaatatctatattatctgaagtttaatttgtgaaggtattaatataacccataacttctaactaatataaaattatatatataagagggactctcttccactgaatgttaaaaacatcgtcccggcatttactgtaaaaaaataataagtaacatgtgaccatattctggaccaacaataagtggagggtcccctgaccacagtgatcaacggtt

SEQ ID NO: 87605 - DNA, 397 bp, Glycine max
  unsure (1)..(397): unsure at all n locations
ttcatctaaagtcttgagtaggatggagaacagcccttcgttatgcaaagttcatgctgagtagaaaacatatcttaaacttcagtagggaagtctcctttttcaccatattacgtctgccacaatagagcacgcctatggatgaggaccagagactcccagactatgaactttatttatgctgtatgggactgtgacagatcattggagaatgttttctgcatanatgaatctcatacatagagtattaatgaaggtattaaatgcactacttatatgttacatcaaatcgtatgatgagtgcatcgcttgagatcttcagacacacaaatatggatcatgatctaataacacatcaaacactactataggcatgcggtattatatgcatctaatc

SEQ ID NO: 87606 - DNA, 355 bp, Glycine max
  unsure (1)..(355): unsure at all n locations
aaccatatcaaatccttgaaaggtatatctcagtattgctctttaatactatatactgattcattatacccgtgatagtagcatatcagtcctacatctgtacatcgtctgatatggatccacctatctcaatactagttgcgatagatacagtatactgtctgtgcataatagactcaatgactgtatttgcaccttaatggaactgcttacaactacatatgcgctaggagttgtgaggcttgatatatgccacgactatgtttcttgggtataccaacaacggntatttgagaattcttattcaacgcacaattgcatgatattgctccgtgtagctgttgcccttaactta

SEQ ID NO: 87607 - DNA, 498 bp, Glycine max
  unsure (1)..(498): unsure at all n locations
tgcagcttgctgattacattctcccctttctcaatcanattctttattcttcttgacatcatcaaaatcttcatgatttacattctccccctttctgatgatgacaaccacctgtaggttaggagcaacaacaaagaaaaaatatctatttgcatatagtttactcccccttggttttgcaatgattgcttatatgagacagttgaagatttcatatttttcatatgtaaacaatntctcataaacaatagatcattcttcttactatgttatcttttatctttctctccccctttgtcaacatcaaaaacaaatcatgaatagagaggagaaagatgttaccacttggttgcatgtatgagaatcaagtgataccaaaaggcattaaaacaatcattcaataataatgaagcaaanacaagtacaataacacatcaatcaaacacaatcaaatacaatcaatcatcanatatttcataatcaaattaatcacaatca

SEQ ID NO: 87608 - DNA, 375 bp, Glycine max
  unsure (1)..(375): unsure at all n locations
tcttctcctataagtgctccgttaaaagtttatcctaacaggacctaagtaaccaccggcgaacaaaatacaatgaatttttacaacatctcacatactacaaaatgcaactactatacgaggttaacatttgaaacattacgagactcaccagtngcagaacatgatatgttgtcttcacgtaatccggaagccactggtcgagaaccgccacgcccttttgggtagcggtgactatcttctcctcctcctcctactcatcttaagtctactctgcaacctcgatttcttctgagtgagtcgaatccctcgctctctttctagtcctacgaggagaacaagcaccaccgtcactcgtcgtttgttacgaagagc

SEQ ID NO: 87609 - DNA, 410 bp, Glycine max
  unsure (1)..(410): unsure at all n locations
gaccttagagcagcgcggctgcagctngnaccaggctgtcgggagattatgtttattatactaaanccaanaacaggctgctaaaagataaaaataagaaagtccaactctcaaatataaaaatacattccatgatatgatcatattatgaaatagagagacggcatgtttttctataaaaaaatacattaaacttttgaacccttacaatgagtggacgtggtctatatggtactctgaagactgaacccttcacactttgacagataataatacatctagagaagtattagcaactagcgcccaacgcatttgccaccataatctgccaggaagtggaacttgggagaaagatcaagttcactaatcactatatatgctatgtgctanaacatggcataacctaaatc

SEQ ID NO: 87610 - DNA, 477 bp, Glycine max
  unsure (1)..(477): unsure at all n locations
caagctttgcttctgttcaatatataatgtctgaattattcttggttggntaatccgatccgttcatcgatggtcggcaagtatgatggtcttaatgatgatcctacacgtatttcgtgtgtatctcacaggcggttttaaaaaacctcgcgaattaacttgggttacgggtgtagttttggctgtattgactgcatcttttggtgtaaccggctattccttaccttgggatcaaattggttattgggcagtcaaaattgtaacaggcgtacccgacgctattcctgtaataggatcgtctttggtagagttattacgcggaagttccagtgtgggacaatctaccttaactcgtttctatgttagcatacctttgtattacctcttcttactgctgtatttatgttaatgcacttttcaatgatacgtaagccaggcatttctggtcccttatagtgaatatggatcatagatatt

SEQ ID NO: 87611 - DNA, 468 bp, Glycine max
  unsure (1)..(468): unsure at all n locations
agcttcaccttctggtcctcctcatagntgtggcttgagttaacatgctctattnncatctcccactccaagtaggcctccggatcattctttcctttaaatggaggaatgttgagtttaataccatcaattcggttttgtctaggaacaccatcattccctcttctcctcctttcttcttcattatgatctctattctccatttgatccaacctctcatggagcgcatcatctcgttgtttcattaacctctccatatgttgcatcaaagcttgcatttggaattgcgaaagccccactccatcattaggaatagtacctgacatctcanacaaacanatcanacgttacaagacaattatagttgctgtatgaatacctcacccactcaagtgtatcacacaattatggctnttctctaatgaaacactcgtgccttttaccactcttatatctccttgagttctt

SEQ ID NO: 87612 - DNA, 288 bp, Glycine max
  unsure (1)..(288): unsure at all n locations
agctngngcgaagatatcgtcancgatgtccagatanctatgttcactgnngaccgccacattcttcccatctacgacgccaatgtggtgttaggcatacaatggcttatatccttatgaccagtcctaacgaactataacatgtggtgcatgcaatttattcatgatgaccgtgtggtagaactcaaaggcgaatcagatgacactctgaaatcatcaatccgttcaatatcgacgtggtgcggaatccaacacgcggcctgtactgtacatatcccttgttgggaa

SEQ ID NO: 87613 - DNA, 451 bp, Glycine max
  unsure (1)..(451): unsure at all n locations
gagagatagtggttcacganactgaaggaataaaagagggagagaagtggaactctgaagtgtgtctcataagactctcattcatcaaagttacaacaagtgttacacatgcttctatttatagactacgtagcttccttgagaagctttcttgagaaaacttccttgagaagcttctctgagaaaacttccttgagaagctagagcttagctacacacacccctctcataactaagctcacctccttgagaagcatccttaagaagattccgaaagaagctagagcttagctacacatacctctctaatagctaagctcacctccttgagatgagaagctagagcttagctacacacccnctataatagctgagctcacccncatgacatanaacatgagaataaaataatagccttattacaaagacaactcacaatgccccgaaatac

SEQ ID NO: 87614 - DNA, 451 bp, Glycine max
  unsure (1)..(451): unsure at all n locations
agcttgcttgtggggcttctatggaggatgtganctttgatcttcaatgatgtcctttaatggggattttccaccatggagatgcagcggaagacaaaagagaagaggtgagaggaggtgtcatccaccagggaataagccatggaagaaggagcttcaccaccaagatgagccttggataagaagcttggaaggatgcttcaatggaggaaaagaaagacggagagaaagagagaggggggagcacgaaattgaaggactaatagagggagagaagtggaactttgaagtatgtctcacaagactctcattcatcaaagatacaacaagtgttacacatgcttctatttatagactangaagcttccttgagaagctttcttgagaagcttctctgagaatacttccttgagaagctagagcttagctgcacacacccctctaataacta

SEQ ID NO: 87615 - DNA, 335 bp, Glycine max
  unsure (1)..(335): unsure at all n locations
actaacctcgagcgactcgcaagcgcatcacaatagcggcgtgtctctcttaccgggtagngcagacatgaaattattttgtctagacagcagggtggatcatgaccgttcttgctgcgatgatctggggatatcaccgttggactcaaatataatcattcctatgcatacctcgaggatatccgatactcttcatgttataacactaagaacctgcttcctctaattcgcatcgaacatctgtgaaaatacactcaaccaagcgaacttatagacgtcctattgctccagacaagaggatcaagaagatcattccacgaacaatgatgcatctc

SEQ ID NO: 87616 - DNA, 510 bp, Glycine max
  unsure (1)..(510): unsure at all n locations
atactcagagtcacctgacgcatgcaagctacatatataggacaaaatttatatttcttaattaaataattctgaccaaactgaagttatnttacaagctatggtagatacaagagtacttatacttacatatgcaaaagtgttgcatcccaacataattattttacaggtaatataataactaaaatcagaacaatgtctggagacataataactaatgatacaaaaaccagagattttactatccaattatctacaaattgtgatatctttggcaacataatttttataaataaagcagatgttgtagatttgcaaccagccaaagaaaataagatcttatgactagactgtatcgtacatgataacatatcagtcaccattacaaaagattacttatnaatttctacanactcacaaatgtcacctatgatagacgaacttactttcatgtgcgaaccaagcatgatagtgccggcatcaccatgctttgtcacaaaagctttgctc

SEQ ID NO: 87617 - DNA, 355 bp, Glycine max
  unsure (1)..(355): unsure at all n locations
aagatgaagaggtatattgatcttttttgtctgangtgtgtctcaccatcgtgagatataatgacaccgcgctgtgagatgtggtcccaccggaaacgacccatgtgctgttatgaaaatcagcgcagtatgataccaaggcaatgcatgatggcttcaccaacaacatctctatcaagcacgctgacaagaagatngttctcagaccgttatctcctcaagagggttgtgaggatcagatcaaaatgatagaaaagaaatagagtgagacacttgctaggaaaaagagtgagacacttgagaatgaaaagtgaggacagaaaaagagtgacacacttgagatggaanagagaga

SEQ ID NO: 87618 - DNA, 390 bp, Glycine max
  unsure (1)..(390): unsure at all n locations
agcttctaccccaannnnntatatttattgggatatgcgaagnanaanagggcncatctcccttggcactacactctctttcgaatatgcttacgaaaggcgttatcattgaaaagatcccagccgagacgcttccgtaacgtttccgcgagtgattctgcgaacattttggaccgtgctttgacgctcttcattcgttcttcattcgatcctcatcgcccttcaacctcaccggggaagtcctccaaccaagcttttcaattattctatgttcccgtggggcccacctctagcttcatgtattttaatctcgttccttcacttttatacccctcttgaccgcctaagcatttatattgcatttctcgtacccaaaataaataatccccc

SEQ ID NO: 87619 - DNA, 484 bp, Glycine max
tctgctgccgcctatacactatgaacctacttgatgtatttgatagcgaggaacttatttataacatacacagtagcatgaatgggcatcacactttaaactattcatgaaaaatccaacatacaatgtatatatttaaatacatttattaatttgaatatttacaaaagagaaacaagaaggaagaaattatagctattagcattggatagatggaacaaggacacaaaccttataagacaaaataaggccttcaaaacaagtgctcaataattaatctccctatttcattatatatatgatgtttagaaatattggagatctcacaatttatactcacctttctgcatctgcatctgatcattatgctctggccctatgcctttgttatgctctggccaatgatggcagacttaaaacacataatgcatagaccaatactatgattcatataatatagaagaccacatatacacttattact

SEQ ID NO: 87620 - DNA, 459 bp, Glycine max
  unsure (1)..(459): unsure at all n locations
acctgcggcatgcaagctntntgccatcaccacaagcgtaacaacaacttctttttatgattgngnncattcattcgntcaagagnggtttatacaagggaaaccataatcatgaagcttatttcgccactcctaatggtgatacccttctgaaaagcttgcctgctaccctgctacgttctggtgcctgcgacccctgcatgtgtgccacgtcaccctttatctcgccagcgccaatagcaaaacgcctacttcacatgtttcgtcagtaccactggcgaaatatgctccacgttggatgtagcccgtatttcgccaacattntggcaacatgacctgcctgttgctgtatctccagtcaaaggggcaaaatctaatgacaattattntgccaacagctttggcgaaactagcataagctaccacgtgtcaatccaagacatatatcgccagccgaac

SEQ ID NO: 87621 - DNA, 448 bp, Glycine max
  unsure (1)..(448): unsure at all n locations
ttaagcaccgcggctgcagcttgctattgattgatttatacagntggttattatgctcttgagataanacatacacatttttcacgacttctgcaataattcttgcttctgaaacggtacatcggcatgntttggtgttaaatgtcatgtgtattaagtagatgagtctcgtcttgaagttgttctgttggctgattctcaattttcttaccttaatacctttgtttgattttatttggcgcactaaatatatggttatgtatcacgtattacacgtttgggaaggagaggttatataacacgttgttcggtattccccttgctacaaggtgtgccagtattttctgtggatatgatgatgctgaaagggagtttctgaattgatcaatccatttctgatgcgcactgacggtgtttcgatgagtctgatacaatgatggtgtttaaa

SEQ ID NO: 87622 - DNA, 426 bp, Glycine max
ataagctctcataacatacgaacttacagagcatatgcttatttaacttgcttaccaaaacatgccaaagtcttgatttgaaaacctgtgaaggaagctataaggaaattaaaaggtctgtcacctgtaatttagtggaaagtcatataaagcatgtacatagttgttgccactgaaagccagcagagatccagggctattatcaacatcagagaatgaccttaatcgccgagtctgtgttatttcacatagcaagcgccaattaatgtgaatcatacatagagaagataaaaatagcactggaataaattgatagacaaactctcagaacaccataatatgcacaataaggacagccaacgtttaacacaatatgcaagacaaaactaagttgatagctatgtatgatgtataatgaaagttatc

SEQ ID NO: 87623 - DNA, 479 bp, Glycine max
  unsure (1)..(479): unsure at all n locations
agcttgtatggctgaactctgtgttccactcacttatgtttattgttttcaccaggtctcctcctattaacactatcctattactagtaattaattgattatcgccaccatgcttctctaattcgtagggtcttgtgttaatgtggctaatgtcttttggtgtgcgagtggggtgagtgagttggagctcacaaaggacaaaccaactgggtttccttttctgcattggaataaaacagcagaactttccattcttactgttgttggcaattgccagctcttccgtaactttgtccctggacatgagtgacgaatgaaccgtgtccgtggcttctattaaattcttctttctaccttgtgtaccacactaatttattaccccaatcaatgtctatatacacatattactgcgatntacgataattttctaaagacaattatattattaccaattttgacatgtctttcaaacaaattga

SEQ ID NO: 87624 - DNA, 282 bp, Glycine max
atatctagctctgtgacttacctagttgcatatggtctatgccgaccatgctcatatcaccagaaatgcggtttgtgagcttgagactatgccttcaattgattgcaaacagatatcgagttactccatcgcatagctgcaacatttgagtgggataaaataatgggaagagacaacatcatacgactcaaaaatgctagtcctatcatgatcgatcaatcatttgatattcaatccattcttctttatgaaaatgtatgccttgtgttgtgaatatgggat

SEQ ID NO: 87625 - DNA, 379 bp, Glycine max
  unsure (1)..(379): unsure at all n locations
ctgcangcgtgcgagctncggatcaagcaagaagagaccgcaggnatttcaatgatgtaaaaangcagacccacaacctgatgcccacggggagcggcagagacaaggccaatgttcaatcagaagttaccacacccatggctcatgtgcaacaatgagaattgtgaaattcttgtgtgttttttattgagcgttgaccctaattattcccgaactataaagtgacctaacccattaaaaccagcgtgtttgtgccttataggatgctaaagacgttggtttttggccactctatactgcccttggaagatgaatccaacgatgaagaggtgcttgactacggggagaagaatattgcatctctatagctgaaccctta

SEQ ID NO: 87626 - DNA, 160 bp, Glycine max
  unsure (1)..(160): unsure at all n locations
actcggcgggaagcgatgggggagatccacattcccattcaggcacgaccccacaagcgcaatgtggtgtctcaagtgatggacataaattccgcctacaactgcctccaggggagacctcggattcatgcgctgggagtggtacctccnacactttacc

SEQ ID NO: 87627 - DNA, 464 bp, Glycine max
  unsure (1)..(464): unsure at all n locations
agcttaaaaaaagttagagatcncaacttatgataaatttgttctanaacctaccctataagaaatcaagaattagctagctttgaaactagtatcgatgaattagcctaaactatttggttcttcttttcttttcaatacaagtgacctgatcccattttagagttgcctacaatttttagtgatcattctacatcaaaactaaatcaatgggttaaggtaataaaacaaatcttgtattctgaaatatctggtttggaagatatacaaagtctatgaaaattttctattacacacaaagcaattatgatcacaccttgttcctcaagcataatcaaggtacaataactgcattgataatatatgttgattatatgattgggaccacaaatgatcctgatgaaatgttaaccttaccaaagcatttaccttctgaatatgacttgaaatggcttggagatctc

SEQ ID NO: 87628 - DNA, 381 bp, Glycine max
accaaatttatactcttaccttactgacagagtatgagcattgatgtaacagaacaaacaggagttgccatatcattctctcatatatgagatgatcctatgcacataaactatacgcttcaaagtgataactttacaataagactcgattattctgttttgaggattacaccacaacccaatatgttatgatgccctgcatgacttacattaaagttgataatgaatttgccctcaacctgatgggccatgacaccgttcgtgaattgagtcattggatgagcaaaaacatgcaatgcatatattgccttataacatgatactgaacggataagtatgatattaagtctagaatgaactgaacttatgtgttcacaacaa

SEQ ID NO: 87629 - DNA, 483 bp, Glycine max
  unsure (1)..(483): unsure at all n locations
tgcaagcttgatgcttgcttggcctctggaagcattcatgttggtcgaagatttctcgaagtttttgttttgaccaaaatattttcgacatgtttcgctatatttcatgttttcatattttttttcttttctctttcttctttaatgttgatatattgtattctccaagctagaagtgttttcaacacattccaacttgtggggggtattagacataaaattaatttagttagttattagaagttatttgtgtaaattagttggttactcaagttatagttactagaagttatttgagtaagttagtgttggttactctagttagttatttttcatctttgtataaatacatcaattttgtaatactttaatgaatgaatgaattgatgaattctaaactacttttcatctatctcccatttctttctnnttctataagatgttatatagaacatgttgtgtatattaatatatgtacttact

SEQ ID NO: 87630 - DNA, 473 bp, Glycine max
ctaagcgcggcaccaagcgtgatctagctctgctcctcatttttctctatggtcagcatttcaagaaacgactcattattaagtatatctcatcgcgctttgctctcactatgcattcaaacaaggggagctcttgattcttcctataggctgactatatgttgcccacgaaccacgtatagtcaacacgacacctgcacaccacattagcgggaatacattgagggcatactccatgggtgataaagaagttgatcttttactgccgggtactcgcaagttagtttctatgatactttcaaactggattctcttgtgcggtatcgagatgactgcatgtcatggttgtttcattcgcaagagaatcttaaacctacacctttacatggatggtcagccatcatagcatgtcatcagatcctcccatttatatttctctctaatagcagagaggatcgtgtcgtaacaaaatg

SEQ ID NO: 87631 - DNA, 450 bp, Glycine max
  unsure (1)..(450): unsure at all n locations
agacttctccagcaatgagtctggtgcatcgttttngattgcctaccaccggacgcctatccttcattctccatttgtattcggagccccacgaatcggttgtcattcatgcatcctccaccaacgagtctggagccccgcgaatagaatgcctagcgctcttcgtctattctccattctccactcttattcgtagccccacgagtggattgtcattcttgcattctccatcatcgagtctgcagccccgcgaattgattgcctaacactattctcctatcctccattctccactgttattctgagccccatgagtagaatgtcattcattcattctacaccaacgagtctggagaaccgagaattgattggctagcgctcttctcctaatctccattcttcacttatattcngagccccatgagttgagtgtattcattgcatctacac

SEQ ID NO: 87632 - DNA, 489 bp, Glycine max
  unsure (1)..(489): unsure at all n locations
cgagatgacgaagtgtcgaatggagaaacttcctggcctacngttgaccacacagcggtacctggagatatgttgcgggggtcatgagaccttggggacgtcaagtggtgtgctattgcccataaccaagcttgaccaatcccgacccaacccgggcatagtcggtcagtgagaacttgtgatgtacctaaacaagcgagctcctgcctgtcaacagattaaaggaaaacattgaccacaaagcatggaggcttgtggcggctggccagctgcgaattttgtgaatatgtggatcgtggcctctggtaatcgattaccaatggtgggtaatcgattacaacgcttataactgaagacaggaggctaacatggtctctggtaatcgattaccactgggtgtatctattacacgcttgaaaacgatcaggaactatggagcctctgtatcgataccacctgtgtatcgatacacatataatggtcactggt

SEQ ID NO: 87633 - DNA, 325 bp, Glycine max
  unsure (1)..(325): unsure at all n locations
aagaantccatattgtctgctccaccattaaaccctctaatggtcacgaggatcacatatatctgaaagcctctcctcattctttacagggagtggcgaaggattggctctattaccttgctccacgatccatcatgagctgggatgacctcaacagagtattcttaaaaaataatgtccctactttcatgaccacgaccatcagaaaggatattttaagcattagacacctcagcggatgaagcttatatgaattctcgagagagatctaagatactatgtgccagttgacctcatcaccagatttctgagcagcttctcctca

SEQ ID NO: 87634 - DNA, 460 bp, Glycine max
  unsure (1)..(460): unsure at all n locations
nngcttatgtgggaacaatatttacatatctatattcttatttgtgaaanacttanaatatgtaacttaaattgttaacagaagctttgatatgcacatccggctttctccgcagtgaacaaaaccacacaacaagattctttataggacataaaacaagcagctgccaatggctcctgcaatttagacaatagtgtcgtatgaataacataaacatcctttatagggatacaataaatatattttacttactaattcaaataagctccaagatacacgtctcgctgtgattccataagccatttctcaatgtattcttgacatgggccacgtcgatcctttgcattcaaaattgatggcaacttatggaatccatacaccaattntgaatccatacaccgatccttgacccaaagttatactccattcatccatatgcctattttaaaaatttagaaaa

SEQ ID NO: 87635 - DNA, 319 bp, Glycine max
acacatgaaactaagctgcgtctatcaacctgataaacatatgttacttattcttataaaagaagggatttatacccggctcatgctctcataacatcaatcatacgctgataatatgtcgcgtaattgcataaagcgcactatacatctatcatgcattttgaaaggcttgtacactcttctacaattttttattttgcagacactcttcagctacgttgcctttaggagtcgtctatgcatgaaataacatctcatgaatatgctcatccttttgaacttgaagaacacggatttgagtcttttaaatctcacattc

SEQ ID NO: 87636 - DNA, 302 bp, Glycine max
gtagccatcaccctagccaacgatcatcaaccaccatttctccgagaataccactcgtacgcaacgtgtgcttgtcaccgagaagccccggggcgttccattgagcattgtagggctctgaagcgtaatgtgcaaggtctaaatgaaacgggctggcctgaatctgaagagaatcgcttgttgaatcctaacattaacaagcaacaccatacatggtgcaattctggaagctgttggtatgactcatcatgatgtttcagtttatgccatatatcacacgtaccatgttaaatgatatacat

SEQ ID NO: 87637 - DNA, 414 bp, Glycine max
gaccacagactggtacctctatatatgtctcggaggtcaggagaccttcgagacgtcaagtggggtgctactgctcaaaaccaaacttgatcaatcacgacccaaccctggcatagagggccatagagaacactgcgacggaccttcacatgcgacctctcggaagtcaaccattatatgtatacagaccacataccaacgatgcatgtgttgtggctggccgcctatggatcctgtgtgatatctggaatatggcctatagtaatccattaccaatggtgtgttagtcgatactacgcgttaacatgcgatcaagaaatggagatggcctgtgataaccgattagcattgggtgtaactcattaccgcgcttgtaaatgaaatgggatgttgaggcgcctctgggatgaaata

SEQ ID NO: 87638 - DNA, 378 bp, Glycine max
gagcttctatataagctgaaccatcttatcaatagtcactttttgtgtttattcagacaaagagagttgatctcttttatcttagtgagagcgagacaactaaagccttcacaggactgcgaacacccaggctgcatcaaaggactttcacgacctttgtgtgttgccctcgctggaaagagtgaatctttccttactatcatctccacccctgatgtttcaagccacaattccagaaaatccacctctgaccaaaagtatcttgtgaccgtaactgccatcttacacactcgaattaagtgatcctcgagcctacattgaatctcaaaacgagacctttcacctcgttttggaatcacctcatttggagccctgtag

SEQ ID NO: 87639 - DNA, 420 bp, Glycine max
cggtcttcaacgtggtggagaagaacaagcttatacgcagaacaagacaggttagacggagaagaagaaagtgcgggcaaaataggtcacgcctgatataatttaaaatgtaagtccaacatcgattttcaataaagaaaaaaaaacctatgttaacaaaatgatgttaacgttaacatcggttttcttcaagaaaccgatgttaacttatcatacgttaacatcggttttcagaaaaccaatgttaacctcggttttcttcaaaaccgatgttaaagaacttacgttaacatctgttcttctaaaaccaatgttaactaattaatggtaacatcgatcttccaagaaccgatgttaacgtcacttttgtaacatcggattttcaaaaatcgatgttaaggatcacattattacaatatg

SEQ ID NO: 87640 - DNA, 163 bp, Glycine max
ttttgaacaccaagaagcgtctgtgcaaaggtgaaagaggctcccgatcttctggaggatcgggacaagatacttctgcggtgagacacaaaatgtctgtgactagtgtggacgtgatgcaaccgagtggtattcccacatattcccggaatgaagacccccc

SEQ ID NO: 87641 - DNA, 404 bp, Glycine max
  unsure (1)..(404): unsure at all n locations
cgagcgtctcgatatattccaagactttatcttgctttcgagntaaaagaaattgtcctttgaattcgctatgagcttctggagacaaattcgagcgtatcgatatattatgggactaaatcggacatgcgagtaaggaattatagtcgcttgaatttgatatgggcttccgatgacaaattcgagcgtgtcgatatattacaagacataatcggagtaccgagtaagaagatattgttgtttgcattaagtacgagctgtcgttttcaattctgagtatctcgatatattacggtaatcaatcagacatccgagaaagaagttattgatgcttgcattttgttcgagcttccgttatctatatcgagcgtctcgatatattgcgggactcatacggacatgcc

SEQ ID NO: 87642 - DNA, 367 bp, Glycine max
agtgcatgtaaacacctctatgcgtacacagcgaaggcaatagaggtaactattgcaataatgaaagaaataatgttgtatacgattaccacagcatgcacatggtgcttcccatactgagcggttgccgatcgttttattaaccgaccactgagataaagaaatgtttgtttatgtaatagaattaaaaagaaaacaagttccaagctgagtcacatctatatccatcataagacatatctggttctcaacttctcaattctcattttcatacatgtagagctagaaaaaactcgggtagggtagtggactccttaagccttgaaggaccatacatagaaagaatcatacctgttgatatagatga

SEQ ID NO: 87643 - DNA, 444 bp, Glycine max
  unsure (1)..(444): unsure at all n locations
gagctntgtgtccttttatanaactgagtattttcttgtctacttatcacgtcactctaaaaaaggccttgagggtggatccaactgctctgatcattcattaacatattcgagtgttggtgacatactcaccattgtttgcttctttaaggaactcaccataactaacaaaatgctgaggcacccctataacactcgatccaaaagaatggataatgaagagggagtgcaagaacagatgaaggccgacctgtccggcttaaaagatcaaaaggagtctatcacggaggccatgctatacctctcgacaactatagaagataatgccacggtggccgcctcaatacaactaaggaagcggaaccggtgctacaacccacaataaacttatgccgagacagaaacatgacaggcttcggctgagaatcgacctcaacttaccct

SEQ ID NO: 87644 - DNA, 114 bp, Glycine max
tcaatgaacaatgactgggctagtcaaaacctcggcatcacatattgacacgtggccacttctcacgaggctggacagaaatgtgatgtcatctatactcatcacatgaatgct

SEQ ID NO: 87645 - DNA, 442 bp, Glycine max
  unsure (1)..(442): unsure at all n locations
gtgctcgtggagcttctatggatgctggatcacngagctnctttgatgtcctctcatggtgattttacagcatggagatgcatccgaagacaaaggacaagatgaagatgtggcgccatccattacggaatcagccatggaagaatgagcttcaccaccaacatgagcattggataagaagctcggagaggatgctctctggacgaaaaaaaagatggagagaaagagagacgggggagcacgaaagttgaggaagaaaaagggagagaagttgaactttgtgttgcgctcgcaagactctcattcatcaaagctacaacaagtgttacacatgcttctatctatagactangtagctaacttgagaagattgctcgagacaacattcttgagaagactctctgagacaactaccttgataagctagagcttagctacacac

SEQ ID NO: 87646 - DNA, 348 bp, Glycine max
  unsure (1)..(348): unsure at all n locations
agcttgtaatcgattacacacataatgtaatcgtttaccatangagttnttcagaaaacattctcaacagtcacatctttttatctgtttctaaaatggccatcaaaggcttatatatatgtgacttgagacacaaattttacaagagtttttcagaacaaaaaaaggtcttatcctcttaaaaagcaaaatcgttntatcctcttacaaattccttggccaanacacttgtgattcaataaggaattatttgagtgctcaaattgttcaatctatctctttcaagagagatttcttcttctcttcttctttattctgaaaagggattaagagattgagggtctcttg

SEQ ID NO: 87647 - DNA, 422 bp, Glycine max
gtggttcgtgctcctctgctgaccaccatacagaccttcgcgcttccgtgcaacaacctgcagcgattgagcatcctgaagcttatgctgtatatatttcaatagacctctcaacctcgtagcataataaccacaacggaacaattatgacctctccagacatagatacaaccctggatggaggaatcaccctaacctcagatggtccatccctcagcgacaacaacagcagcctgctccttccttacaaaatgctgatggcccagcagaccatacatttctccaccaatactacaacaacatcaaccgcagacacaaccaacagttgatgcccctccacaaccttccctcgaagaacttgtgaggcatatgactatgcataacatgcggtttcagcgtgagaccatagcctccattcataa

SEQ ID NO: 87648 - DNA, 469 bp, Glycine max
  unsure (1)..(469): unsure at all n locations
agcttgtacgggtgctgagttggaaaagtcccattctctatctgagaagctcgggttatgttgcacgtactaatgggtaccgtgagagatctacggcggcttgatccatgcgggcactaaagtgacggcatgggtatctccttccttcctctttgccccagttgctccgatcctcctagcgttggtacttgtggaggagacataatcgaacttccctctcttcaagcccactttgattctttccccggcaaataccaagtccgcgaagctggagggaatgtagcccactaatttctcatagtaaaacaccggcaaggtgtctaccatcatgataatcatttccctttcgaccatgggaggggccacttgcgctgccaggtccctccaacgttgagcgtactctntaaaggactcactnntccttttaaccatgttctgctgctgagttcgatcgggagccatatcggag

SEQ ID NO: 87649 - DNA, 410 bp, Glycine max
agatcatggtgtaacctaccgccaagtttatgtttattaataccaagtgaggggaaagtcatgagaaacaaatgaatggtggggtgtttaggtagaatagtctaacccaattgtaatagtccttagaacactcactgagacattatgtctcacccttttaagttccgtttttgtttcaagaaacgggcgatgatgcgagccgtacagcattctggcgagccacatttgatggttatatgggaatcctttgatatgacgtatgagacccatgttataagggaggatacatatctatcaatattataattaacgcctaattgggatatgtaattgtaggtttcgcatgataatatcatataaacgttctaattgtcacgtctagagaatcacagtagtatgataataccctt

SEQ ID NO: 87650 - DNA, 480 bp, Glycine max
  unsure (1)..(480): unsure at all n locations
ctaagctatgccatattctctacgaacgttcacttgcacaagactttctatctactaagaaaaatgcacccatatacaatcaacgcagcttcgctacctaaattatttacatgtactttcaaggcgtatatgttacttacatcacacacatctccttggctaaatttacatacatgcatactcaaagcattttggggtaccaaaaattgcacatgtgcacatcttggtactttcaatacctatacatacacaaacttcatgatgaatcttgactatctacacaataaggtgctacatttcatgctctnttcaagattttgctacctaaagtcgcatgcaaatacaagtatatattcctctgctgactaanatatgattcaaattaaaggcatattcttttttgtaatgagttcttttacataacatgcaacatatttatatacatgtttttggagacattttactaccaaaaatatatgt

SEQ ID NO: 87651 - DNA, 431 bp, Glycine max
  unsure (1)..(431): unsure at all n locations
agctngatataaataacanaatttgcttgggatcaatagcgatcacaaacaatggggtttatgacattcctaaaccaaatcatacttttctttaatcgtgcattggttttctctacaggtggggagagaaggaactacttgttgatttggtgtattaggaatcataatcgtgccttgggttttaacctatcaaggttgtcattatctcctaatggaccacattagtttccgctcattaagcccatatcaattttatgttggtagtctaatgggttcattaaattagatcacttatattgacccatctaaatgtaaacaactgatgtaaatgttataatataatatgtaactcatataaattaattaggaattagaaaattcctaacaatcttcccctgaactttatattaaccttagacatttataccact

SEQ ID NO: 87652 - DNA, 251 bp, Glycine max
acccgccgaaaaggccataaagctataaatgcacttggacacaaaacacaagagctgtcaaacaaaaaaggccgatcctcaaaaaagaaaaagaagagcccgtacaaatacctggccaagcactgcgaccgacaagaaacaccgagcgccaactgcacacacgaccctctcagacagactctacaaccgtcatcttatcccgaaagggacagaagacgacggcactagcggaaaaatcaaacacaaagaag

SEQ ID NO: 87653 - DNA, 303 bp, Glycine max
accaagcccctactgttgaggggcgactaccgccttatgacgactatcccgggcaagacgatgaagaaggagatacccatctcggccccctgcttcacctcaaagatccgtgcgcacatgaactaccccaaccggacatagattgacgtattcccgactcactcacactcgttaagaatctgttccttccggaagataaggaaagatcaggcctcgaaagaggttagacagtcgtggccttggcatacccattcttagattacgattatgtctctgcacatatcgcattcctccaattcatat

SEQ ID NO: 87654 - DNA, 89 bp, Glycine max
  unsure (1)..(89): unsure at all n locations
ggctgcagcttctctacaacaccatccttgatcattccaggtcttatacatttctataatattaaatctttnaatctaataaatcataa

SEQ ID NO: 87655 - DNA, 399 bp, Glycine max
  unsure (1)..(399): unsure at all n locations
ctcttattcatctntacttgggctatctcagaccttttattntgttgtctaagatttgcatacacctccttcanagtgaagtgtgtagcctctctccatcatttgcccatgcttagaagattntcttttaggcttggaactagtaagacatcatggatgagtcgtgtacctttatctgtctccaccatgatagtgcctttgccttttgattcaacccatacttccatttccagtcgaactttgactttgacagactcatcaatgcttttgaaaatagtctcatccttggccatgtgattgctacatccactatccaagtaccagcttcctcccttttcttttattgagtcttgagtggaatagaacatacaatgttcttgatcatgctcctctntgata

SEQ ID NO: 87656 - DNA, 183 bp, Glycine max
attgtattctcttcccgtaacccggcacactccttccgaacgtgtgtagcacacaacttgaacttctccttggcgagttttgcctttactaactacgctttgagagcttggacttcttcgtcctcttgcggagcttcaaaatactcttcgctgacgacttttaacttggcgagccaatctaaa

SEQ ID NO: 87657 - DNA, 383 bp, Glycine max
ctgcagctacgctacactgaacatgacatgtctttgtcatcagcctctcatttagtctttgccatctaagagattcctttgctcttatattatcctctcagctcaggagtgtcaccaccctttgagaatcaaatgattcgtgtgcccacaagataacttagatatctcaatcaaaaacgaaatattttattttgaatgattctagctccgataaagatcctcctaacgtagtgttaaactcagttgattatctcgaatattaattatatatttgcattatatactttaatggaaatgcatttaaaaaagaacaccaatacattggacaaaaaccatgtggaaaagatctattgtgacccgctggattggttcggtggaaatca

SEQ ID NO: 87658 - DNA, 374 bp, Glycine max
  unsure (1)..(374): unsure at all n locations
tgtgggttggatatgccgctctaagatcacttcatcaaacatgtcgcctctatacccataaaacaagtcattgcttgcgaaattcaacaagatttttaaattaatcccacagtttctttcgagaagagcatatgattaatttccatgtaacaacttttcttggttagtttgtgtgccctttataggagcaaaatttcaacacgcttctttcttttggtttgcttttctcttctatgtatgattacattagactcttgttgtgcaagttgtttctaatgcaatgggttgttaaggacaaaaggagatggcggctatccaaacctcatcaatggaacatgacanaaggagaagggcaattaaaacctttctgctta

SEQ ID NO: 87659 - DNA, 423 bp, Glycine max
gcagcttgttctacattatgccactcaattctaacctttaccacatacattggatgaaaatataattccctacactattttaactataactatcctgctttgcatccaacaaaataagctttaaagtataacttagtgactacccaagcttaaaaaaaaaattaaaattttaactctgttaagggaacctactctgtgttgcccctcttccacactttcttttttcacaatttgtaattactctttttatgcggaagcggtttaccggaaagtgcctcggatcgccaagtaaataattaaaacggaatgatccgagtgtcatacacagggaacttattccttttgccaagctttgttcaacatcatgcattctgttgacgaacatataattgtgaattgagtaaagtatgaatattctatttg

SEQ ID NO: 87660 - DNA, 277 bp, Glycine max
  unsure (1)..(277): unsure at all n locations
ccaactgatccacaatctccagtggtgaatacaccttcttctcctgagcttgaagtagctcccccatctccaccttcttgtgaaaattggtgttatgaacattnttggatgaatgcatgattgtgatggagtttgtgtttctcttcatgagtttaagcaagtatgttgttagacatagaaagaacaagaatgtgaatttgcaattagaattgttagtcaatacacaggttgattgagaaagagaagcttgaaccataaccggtgagagtgccatctt

SEQ ID NO: 87661 - DNA, 264 bp, Glycine max
gtcagtttaatggagttgagttatacctctaacccaaaattctatgatatcaaaatctatcctatttctagaatcagtgttgggcaacctgcatttgccatgctccaagccggtagccatgggcatgaggagttggaaagcccaccttaattgtgggtcattccctttgccacacatagattgcaggctatttttgggctgccttacttgcaacatagaagaggggggggggggggggtgttttatttacttcaccttctttta

SEQ ID NO: 87662 - DNA, 361 bp, Glycine max
aacttcacagtatagtgcttaagcatctttatttgctacatgacactagatgaaactggaaatgctggccaattgtctcagaaaatctctgattgttggctatctttctatcattttgatctccatgtctcatagaagagaaactccttcatgttcatctgccacatattgaaaggaaaaccgttcgtgaacatgaaagaaattacttatataccgtcattgaacaagatatgaaatagccaacacaatgcatttagtctgaaactgttaaaaaatggcagggcaaatcttcttcggcaaaccacatgcatgcatgttcaagccctctactattctctgccactggagatttgcctatcat

SEQ ID NO: 87663 - DNA, 444 bp, Glycine max
  unsure (1)..(444): unsure at all n locations
ctgtgctaacgaccgacgtgggtacatgattgtttcatatactttacctccatacttaatactataaagatatgtatgagcacatgtaaccataacataatatgtgtgaaataggaataaaacatattttgaactctgtgttcactcatatataattaaaaagaaccaatcttacatctattaacctatatcatgcaattttattaatctcaagtaaaaataaaattatctatataatattggtgattaaaacttattatcatgaataaaaaaagttattgaaaataaaattaaaattaaatgaagagcattctagaaatgataacattaaatacaatataattagtcaaacttatctatatttaaggctaacatataagaacaatttgtgttcatatgaagtattaatntttgctatcaataataattgaggttagcattcaa

SEQ ID NO: 87664 - DNA, 363 bp, Glycine max
  unsure (1)..(363): unsure at all n locations
agctngcacaggctctggctcaactatgatttttatagcagtgctgtaccaaagatagtacagtgtatagagcaattaagaccgacaattcccatgtgcattctgctgtctcactcggtcttgatgtgtaggggtttgcacaatgtacaagttgtggaagctctggtcaactataaggtgttgatgctctcacagctcgtctgagcagactacacctcggtactcgatatttatcacggcggctaaattcatgtctcattacacgtgaagaaaactatcattgacttttcatcttataatgaattgagtgattgacttatcaaatagctagcatcatgttcattatggtgtcagaatctctac

SEQ ID NO: 87665 - DNA, 449 bp, Glycine max
  unsure (1)..(449): unsure at all n locations
ntgagctcaatataagccatatttctagctgatgtggaattaataccaccctcgacgctataattaatgcagtctctaaagaggccgcaactaaagtggactagaggtggctacaattaatgaaactttcacgctcagggctactttcctggagcatggcaatgcaaatggcccaaaaatggatctaggagaggctgtgataccatttttgaatttgggtttagggtctaactgaacctcacaagaccatgctgcaagatatggattatccaagctttacaagctttatttaagtcatatttctatgccatgagagactaaacaccacctttgaggctgcaattaaggaaaccccaaacaggctgcaactaagacggactaagggtgactgctattaagatattccatcataacaataaaaccaaaacataaatgatttgtggttgttg

SEQ ID NO: 87666 - DNA, 337 bp, Glycine max
  unsure (1)..(337): unsure at all n locations
agcttgtgggattatgtgatagagattttgctctttatgctgatgatagaaaaaggtctaccggatttgtattntttatgggagactgtgtttttacatggagttctaagaagcaaggcattgtgacactttttacttgtgaagccgagtattgagctgcaacttcttgcacatgtcatgccacttggctaagaagaatgttggaggaacttcagttgttgcaaaaggaaagcacacagatctatgttgataatagatctgcacaagagcttgccaagaatctggtgttccatgaatgaagtaagcatatatatacaatggatcatttcattagaga

SEQ ID NO: 87667 - DNA, 452 bp, Glycine max
  unsure (1)..(452): unsure at all n locations
tcaattgactcttctttttagagaagagaatttaagttattgtcacaaaagagtttatggcgccggaggcacatataccatatttctatactctacatctctaattcaggttaccactgtttgacaaaagagtttttgaaataattttaacactaatgatataaaaatattaatatttcttgtggaacttaatttgcttgtaaattcacatgaaattttgtcctaattntcctaccacgttattatataattaataaattttacctacaaatacatgtccacaagaaaattggaggtattttctagagattatacatccctataaaatccgcaagtatttgctatgaattttcttaaaataaaaatgtgcaggaatttcttgtggattatttttcacaaataaagtcacaagagattatcagttgtctatagtgtgaacggatagtgtaact

SEQ ID NO: 87668 - DNA, 421 bp, Glycine max
  unsure (1)..(421): unsure at all n locations
agcttgtcattaccacaacaaatcgtaatcgttttatcctgagtattgaaaacatcaaaaggtgccatgtatggatggcgatttcccacacgttgtggtgacttcccagttgcgatatatgccatcagaccatgctccagaaaactcagcgtggcatcaaacatcgctatatcgacatgcgcccctctctggctcttttcgcggccataaagtgcactcactattccgctgaataaatagacaccgccgcatagatccgcaagagatgtaccaacgcgcactggcggagcatcaggatatcctgnttccatcattatcccgctcattgcctgaatgatggtatcgtaggcacgagcatctttatcggaccggtatgccgaaacctgacgatgaacatatatgaggcgcgggttgatttctt

SEQ ID NO: 87669 - DNA, 452 bp, Glycine max
tccgctttgctgtcagatgacagtaccgaatgggcattgttttctaagccaggtaaaaagaccaatctcaatgatgaccaatatattgtcattaatgcatctgtcggaatttctgagagttatgtagcaactcccgaaaaagaagccgcgataaaaattgccaatgaaaaaatggcgaaaggggataaaaagggcgcaatggaagagcttcgcctggccggtgttggcgtaatggaaaaccaatatctgatgccacttaaacagactcgtaatgcacttgctgatgcgcagaaactgcttgataaaaagcaatactacgaggcaaacctggcgcttaaaggtgcggaagatggaatcatcgtcgatagcgaagcactgtttgtgaactaatgctgacaggcagtatattgaggtaaaggatctaactccctccagccgacaattttttatga

SEQ ID NO: 87670 - DNA, 435 bp, Glycine max
  unsure (1)..(435): unsure at all n locations
agctngataaagaatgtcttgctggttaagatgctaaatngcagntggagaaggaaaaagctgaaataaattctataagtaattcttcattgatccctccccaaaatgaaaaaagggagaaagtgaatacttctaccgtggagaagtcacgagaagatggacctgtgaatcctcttgccagtatggatattgatctataaaatcatatggaagatttggtttctttcaggaattcatacttcagtgagagcaatgataatataagccagccttttctgcatgacgaagacttgggtaaatgccaagaaccttatgatgtacctgatcatgtgaaagataatgctactgctctctggagaagatttgagcttagcacaacaaaattgtctcatgaattgactgagcaactgcgccttgtaatggagcccactgtgg

SEQ ID NO: 87671 - DNA, 447 bp, Glycine max
  unsure (1)..(447): unsure at all n locations
cttgcaagttctcgttgatttttgtatatgaattagaatattcttcatactcctaactataaatataggttacaaataaaaaatgtataactcaacataataaatgattagagactaaaagcatatatataaataaaattaaggatcaaatgaaaaatatatatttgtagagactaanattaaaattgactacaatgagtacataattattaatacgatttttgtaattatatacgtgtaatataataatttagattaattattgatcttacattctaaataaatcaatatcaatcttacctaagtaatacgtattcatttgtgttaattactctcatagagaatctaaagtaatcttatggaaaaggttgaggattgatttcatatcatggngttaacaaacgaaagtaaatattgtgaggggtaagaattcatttagatcattac

SEQ ID NO: 87672 - DNA, 457 bp, Glycine max
gagaagttgaatactcgcgtgtgtagaacaacaacttttttatttattacatctagagattattgtagcgctgactcattttaatttgaatccaatctcagagtctgacacgtcctataaaattacataaatcttgttgggatcggttttgatataataataagatttaaatttaaatataattaagatttaatataaatctaaaaatagtatttgaaaatgataaaaattacctcgatcggaactatatatgtgagatacaagcataacgcattcattcatcaccgtccaccccgttcattcaccagataatgcggcgtactactattatcttttatcctgcgaatgcattccattgccgcgtgattggcataaaatgatgaagatgaacaccactcttcctgacgaactgataagacacattctgtaagattgccggtaaaactctattgcattc

SEQ ID NO: 87673 - DNA, 372 bp, Glycine max
  unsure (1)..(372): unsure at all n locations
agcttatgaanaacatttactgatcgaaagggacaaactatgttacgtacgtaaaatgaagattatacttaaatctaaaagttaaacacaaagctaaagatccatttagttgtatgggaaaaacttgaaaataaaagtgaattaagatgaaaattttaaattaaaatagaatgttataggatgagtctcacaccattttattgttattttttcttattttcacctttttttttcacaccatatgggcctaaaagataaagaagcaattagttccaataatggaatgctttgatattaattttcgcgcacaaatgttattccatcccctgacttctggatcaaattatgggacgaggaaaaggacaatagagt

SEQ ID NO: 87674 - DNA, 452 bp, Glycine max
tgacaaactccctcccccagggcgaaaaaaaaagaagttatcagatacataaaatacaatagcttattttcttaatcacaatggaatattatatagcaatctggtaatttctgaatcaaagtggataaataatgtgccaatttcaatcatgcacaaatagatagaagtttaccacaaaggtaataaagtaaatcactctctttttacaaggatgggggtagaatttggccttgagagagaaatcggtaagcaaattataactttaaatataatgaaaaggataatcaataataatgtattgataagaaatattaaacatgctcattaatgtgtgcatgaatgcaaatgcaatggaagaaacttacaggatacttcatcgcaaagaagatgagattctctaatgaaataaatcctccacccctgcacaccatggttagaagttaatattaact

SEQ ID NO: 87675 - DNA, 435 bp, Glycine max
  unsure (1)..(435): unsure at all n locations
agcttgctctaaatttacattgatgtttgtatttatgggaggagggtgtacgccacttttgttttaagagtagtgtcccactggtaaaactaactttccaaatttttgccttcgcaggaaatggccccgaggaagctngcctcaaagaggtctangaaggacaaagcagccgaaggaactagttccgctccggagtatgacagtcaccgctttatgagcgctgtacaccagcagcgcttcgaggccatcaagggatggtcgtttctccgggagcgacgcgtccagctcaaggacgacgagtatactgatttccaggaggaaatagggtgccggcggtgggcatcactggttactcccatggccaagtttgatccagaaatagtccttgagttttatgacaatgctnggccaacagatgagggcgtgcgtgacatg

SEQ ID NO: 87676 - DNA, 428 bp, Glycine max
  unsure (1)..(428): unsure at all n locations
tctcagctgctagcagtgatttaccttattcccttattattatcattcngntagaatgagaaattcccaaaagaaaatgtccggttggatttccgctttatttactaaaagaagggttttttattattatattattttttacctctttttttgatttccaacgtggttacggttgacgaacggtcggaattattntaaccgaatttacagataatacaattcaaacgatcgctggaaatttattttatttttaggttaagcgagaaatgacttaagtaaaatggcttaagcacgtcaagagggggtataaaaagtaaatgaaatgagaataaaaatacacgaaacacaatgtggaccaccactggtacatataatgaatcgaaaagcttggttcaaggtacttacccgttgaagatcgaagaacgatg

SEQ ID NO: 87677 - DNA, 362 bp, Glycine max
  unsure (1)..(362): unsure at all n locations
aacaaagagatgaaatacgagttcatgcgcataggtgacgcgccgtgtgcaaggatgtgtgatgcaaaaggggacgagacttaaggttaaagagtagaaagcaatgtggacctttctttgtttttggtcaataatgttaacaatgacattggntaaagtaaagttggttttttaaaaaaaagtgcattgtccagctcgaatcaacaggtcaccacttcaaccacactatgtcaacaagtcacaccgagttgactgcataatcgatctaacatctaacccgacttggtcatacctcaagttcatagtcgaatcacgctatgctttaaattatattttaatcattggatatgaccgagatatgt

SEQ ID NO: 87678 - DNA, 302 bp, Glycine max
  unsure (1)..(302): unsure at all n locations
cctcttggtctcttgttcaagggctcttgcggtaattgtattctcttcccgtaacccggcacactccttccgaacgtgtgtagcagccaacttgaacttctccttggcgagttntgcctttcctaactcgcttttgagagcttggacttcttcgtcctcttccggtgcttcaaaattctcttcgctgacgacttttaacttggcgagccaatctaaacctcgtatgcgaactntcagccattcgtggtacccaccaatgatgccattacgaatgcctctaagctcttgatctttccttaacg

SEQ ID NO: 87679 - DNA, 389 bp, Glycine max
agtcaccgcagctgcagcttgagcaacatatgcttggtatttggttacccaatagccttgaatcaaaattggacctgtcgcaagagtctatggtttatgcctctctgctgaacaccatacagaccctttgttcttccatgcagcatcctgaaacaattgagcagcccgaaacttatgctgcatacattgacaatagacccttctcaacctcaacagcgtaatcaatctcagcagaacaattatgacctctccagcaatagatacaaccctggatggaagaatcaccctagtctcagatgggcttaccctaacaacaaaacagtagcctacttcttactttcaaaatggtgtggggccaagcagaccatacattcctcaccaattcaaca

SEQ ID NO: 87680 - DNA, 284 bp, Glycine max
atgagcctttgattacaagcttggaatgatgcttcaatggaggcaaatactgagggagagaaagagagaggggggagcaccaaattgaacgaagaacatgggagacgaagtgaactctgagttgtggctcacaagactcttattcatcatagttaccacacgtgttacacatgctgctatatatagactagctagcttccttgacaatcttgcttcatataactttcttgagaagcttctttgagaaaactctcttgagaagctagagcttagctatacacacc

SEQ ID NO: 87681 - DNA, 366 bp, Glycine max
  unsure (1)..(366): unsure at all n locations
cagctttatgctntatcgtgtcacctanccctatagatctcttcgatgggggggtccgatcgcataatcaacccatgaatgttttgatcgaccgagggagtacgcacaatcttgtgcaagcccgtcttggccgtcacctgggcctcactgctcagcccactcagtctcttttggtggtggtcggaaatggaaaatgtatgctctgccatcaactttgtgtaggagttactatcaatatccangacaaggatttcaccatggatcttcatgccttacccttgtgtggtgccgacgacattcttggtgtttagtggctcaaatccctgggtctgggcttaacttgatataatgatctcacaatgaaat

SEQ ID NO: 87682 - DNA, 458 bp, Glycine max
  unsure (1)..(458): unsure at all n locations
ggacctatnatactaagctgcattntttaatttgactcttgaagcgctttgactattttaactctggcnagtgtgtggttttttaaatttaactcttctaatatcctaatctctttatttataggcctcataagaacatgcttataggaaccaaaattattaaaatgcaaacttttaggaaataaaaataagttaaatatcttacaggatccaaaatttaataaatgaaaacttaatgtctaaaagtaaacaaattgttttatatgaatcaaaattgaagaaatacgaacttacatgaaccaaagacatatttaattcaatagttaacattgagacgatttcacccaagccttttacccacccacaaacttgcactcttacacaatagtcaacaacattctcaacctattttatctttttgttgataaatggtagtgatatgaagcagagattaattt

SEQ ID NO: 87683 - DNA, 375 bp, Glycine max
ggggggggcgttttactatatcttatataaagacaaaaatggccattcataacagttgcttggcgcactcatcatctacccaagtttatgttacctagcccatacaattgcatgcccagcaggacccattctggctaacattgacatctgaatcttgtgttgctagggacaaggacccatcatttggggcaagcttgtcctgttatacattggaactgtgctgcaactgctttaatattctatcccccattaaacaatgagctctatctgtctgcatattgccaagaatccccccgtactgaataacaatcctatataataactgattgttcgttcatttggatgaaatgtcttaacatgtatttgataaattga

SEQ ID NO: 87684 - DNA, 428 bp, Glycine max
  unsure (1)..(428): unsure at all n locations
agctngnngtagagtaagaagnggtcatgacataatacttataactntaagaaagttattataaatgagttgctagctaagaactgaacatagtcttagtggtagaaacaaatcaatataatttatgtcttatatactcctagggggcgagtttgattttttttaaaagaaaatctctattgggtgtgcaaaattggtttcatcatttgatcgtgtcactactataaaaagcagntttaacatcggcctattaacatcggttttagccaaaaccgatgttaagttaaacgcggtgacatanttgtaaataaagtatacttcttaacatcggttnttcaaaaaaaccgatgttaatgcatacatgttaacatcgggttttcaaaaaccgatgttaactaatcaaaaagcgatgttacatatcatatgtt

SEQ ID NO: 87685 - DNA, 451 bp, Glycine max
  unsure (1)..(451): unsure at all n locations
cggcacaatgttgataacaagacacacttcaattgcttcattttggtgacaactctatnttcatccaaatgatttttttgcatgagaaggttttaaatgggaaaaaaattaattttcatgagaaataacttttcaaaaaatatatgtacaactaacctcgtagaatattgtccaaaaattctcccaaattattataaagtgatatgataatatttagaaattgtgttgtgaaaatacggttgtaggacaacaaaggaacaataactatgaaaaatagattcttgtaatttgtttggcttgagaaaaatatgacatattattaagggtaaggaaattccctattaaagtttataaaattcagaggtgtgtaagtactttttttaaatcttaaaatagcgtttaagaataatttcagtgttaaaagttaaactggaaaaaaagtgtctataat

SEQ ID NO: 87686 - DNA, 435 bp, Glycine max
  unsure (1)..(435): unsure at all n locations
tcgaccggatcttagcaccgcngctgcaagcttaaatttgattaaaacgttcagatactgctagtaatcgattaccatatatgtgtaatcgattacacagtgcaatatttgaattcaaaatttaatagctgttgtaaatcacgtttggccactggtaatcgattacatcctctggtaatcgattaccagagagtaaatttgttgaaaaagaccttttaacttaaaattcttggccaaactctttgctacttcaattggaattcccttcctatttattataccctgtctaagactctaaagactgtcttgatcatccatcttgaatatctttaatttctttgtcttgaataaagctttgagacgcatgtgatcctttggcatcatcaaaacatcagcttgatccttgtgtctacacccttcactctataatatctt

SEQ ID NO: 87687 - DNA, 437 bp, Glycine max
tctcaattcggaagcattgaggccgtgattgaccttttcatcttccatcagatggcacgtgaagtggaagatggcccacacaaagaacactggccaaatgacgtctgagtcaccaaaagaaattgttgagaaaattgtaagtcactttcaattaataattgtaattatttatgtgtattctgtgattgaataaacaaataaacgtgttctgcatatgactcattggaggagcatgcgtcacagggtttctttgtccctcatggacgtcaagatgtcttgactgctgccattgggcgaccataacaccatggtcgtgtgcgtgctattggagccagtgtgactgttggatttcccttgcagttactttttggaccactttttctttatgcagatatgttcaagggaaatcccggttgccggacagcacaccagatcgt

SEQ ID NO: 87688 - DNA, 445 bp, Glycine max
  unsure (1)..(445): unsure at all n locations
agctngagttaacattaaatcaaactctctttataataagtaatggggtgttcacacgttagaatggtattagttcaagataaaaacttaaactaattatatttggaaaaaaatgatcatgaattaataatataaaaatagtttatacacttatcttatcctaaaaatataaatatgataggtaggtttacttttataataattatccgaaaaaatcttacaaattataaattattaattgtgatcgagtaatagtatataaatttacattggtaacacaaagttattaaactcttttattagattggtttagttaaaagttgaaatttctcttgactaatccaaaccaaactaaactactgaaaattgaattaattcgagtcaccgcataatgattaacatacatacattattatattctattcacgtttttatttacactaat

SEQ ID NO: 87689 - DNA, 449 bp, Glycine max
  unsure (1)..(449): unsure at all n locations
ctacgctgatatcgcccttctttaagcacgtgatcatcttgtttatgtaatcatccaaagcattattgcgtagccttcctaaagaactagttatcctcagcctgggaagtctcagctntttcaatcattcttttaatttcttctgctgacaattttccttcatcattagttattgcaatatcattcttattgccggtggttttttcctcagcagaaacagataaaataccattcacatctatatctaagcatatatcaaaaggatggtactgaggagttggaggaaaaccagatagactaaaaaaacccagtgaattgttatcactagctctttgtctctcgccctcatacacaataatctgaacagatgntaggttctctctaaatgttccatatgtttacttcttctttacaggaatagtagtattcctaggaatcacaacacctca

SEQ ID NO: 87690 - DNA, 410 bp, Glycine max
  unsure (1)..(410): unsure at all n locations
agcctggtattcaacataagagaatatttgtatggaaaatacaatatgggggtaaaggctgacacagttttcggtttgtgtttttaactattatttatttatttataatcgatattggcttatgcgttgcatctgcaaatcacaacccaaaaaattctccctctttcggaccctgtctctttnctataccaattttcgttataatttccttctgagtcgcatcgctctcggatcacttctggtttttcagcggggacttgcgtcgcactcgcaggcaacaatttactgcgaggtacggaatccgtgaattttccggcgaggtaagattccgttgaaatttttgctttgtccgagggggagggtggaactttgtggaataagatcgatttggctccacatcttggaattat

SEQ ID NO: 87691 - DNA, 371 bp, Glycine max
  unsure (1)..(371): unsure at all n locations
ggtttggtgtgatccacacaacacagacagagagagagagagagaggttggggtgcatttgttgcacagccacacgtcctggtataacagttacatgaagctatctacctttttcctgctcggtgaggttaaagatctgccacgtgggcacactctctgccactgaccacccacgtacgttgttggatcattgcaattngcaacatttcatcgtcaatgctttactactagtagtttcttttttactaacttggacaaataaatttaaattcaatatctatagcgatcaattcttaatgtgtatgcttagattaatctctcgtaatttaaaatcttacaatacacaaactcattaatgttgttattatact

SEQ ID NO: 87692 - DNA, 342 bp, Glycine max
agctgaagtgagaaagtgtggaagagtcagtcttcctacctttattcgttgaccacagagtggtacttggagatatgtcgcgggggtcaagagaccttgtgacgtcaggtggggtgctattgtccacaaccaagcttgaccaatcccgacccaacccgggcatagtcagtcagtgagaacctgtgacgtacctaaacaggcgagctcctagcagtcaaccgataaaagaacatagaccacaaagcaaggaggcttgtgtggtggctggccaactatggatcttgagtgatatctggaatatggcctctgataatcgactaccaagggtgtgtaattcgatac

SEQ ID NO: 87693 - DNA, 456 bp, Glycine max
  unsure (1)..(456): unsure at all n locations
tatctcatgtgggtacatctcaataaaaacattcttggttagtcttatggntntggcgagcacgggaaggatcattgcagatgcgggaagcatgaccacggatctcgctagaggtgctgatgtagttggtgaatattttgggatcattgatcgtcgtacgaagattgagccggatgatccaaatgggtacatgctagagaggttaattggtcaaatagagcttcatgacgtgcattttgcgtaccctgctaagcctaatgttgctatctttgaaaatttctcgatgaaaattgaggcanggaaatcaacagcattggtggggcaaagtgggtccgggaaatcgaccatcatanggctaatagagaggttttatgatccacttaaagggatggtgacaatagatggcatgaacatataattgataacctaaagtcactaaggaagcacatagcacta

SEQ ID NO: 87694 - DNA, 437 bp, Glycine max
agcttatgagaaacatttactgatcgatagggacacactatgttacgtacgtagaatgaaaatttgatcttaatctaaaagttgaacagaaagctgaagatccatttagtattatgggaaaaactgaaacataaagtgaattatgatgataatattaaatctcaatagaatgtgataggatgagtctcacaccattttattggctatattttcttattttcacctttttttttcaaaccatatgggcctaaaagataaagaagcaattagttccaataatggaatgctctgatattaattttcgcgcacaaaggttattccatgccctgacttctggatcaaattatgggacgagcgaaaggacaatttattagacattgagatgaaaaatctaagcttgtttggaactatttctaaaacatttatagttttgaaat

SEQ ID NO: 87695 - DNA, 448 bp, Glycine max
  unsure (1)..(448): unsure at all n locations
ngacanactcnctccncccagggcgaaataaaaagaagttatcatatacataaaatacaatagcttattttcttaatcacaatggaatattatatagcaatctggtaatttctgaatcaaagtggataaataatgtgccaatttcaatcatgcacaaatagatagaagtttaccacaaaggtaataaagttaatcactctctttgtacaaggatgggggtagaatttggccttgagagagaaatcggtaagcaaattataactttaaatataatgaaaaggataatcaataataatgtattgataagaaatattaaacatgctcattaatgtgtgcatgaatgcaaatgcaatggaagaaacttacaggatacttcatcgcaaagaagatgagattctctaatgaaataaatcctccacccctgcacaccatggttagaagataatat

SEQ ID NO: 87696 - DNA, 432 bp, Glycine max
ttaagcaccgcggctgcagcttgtaaaacttgaaaaatcagaactagctttgtcgcacatcgttcgcgtgtatgatatccactccacaaggtttgaagttgaggagaccttcaatcctattacgcaacgtggcggacaaaagtgggctgttaacttgaatggtcattattgtcaatgcggaaggtattctgcgcttcactatccatgctcacacattattgcagcttgtggttacgtgagcatgaactactaccaatatatagatgttgtttacacaaatgaacacatcttaaaagcttactccgcacaatggtggcctcttgggaatgaagcggctattcctccttctaatgacgcatggacacttatccctgacccaactacaattcgtgcgaaaggtcgaccaaaatcaacatggataaggaatgagat

SEQ ID NO: 87697 - DNA, 450 bp, Glycine max
  unsure (1)..(450): unsure at all n locations
tctagctatgaacctttttaatattatcagctgaatccacatatcacagaaatcactcactcatgcaacaaacaaattaaaataatgactgggtgcctccacaagcgcttgttaacgtcattagcttgacgcatcgttctttgtcatggttcttgaaagtatagaacaatgtttaatctctcaatggttccaccatggtacaacttcagcctttgtccattcaccacccatgttctgtagggatctttagattgagagtcacaaagctccactgctccatatggtcggacttttttgatggtaaatggtccgaaccatntagatttgagcttcccaggaaacaatttaagcctctaattgaaaagcaacacttattgtcctggctganaatccctcttgagtagctttttatcatgaatacttttagccctctcttttgtacaacttgac

SEQ ID NO: 87698 - DNA, 438 bp, Glycine max
  unsure (1)..(438): unsure at all n locations
agctngcatcaagtggtaatcagagcacaagatcttctagtangtgctccttaaacctccattaattnttttctttaccgtctcttccattggtgtttcttcatttttttctccatgtatctcctcacatgtcttgtgataaatgtttttaacatgattctttagagtttccaccgattaaaattgctatagaagctacatttgattttctatggttcaaatatcttgttcttgttcttgaaccatgaatagtgttaagtttaggttcctttgagttatgtcttgttatatttttgtggttgaaacctacaccataaaattcttacataaatatttaagtagaagaaaacctctaaaatctagagtgacttgttcacctattgtagtcttgtcatagaagtcatgtctagtcatgacacttgtcacataagatttctt

SEQ ID NO: 87699 - DNA, 394 bp, Glycine max
cttgcatggcttattccttagtggatggagcctcatctcacctcttctcctttgtcttccgctgcatctccatggtggaaaatcaccattaatggacctcattgaagctcaaagatccagccttcatataagccccacagcaagcttccatcaagtggtaatcagagcacaagagcttcaagtagttgctccttaaacctccattaattttatgctttaccttctcttccattgtttgttcttcattttttctccatgtatctcctcaaatgtcttgtgctaaatgttgctaacatgaatctttaaagtttcaccgattaaacttgctatagaagctagattttattttctatggttcacatatcttggtcttgaaccatgaattgtgttgagt

SEQ ID NO: 87700 - DNA, 229 bp, Glycine max
ataaataaagtaacttgattttatctaaaatttaaccatattaaaatccaacattaaaaatcatgatgaatctatgaagtatccaaaccttatgaaattgtggctaggggtttgccacattagcttaggttaccacagttaattaattttaactatagtgagctaaaatcaacccatgttatatctctgagaacttttctatatatagaaacctacttcaccttatgga

SEQ ID NO: 87701 - DNA, 447 bp, Glycine max
ctaagccttacatgtagtaaccattttctgactgcttaagccgccataaattgttcatgagatgccaatcttcgttagacacttatacccagaatacaattattctattgactataaatggaaattttatagatccttacaggttattaaaaaaatgaataaacgagggcataaactatgttaattggttatggatttgaaccgacgggtagacaacaatgcttgttgcgaaataattgattgtgggcaactactaattcccctctggaaatcttttcaatttttcatctaatgagatgaggattcataggtgtgaatcatttcgatttgttctcgttatggagcagccacttgtttattttgtccacaattattgattctcctcctttgatgtggttcattatggatcagccgcttcaacaaatttgaaattgtgtttgggtttca

SEQ ID NO: 87702 - DNA, 310 bp, Glycine max
attaaattccaaaattagcaacacttatcaatttatccccattatttgccttaaagcaaaactgagtaaaggcagaaaataagagtcaaagagatatcaactcagctcaaaagaatatgagaatactaaactaaaaaggcttatcagccagcttatagagagtgaatgattgtgaagcacagatcatatataaacaagataataattttgacacaaatcttgaagtattcttgattctatcttgaatatctgtgaagatatgtgaacacatacatggtaactcattacttatctcaattattttagcata

SEQ ID NO: 87703 - DNA, 436 bp, Glycine max
  unsure (1)..(436): unsure at all n locations
tccgcctctgatccctcttgttggactaagcccaatttatgttactctcttaggtttagactaacttaaactcgagttcatctgcagatccctcttgtaagactagactaagctcaagcatcttacaacagtttagcctaatttagcctaagcttcgttcacagatccctcttgtaagactaggcctagactaaacaacattattgtaacaacatacttaaaaccaaaacttaattcacagatccctcttgtaagactaagtgtcaatcctgcttcaatcaagttctaatgcaacaggacatttcccaataataaagtcacctaattatgcatacaaatggatgatcattccanaagcatacaaacattaagcattgaacgaagcattgaacatataaaacataatctattacatattatgtatttacatcagctg

SEQ ID NO: 87704 - DNA, 421 bp, Glycine max
  unsure (1)..(421): unsure at all n locations
agcttgagtccaggccttgagaattgagacatgacccaacaattgcacatagttgacagcttctaatccaccatggtgatactctgttgccccacagctcctccctgatgccctaggccagattgttgacttcagtcacttgcttcaaatcttgtctcggacagtcgaacctctctagaagtaaccaagaagcaaactttggccaactcagccatttgtgccaccaacacttcaattatttaatataatcctccacaaaccctcttgcctcaaggtggataatcactcatgcactgatcctaanatacactcctcaaatcactgttagttgcttctaagaaattatgggagacttcttggcttctatacaagaactgtgtaaaatctcacacaactaaagatatgacttatgtagtcctta

SEQ ID NO: 87705 - DNA, 426 bp, Glycine max
cgtacgaatgtaagaaaccattttcgtgacctttgtgatccttgactccatctcattgaatcgcatgtgcacttgtaactccaaagtatcaaacctttcaccaacaaaggtttgaagaccatcgaacctgtccaaaatcttttgaagaagagaggaatcttctccatcatgtaaatgtccttcttcatcaatgggttgagcatcctttttcatccaagagccatcatgctctttacggtaaccaaaggatacaatcacagcagcacctattagaaaggatctcttgattggaacataaggttcagaatcaagagggatgttgaagtgttgaaggaagagagtgactacgtgtggatatggaaatggagaatttaatcgcaatgccttatgcatgcaatattggactaagtgtgcccaatcaagttt

SEQ ID NO: 87706 - DNA, 391 bp, Glycine max
  unsure (1)..(391): unsure at all n locations
ctgcaactgctttacatttgtgatcttgttctctaacatgatcggctagtttcttcaaaggatnggatgtaatcttcacacccttatgtatctctatttatattttattatatgtatgaatcttttatactcattactggtgatttcattatgtttggaatgcttaatttctatttgaacattaatttcataaaattggattttaagttngactgaaaagtactcttaaaatttaaactgaatgaatttaatttgtacgcgacgttgctaggaataaaacataacattttaattgcgaataacacgagattaagattatattgtggatcaatttggggttatttaatgaatgcataattatgtcaaaaatattcattatgttattctatta

SEQ ID NO: 87707 - DNA, 415 bp, Glycine max
caccagagaagcattgtttgatatatccaacttgttgatgcttctcagcttaaccgacttcaaagggtatgctctccattgaaccagtttgtgggacaagttcaataacaatgacaagttggaaagaccaatgacttgccaaggaatagttccactaattctgttggtgaaaggcaaagtattgtaaattttggcaattcccaacaccaggatgtatgcttccttccaacacattatttgacaagtcaagttgaaacaaaagactaaggttgccaatggattatggaatttctcctgaaagattgctcacatttaaattcaatgactgcatcttttggaacatgacataagaagcacgaatattcccatgtatctgattgccaccaatataaaactggcttagtgacttgataag

SEQ ID NO: 87708 - DNA, 432 bp, Glycine max
  unsure (1)..(432): unsure at all n locations
agctngtgcaagcactagtaactcaggttattttgttatctttcaaaagcaaaatcagaagtggtacacctcatttggttcctattgccactatcaatagctaaataagattttgaacaccccctttggttcaaatgccactctctattatcaaaatcataaatggaacatggctttaggttactaatgccacccttaatagcaaaatcaataatggaacacaccctatggattcaattacccatgatcgaaaaaattgtgatgttaggtgatatatgctatattgatatatgcttatgatgtaaccttacacaaatagatatcgccaaacataaagaataatctatgcatttgctgatgtgaaaacctatacccaaaccaatccttctatctttaactatgactaactgatttccacctgcatgtgtgtaa

SEQ ID NO: 87709 - DNA, 379 bp, Glycine max
  unsure (1)..(379): unsure at all n locations
tgtagtagactaatactcttattaaaattcaaaatagtttaaccagttctatacaacctgtttattgaatcatttcttgatgaagcagttataaattgatggtgttcgtcgtctcttctctgggctgatacaatccatgcatataaaaattatgaagaagttgtgtgagtaggacaaaactngcttcaaactcaataataactcatctcattcttaaagtgacttttgccttacatacaataggaattttgtgcatactgacttaattgatgtcaccgtcttgattgacaaatcaaataatatcgaattgccacataaaccactatttaatgtgtaagcacagatgagataacacatctatctactttctaaatgcgta

SEQ ID NO: 87710 - DNA, 405 bp, Glycine max
  unsure (1)..(405): unsure at all n locations
agctntaagtagtagtgagaatgctctgagacttggtgggttttctccttggcctgactctccatttatagctaatgaagtggacttgggcttgattcaaaaaatcttccttatctatctttntgatatcttgtggatcttataaatcttatctttcctacatctgcaggtcatagataagaaaaatattcattcatatcttttaagccaaaaataactactaaataaatatctttaaagatattnttaaattagctcatatttagcagttatcaatatcttttggatcttgtaatcttatcttttcatatctgcaatgatgtaagctccattggagcttgtaggcctaggatcttcttcatcaatggattcctttgcttcttggaagatgaatggcagtggaat

SEQ ID NO: 87711 - DNA, 450 bp, Glycine max
  unsure (1)..(450): unsure at all n locations
tcctaagtgtagacatatgtgacgtaatgtacaagtcaattatcttactctcatcagctgcagcaataagtagtttctccaagagtggcttctcatttattgaggaacacaaagtcttttggtgttttcccctaaaatctgtcaccaacagttctcttaactgctttagctttccaacctctccaatgaccactccatcatcatccataatcactggaggtatctcttgtaaggatgtgatgcctccaatatccttccattgaattgaacacctagaataagccagaagatgacgtagctttttaagcttactaatctcctctggcatctcagacacatatgtgcctcttatatccaaggtctccaaattctggagcttnaccaatggatttggtagactntctatgaatgtattccggaagctaaatacttcaagtggcatatattccc

SEQ ID NO: 87712 - DNA, 313 bp, Glycine max
tattctcaatgtaaccataccatgcggaaatggatagagaaagacttacaaagagacttgctatttagtaatacaaagatatttcaagagttgtcagaatctcaaccttaaataacctgatggtgtactttctgcacaccgttgagatctatattgcttgctaaactataagatttgacacccacctcttaaggcctcaacctttcattttggcgtaggttgtcaaatcatggctagacttcaccaagaatatgatctcataaacaacagaatgaaaataaaaccgacgttctttttcaaaattttctatttt

SEQ ID NO: 87713 - DNA, 253 bp, Glycine max
  unsure (1)..(253): unsure at all n locations
cactctttatgttttgangaanggngaggnaggtgaggtgctgatgtttgtggcctacatagatctggaatcgcatatagtttagcaggcggagaagatcatgggtttcatatacagaatcatgaggcttctacatgatgtccttactgcttcatcgatgaactcataagagaatcccttatatgaaagaggagtgaaggcttcttctataatccactcgatctggaagtgggatcgaattatagagtgtatt

SEQ ID NO: 87714 - DNA, 437 bp, Glycine max
  unsure (1)..(437): unsure at all n locations
agcttgtataaatgtaccttccttgtaaatattattaaaacagaccctgattggtaaatactttctaaataggaccctttgacatatatttgcctcatagaaatattgttgtcccaatttaaaataataaatagtaagagacccttattcccggttttaacttatcctggttgtaacctgtgcaacaaactagccatttctgctatacatgtattntttnttctctttattaatagaattactgctcatccttgtgatatcaacatgaaaacaccacactagggaaatatagcaaaatatcatctttatctatctgatacatacaataattttacaaatctattccatacattctatgatggtacaacatggacttcacattatataaactacaaaaagaaaaactataaattattagaatgtatacatcacaaatc

SEQ ID NO: 87715 - DNA, 406 bp, Glycine max
cgcttcaactaccattttcacacgtcccgagagaagtatttttgttattccacattgtcggtggtatggaagaaaagaaaaataatatagaggagcaaacccgacacgaatgcgttgaatatttgaagaaggaatggaatgatcaattttattcattagcaccagtgcagttataataattccaatacaatcgaaaactatcatgttgccaagattttatcaatccctggataacaacctaacttgctcctaaagtgtatgaaccacttattaacttaaacaaatactaaaaaaatacatgataaatattaaagagcccataatgcaattccaaagcaaattatttacaaaggacctctatggctggttgttttactgagagagatatgctcttcatatgtaaact

SEQ ID NO: 87716 - DNA, 68 bp, Glycine max
tatgtgaactttgcgctatcaagacatcatttcaatgtggtttttgccttgatcatgtagatgcatgt

SEQ ID NO: 87717 - DNA, 440 bp, Glycine max
  unsure (1)..(440): unsure at all n locations
aattactctacgatagcatcatctttttatgagctggtgaagatgaatgtggcttttacctgcggtcgaaaacaagagcagcctttgntttgctcaaagaaaagcttactaaggcacctgttctagctcttcctgacttttctaaaacttttgagctagaatatgatgcctctggagtgagagttggagctgtattgctacaaggtgggcaccctattgcttattatagtgaaaaaattcattgtgccacccttaactaccccacctatgataaagagctttatgccttaataagagccctccaaacttgngagcattaccttgtttccaaggaatntgtcattcatagtgatcatcaatcacttaagtacattagagggcaaagcaagttaaacaagaggcatgcaaaatgagtagagtacctatagcaatttcatatg

SEQ ID NO: 87718 - DNA, 382 bp, Glycine max
aagcacctgtgctgcagctaccgtatctgcggtgtatgatttttttatgctgtttggaatattatacaatttagagagacattgctatacttgataaataaattacatattgataattctatataatattttagtctaatatgttttgttctatgtgagtatatagatttgtggcttcgaccttatattattttaaattgttttgaaaagttttttatcttattagttgttcaatattataattattaattaccaagggctcataacttaagggggggtctttctaaaaaaaaaactcatccctagattattttttttatgaaagaaatattccctacctacccccaatacattaaacctttgctttagaaaatgttaaaag

SEQ ID NO: 87719 - DNA, 391 bp, Glycine max
catcatggcaaggaaagcccggacgtcctcttttttgccatgtatgacacgttcgaccggggatgtgaaaagagcagcgcaagaattgtttggtgtgcactggctctctatgtgtggctgggttcacaccttttttctccaagaaggtaggcccgtctatccgctacaaggtcaccgctcgtgcgtcgaaaaaggaaagggtgattgattcatttgcccaagaggcaacaatgtggacggactgatttgctcttactttgaacaagagtcaagaactttcccgattgctagccaaggccaaagcagtggcggacacctactccgcccccgaggagatacatggacttctcagctatttgcagcatatgatagacttaatggaccatatgat

SEQ ID NO: 87720 - DNA, 452 bp, Glycine max
agcttgttgataggatagaacctaatgacgatcacatataccatatgacattgatgatcccacgacttttcctcatgcctatgcaggtgtcgtgggattcaactgtgtttgggtagtacaatgataatgttcccttgtacataaagcatgacgatcatggggaaatagcacacgatggtcaatgtatgaacatcattattataaaaattatggattatgaaagttactttaaattacagtccattacctaattgattgttttgaattgatccataatttactttattttaacaacaatagtcaatcaatgagttaagtctatgatcatggaatgcctctgtgtatggattcaatcgcatgttgaatctgaagattatattaagaaataaatgtccaactcacagagagatgtctacctacgaacctacttgaatgggtaagtaaaactaacc

SEQ ID NO: 87721 - DNA, 321 bp, Glycine max
  unsure (1)..(321): unsure at all n locations
ccaacatcttcactataagttgcaccttaaaaagtgagcttaatgtggatgatacgctaagttccacttcctctctgggaaaatttattataactgtgctaagcgctccatccttgcctatgccccagattcattctgtaagttgagctttcaagctgggcttaacanggaaggatgcactaagcgccaacatcattctattttgaagtcattggaagtgcgcttagcgcaagtagtggcgctaagcctgaatcactcactgtaagttgaagcttgatgtacactaagcctcacatctcaggctaagcgcatgttgcaaaa

SEQ ID NO: 87722 - DNA, 370 bp, Glycine max
tacatgacgctttattggcacagaataagttgctttctatgcaactagagaattaacagaaacacttggtgaagtgccaactaaattgtctattgatcaacctacacattcttctattttgcaggttacaaagtgtaccattttgggtgaggctcatgaaataagccaatgtatttccattgaagaatacactcaagaagttcactatatgggaaatcaacagagaccaggatatactcaaggaggattctcatgcttccaccaaggtccttacaagcaacaaggacagtggagaacacaccctagcaatcaattcaacaaagaccagggtggaccttctaacaggccaatccaacaatgacctaacatc

SEQ ID NO: 87723 - DNA, 359 bp, Glycine max
tcatctagccagttcacaaaagccaccagatcttcaatcttagagaacgaggctgctctaacttcagttgccaaggagatgacaaagtcaccctgtgtttccacatcggctttcacctagatccattaaaaaagttataaaatttgtaatgatagaatgccaatgtgaaaaaataacaaaactggagggtaaatttaatgtacagctaagaggaatgatgatctattctcaatctccccaatcatgttgctcctagcatcaaatggatagcaagctcaatagtttttcatttggtcatagaattattctcttagtcacactacatttttggtagggtgaaaatacttttgtggactcca

SEQ ID NO: 87724 - DNA, 457 bp, Glycine max
  unsure (1)..(457): unsure at all n locations
ctactatggtgtttganatatgagggagactaaagnatttatctgatgtttgggtcatactctacacacatcncannggactttnattgataaacaatgtatttgcagagaaactagagttgaaacatagcacaacatgattcaattaccaaagacagaaaactatctatgatgtgaattatggagaagactttgaatcttaaataatgatctcataatgagttgagatggaaaataagtaaaagttaaattataaagtgggtcaaataaggaccaaaatatattttagctaaatgtatccagatatgcacttgatccaatcagaatatattactgaattatacgagcatgtagctttatagtttataccaattcattcaatagtatgttgtaaggattatagacaaaaggggaaaagtagtgtaaacataatgaaatgctatccgacacagataaa

SEQ ID NO: 87725 - DNA, 440 bp, Glycine max
  unsure (1)..(440): unsure at all n locations
agctntatcaaacatactcttctgatctgtgttgcaaaggtttgtatacgatggagggaaaactntgtacacagtcggtcctctgccgctaaataagtatgagttcaaagtgttgctggagaaatcatttacaaaacggtatgtcttgtgtatgactgtattatttgcatcactagtttattttcccttaaatctcactgttccaactctagcagtagtgccgactgccaagagtcctggtgctaacggaagccttaatgaggaaactaaaagaaccccgttatatttttcccttacactatttattntttctagatgtgtcaacaactgttatcataaaacctgcacctgtaatagaaccccgttatattgactgggaaaaagtgacaaacttgtacatatggttcatgaatctgcattaataatcgcccgcgtttttt

SEQ ID NO: 87726 - DNA, 441 bp, Glycine max
  unsure (1)..(441): unsure at all n locations
ctacctttctgtntctctcactagttnttccagtatttgtctagcgtgtntacaactgagcccggngccctttatatagagaaactggaaagaaaatgataaaggccccttcagtcaaaaatagtaaagttactattcatttactttgtcacatggctctttttacaataaaattttatagatagacttagtatcagagtctttgcaaaagtagagattcccgcctttaatttacagttgtattttggcaggatgcttctgtcttcagttctttgttgattntgtaatagtaacattttcttcttcatcttggatattctcgaagtaggaaatgtctgatgagtcttccaatgagagatcagtggatgaaaaaggaggaatttgttgtccatgacatccactggctgttgaaatctcttcatctttcttctctttttggaa

SEQ ID NO: 87727 - DNA, 462 bp, Glycine max
  unsure (1)..(462): unsure at all n locations
ctcgaccggatcttaagcacctgtgctgcagcttgggatgatgctcatggattatattaaagagggaaagaaagagagagggggagctcgaaattgaacgaagaaaacaggagagaagttgaactttgagttgtgtctcacaagactctcattcatcaaagtgttacacatgcttctatttatagactaagtagcttccttgagaagctttcctgagaaaactttcttgagaagcttctttgagaaaacttccttgagaagctagagcttagctacacacacccctctcataactaagctcacctccttgagaagcttccttaagaagattcctaaagaagcttgagcttagctacacatacctctctaatagctaagctcacctccttgagatgagaagttagagcttagctacacactccctataatagctaagctcacccncatgacaaataacatgaa

SEQ ID NO: 87728 - DNA, 407 bp, Glycine max
  unsure (1)..(407): unsure at all n locations
tctggtgggacatcttgacttgctntccaatctgacattcatcacagattctgccttcttctatcttcagattgcgaatgcctctaacagcacctttgtcaatgattctcttcatgcctcttaagtgcagatgtccaaatctttgatgccatattctgacttcatcttctttggaggatagacatgtggaggagtaactggtttcttgaggtgtccataggtagcagttgtcttttgatctgctgcccttcattagaacttcactcttctcatttgtcaccaagcattctgactttgtgaagtttacattgaatccttcatcacacagctgactgatgctgatcaagtttgcagtcagtcccttcaccagcagtactttgtccagactaagaagtccatcatggact

SEQ ID NO: 87729 - DNA, 436 bp, Glycine max
  unsure (1)..(436): unsure at all n locations
agcttattcgcacatcgnctgcgtctatgatatcctctcgacaagggtngaagtagaggagacctttaatcctataacgcaacatggcggacaaaagtgggtagttaacttgaatgaccattatggtcaatgcacaaagatatttgcacttcactatccatgttcacacattattgctacttgtgattacgtgagcatgaactacttccaatatgtagatgttgtttacacaaatgagcacatcttaaaagcttactccgcacaatggtgacctcttgggaatgaagcggccatttcttcttttgatgactcatggacatttatcccagatccaactaccattcgtgccaaaggtcgcgccaaatctacaaggataaggaatgagaatggatgacttgaaccatctgagcaccgacaaaaatgtagtagatgtgga

SEQ ID NO: 87730 - DNA, 411 bp, Glycine max
  unsure (1)..(411): unsure at all n locations
atctaaggttgatgaaggacatctatatatctttatgatgtngngnntgcagcttctccccaaaaggtctttggcagtcctacacttagaagcatgcacctcactcttttcaaaatgggcctattcattctttctaccaaaccattctgttgtggagtgtgagggactgttttactgcctttgatgcctattnttctacaaaactcattgaactgctctgaaacaaactccaggccattgtcagttcttaaaactttaattttgtacaaagttgatttccaacaagagtatgtcattctctgaatttttgaaaagcttccgacttatttttcaaaacatacagccatactcttcttgagaaatcatctatgatggtgagaaagtatgagcttccaccatgagttttcactc

SEQ ID NO: 87731 - DNA, 330 bp, Glycine max
cgctttctaacaggcttctttgagaagctatatccttatctatccacacccctctattaaataaattaacttccttaaaaataattacgaatgaaaataacgcaacaaataatcaaacatcaaacataattactaataatatatagatatatatatcagagtgttacaagggcgtgcagccctcttaaggtgaggacgtgtagtcctctgaaagtgaaggtacatgaccctctgaaagtgagggcgtgtagccctctgaaggcaagggcgtgtggccctcttgaagcgaagacgtgtagtgctctgaacgcgaggacatgtattcctcta

SEQ ID NO: 87732 - DNA, 435 bp, Glycine max
  unsure (1)..(435): unsure at all n locations
atattcaaatcaaatcagtgtttataatgttntccttttatcaagttcatgcaataatatatgaattcatttggtttttgggaaagtccttcattgttttcattctcattgtttttttaaaaaaaatccttttgttgtgttttgatccaaaaataagtttcataanaacaggttgttgattctttccaaagcatgttatgttaaaaaaaatttgtttaagttccaaaaagttataatctataactatactaacaaaatatcaaaggatgcataaattactcaaaataacctcgtgtaagattttcagaaacaaaccaaaacaataaataaggtaataaagtactaaaatttaataccaagcgataaataaacatatagacaagttcacgaatctttgaagatcatggctgaagagctcagtcttcttgatgatca

SEQ ID NO: 87733 - DNA, 288 bp, Glycine max
acatccatgatttattcatcaacaactatggctttcagagttcttgcttcctaccacattgccaacgagagagaaaatattataccttttgaagtacaaacaaattctataaaaaatggagcaaccgaagattatacattaaaaaatttattataccatatcgttcgacataactttgtagagatcttcacacttccagagtctactccactattctggctctgtaggtgatattttctcgatcaatacacttgccttaatctctgagcaagctattgcctattaatc

SEQ ID NO: 87734 - DNA, 439 bp, Glycine max
  unsure (1)..(439): unsure at all n locations
ccttattcatattcatatcattcattctctngatggcttgctgtttgtgaatttataaaatagggagggggtcatgcctgggatttctacatgctctcacgcatgatatatgattttaagatattattgttgctctaagctccaagtagaataggagccttgcgaaaatgaccactcaagtatagaggatccttgcaagcctttatgaggatgcattatagtggaaacaaagaacttgntgttgatagtgatccaccctttattgcaagagtttggtgacatgtatatgtcagcatcgaagtcgtctaagaattaagctggatataatcactctgacttaatagatgtgttttagattattagtgagctgatagtgccacatgtatgtaatactaataagctactcaatgagtcagaatttcattgttgactaagaaag

SEQ ID NO: 87735 - DNA, 309 bp, Glycine max
ttcggccgacgccggcattttgtcggccaagaaaaccattacccaccttggataaaaaaaacatgattcaccgggtttgacagaaataaatgctggccttagtctggcaggaaagatgatcgatcgatgtcttaaaaagaagcatgaccggattacgccgatcgaacgttcctaatagatatcctccaagtattattcagggattgaatggaaaaaacattagccgacatctgtagttaaatagccgggactgatatttttcagccaactatgcgcaacttcttttacaaacgctggccgtaattattt

SEQ ID NO: 87736 - DNA, 381 bp, Glycine max
  unsure (1)..(381): unsure at all n locations
gatcgtctcaatatattacgagactctattttatatctgaggaanaaagggatggggcgttgaatttactgagagcttcaccattccattccgagcgtntngatgtattatgggactcaatcagacatccgagtaaaaaaggtattgtcgtttgaatttgttgagagcttcaacattcaatttcgagcgtctcgatatattacgggacacaatcagacatccgagtaaaaagttattgtcgtttgaacattctcagagcttcggtattcaatttcaagtgtgtcgatatattacgggactcaatcagacattcgagtaaagagttattgtcgttcgaattagctttgaggtctataattaaatttcgagcgtcttaattga

SEQ ID NO: 87737 - DNA, 421 bp, Glycine max
  unsure (1)..(421): unsure at all n locations
agcttaatggctcaatgagtaaggggaaatgtatttttatcaacaagtaattctacccttttctatatgagactaatgtgatgaagttttatgtgatataatccctatggaagcagggcacatnttgttgggtagaccatggcaatttgacaagaaagcaatccacaatggtctcaccaatgaaataaccctcacctatggaagcaaaaagttcaaacttgttcccatgacaacttcataagtggctgggtgttagtcatcgtttatgactaacttttgtatagaaaagttttccaaaatgtatataaatctcgcaatttatggttatttttggtacgatcgttaataaaattgctttgttttgatctttgcttagtagacgcctctttacatggaattaatgtttaatttctttaatttc

SEQ ID NO: 87738 - DNA, 407 bp, Glycine max
  unsure (1)..(407): unsure at all n locations
ctcttggaagtgtccttgctggctgtgctgatatggcttntatttgatggggaaagaggcacattcccttgccattgtcagaggtctgcagtccaacagtattgtgggtggagctttggtagaaatgtattttaaatgccaggacatagtggctgctcaaatggcatttgatggagtaagtgaaagagatcttccaacttggaatgctctgatatcgggctatgcccgctgtaatcaagctgaaaagattagagaacttcaccacanaatgagaagggatggctttgaaccaaatgtgtatacatggaatggtattatagctggctatgtggaaaataaacagtatgaatcagcaatgcaattgttcactgaaatgcagattgcaaatttgaggcctgacatataca

SEQ ID NO: 87739 - DNA, 282 bp, Glycine max
gttttattcattacaataaagggaattttcatgttagttcacccataagtagttatctcacgaacatgttgcaccggttatttgccttatatttattacatttcactaacacattctcaaaaaaataattattatattatcacattatcccctcacccacccccaatatcaaacctcgatgttgtcactttcaaaaatattctactttatcttatcatttgcacatgattatttgaggaaaaacaaaccatttgtacattatagctatatatcctttcctac

SEQ ID NO: 87740 - DNA, 448 bp, Glycine max
  unsure (1)..(448): unsure at all n locations
cacatatagagcagtagatataatatggagctggatgtattatnatagcaatggccaatatgacactggcttcttgtctcaatatgagaccttgccttccgcaacgtgggagacggaaacaaggaagtaacatccataactattgcagatgtatgaggcagcagaagcataagtgcaccatgcataaatccttttgaaagatgtgttgatatcacaagacgaaaatcngaacttgtgcgtctctgtgtgctttgatgaagtgaagaaggcgccagggagtttgaatagactatgcctttgccccacaccacagagtactgacccaatgcgataatgacagcttcaatgatactgaatatacaaagacagagcaatggcattatttagaaaattggtatggacgcgtaacatcattcatctcaatgaaataataatcaccatgctataa

SEQ ID NO: 87741 - DNA, 191 bp, Glycine max
tctttttttgataaaatatcactttcttttacatgatgggttgctttagtaaaaatttttctataattcttatggcttggaagctttattttggttttgattttaattatgctactttagtttctacattctctcaaattttttgttatatcgattcaaagttttgttgtaggcaaattttttatttggct

SEQ ID NO: 87742 - DNA, 401 bp, Glycine max
  unsure (1)..(401): unsure at all n locations
acgagctgcactccagttttcctacacttttcttgtgagaccattgccatcttgaaatttcaccccctaaaaagcaccgtgaaggaaaataatcatgactcatgagacatgccccgaagaataccaaggataaatagataattcttacttttgtcactcaaatccagatgggttgaataaatatggagcatacaaccaggatagagccatanaccaactgcttatactcaaaagaatatatgagagtgcaccacctttattatagccataagcaagatatactatcaacanaagcgcaaccttcaacctgaggacaaacatatgaatacattattacattcaggagaagganacaggtttcaatctaaacgagataatttcataacaaaacatgcagagtt

SEQ ID NO: 87743 - DNA, 429 bp, Glycine max
  unsure (1)..(429): unsure at all n locations
atgtaattcgagtatttatgtcatgtcatttcttgaatcttcctcacttgcatagatgtgcgaaacaaaaacattattcttaacaatgtttcttaattttagagaatatgtttagatacgtacgtataaaaaggtttaaaaaaatatgaaattatttacatataatacactaaacacggaggaagtattataaatttataatagatggaacaaagtatattatcatattatatatatttgaaatgatgagaaaaaagattaaaggcagataagtaaaaagaagatatccagatacatatgctaatatngtccacaacatgtggattgcaggaaaaaccagtgtttagatcaacaactaccccttccttttcttttatcactcccataactcttcttcttttcttcactgtcactctttaacactcaaca

SEQ ID NO: 87744 - DNA, 441 bp, Glycine max
  unsure (1)..(441): unsure at all n locations
cttacaatttgatcagttacatgattttatgtctttccaaaggattagggccgctactattgttcaaattcatcaactctcacgatgtctagcacagaaattatcacccccacctgcacatacttgatatcttgataacaaacctacatcttagaagaaatcccacggcctgatcaccaatggaatgtagggttgtacaattcctcaaacgccttagctcctcagattttgcaggtgcaggtagacacccacacatgcgcaaccgcgaatggtgataacanaccaacatctagaagatatctcaccgatgagtaagaatggatttatgtctgttacgatatctcaaaccccttaactccaggatttgcggcaaacacattgatacacactaagaaagtggtagtacattcattctaacccctcatttctatactaaacagt

SEQ ID NO: 87745 - DNA, 413 bp, Glycine max
  unsure (1)..(413): unsure at all n locations
tcaaatctatgttgcgagacccctttgttattggatnttcaacgtttgagaagtgaaattgagaatgacggtcaattggagcaaactctcaacttacacaagtctataacatcaatttaaacttgctcagactggattgacacctaaaattccaccgaattaaaatttgacttctcaacacccacatttaccctagaaaaggctctttgatcactttgggcttttgtttttttcttagcacagcccaaactttctcattagtcctaaatgacattttaagctaagaataactcactttaaccttcaaatgccacttaatccagatttgggctttcaactcttataactcactcttttgccacttataacaccatattctcactttctaaccctaggtaacactaccctttatc

SEQ ID NO: 87746 - DNA, 285 bp, Glycine max
  unsure (1)..(285): unsure at all n locations
cacgcatgcnagctntttggagaagaaacacgggatctactcattctatttcaaaaaggaagccgtntccagtcaaggactgagagaccacacaatgttcctaacgatttctaatgaagtgggccactaagtctatcatatgctgacaatatccgacaagcccatgaaactcttcgggggtggaggaagtgtctgccatccgccatggcacttggctaacaagcggggaagctcttgactcccatncaagggaagagcaaaccggcccatccacatgggtgcctc

SEQ ID NO: 87747 - DNA, 423 bp, Glycine max
  unsure (1)..(423): unsure at all n locations
tgatgttgctntaacattatccctatagaatggtttctttgtgttggtgagttcagagtttcgcaggtttatgacataatcttggctcctgggtggtgggttggtgagttggtgagttgctacgctcgtgagttcctgagttggtgtgttctccagctggtgagtctgttggttaaaactgttggttttgtttactgcaatgattgttattggtgcaccattttcttgtttgctgagtgccattgttttgttttatggtataagaaaacaagacgtagtttgcattggattnttgctttgaacaatggttttgataaccctatacactaacctaagactttgttggtcactcctgtgctcattaagtgattgattcaagaantagaaagaaggttcatctggaaacctatttcccctccatac

SEQ ID NO: 87748 - DNA, 437 bp, Glycine max
  unsure (1)..(437): unsure at all n locations
catgcaatgcttttatacatcaacatgaagacttatattatatatntaaccattaaacttactgaaataagccaatgagaacaaataggagtcataaacccaaataaactctgttgaagctcatccaaggattcagtttcaaagtaaacagaaattaataacaaatcgctgaaagataaaaaagacacattcagagacacataaaggacagattgaagaggtaaatgagaaaattatagcatgtgtggaaagacaaaagttaacctgctttccaaaagatccacaaagttcaatgtgtaaaaagccatcatgatatttctcggctttcttagtaaatgagtactatataagacctgccattctgaattgaaagggaagagatatatagtgaacactcatgaagatgatacaatgaagattatctaccataaacaaat

SEQ ID NO: 87749 - DNA, 439 bp, Glycine max
tcagcctaaggtactagaatactacagagagatgagaattattctattccctatagacagataaatgaggtctaaaggccaattgcctacacacattgatcccattatcttgatggtggaatccaattctccatggtttacatattaaaaaaaatacacttccctttgtacctgttatctgatttcagaacatctagggaactttgaaatctctaatccacgggaaatgtaattgtaagttatgtttctaactaacaccaataccaagacttgaccattcaatccccacattaaattagaatgctatgcactatatcagtcctctcgtggcttataaaagtatgcataaaatatcaaatataaaaggtgcagaaatagcatcaaattataagtgtggtacattgttgcaaacaaattgattcttaatcataatatttgg

SEQ ID NO: 87750 - DNA, 447 bp, Glycine max
  unsure (1)..(447): unsure at all n locations
gctttaacatcagaccacttacatgtgttttgtctacttcacatggacttgagggggcctatgcaagttgaaagccttggaggaaagaagtatgcctatgtttgtgtggatgatttctccagatttacctgggtcaactttatcatagaaaaatcagacacctttgaagtattcaaggagttgagtctaagactttaaagagaaaaagactgtgtcatcaagagaatcacgagtgaccatggcagaaagtntgaaaatagcacggttactgaattctgcacatctgaagcatcactcatgagttctctgcacccttacaccacaaaagaatggcatatttgagaggaaaaacatgactttgcaagaggctgctatggttctgcttcatgccaaaaaacttcctataatctctggactgtagcatgaacacagcctgctacattcaca

SEQ ID NO: 87751 - DNA, 425 bp, Glycine max
gcgcaacggatgcactcgcttctctcgttctcatcacaatacccctgtcactgactcgcctctgtctcctccgacgaccgcagtgccggcgccaaacacaacggctgggactctgtgctgcaccagttctccgaggtcaccaatcaagtcaatatctactggaagtccctcgggaacgccgccgctgacgatacgcgtcacctcaacagtggcgacgaggattgggattgggatcgccggcatttcgaggaaatcgacgagcaatagcgcctcctctcgatgttcaatgtacacggatttcaatttgtgtcttctcgcgtgctcttaccaaaggttatgtgaaagtcattattctaaatcaatgtcattgcgtctcttattcgtcgaaaaaagaaacaattattattgttctgagagaattatat

SEQ ID NO: 87752 - DNA, 450 bp, Glycine max
  unsure (1)..(450): unsure at all n locations
agcttgaccaatcccgacccaacccgttcatttnttgttagtgagaacctgngatgtactctaagcaagccagctcctggcagtcaacagaataaatgaacaaagaccacaaagcaagggggcttgtggtggctggccaactgtgaatattgtgtcatatgtggattatggcctctggtaatcgattaccaacggtgggtaatcgattacaaggctcaaaattaaagacaggaggctaagatggtctctggtaatcgatcaccacggggtgtaatcgattaccaggcttgaaaactaagtcaggaaactaagggagcctctggtaattgattacccacctgtgttatctatcacacagatggatgggtcactggtaatcgattaccacgtatgtgtaatcgttacacagtgcatctttgcatattttatgtcctgaggctgttgtattca

SEQ ID NO: 87753 - DNA, 411 bp, Glycine max
  unsure (1)..(411): unsure at all n locations
ttatgttgtacacaaaatnggtgtcgatcttccccattgactatggaggatgaatttaataatcttaaacaaggtattgtagttttatttaaactcttctagttgcttattcttttttgtgtaatttttcattcatactaattacaatttttatatatatttttagatatggaacctatccaacaattgaccgaagataatttacatgttgaatctgattagaggtaattcaaatttgggatactggtcaagacaggtcacattttgtcatcaattattctcttttttgatataagcgtgatttaggattcaatttggtgtcatgggttgcttggttttgcatgaatggtggagatgctcacttatatctttttctgggatttgatactggattgttgcttcgtcttgata

SEQ ID NO: 87754 - DNA, 432 bp, Glycine max
  unsure (1)..(432): unsure at all n locations
ccaagcttgccacccagctcgcccaggcgttcaatggtgcttcctccaaaacaacagccttctggaggaatcttctggagggcccaagtgggtctggttgctattcgcacccccattattactaaatacaccccctgcccttttttggtgattcttttttcgtaaagntacggaaacttacggatttcgcaacgatacttgttttctttccgtaatgttacgaaaccttgtgaattacataatcaaccctttttttgacttacggaatggtacggaaccttactaattgtgcaacgatgctttcttttgatttcggtgtgtcacggaacccttacggatatgcatcaataccttcttttgatttccggcatggtcccggacttcacaaaatgcctaatgatgggtgccaaacacctcacaatgaccaacaaa

SEQ ID NO: 87755 - DNA, 409 bp, Glycine max
  unsure (1)..(409): unsure at all n locations
cgtatattctatntgagggcttcatatgagataaaaatattactcttagctatgctatcctccaattaagaagtaagaaagtttatcagcagataaggagacaccaagaaatcctgattattcatactccaagtttgaaggtacaatccacagatgaggatgcaaaactaatagttctccaccaaatgttaggggatgcaaaacaatcaatcaagaacagagaaagtttggtttatctttagaccaggaacgctgaccaacaaatgcaacttgtcgtatgatacagtccccaattttcacctccaaaccatcaataattcacatcttattgaacttacattccatatgctttgtcttactcctacctaatcaaaaaaccattgataccaaagcttcttctcttcacaat

SEQ ID NO: 87756 - DNA, 351 bp, Glycine max
acatcatttgttttatatatctaataggccggctcaacaaagataatgcataggctaactataccttgcgaaatagaattttatccggaaattgtaggaggtaaggatcaaattcttaaacgtccataaatcaattctctcaaaagcttataatgtcaggtaaagacaccagattggttatataaatcttaacaatattaaacagttccccaatcaacattatgctattatctctcttttatatctcttattctaccaaaaacactaatgtgtagatactaatgcttcggtgaccttctagatctccatacaactcggataatcatactgcatatattatatgtcaactat

SEQ ID NO: 87757 - DNA, 453 bp, Glycine max
ttgacttctgtcaacaccatcttcccaggtatgtggtctttctctcctatcattggtgacaccaccatcagaatattgggcccacacacttcgacacttttcttctccactaaattccttctcgcatcctgccacagactttagcagatctgattgcagcaagggacaattttccttaagatactcataaccatcagattgcatcacagctgcaagccagaatatagtaagaaatgatatgagagtcaactgttatacatctgaggtcttggcttgatcatttaatgatgtctacgctatcactgaaaatgaaagtctataatacaaacagaactgtgtacaggatgagatgccaatatgtgattgaaaaatgtagggagaacaaattgatatgcaattatgcatgcaattacaaactatggaagtacatagtactagaaactacggactaca

SEQ ID NO: 87758 - DNA, 286 bp, Glycine max
ctgtgcaagatacattgagtgtttataaaagtaaccttcttgaaagaacttatgctatgctgacagatccttcatatatgctatatggcgacactgtatcagacacggaagtgaaaaccgttgttgaaacgcgtatacacatacgatgggctttatactaccgtgcaatatggcggtgaggtgttcaagactacgatgcttcagagatagaaatatcaatgctttgggatttagtcaaccaagaaagaagtgactttgaaacatgacctcaaattcttactcaaac

SEQ ID NO: 87759 - DNA, 283 bp, Glycine max
attgaaacatggccgtatatacccaccacagtatagagagtttcaatagatgcgttttcatcacgcgaaagcataaccatataataacctagagatagatggtcgcgaacaggagctactactgaatcaatacaacctaacagcgccaatcatattaacatctgccctacgtaaggattaatatttcatagttcaaattgcaagagtgctaacgaaatgtggcacactcttcgataacacttgaacgacgtacaatgttaaagatcaggatacatcactactc

SEQ ID NO: 87760 - DNA, 280 bp, Glycine max
  unsure (1)..(280): unsure at all n locations
catacctgcaaatatatagatggcatcaacgattaactgaaccacatgattgctcattcgcgtcaagatggcgtacaccaactgacactttggcagggggacgtcggattatggtcgctgggtaagatgttgctgagcancanagtcatccatatctgagcagggtggcatgttgatgccatatttgacccttccgcacagttcggcaaatcttgcccgttacatacactggcgagactctatcaaccatcgaccgtctctctgcatactacttctgcct

SEQ ID NO: 87761 - DNA, 363 bp, Glycine max
gggcaaaccaccaatgatttgatgatgatggctcacattctcacaaagagtgaaactccatcactgttctcaattgagcctctctaaaactatcaatgacattgttgaggagaaatcacagaatttcaagtcacaaaatgtcaaaacttttattatcaaaacaattacccatttcttgaacatatcctataattcaaagaaaaacatgcagagtcctacatgcacacagaattgacccacaatattaaactagaaatccgacgaaactaacaacattaacaaattaccacaactaacaatataaaaataccgacaaaactatgcaaacccaagaacactttcccccaatacttaaacaacaca

SEQ ID NO: 87762 - DNA, 344 bp, Glycine max
tgcagctctaacggatcaacatcatgtttttttgagataactgtgtgcggacttgtttgtgtacccaagcaaaaatatgcaagcatgtattggtgttttttaacagtcctacaaacaaccggtcagactccactattgactttgtgaatgacaccacggcaagacattttgctggttgatattggagctgaccggtaaatattgatggcttggacgaattcagctattttaaaccgacgctccctgcattgcctgacaaaccacactgatgaatgaggaaactggttccatctatattgtggcagttatatcataaagtaaggaggcaatttatcggaaaaagc

SEQ ID NO: 87763 - DNA, 430 bp, Glycine max
tactcaacctgccaacctatatccttgagaatagatgcagctgctgcctctacatatgcaccattcaaataatcatgaaagcatcattaattcttataggttactccaccccagatgcaattacactgtccaacttgagcctagggtgaaagtaaaggctaatttcattttggctggggttcgtgtggtttacctgttcagcgtcaccttctatggattctgtaaagtattactactgtaaacaatgcactgtaggttctgttcagatttcgctagattaagaaattcaacattattctagagatgtgaaaccgaaatgaggaaatacgaaacaatccttaaacaatgtatatatgataagaatttttttcttttgctcctgtcagtcagaacaagacatgaagtcacctcttggctcaaatttcagcaa

SEQ ID NO: 87764 - DNA, 315 bp, Glycine max
gagcccgaccttcttctgtgggacatgatgaaagttttacagcccatgctcctcgaaagcatgagccgcaatctaaaaacgatcactcatctgaagccaaccatcctggagctgttggtttgcaaaagaagattttagactaaagcttatgaggctgctcatactggaccagtgccagcatcagctgatgcaccattttatctattgtgaaacatgatgtatgttctattttgaatgagtgataactgcgaggagttgtgttcctttacgaaattgagcaaatgttgtttacaaaaaagaacaaatggaactgca

SEQ ID NO: 87765 - DNA, 294 bp, Glycine max
  unsure (1)..(294): unsure at all n locations
gctatttggaccccctgtttactaaatgcaccccctttctatttatttgttattcttttttccgtacggtacgatacattactaaattcgttaccatacttatttttcttctcagaagggtacgaatacttacggagtatgatttactctttcttggccttgaaaaagtaccgaacctcacacattgncgaaaacacccttttaacttccgcccatacagaatgtactgatcgcgaagcctgtttctttgattatagacgttcggacttattattgatgcctcagaaaatcccg

SEQ ID NO: 87766 - DNA, 414 bp, Glycine max
  unsure (1)..(414): unsure at all n locations
tcgtatgnctgattgagtcccggcatataacgagacgctctaaattgaatgttgaagctctgagccaattcaaacgacaataactctttactcggatgtctgattgaatcctgtcatatatcgagacgctcgaaattgaatgttgaacctctgaacgaattcaaacgacaataactctttactcagatgtctgatatagtctcgtaatatatcgagacgctcgaaattgaatgttgaagctctgagcaaattcaaacgacaataactttntactcggatgtctgattgagtcccgtcatacatcgagacgcttaaaattgaatgttgaagctctgaggaaattctaacgaccataactttttactcggatgtctgaaggagtctcgtcacatatcgagaccctctcaattcaat

SEQ ID NO: 87767 - DNA, 461 bp, Glycine max
ctcagcttcaacattcaatttgagcgtctcgtaatattacgggactctatcagacatccgagtaaaaaattattgtcgtttggattggctcagagattcaacattcaatttcgagcgtctccatatattacgggactcattcagacatccgagtaaaaagttgttgtagtttgaattagcttagagcttcaacaatcaatttcgagtgtctcgttatatcacgagactcaatcagacatccgagtaaaaagttattgtcgtttgaattggctcagagcttccacattcaatttcgagcgtctcaatatattacgggcctcaatcagacatccgagtaaaatgttattgtcgtttgaattggctcagagcttcaacattcaatttcgagcgtctcgatatgtgacgagagtcaatcagacatctgagtaaaaagttattgtctcttgaatcggctcagagct

SEQ ID NO: 87768 - DNA, 384 bp, Glycine max
ataaagtaataacactttataacaccaccttaagaatacctaaccatggatttttatgaattttgttagggtaaatatgtcactttattttgatgaaatttgacgtaagaaaatgagccacacattattagaaaatacactttcaacatccgttatttacggcattctacatcgggtctaaaaccgatgttgaaagtaccgatgttgaatgtattattgttaacatcgggtttgaaaaatcaatgttaacataaatacaataacatcgattttctaaatacccgatgttatacacaatgaactacaccaaaaaaaagtgtatgcatgatgaacgttgacattgggtttgtagataaactaatgttaatctatatattgacatcg

SEQ ID NO: 87769 - DNA, 440 bp, Glycine max
  unsure (1)..(440): unsure at all n locations
tgaatgtgtgtagcccaccatctnttcatagtagaatactggttatgtgtctactatcattctcatcatttttttctccgtcatagaggtgccacttgagctgcccaggctctccacctttgggcgtattcttttgaaagattcgtgcgccctttttgcacatgttctgtagttgcatcctatccgaagacattatactgacactgcctaacgaaggcaaccactatgtccttccaagaacggactcgggaaggttccaagttagtgtactatgtaacagctaccccagtaagactttcttggaaggaatgtatcagcaattcctcatcttttgcatatgcccccatcttccgataatacatctttagatggttcttggggcaagtagtccccttgacttgtcaaagtctagcaccctgaacttgggaggggtgatgata

SEQ ID NO: 87770 - DNA, 405 bp, Glycine max
  unsure (1)..(405): unsure at all n locations
cacgcatgcangcttctaactttacacacaaatgggttatttattctcaagcatgcataacataagcatagatagaaacattgaacacatcacgtaacttcaaatagatagtaattatatttacatcaagtactcagcataatttcccaaggattttaacccttcattaaaagggagcacctttcaccaataggagaagggtttcagagaaaatactatattacaaagcagtggggatgtctcatccacctctaagaacctagaaatcactcctagacctaaaatctacctaaagttagggcctttttcttccttgcgcaacttttcctctattcttcgttctgcacaaagctcacgtagtctattcagacctctcttttcaatctttgcatttaagcttaaaaa

SEQ ID NO: 87771 - DNA, 436 bp, Glycine max
tgctaccattaaggatcattggagaaaataattatgtttttatattccaaatagaccatacaacagccatccaccaagattgccaccttcctcttcttataccttccacttgcacaaaggagtgctggagaaaatgctgaattggattatattggaacacactattgatattcaaccatgatgtattctcccaccgaatatgccgaatctttgagcaatggaaaaaaagatgggaagcctcctcctccattcctccacaaaaaggacatgaagcatccgtgagttgcaattgccctcttaacagattactttttgtaggcagtttgtcttgataaagtctccatgcgaatataactattgtacttggaatcttcaatatccataataccacatatgcttggtccttacttgcagttgagcccccttcccttaacat

SEQ ID NO: 87772 - DNA, 261 bp, Glycine max
tcacccatttgtactggacataaatggttctcccttctttatgggcggcaggatcattatgtcacttcaaggagcgggcttaacaaggatcttctcctattgttatgcttgtgagactttcaaatatacgcttcagaaatgcatttaattatccacggcagttactattatggtttgaataatatctctttaagaaatccttggcacttgtgcacttaaattttaggttaggttctacttatactgctatctaccgatagc

SEQ ID NO: 87773 - DNA, 460 bp, Glycine max
  unsure (1)..(460): unsure at all n locations
tcggtcatatacttacgaatcatagctacaaacttccgatttatgagctcccatttggtgtccttcttatccttcagtttattctcatgggtgaattgctcgtgcaaattcttgcagtactgatggtcttccatcatcagcttccaataggaataattttctacagttagcttgaacatatctccatcatgagtgacaacttcttccatcttgggaaacaccagcactatttccctctctatatactcaaaataggcacttagcagaaacgaanaacaagaatacagagtagaaaaatgacaccaagaatttttaacgtggaaaaccttttcaatgtgaaaggtaaaaaccatgggaccaagccagtaaatatctccactattntaaagtaagattataatgactctcttaatacaagagagtacctctcaacctcacccgacaatgataggttacaatt

SEQ ID NO: 87774 - DNA, 393 bp, Glycine max
cagatatggaggccggagacaacaatgaagctatggagttgggagagatgataactcatagatgaatatttttccctacaacattatagggctgggcagtggttatcacaaaatatatatacagaaaggccgtagattaacatatttttgggggcggaaaatttacatgagggaagaaatagccgcttacactcccattggtggaagggcctatggcagctcaattcaatagaggagtcaattcaaataaaagagcaaattcagtggaatgtgtgctgtggagacatgacccgatatttgtgatgaccaatgggtaagtggggcagaactataatggacctaatttctacgctctatcaagttctaaccacaacaacaaactttcgactcatg

SEQ ID NO: 87775 - DNA, 413 bp, Glycine max
cttacggaccttaaatctcagcttcaaccttggtgcccatttctgctccatatcgcgaaatgtgagcatttttggagtcgtgaagtgcgtggctactagtgggacttctaaatttcaggtttgggtggacttctttccctcttgattttcgtgggtatggggttctgggagatattatgggtagtcttgctagggttctgctgtgtgatgattatttgtgaagacatttgctgaaagctctgtgaaattgtcatgtttggatgagtcaaacatacccattctgttttagggtttttgtgataatgtttgtgatgtttatatgctgaaattgcctatggaaaactgttagagatgaaatgtatagttaacctatggttggaaagtgagaatgtggtgttattaattgaaaaaca

SEQ ID NO: 87776 - DNA, 336 bp, Glycine max
  unsure (1)..(336): unsure at all n locations
agcttgcttctacaatagtttatgcgttaattcgattctatgtcttttgaaagattgaatttaattgcgaacaaaagtccgttaagacattggaccttgaaacgatgttttaaatttcaaaagcggagagaattgtcaaggcgttggaccttgaaacgatcccaagtgatgtttaatgaanagcggagagaatcgttaaggtgttggaccttgaaacgatctcaagagatatttgatgagatgaagaagtctatgagttagttttattttggttttgcttattaaccttcaatccttttttaagataacttacagcataatgatcggttaaaattc

SEQ ID NO: 87777 - DNA, 448 bp, Glycine max
  unsure (1)..(448): unsure at all n locations
gtcatctagccaagattatacaaaggtattacaagagaacctaacgatttctaattatatgggccatcaaatctatcatgtgttgacagtaattgattagcccatgaatctcctccgggccatggcttttgctttggctaatagacgcgggaggtcttgacttccattcaaggtcaaggcgaacctatccatccacatagtcgcttcttgatgcaatgcatcaatcaccctccctcttgcttctttntcgacgtacacttgtgcaaaatcctccactagctattgttcatgggccacagactggtgtaactcttccttgtattgccctatgatagctagcatgctttgctccgtggcttccaagtgttgagccaaaactcttttggacctcacgcatgcaactaactcttctttcaagatcatgccatgcacncgtgactgatctctt

SEQ ID NO: 87778 - DNA, 333 bp, Glycine max
  unsure (1)..(333): unsure at all n locations
taaaatagtgaagagacttatgaaaacagacattttgttttccccaagccacgtgggaaattaccttaaccaatttccttattatatgtttaccatatatcgatcaatctctatatcatgtataattatttcttaattaatttatcaaaaacaatacttaattactatttagagacgtgatcggcatacaacatgtgttctcgagtttaaataatattaagcatgtaattatataaaatatttggagaaggttttatttatttctaataaataatacatgtgatctataacaaatgcaccatataataanttatctatagaaatatgatactt

SEQ ID NO: 87779 - DNA, 396 bp, Glycine max
  unsure (1)..(396): unsure at all n locations
gtatgtntacatatggcagatatatatattatatcactatacatatatagaagaaaagtgatacacaagcaagatactcatactcatgaatttccaaattggttcctaaagtatacttaagcaaatacatatattttatatatgaaattgaaatctaaaacaaaatcactacatatgtatccttatatatatatatatatatatatatatatatatatatatatataacacattataatcttatatacatataatcatataatcttatatatggagaacaaatatacatatatcactaaacatactccaaggcaaccataggaatctagccacgagaaatttagtcaatagaagattatgatcacattntcaaggcttcccattcttactcacaac

SEQ ID NO: 87780 - DNA, 372 bp, Glycine max
tattgtccactagatctactcgctggagtaacctgcgtgaagtcttgactgtgttggggggaagtgaacctgttcacctgggtcttcttcctcagcttcttcttgaggtatgtgagtgggtataagaacattcttcttcactttttattcatcctaatttcaagaagcattttcatcaacttcaacatctcgactaatgacgagtttcttatgttgcaagttgtagacacggtagcccttatagatattgctatacccaaagaagatacctcgtatagtcttgtcttcaagcttgtgtctctttacgtctggaatatgaatgtagcatatagatccaaagacccttaggtgctttgttgatggcttcttccc

SEQ ID NO: 87781 - DNA, 320 bp, Glycine max
ctgtctcatatgaaattaccagcgatgctcaaaactaaatattcaaaacaccctctaccaaatgcctcaaaatgctttaaatgaccagcagcccaatatggccttacctattctatgaaagggcctatctttttcaggtcaaggggtgtaatcaccttgattgccctagtatgccctatagcaacaataatgtgttctcacaagccctaacaggagattaacttcagcttactccaacgatttcaaatgagcaaaattttgtgagaacacccaagtatgaaaggtagacaaaattttcaacaaaaattctagtctactat

SEQ ID NO: 87782 - DNA, 364 bp, Glycine max
ctataatacctactcggaaggatcctcacggaggtaaagaatgacggagagatatatatatgtgggtgcaccaaatcggaggaagaaaaatggagagaaatttaactttgagttgtgtctcacaaaactcttaatcatcaaagatactacaagtggtacacatgcttctatttatagactaagaagcttccttgagaagctttctttcaaaaacttgcttgaaaagattcttttgtgaaactttcttgagaagctagagcttatcttcccacaccaatctaaaaactaatctcacctttctgagaagcttcctctgtaaacttgagcttatctacccacaccctcttaaaactttctcacctcc

SEQ ID NO: 87783 - DNA, 395 bp, Glycine max
  unsure (1)..(395): unsure at all n locations
tattacgatntctaaatcaattttcattgaaggttcaacaaaagaagcacaagttcggattataaaatgtacaatctgttattgtttgatccacacattccagatctttagtattgttatttgaccaccacccacttttcaagataatttatatataaggtgggcggaaacccactatatgcactaaactgtatgtacctaaaaacagacccgcggagcttcttcatgtattctgcagcctggttttgcaacaaggaggataacttgttaaacctgtcatgaggcagaatacaagcactaatgtgaacatcgcttacacaccacatgtttaattgtatggtgcattattcaacaataaatcatgttcctataattctaattcaattaatagacat

SEQ ID NO: 87784 - DNA, 381 bp, Glycine max
gcttgaaatatacgtaggaataattttgttctgatgaatgcaaagacttgcaatagcgagaccagatattatatcttctctcaactttttaaggttgtaacttctcccccaactaagtattgggaaaatggcttaataccgagcctgatctttcttgatctaagtagatctttgaagggtcttagaggatcatcataaaagaacgtctcttttatagagtcttggaaatccttgaagaagtctgtctccgaggaattgtcactttgtgggcttgtggtgcctgaccaaatgaaaaataaggatacttctgagaccactttctctgtataatatttcattactcgaggaccattgagacatctacgtgccttcaatccatta

SEQ ID NO: 87785 - DNA, 446 bp, Glycine max
  unsure (1)..(446): unsure at all n locations
catgttggtagagagaataacattagagtcgacttgctatcaaagttggctagtacaaagaagaaaagccaacatagaacattcttccaagagacagtcttagaaccaagtctatacaaggttgtggtgagtgtaactcttgttaatcgaaaatggatgactgagatttgggacttccaagaaaggctcactcccaaaatctctaacaacaacaagaaggctaaaaaaacttccaactattatgtgatagatggaggagacctatacagaagaggcttcactaccccccttttgaagtgtttaacccaagatctatctgaatatgtaatgaatgagatgcatagagggatatatggaatgcacttaggatcatgatcaatgaaaaccccagtcctcatatgcaggtactattggctgacnatgagaagaaattatgcagaatatgt

SEQ ID NO: 87786 - DNA, 454 bp, Glycine max
cttaagttatggaatgtaacatgaacaatcaaaacctattactccgttccaaaactataaatgctctacaaattcaacactaaattcataatcctctctctattatacccttgtttacagttatcagtgcattgaatattttttgtcaccaatagctaaccatttatcaatgagaatattcacttaatattgtctctagactctacggtatctaaatatttgtggttaatggtgattccaacaacatgattaaataggaatattttagtctaaagttttatcaattaatatttagtaatgggtgtgcactaaccttaaacatatataatttttgaacaaagggactactttatataaggtgttccgtagacaataaggtatggtgcagttgtgataattgtggagtaatctatgcttctcttttgttctggttggcctgatttatcttgcaatc

SEQ ID NO: 87787 - DNA, 368 bp, Glycine max
  unsure (1)..(368): unsure at all n locations
cagctttcacaatatccaaacaattcgatttttttaccatgatactaccctaaccaagaaaacagagtagaggcagaaaactctgcccaaaactcattcatataccacagctttccttactcatataccccagtaacattcttttcgttccgattcgctaaccggtggatcgccctgaaaattttattgagggtcctagtacataaatctacatttttaccggtgggaattgctagaaatgcctggaacacaaaatgcactactctttccatgactagcaatgtacaaccatttttctgcactatgtaaaanaaactgctgcacaatttcgacagcatttttctgcataatatggcagatttcgaaat

SEQ ID NO: 87788 - DNA, 426 bp, Glycine max
cgcttctatagagaatattgggttagcgcgtgtctttctcgctcagcagatggactgaagcggtgcgcttagcatgatgacccttcactcagcgagcaagcacagctgatctttcttccagattcttcctcgcgcttagccgaggaatgttgcgctcagcggatggctcgctaagccatcagattggtttagcgagagggtgaagatcagcacttcacaaacttgcctaattaacctgaaattaagagaaaatgattattaaacacacaaaacagaattactaagtatttattacctatctgtaactaagagaacttataacactacaaaataaccataaattggaggagattgatacaatttacaccagttgtatacacaaaagttagtcgtattcaccgactaacacttgccgatcaagaaaca

SEQ ID NO: 87789 - DNA, 379 bp, Glycine max
tcctgatattcttcaaaatctactagaaaactataggggtttatttttaaaataaccgcacaagctttatcccatccttgctctaagtaagttacgcctgttaatcggtacattataatggtacgtgagtacgttttaatcatattcaatgtttgggtgaacacttaaaactagataacactcattggtgtaatcatgtcctaatatttgacgcggaccaaatatttatatgataggatataatatatgttcagatgaaaaaattagattcaataaattactattattttaaaatgcactttaatttaatttacaatataaaagataaatttactaattatcaaatatttaatttgatgcgaatttaagtatgaaaatt

SEQ ID NO: 87790 - DNA, 402 bp, Glycine max
atatttaactaaatgatgattgttctattaaattgaaatttccttctaactaatacatgaaatggaaatattggggatcctatactatagcaacctgttgtataaatcacatctacgatcactatctatgccatctgctgtgaacttaaatggccacagatgcacctaatatctagctggcagctttccaagtatatactcaatggtttcctatcaactcataaagctgtgaagcttttcgcgtgagcccttctgaaccattatctgccaggtccaagagaggatggaccacacctattgaactgacaattgacacatataaagggtctccatttcatatgataaccaacacttgaattgcattctctttgttctcagaggtccatactgactatttcacca

SEQ ID NO: 87791 - DNA, 447 bp, Glycine max
tctagccaaatggacttacctcgaattaattcctctgatattccctttgagcctatgttcccctttctttgttttgaagctcattacaagccttaagtgaaaaaccatgatatcaccttacccttaatgaattatggagctttgcaattgttttggggataagtgtgggggggtatgtctcattggaagatatgatctttggccatgcttaatgttttattttggccatgcttgatgtatatatatattgcctagttcttgctctaatcttcaaattcatactgtttaaaaaaaatgacaaagtgaaaaatgagaaaaaaaattcatttgccgcaaattctgcaaatttgtactggtgtaaaaaaagaataatagaagtgaagtcgaataaataacgtcttgttatgaagactcgatttatgagcctggttgattatgttgatatta

SEQ ID NO: 87792 - DNA, 380 bp, Glycine max
tggtatgaaaagtttctacaccagaagttgcgtgcttaccgctgacagcaaaataagtgagaagaaacagctgatttttttctcccacaatctcctactacagctcagtgtggaactaaagacaaattttgttactataaaaaagtaactggcgattaatgggacaagctctgactcagtgggctcatgcactaataaaatacaaagaaagagacggccaaatctttctcacttcaccgctaacccacataggaatccaaaaaaaacatcaatctgtatactaggccccatgtacgtgacacctcgttgctgacacgagtcataagagtagtggctgctcctattactaaaatccagattttttcaacttgaccattacg

SEQ ID NO: 87793 - DNA, 408 bp, Glycine max
gatatctgccacatatatctggatgattaggaatctactcccatattctatgcgaatcagagtaattacgacctttgctcttataaagccagtttgagttcaaaaagaactcatctgttcataccaagcttgaagagcttgctttataccttacaaagctgcattatgtgcgaagacatgatgacgatggatatgaactctcaaacctatgggtgggtccacaaagactccatccttgatatgtcgcttgggaacacacttattacatccatctgacgcgacatgataccatgatgagcaacatatgatagtagaatgcgtatttcctctaagagagcaacaagaacacatgtgttatggtattctatacctgctattgtgaggaactttggcacaagcctaaccctg

SEQ ID NO: 87794 - DNA, 441 bp, Glycine max
  unsure (1)..(441): unsure at all n locations
tatcctttatatagctaatgatgcttaactaaaggggagagaanaatattttttctctcatcccttgagctagcttttgggattgagttagacccaaactcacattctaaaaaatacgtaggcatgcgccattacttggtttgcatagaagaaatgtgacgaataaacgtggacaagttcttagaaagagagcatcgagatcacgaagattgaaacgattcttgtgatcttcttcatctgttactctctctattcgaacttgtgctctttaccaagggtatcgagagtttacgtagactcgtgagagtttcatagactcgactcgtagactcatttggtataatctgcttcatataaaaataataacaaaatatttataaataacatactaattaaacattttcacaatatantaaagcaaaacagntaatcataaagttc

SEQ ID NO: 87795 - DNA, 426 bp, Glycine max
  unsure (1)..(426): unsure at all n locations
tgtagaaaccanagagacagagatatatagagaanatccaacttgtataaaccatagaaagaataattttttgattgatatntactgcttgaggtgttacaattaaacaaattcactttttacatttgtgcattgctgcacatgaaggcttgtatgtttggccttattgtgaaatattatggagtacactccttgacagcaattttgtgtgtctgctactctgcagtcatataaaaacactaaanaagaatttggcaaaacaccatgaagagttaaaagatatgtctagctttctacatcggttcaggccaaaaccgatgtagaattctagacattctacatcggctattagaatgaccgatgntgaaatctgacattctacatcagttattagaacgaccgatgttgaaatctcgcattctacat

SEQ ID NO: 87796 - DNA, 392 bp, Glycine max
taacattattttcacatttttatacaaactagtcttttagcaaagaatgaggtggagcatgtttacatgtgcatccctacgaagcaataggtcaaaatcattaatcttatttttcaagcaactaagctcatgaaatgaagcatgtcaatataagcatgtgatatacctactttttacctatgtgaacaacctcactagttttgcttacaaatgagacaacattcttttgaatgcaatttgaagcctatgcacataattgacttatgctcagagattgtgctaagttcataacatataaaacattttttatttgagtattggctaatatcaatatttcttctccccaattctttcttattgttgctccaaagtgaataacaccttccttacac

SEQ ID NO: 87797 - DNA, 446 bp, Glycine max
  unsure (1)..(446): unsure at all n locations
ttctactgcctgtggcaaagacaatggcaaagtgcttatttcttatggagctctggattcaggccaaacacaaagcccttgacaatctccattgataggcaactaaatacatgcaactggaggagcttcaccagtacaacccggcagttgatgaatgaagcatccgactcaaagaatgagttagaaagggatgcccaaaaaggaaaaagaacatgcacgccagactagaggacctttctacaactattacactccccttaatgatagccaatcaaggatcttggaacaagcccttgctactgaatatttcatgatgccaaagcaggctaaccccccctaagagccaaccactctaagcatttttgataccataggaattgtggtcattcctcagaagaattgcatccacataaatacaagattaatgatctaattangaaaacatg

SEQ ID NO: 87798 - DNA, 304 bp, Glycine max
  unsure (1)..(304): unsure at all n locations
agcttcaattggagtcttgtcttttacaaacttaattggacatctggtgagtatgtaaacagcagtgtagactgcttcagcctagaatgtgttaagtagtctcttctcttgagcatcgatctaaccatcttcataactatgcgattctttctctcggacactctcatttgttgaagagaatatgcgactgtaagttgtcgctcaatgccttcatcctcacaaaatctttcaaactcgcgagaggtgtactctctgtcgcaatcactttttaagacttttatccatattccactnttgatttcag

SEQ ID NO: 87799 - DNA, 440 bp, Glycine max
acggaccttgatactaagctcacgatggacaccttcacagatgcaaccaagtatcacataatctatccttctaatatctcactctcactcagccagacttctgcttctctgtcaattagctctcttagttcatgcacaatcccataatactacatcttcaacacctgaaatgtgtaacagcccgaattgttaataaataaataatacaggaataagttaataaataaataaataatataattaggtcataaatctctactatataaaccacatgttaacttatagcagcttttacaaaacacttatgtccctttttttttctgacgcacaagaaccttaacagagcaatcagaggaggagctctatagagcaccagagacgccaccattgctaacagagaacatttaagcgactacctcgaggtaagggatgaagtactc

SEQ ID NO: 87800 - DNA, 345 bp, Glycine max
acttgctgaactttgatgaatgagaggcttgtgagacatacttcaagttcacttttttcctctttattcctgcatttcgtgctccgccctctctctttctctccctctttctttccctcattgaagcatccctccaagctttttatccaaggctcatcttggtggtgaagctccttcttgcatggcttattccctagaggatggcgcctcctctgaccttttcttctttgtcttccgctgcatatccatggtggaacatcatcattaaaggacctcattgaagctcacagatccagcctccatagaagccccacaagcaagcttccatcatgtggtatcagagca

SEQ ID NO: 87801 - DNA, 396 bp, Glycine max
  unsure (1)..(396): unsure at all n locations
gtttctggttgtccaaccttgaaacaaatcttgtgctatccatctattgcattcccttctccctttgccaaaaagaattggccaaggactaaccgcctgaattcttttggtgtctctcttcccccttttccaaaagaacgaaggactaaccgcctgaaatcttttgcgtctcctttctcctttgtcaaagaattcaataagacacagtctgagaattctttcgattctctccttgcccataaacaaaagatttcaaatgactaaccgcttgagaatgcttatgtttaccccttcacaaagtttctaaggactaaccgcctgagaactntgtcttaacacattggagggtacatcctttgtggtacacgtttaggggacattctaatgaatatttga

SEQ ID NO: 87802 - DNA, 304 bp, Glycine max
  unsure (1)..(304): unsure at all n locations
agcttagtttaagttagtctaaacctaggattgctatttaaattgaacctagtccaacaaaagggatctgaggacgaagcttggattgattcagtccaactatggatcgaggttaataatctaggctaccacatagaatacaaaagcatgatccattagagaaacatccttatatgcatcagctggtctattcactactagaaaatacactttcaacatcggntatttagaacattctacatcgattctaaaaccgatgttgaaagtgacgatgttgaatgtatgaatgttaacatcggttttg

SEQ ID NO: 87803 - DNA, 453 bp, Glycine max
tctatattagctgaaccattttatcaataaacacaagttgtgttttattcataaaattagagtttatctcttttatcctagtgagagtgattctcctaagttcttgagtgattcaagaacaccctggctatatcaaaggactttcataacctttgtgtgttgccctcgtcggaaagagtgattctttccttcctttcatcttcaaccttgttctttcaaaccacaaatccataaaatctatttctgcccaaaattatctcgtggccataactccccttttacgcgctcaaagtaagtgattcttgagcctaaattgaatttcaaaacgagacctttcacctcgttttggaatcacctcgtttggagccctgtaacttgagttattgtcatttctatatttctgtccagccaccacttaacctacattttatcatctcattggtccatttatgc

SEQ ID NO: 87804 - DNA, 319 bp, Glycine max
  unsure (1)..(319): unsure at all n locations
gcagcttcttgagaagacttccttgagtagctatagcttanctacacacacccctgtcatgactaagctcacctcctcgagaagcttccttaagaagattcgtaaagaagctagagcttagctacacatacctctttaataactaagctcacctccttgagatgagaagctagagcttagctacacaccccctataatagcttagctcacccccatgacaaaaaacatgaaaatataaaaaaagttcttattacaaagacaactcaaaatgccccgaaatacaagggctaaaccctatacttctagaatgggcaaaata

SEQ ID NO: 87805 - DNA, 444 bp, Glycine max
  unsure (1)..(444): unsure at all n locations
tcagctgtggccatattgacgtcccttagttcatcatactcttttcagactctganggctatggacttgaacttctcttcgactacccgggctctttcaagctctgcctttagggcttgtacctcatcactttcttccgaagctgtaacctcatcgactctcacaggctttagatatgggagccaatccaatccttgtgttcggactctcatccacttatgatagccgccgatgatcccattactgcttcccctaagctctctgtcctttcttcacgccgcatcctatgccttgcgaactccttggagaaccctctcgtttgtggtcactgaaaccccatgcgatgaaaggcctgatgctcttctctgatggcacttctctcatggagtagccacactgtcttatggcgaggacgggattatattaatacaaccccttgttcca

SEQ ID NO: 87806 - DNA, 416 bp, Glycine max
catgcacgcttgtaatgaagatgaacataaacttatgtatcacttatttctggcagaattcactcgttgctcaagccaactccttgcggcatggattatcaaccctgattactgtcttgtgcaaggcccgaggagtcacctcagattctcttaccttcgagtcactcaacctagccattaatttggcctatattaagaagaattgttggaacctggatgacccttttgtcacttttccaaggacccaaaaatccagggctagaaaatctgaggacccatctctctctgctccccctacttctgctctttcttcaccaccagcagctccaattctttcaagtccctccacttggagctcatagcctttcatgtttatgctacagagcctgcaccagggccagctcctgaatatgcat

SEQ ID NO: 87807 - DNA, 395 bp, Glycine max
  unsure (1)..(395): unsure at all n locations
tacgcgacctataaaactcaactttaggaaggactattatgagagggtggtgttcttactctacttctaaagaagtttctctagaagctctcaagaagtttctcagataacttctaaggaagctacctattctataaatagaaacatgtgtaacacttgttgtaacttttatgaatgaaagtcttatgagatacaacttaaagttccacttctctccctcttttattccttcaatttcgtgctccccccttctctctttcttttcctccattaaagcatcctcttcaagcttcttatccaaagcaattcttggtggtgaagctccttcttccttggcttattccttaagggaaggngccttccctcttctcttcttctttgcctttccctgcatc

SEQ ID NO: 87808 - DNA, 432 bp, Glycine max
  unsure (1)..(432): unsure at all n locations
tgtccaagttngagtaattgagtctgagcatgtttaaccattatttagttcacacattttttccggtacacttgtgatttgaaccaagttgagaatctcagaatcagcaaagtacattaccggttgcccgtttgctagatgggggtttggtatttgagaatcatgtccagaagatgaagagaggtcagcatcttcttcccataacatccccgccttggaactgtttccttggccatagttgatctcattatctagatcatcagcatcgtcttcatcattatcatctccctccacttcaccaccctctgatatacacattcattttgttcaacgaaaattctgatgacggaaagaccaaaatattaacatttatgccaagctaaccttggtgacttgtgaatgctccttgcactggggacaatactggctcat

SEQ ID NO: 87809 - DNA, 271 bp, Glycine max
ctgatatttttgatgccactttctcaaacctctggtttgaatcgtgacttactgcctcgaacgtgtacaacttaacacagaacagagaagcgcacatcttgctcctgtccaaggactgactcactgcccgtcttggaatacacactatgagacagcttgatgtaatatggacctgccaggaaatgattttactgaggattgcgtaccacttcaaagctacgggatagaaacatccgtcttctgttacataacattcacaggcgaaaattca

SEQ ID NO: 87810 - DNA, 380 bp, Glycine max
  unsure (1)..(380): unsure at all n locations
acccggatccttaagtcacctgcggcatgcaagctttaaaatcaagggagtaagttatttaattgtctgttgttttatgattnctttaggtatgtctttgactcgaggcggatgggtaaatatgtacttcagtaataagagatttgtngtttttaataaatttaagtntnnttngaaagagggttttttttattgaaactaatacttgtgttttcttttcatgtacgccaccnaaaggatgcccatttaggaaagaattnttttaaagaaaaaagggatggtgaaaaaaaaanaaggaacatgaaaattgtagtattaaaaggactttggtgaaccaatgaccaaggccagtgaagaaatattatctaagtttaatttat

SEQ ID NO: 87811 - DNA, 303 bp, Glycine max
  unsure (1)..(303): unsure at all n locations
taaaacattctnccntgtttatcagcatttgacaattccttttcacgaataacttttattctctttaaagcatcttcaagtaatggaggatcactctgagctagagtggtcaaaatgcaaagctcccttgcaggactttctgttatgtgatcctcaagtgcttttcttacagccatcaaaacggaagaaaccttgttaccagcaagagaattctggatgcccccaactagcataacatcagcaacctttggacagggaacagaaatgtgatttttatagagtttctctataatattttcattc

SEQ ID NO: 87812 - DNA, 307 bp, Glycine max
  unsure (1)..(307): unsure at all n locations
aagtgagggccgcatgtggatgataacaaaaagaatattgttttatcaaagggactagaagcggttgaacaaaaacaggtggagctactagattgctacggaagttatgctaacctgggttgatgagtancttgtatttcatagacgcattaaagggatggaaactatgaagtgaatctttgacactttctttagtggggcaactcaaccttggatcatcaaccttgattgataaagaggtactgatatgaccaccgcgacaatttgtcaagaatataatttcacatcatggactgttttggttgct

SEQ ID NO: 87813 - DNA, 380 bp, Glycine max
  unsure (1)..(380): unsure at all n locations
agcttgaaaccttagttcctccaattcatgaagttggtgctccctatgctcaccagttgcattngagtcaaagttcagaaactttaatgcccaataagctttatgttccaactcaacaagtaggtgacaagatttgccatagaccaattataaaggagtaagtcatgtaggagctttgtatgctgttttgtatgcccataaagctacatctagtttttgggaccaatccttccttgattgagcatatgttttttctaagaatttcttaacttccatgttagagactttagcttacccattggtttgagggtggtaaggtgaggctaccttgtgcttgacactgtagttttggaggaaatttgcgaagaggacattacaaa

SEQ ID NO: 87814 - DNA, 448 bp, Glycine max
  unsure (1)..(448): unsure at all n locations
tactaagctttaacctcatcgtctctcacagtctttagattagggttccaatcctgtccttgtgttcggactctcagccacttatgatagccgctgatgatcccattactgcttcccctaagctctctatcctttcttcacgccgcatcccatgccttgcgaactccttggagtaccctcgcgttgtggtcactaaaaccccgtgcgatgaaaggcgtgatgctttcgtctgatggcactcctctcatggggtagccaagctgtcttatggcgaggatgggattataattaatacaatcccttgttccatcaagggaacatttggacatccttcacatgaagatagaatcctgattcttccttccttctagcgagggaaccaattaacagacgcccctccatgttagccaagagttggtcccaattcgccttttctttntcgacgcac

SEQ ID NO: 87815 - DNA, 383 bp, Glycine max
agcttcaaaacaaagaaaggggaacataggttcaaaggggctatcaaatgaattaattaaaggtcggctcatttggctagaggcttataagaacaaaatgcctaaatcatctcccaacatgcatgtgaagcaagaagtatcaacacgagtcaagccaaggctattgtgtagcaatcaatggggcaaaacacaccgaataaaatagatgatgatggctcaaattctcaccaagggtaaatctatcacttccaattcgaacttttaaaactaacttgacatgtagagaaaaacaaggatttcaattcacaaaatgccaagaaacttcttatttaaaaaccattacccattacctggtcataaactattattcaaagaaaaacatg

SEQ ID NO: 87816 - DNA, 363 bp, Glycine max
ttcatggccagagaactagtgtattattccccctctcataatacaggtcacagattaattaattccttctacttttggaatttctagttcatgaaccgaaaattctatgaccacagtttataaaaaagaagagaaaaacacgtctaattataattattatattcaattataatttatttatttattaaatatgatcataattatgaaaatatttaaattatgacctactgggtttctgttaatataacagagtaggcatcaagtatttaatccaagttgtatgggctggtgggtcaacgcacaaagcttgtgttataggaagcttatggtgtatttaatccaagtcataaaataaaatatatt

SEQ ID NO: 87817 - DNA, 291 bp, Glycine max
  unsure (1)..(291): unsure at all n locations
tttttttttccncccccccccccccccctgttgtttttagcaccctccctcctggggatcattatttgtttgattagaaaatatgaaattattttagtgtaatttttttaatgaaaataaaaggttttttttatttatttaattgaaaaaatatttttttattagtaaaaatttttgtatgcgaaattattgagttttttattttttgacagtgaaataaaatgtgttatagattagattttataaaatattgattttgtaggaaaaaaaaatattgtttttagtataatt

SEQ ID NO: 87818 - DNA, 423 bp, Glycine max
gatgttggcatattggtagtgttggagtttttttgggcttccgccaacaggagctgaagtcacagcgtgggcatcttcttccatcttctttgccccacttgccttgaatctcctattgctcgtgtcgataggggtgacataatcaaacttccctctttcaggcctactttgatcttctcacccacaaatactaaatctgcgaagctagagggcatgtatctcaccaacttttcatagtagacactggcagcatgtccactatcatagtgatcatctctctttctaccatggggggtgccacttatgcttccagtccctccatcgttgggcgtctccttaaggactcatgctccccttgatatatttgcagcgggttctgcgggagtattgtaattttgttattcctcctaagaagcagtattc

SEQ ID NO: 87819 - DNA, 332 bp, Glycine max
  unsure (1)..(332): unsure at all n locations
agcttaaggtcagaatgaactntgagcttggaacgttttatgaaaatccgatccttggttaatggttttttgaagatgtcagcaatttgatccacagaagatacatgacagatttggagcaatttggattcaacaagctcatgaatgagatggaaatccaaagcaatatgtttggacctagtgtgtataacaggattcttggtcagaaaaatggcgctgacattatcacataacaataatggaggacgtctaagaggaacacaaagatcttgaagcagttgtttgatccacaacagctcagcagcagtgtatgcgagtgaacaatacttaac

SEQ ID NO: 87820 - DNA, 353 bp, Glycine max
ttctcaatctctttcccttgtcatgtattgttgcaatctcattcccttaaaaaaagatgtatctagttttctatctctagtctcaaaccttaaattagaaccctacaattaaaaaaagtccaaagagtcttattgaacaaagatgaaagaagaagaagaagaaagaattgaggaaagagaaaattcttatgaaaaaaataaaagcgacgaatgattgaaaataagaaaaaacgataaagacatagagtgtttcgaagaataaaaccttccaagttatcttttataatgatattgaaggttggggcaaaagaagatgaaaggttatagagagataatacaaaagtgaaaatgtg

SEQ ID NO: 87821 - DNA, 370 bp, Glycine max
agcttgagcttggttcaaccccgtaatccaaggaattttaattctgttcgccaatacttcaacaacatctcatatggatgaatgactcgggcatactttaagcttatgcacggaaaatgtaattatgaaattgagatgcccgaagaaacaccatttcctagttaaccatgcattaagtaccatgttcaattattttgtttttaagtgaaacgggtttatgatcccaacatgggtggctcctaacacatgaaactaaaaatggtgtgggaagttcacgcttcccccttcttttgttttggtttgtggaggaaaaccgcaggatgaacaaacatgaaaaccaatgggatgcaattttgcagatcaaaaattt

SEQ ID NO: 87822 - DNA, 444 bp, Glycine max
  unsure (1)..(444): unsure at all n locations
tgcgcatatttccttacgaacgttcactttcactttatattctttntaactaagaaaaatgcacccatatacaatcaaggcagcttcctcacctacattatttacctgtacttccaaggtgtatttgttacttacatcacacacatctccttggctatatttacatacatgcatactcaaagcattttggggtaccataaattgcacatgtgcacatcttggtatttctaatacctatacatacacaaacttcatgatgaatcttgactatctacacaataaggagctaacattcatgccctctttatgttattgctaactaaagccgcatgcaaattcatgtatatattccttcgctgactaaaattgtattcaaattaaaaggtatatatatatatttttcggattgtatttacttacataacatccacatattttgtttaa

SEQ ID NO: 87823 - DNA, 354 bp, Glycine max
agctttgacttgagtcatcaagagattatttatatgtttccatgggatgagtttcaaaaaacaatcaatcatcaatcatctttgaatcatctatctttcaatctttttcaacatcatctctcaaacatcattcaatcaatctttcaatatttttctatagaatttttctgattcatttctcttcatctttctaaaagttttttatcaacactttctcttccaagaaaagttctttgttaaaaaacttgggctattcatctttgttattctcttctccctttgccaaaagaatgaaggactaaccgcctaaattcttttgtgtctttcttcccccttacaaaagattcaaaggac

SEQ ID NO: 87824 - DNA, 313 bp, Glycine max
  unsure (1)..(313): unsure at all n locations
tctatggagactgaatcttngagcttcaattgtgttcttcaatgatgattnttcaccatggagatgcagcacaagataaaggaaaagagatgagaggaggcgatatccattaagaaataagccatggaagaaggagtttcgtcaccaagaatgtgccttggataaaaagcttggagagaatgtttcaatggagggaaaataagagagagagagagagagaataagagagagcgggagcacgacattgaacgaagaaaacgcggagagaagttgaactttgaagtgtgtcttacatgactcttatttcttaaag

SEQ ID NO: 87825 - DNA, 351 bp, Glycine max
  unsure (1)..(351): unsure at all n locations
agcnttgatagagaagttcacgttgccttttgaagctttagtgcttccgcgcaagaggaagaacctacagaattgaggaattaggcatatagaaaaaattacattggataagtgaatcattttttcaagtcaatcattcactaaatgataaatcactacaagttatatattaaaaagtagcttgataaagcaactattttgncaaactcttgttatatatatatatatatatatatatatataactccgaactaagtagagaacttccctctctatgtcaaacttttttatcaaataataataataataattgggtaatacaagaaatgctcatatttctcaagctttaat

SEQ ID NO: 87826 - DNA, 357 bp, Glycine max
  unsure (1)..(357): unsure at all n locations
accttgaaactccgctgttgatgcccgtttggaagatatctatttgttgactgctcagcattaagtttttctcctcccaccatttaagcagcatcattcctagnttaaacatcggattatgtgaaactcctcaagatgtctactccacgtttctgagctacataccccattgtattagagaaaggggtaattctgtcttttactgatataagtaggggaataagtgtaatttcacaataaggggaagcatttttgttatgagataaatacttttccgttttataaaatatacgtgtgtgcaattccattattctggtgttccttcatctctttctcgctcataatctccattcttct

SEQ ID NO: 87827 - DNA, 310 bp, Glycine max
  unsure (1)..(310): unsure at all n locations
agctntgttctttttataaaatgagaagttctggacttatcacgttactctaaaaatctttgggtggatccaagtgctccgatcattcatttacatattcatgttttggtggcatactcacctttgtttatntttttaggaatttcatcataactaagaaaacaccaaggcacccctataacactcgatccaaaaaaatggataatgaagagggcgtgcaagaatagatgaaggccgatctatcggccttaaaagatcaaatggcttccatctcggaggtcatgtttaaactccagaaaactatagagga

SEQ ID NO: 87828 - DNA, 420 bp, Glycine max
  unsure (1)..(420): unsure at all n locations
tcaacctagaggagacggaccattccaagtgttggataatatcaacgacaatgcctacaagattgacttgcctagtgagtataatgtaagtgccactttcaatgtgtctgatctatctctttttgatgcaaatgaaggggccttggatttgaggacaaatccttttcaagagggaaggagtgatgaggacataatcaagggcaaggaccatgaaacacttgaagggcccatgaccagaggcagacttaaaaaagcccaacacgtcatagagacaaggctggtcatttgtatagccgccattgatgatgattgaaggcccaagtggagaaagatgaaggcccataggcagaggcactaccaagactactaatttgtgctgaacgcccaatntaacataagttttagttataattaatttta

SEQ ID NO: 87829 - DNA, 342 bp, Glycine max
  unsure (1)..(342): unsure at all n locations
agcttgaagaactatccggaaaggccataccccagacttggaactcttttcatttgaagntttactgcaattaaatcatgtaaaaggtggtatactattcttcctacctcgaccttttatccctataaaaatgtaaaaaggtttttgtcgagaaggttttaacgaggcacacctaaacttatactatcaatgaatacatttttccaacaattatacttgtcatttttttttatagtaccctttcgaataccctttttggcagaggttgaactctacgataacaacatgtgttccctctcgaataacttatttgatcgaggatgaacttatttcgttaacaat

SEQ ID NO: 87830 - DNA, 447 bp, Glycine max
  unsure (1)..(447): unsure at all n locations
tggcctcagcaaacttcttattcccttaatgttactctatanataggcctcctatntntaatggggagggttaccactactggaaaactcgaatgcaaattttcattgaggcaatagacttaaacatttgagaagccatagaagttggaccttatgtacccaccatggtggctggtaatacaacaatagagaaacatatagaagagtggtctgaagaagaaagaagattagtacaatacaatttaaaggctaaaaacatcattacttctgccttaggaatggatgaatattttagggtgtcaaattgtaagagtgctaaggatatgtgggacactctacaagttacacatgagggaacaactgatgtcaaaagatctaggataaatactctaactcatgagtatgaattatttacgatgaagacaaatgaaagtatacaagatatac

SEQ ID NO: 87831 - DNA, 340 bp, Glycine max
  unsure (1)..(340): unsure at all n locations
agctttntatttttagcagatgaagttgaattcgtggttacctcatttactcctctaaggacaatagcatcatttcttgcactaaattgttgggagttggaagccatcttctcaatcaaattcctagcctcagcaggagtcatatcaccaagagctccaccactggtagcatcaatcatactcctctccatattgctaagtccctcatagaaatattgaagaaggagttgctcaaaaatctggtggtaagggcagcttgcacacaatttcttgaatctttcccaatactcatgcaagctctctccactaaattgcctgatgcctgaaatgcctttttttg

SEQ ID NO: 87832 - DNA, 443 bp, Glycine max
gacactctcatactaagcttgaatgaggaagtgtagaagggtgagacttcctgcttttattctttgaccacagagtggtacctggagatatgtcgcgggggtcaggagaccttggggacgtcaggtggggtgctattgcccaaaaccaagcttgaccaatcccgacccaacccaggcatagtcagttagtgagaacctgtgatgtacctaagcaggcgagctcctggcagtcaacaaataaaaggaacaaagaccacaaagctaggaggcttgtgtggtggctggccacctatgaaacttgattgatatatgggatatggcctctggtaatcgattaccaagggtgggtaatcgattacaaggcttataaatgaagacaggagactaagatggtctctggtaatcgattaccaaggggtgtaatcgattaccaggcttaaaaa

SEQ ID NO: 87833 - DNA, 342 bp, Glycine max
agcttcaacattcaatttggagcgtctcgtaatattactggactcatttatacatccgagtaaaaatttattgtcgtttgaattggctcagagcttcaacattcaatttcgagcgtctcgatatatgacaggactcaatcagacatccgagtaaaaagttattgtcggtcgaattagcttagagctacaacaatcaatttcgagcgtttcggtatattacgggactcaatcagacatccgcagtaaaagttttttgccgttggattagctcatagccttcacattcaattttcagcattttgatatgtgacgggacttattagacatccgaataaaagttat

SEQ ID NO: 87834 - DNA, 442 bp, Glycine max
  unsure (1)..(442): unsure at all n locations
ctaagccaattcaaacgacaataactntntactcggatgtctgattgagtctcgtcacatatcgagacgctcgcaattgaatgttgaagcactgagctaattcaaacgacaataactttttactcggatgtctgatagacgcccgtaatatatcgacacgctcgaaattgaatgttgaagctctgagccaattcaaacgacaataactttttactcggatgtctgattgaggcccgtcatatatcgagacgctcgaaattgaatgttgaacctctgagcgaattcaaacgacaataactttttactcagatgtctgatagagtctcggaatatatcgagacgctcgaaattgaatgttgaagctctgagcaaattcaaacgacaataactttttactcggatgtctgattgagtcccgtcatacatcgagacagctcaaatt

SEQ ID NO: 87835 - DNA, 365 bp, Glycine max
  unsure (1)..(365): unsure at all n locations
gcatgcaagcttctcaaggaggtgagcttagctatgagaggggtgtgtgtagctttgctctatcttctcaaggaagntttctcaaggaagcttctcaaggaagtttcctcaagaaagcttctcaaggaagctacctagtctataaatagaagcatgtgtaacacttgttgtaactttgatgaatgagagtcttgtgagacacaactcaaagttcaacctctctcccttttttcttccttcaatttcgtgctcccccctctctctttctctccctctttcttttccttcattgaagaatcctcttcaagcttcttatcccaagctcatcttaatggggaagctccttcttccatggcttattccct

SEQ ID NO: 87836 - DNA, 375 bp, Glycine max
  unsure (1)..(375): unsure at all n locations
atggaagacattgtatatatgtcgatgaatttttcattcactattacaagattgnttaatgtgtacgctcaaatctattagctcatgtgttcaatttgaaatatgaaatttctattttacatcttttatttggcattatgtaaccttgtccagcacatcacaaatttttctttgatttctcttcgccatagattagacctgttttatatagttctactttgctgtagttaaaatcaagattaaaggttactaatgntttttatgcagttaaatatttgaacttgaatattgagcccatgaatttagcaaagccgtgatcccctcctttatggggtgttacattcatggcaaacacattccaaataatgaaatatg

SEQ ID NO: 87837 - DNA, 373 bp, Glycine max
  unsure (1)..(373): unsure at all n locations
agcttgtcaatcttttgagcaaggactcttccccaattttaattggatgcatcacacatcaactcaaatggggctgtccagtcagatgcctgaatgatagaggtggtagtcaatgcatgcttgtggcaatcaaaagcctctttgcactggtcatcanaatcaaactccaccttcttttgcagcagattggatagtggaagggccactttgctaaaagtcttgataagcgcctataaaccctgcatggccgagaaaggaacgaacctctcacacacaagaggggtaaggcaattgtgaaataacagttatctttgcagggtctacctctatgcccttattggaaattatatgccctaaaactataccttgttct

SEQ ID NO: 87838 - DNA, 434 bp, Glycine max
  unsure (1)..(434): unsure at all n locations
tatgatactccgcttttacagaagtggaaatctaagcggttgtttttgactagacatggcacagggtgtggccaaaccagtataaaaactgagtttgcattctctcttcccttaaacttcttttaattattgcaatttatcttttactttaaagaaatttattttgaattgttctttgagtaattcatattaagggtgcattgttaatccaaaagagagttaaaaatttaattagacaaagttttgtatcttaattcaaccccccttctaaagatactgggatcacttgtctaacaaaaaggaccaagctccttctcagaaatctcgcgtcacactatgccaaatttcagaatatgcaacactttnttttttgccttatatagtgctcttttggcgctattactatcgaagaatatatatattatatacaatgc

SEQ ID NO: 87839 - DNA, 340 bp, Glycine max
  unsure (1)..(340): unsure at all n locations
agcttcatgatgaatcaagagtgattcttaaatgtttttatgataacaaagatgataacaaaatatgatgacaaaggtgatgacaaaaagctcaaaggtcaatcaaagaatgagttcaagatattcaagatagaatcaagaacacttcangattcaataggagagttgatttcaagaatcaagaatcaagattcaagagatcaagatttcaagaatcaagattcaagagatcaagattcaggaatcaggagagggcttattcaagataagtttgaaagggtttcttcaaaaatggaatacaccatgatttttcttcaaacattgttaaccaaaaagtttt

SEQ ID NO: 87840 - DNA, 438 bp, Glycine max
  unsure (1)..(438): unsure at all n locations
cgaagctcaagaaaaagtttgaagaagttttttggtttttacatgtccaactcctttgagtgacatttgtattggttattaacttgattattgcatcttagtacatccgatatttattttgcattgtgcatcatcatagtgtgagtgaagaaaattttctaagttagaaaaatttcttcagaggcaaaaactctattttaatcgattacaacaagttgtctgaagcttaaagagttaagtctcgtattggtttaatcaattatggtagtattttaattggttacatttttgtttgagacaatgactgatttntcaggagtctctactttaatcgattacctggtggattaatcgattacttctctctcatttaagctggttagaggtgaacaaagagaaattaatcaattacttggtcatctaatcgacacattattc

SEQ ID NO: 87841 - DNA, 295 bp, Glycine max
  unsure (1)..(295): unsure at all n locations
agctntagtcaaagatggcattagatggaaagtggtatatggcaacaagataaaaatttggactgagccatggcttcaagattcacaaaattcatatattgtttctcctcatattgatgggcttgcggatttaacagtaagttctcttattcattcttcaacggccacatgaaatgagactcttattcatgatcgctttgttcctcttgatgttacatgaattctgtccatgcctatctatccttcacgtgaacctgataagattttgtggaagcttaacaaaaatggcatggtc

SEQ ID NO: 87842 - DNA, 449 bp, Glycine max
  unsure (1)..(449): unsure at all n locations
tcaagaganatttgaagctagttggatcaacatgattgttgtctttggaaggtacattaaccttcttgagatcaaagaatgtggatgagacattctttgttttgtaaacaagaagaaatggattggcttctttaacatccatgaaccagtttatcctaggttggttagggccttcttcttagcaacaaaagtagactacaacaactttactctgaaggctaccataaagggaactgagattctgatctcataacaccttttggcaaacattctgagggttcctgaagacaactcaaggctttatgaagactagctcgaggtcaggggactcagaaggacaaaggtccagagtaagttctagagaaaaagagagattatntcaagtccaagtctttgaaatcctttggaaggaatgttcactagatttgcatgcactttgtgctgctcaa

SEQ ID NO: 87843 - DNA, 394 bp, Glycine max
  unsure (1)..(394): unsure at all n locations
tcctcttagtcacctgcagctgcagcttaataaatctatatatgngtattacaagcttctttgtagtggtaccttaagtttcatgggataatttcttcatttggttttgaggaaaaccccatggatcaatgcatataccacaaggtcagggggagtaaaatatgtttccttgttttatatgtagatgatattntacttgcagccaatgatcggggtttgctacatgaagtgaaacaatttctctctaaaaattttgacatgaaggatatgggtgatgcatcttatgtcatcggcattaagattcatagagatagatctcgaggtattttgggtctctcacaagaaacctatattaacanaattctagagagatttccgatgaaaaattgttcac

SEQ ID NO: 87844 - DNA, 324 bp, Glycine max
  unsure (1)..(324): unsure at all n locations
aaataacactccgctgaggttgacacatttgtcagctcttgtattatgtgtgatgtatcatngttgaatgcatgagtgcatcctctcatgctgtattgtaacaagaagtttatttcacaaaagtttctatacctaaacatatcaccaaaggaagttctttgggcaactattccttaatactaccctttttcaatttgcccctcactttgcttctcatataatttattttaattaaatattttttagctttctacttgtattgacccctttaaacaaaaaaaaaaaacttttactagcctggattttaccccgaaataacccttt

SEQ ID NO: 87845 - DNA, 363 bp, Glycine max
agcttgtagaatggctatacatgatacatgtcagggtttggtttggttcaaggataaaagggatgccccacattatttccatgacacaaatgcaaaaatgatgaattggaaactttatgcaaaactggtcatgcatgcacctatgtggacactcaagtgtcaaaattttattggcatgtgatgctagggctcaagattcattttcctctattttaatcaacccaacgtttccaaaaatatgtcttttatcaatttgtgcattcatccgaattccattttgggcgtctggggaaatcttcacagcattcacccttcaggtgtatacacatttttttcaaaactagttatgatcagtgaattttt

SEQ ID NO: 87846 - DNA, 286 bp, Glycine max
  unsure (1)..(286): unsure at all n locations
cactcagcttcgaagnagtgatgagtcaagctcttttgcttatcttgaaagagcccgggtagtcgaagagaagttcaagtccatagccatcaaagtatgaaaagagtatgatgaactaagggacgtcaatatggccacagctgaagccttggaatgagaaaccaagaaggcctgaaaggaagaacacgaccaaaacaaagttttgaggggctttatagggcagcaatagtgaactcaagctccgaagaggtgaaaggaatcatcacgggtcaaaggcatgatcttg

SEQ ID NO: 87847 - DNA, 366 bp, Glycine max
agcttgacgttcctcttcaaaaggattttctagccgttgacattgtcagtgtatctgtttcacgcttcttctgaggaaaacctccttgtatcatagataaggtggggcctgaaagtcgtgcttttcctttttcttgaagccatctgtgacaaaaaaaccattaagactatattatctaactcttatataaattgaaaacatacattaaaaactaaaaaacattgtgggcgctcagtgagagcaagctcgcttaataaaaatccgtttacaaagtctaaaccacacagggacaacccatcccttgtgttcaagaattcttacagcttaagagaccctcagtcccttaatcaatctttttgaatgaga

SEQ ID NO: 87848 - DNA, 453 bp, Glycine max
  unsure (1)..(453): unsure at all n locations
tgttagagctatcatcacatgatgctctatgggcgcataatatgttgctttctaggaaacttgagattttaacataaacacttggtaagtcgccaactaaactgtctattggtcaacctacacattctactgttttgcaggttacaagttgtaccatctgtggtgaggctcatgaaacaagccaatgtattcccattgaagaaaacactcaagaatttcactatatgggaaatcaacagagacaaggatatactcaaggaggattctcaggcttccagcagggtgcttataaccaacaaggacagtggagatcacaccctgacaatcaattcaacaaggaccagggtggaccttctaacaggccaatccaacaagggcctaacatctttcagaggactactaagctggaggagactctgactcagtttatgcanataacaatgtcatatcata

SEQ ID NO: 87849 - DNA, 390 bp, Glycine max
  unsure (1)..(390): unsure at all n locations
tcacctgcggcatgcaaccttctcccctattttcctataaatagggggagaagtgaagggggttaaatgttcagcctttctggtatctcgagatcacttgaaattagtgaaagaaattgttttcgtgaagaaaatccaagtcgaggcgcttccgtaatgtttccgtaacgtttccgtgggtgatttcgcaaagattttcaaccgttcttcgacgttcttcattcgttcttcgtcgttcttcagtcttcaaccggtaagttcccgaaatcgaacttttcaattcattctatgtacccttagtggtcctcatttgntttcacgtgcttttattntcattccatttacttttccgacccccttttgacgtgctttagtcatttacttaagtca

SEQ ID NO: 87850 - DNA, 458 bp, Glycine max
  unsure (1)..(458): unsure at all n locations
cgggttgtatgttgatgacaatcctccctgcctggtttcttttgtaagaatttatgaggggtcaacaatcgtgcaccatatccctttgggcaatgatctggtgaaggtaggtgttgaggaagttcaagatgttgatgctcgcagtcctatacccactaaagaggttaagttagtgggacagatccttaacaccttccttgcttggtcgacacatctaaccttttttagaaaaggtatttcctttttgttgtgtctattattattaaaaaaggatttgttactaataaaatgttgactgttgttggatcaagtggtctcagaataattaagaatgggggttgaattaattatgaacgtgtcttgactaattaanaatctatccttcttaatgttactagattcanataggcttttactactaagttaagaaaagtaagaacagaaatagaaacttaacc

SEQ ID NO: 87851 - DNA, 414 bp, Glycine max
acccgtgatccttcagtcacctgcggcatgcaagcttctccctattttcctataatagggggagaagttaagggggataatgttcatcctttctggtatctcgagatcacttgaaattagtgaaagaaattgttttcgtgaagaaaatccaagtcgaggcgcttccgtaatgtttccgtaacgtttccgtgggtgatttcgcaaagattttcaaccgttcttcgacgttcttcattcgttcttcgtcgttctttagtcttcaaccggtaagtttccgaaatcgaacttttcaattcattctatgtacccttagtggtccttattttgtttcacgggcttttattttcatttcatttacttttcgaacccccttttgacgtgccttaatcatttacctaaatcattttctcccct

SEQ ID NO: 87852 - DNA, 447 bp, Glycine max
  unsure (1)..(447): unsure at all n locations
ctaagcttgggttgtatgttgatgacaatcctccctgcctggtttctctnggtataatnnatgaggggncaacaatcgtgcaccatatccctttgggcaatgatctggtgaaggtaggtgttgaggaagttcaagatgttgatgctcgcagtcctatacccactaaagaggttaagttagtgggacagatccttaacaccttccttgcttggtcgacacatctaaccttttttagaaaaggtatttcctttttgttgtgtctattattattaaaaaaggatttgttactaataaaatgttgactgttgttggatcaagtggtctcagaataattaagaatggccggtgaattaattatgaacgtgtcttgactaattaaaaatctatccttcttaatggtactagattcaaataggcttttactactatagttagaaagtaaagaaa

SEQ ID NO: 87853 - DNA, 372 bp, Glycine max
agcttgtgaataagtatgaacgaggtcaaattcaacgtgtggactgtttggatcgcctcacatttaaaactatggagagaatcaaggagcgtgaaagcttgaaaaatggaagttcttatatgtaccttgttgtagacttctgtagttttgagcatcgagttgtttttcaggtattcttgcctcctaattgtgacattggccaaaggattagtttcaacaatgcctgtggggatattcagtccaataactaaaaaattgtcaaaaatttaaaaagaatgactggtttcccccttctaatatgtgatatattcctgcctcaaatgcttttgtttttaaggagattataattaagttcatcaatttaaaggtaat

SEQ ID NO: 87854 - DNA, 444 bp, Glycine max
  unsure (1)..(444): unsure at all n locations
atcttttgttctttgggcatatcttattagttatgtattatacacattcagatgcctttacagcttcaggaaaattggttataacatagttccagagtccctttgtctaagtagagtttgatacttgtcgaccttatattcttctaaataaaaattgaatttgagtatattagaatgtgaatttggacctaactcaactccaaaagctagctcctagggtgagggtttccccccacttatatactatatattgatcttatctctagacaatgtgggacttgaattttttcaatatacttctcacacccagcactttaaggcttggtgcgtggatgacatgatgggtgacccatctaatggatctaggatagactttgataccatcttanaatatgggtttggaccatactcaatcccaaaagctaactcatagggtgaagatta

SEQ ID NO: 87855 - DNA, 360 bp, Glycine max
  unsure (1)..(360): unsure at all n locations
agcttntttacttattagacccangtttgatgatattattggtntgttctttctatatttctgattgccaattttagagtaattaataccattcattatttgtaaacatggtgttgctgccttcaaatcacaaatctacatgggagggtggagccatgcatgtctgaacttttctaagttcgccaagtgcatcatcttttcatattatttatagggaaaaaaagaggtattcaaggttactagaagggtaacctcccttaaatttgtatagtaaggaaaaaatgtactggatttttgcattaattaaaacaatattgatcgaccttttgatttgaggtagcgtttcttttttaataatgc

SEQ ID NO: 87856 - DNA, 399 bp, Glycine max
  unsure (1)..(399): unsure at all n locations
taatacatgtattctatctattaaatcaatatttttattttatatctataattatagacacaattcaccttanacctatacctacctataagttaaaataaatctatcatattcaattgttttttgatgatggggtttcttgttttcaaccaagccactacaaccttttctaacaaagctgaatcccactcactactcaacctcctatttaagctatactctctaaatagtaactaactgctattatttggaaatctctaggctacatatcaagcaacaatgtaataaatgaggacataagtttcagaatcacatacatacctcgaaataggctactaactaaagctntgcttgcggtcacactgcagatgaatggatgattgaagaaacttgtcccac

SEQ ID NO: 87857 - DNA, 352 bp, Glycine max
  unsure (1)..(352): unsure at all n locations
agctttaacctcattgtctctcacagtttttagatttttgagccaatccaatccttgtgtccggactctcatccacttatgatagccaccgatgatcccattactgcttcccctaagctctctgtcctttcttcatgccgcatctcgtgccttgcgaactccttggagtacctttgcattggggtcactgaaaccccgtgttatgaaaggcgtgatgctttcctctaatggcgctcctctcatggggtagccaagctgtcttatggcgaggacgggattataattaataccaccccatgttcccatccagngaacatttggatatccttcgcatgaagatcaatcctgattc

SEQ ID NO: 87858 - DNA, 430 bp, Glycine max
  unsure (1)..(430): unsure at all n locations
nttctttctcaatcaatctgtctactgactatcatttctaaatgcaagttcacattcttgttctttctttgtctaacatgcacattttctcaaacttatgaaaagaaacacaaactccatcacaatcatgtattcaatccaaaatcaattcatacacccattttcacaaaaagataaaagtgtttcactgccatatcatcaaaatcaagtcaaactgttctaatgcttcaaaatgagcaaaccaactactcataaaanaactagcagtgtatataaacataaaagaaatattgtactgaaaccataatcataataataataataatccaaaaagcaaaagcatcattatgaatttaanattcccgtgactggtcctgagtatcatgtgtctaaacatcctcctcatctttcagatgaagcattggagtag

SEQ ID NO: 87859 - DNA, 89 bp, Glycine max
  unsure (1)..(89): unsure at all n locations
agcttnnnanaaggatttatatacaatttttagancgttgttcaagatgtttacaacactggacactcagccttccattaatcagctaa

SEQ ID NO: 87860 - DNA, 354 bp, Glycine max
tataaaactccgctcttgaaaacttccttgaaagctgagtttattactctcacccctctaataactaagcgcacctccttgagaagcttccttgagaatattcctaaagaagctagagcttagctacacacaccgcctataatagctaagctcacccccatgccacaatacatgaaaatataaaaaaagtgcctattacaaagactactccaaacgccctgaaatacaaggctaaaaccctttactactagaatgaccaaaatatcaaggccctatgaaggagaaaccagatctacttttacaagaagaatggttcaaccttgacccatgggctaaaaatcttcctaatgttat

SEQ ID NO: 87861 - DNA, 342 bp, Glycine max
  unsure (1)..(342): unsure at all n locations
tgcggcatgcaagcttgccaatnnaaattgaacggattcatatgacttttatcaaatgaaacgagaacgcaaaaccggaaggggcgaatatcagaatgactacggccacaacaatgaatatgggaaattggattcaaattgcttcctataacgaccaatttataagacccaataaggaattggtatagtattgttctcgactgggacatatctattgacgctgcggctcattgaatttcttctcttccataccatctggtccttcccacaagaaataatttatgggagaaaacaatcaaacagattttttgaaatgcgcatttctttaatgggttttaccag

SEQ ID NO: 87862 - DNA, 229 bp, Glycine max
cgctctgtgttgcagcaacagagaagccactattaattattcttcttagcacggcaggggcagcgagcaaaacgagagagatgggagccgcagcagcagccaacttcataccgaacgagagaaaccacgagctttgcatgtgcagcatacagagaatgagagagatgaaagagagagaacgagatggagtggggtcgtgaagatatgtgaaggaaaaaaaatgagccca

SEQ ID NO: 87863 - DNA, 338 bp, Glycine max
agcttttacatgcatgtgctcaccatatttactatactttgatcaactgatacaatctatttgattgaaaagataatttatacaactcttctaatgtagtggacaactaaaattaaaataatataatagaaaatagtgcttaagccattcaagtcaagtcattttgaatctcatcattaatatcatgcatgtcaaaaataaagagaatcaggcatcgtaatgcataacacaacaaaacattaaaagaaaacacgcttcctaaagccaaccaagggaaatatgtattcataatttgtgaactttttcaaaattttaaaacccctttaccctttttaaaa

SEQ ID NO: 87864 - DNA, 451 bp, Glycine max
  unsure (1)..(451): unsure at all n locations
tagactatattgtagaatcttgagcctttgttcttttgattaagtcggncttatcatagagggggtctttatgctttcttccaatatcgagaatccattttgtaagtacaatgtttttcctaatgatatgatcgaggcttcacaccagtaatgtggacttatcatttactaaaagaattaggattccagacaaggagaaattaccaccatatacatcttgtataacacccaatttttgcgtaatataaattaaaaaagattctatttaaaaataaatagagttttaggaaaataatgagattttcataattaaataaataagaaaaaantaatttattaattaaaataatgattntaaggtaaataaaataattatatgttcttataaaataaaatgaatatctaatttattcatttgattgcgagtaaaatatagattatttttattaaa

SEQ ID NO: 87865 - DNA, 428 bp, Glycine max
  unsure (1)..(428): unsure at all n locations
gacactataaaactccgctgaacttaagaccccgaacaaaagatatctattttattttcatcgaaatagacgcgatggatagtaattacttaatatgttcaatttacatgctatggtggagtgaaattaattgataagaagcattgggctgtaaacaaggttgcatttcaatttgcagtatatttgtttgtgctgacccatgatgctatgattgctccttcatcttgcttagcaataaacgatacataatattgcatggctttaaaagataggcacaaataaggagatttgatgtttgcttgcagaatgcagattgatttatgcttgaaggctgacaccttgccatnttatctgctntattgtatgttaacatgatattgtaatgtgtattgaagctcatcatcttgcacgtgccactggtagtgggc

SEQ ID NO: 87866 - DNA, 351 bp, Glycine max
  unsure (1)..(351): unsure at all n locations
ngcttgaagacgtgagcttcgagaacatcaggggcttttacaatactttgcatgtatttactctgnggcgcagctctgctgtccctagtgagaacattctgctagctaacattaatttgaactacacaaaacaagcagatatggagcaagaacgcttcattgcaaagggtgtctttcatgatttacaagttgttaattctccattctgatgaaaaacatttctgggtccttaaaagctgagaacggcacattgattcatggtaaggtctgaatacattgaaaacatggtttgttttttatataaaaaaatccggcttggttttcgttttatttctttgaccgcattattta

SEQ ID NO: 87867 - DNA, 269 bp, Glycine max
  unsure (1)..(269): unsure at all n locations
tttctctcttcctccccttcttttttcttcancccntcttttctctttttgtcctttgattcngtaaattctatgtaataccactctctctttccaaaaaaacctctntgctcaacaaatctatttgtatatgaaattaatgtttgttcatgaagtaacatgtttttgttatttgcgtaaaagtacttttgaaaatttccnctgaaaacacaaaataagaaatgataaatattgcctccaattttttaaatacttccatctaattccat

SEQ ID NO: 87868 - DNA, 368 bp, Glycine max
agcttatcaacatggggttgaagagtttttgtcattttccgaaatatattcagcaaccacagatggcaactttttctgcccttttgttaaatgtgtcaacgggaggcgtcattcgttggatgacattagatcgcatatgatatgtgatggctttagcccgacgtacacaaagtggatatggcatggtgagttggttggtcatacagcaacatgtccacctcatccggttgagctacaaagcggagatctcatggaaaacatgatatgtgatcttgggcaagagggctttcgggaatgtcatgcagatatttacgatgctcttcaaacagatgcgcatatgccattggatgttggatgcaaaactttac

SEQ ID NO: 87869 - DNA, 454 bp, Glycine max
  unsure (1)..(454): unsure at all n locations
gataaatcaggaatcttatatgactgttgntttcatgttngtgtaacaaaggggaaatatagcttggtttcttaaatatgtctgaagtaagcaactacatacattctaccatatatttaacatatttaatgacaatttcataaactaaaagatgaatcaatattggattttgaatattcatttccctattttttttaccaggttgacattcaaacaacacttaggagtttgtttcctaaagatttttcactagagtaccgccctaacaaattgatcaaaaccctccaacatcatcttcaccttctttgagatcaatctccacaagaagcccagaatactcatactttctaatcattgtctatatatcctaccaactagaaattaatcttactctttaactaggttatcaagtcaaacaaaatggaataaataatccgatcacagtttcacaatc

SEQ ID NO: 87870 - DNA, 384 bp, Glycine max
agcttctcccctattttcctataaatagggggagaagtgaagggggataatgttcatcctttctggtatctcgagatcacttgaaattagtgaaagaaattgttttcgtgaagaaaatccaagtcgaggcgcttccgtaatgtttccgtaacgtttccgtgggtgatttcgcaaagattttcaaccgttcttcgacgttcctcattcgttcttcggtcgtcttcagtcttcaaccggtaaggtcccgaaatcgaacttttcaatttattctatgtacccttaatgggcctcatttgttttcacgtgctttttatttcattccatttactttccgaacccccttttgacgggcctttatcatttactttaagcattttctcccct

SEQ ID NO: 87871 - DNA, 462 bp, Glycine max
  unsure (1)..(462): unsure at all n locations
acactccncaatactcaagcttgggtcgtatgttgatgacaatcctccctgcctggtttctcttgttatgaattatgaggggtcaacaatcgtgcaccatatccctttgggcaatgatctggtgaaggtaggtgttgaggaagttcaagatgttgatgctcgcagtcctatacccactaaagaggttaagttagtgggacagatccttaacaccttccttgcttggtcgacacatctatacctttttagaaaaggtatttcctttttgttgtgtctattattattaaaaaaggatttgttactaataaaatgttgactggtgttggatcaagtggtctcagaataattaagaatggtggtcgaattaattatgaacgtgtcttgactaattaaaaatctatccttcttaatgttactagattcaaatacgctcctactactatagtaagaaagtaaagaaaa

SEQ ID NO: 87872 - DNA, 341 bp, Glycine max
  unsure (1)..(341): unsure at all n locations
agcttggagagttgatcttatatcggtttaatcgattttagtagtcttataatcgattaccctgctgtttgagacaatgactgattgatttangagtccctactttaattgattaccaagtggtttaattgattacttctctttcatttagtagtccagaagttaacaagaacactttaatctattacattgaggatctaattgattacattgntcttgagttatttccagatgttaggaagaacactttaatcaattaaagagatgatctaattgattacttaattgaattaatcaataccttgtagatttaatcgattacaagcgggtataattggttt

SEQ ID NO: 87873 - DNA, 441 bp, Glycine max
  unsure (1)..(441): unsure at all n locations
ggttcgttgaaaaccatggaaggttcagtttggtttactagcctacacatgccgacaagagaagggttgccttataaaggaaggaaagaagcctagcccatttacaagggcggggaccacagatggagagggtccctatctgccacattagcaaaagttttgtcagcacggggtggatgcatgaaaatcaggatgttgtgctagatggagaaattgacaaagagtatgaaagttgggtgcagccgtgctcctcgagtttcaaattgaagatntagtggattgtggagcgacccgagatttctgtgtcaaatccattgtattccagtagttttgaactttatttgttggcctaggctttagggtctacttcttttgttgggcatacctctttctctaatgttcccacaattataaatatacaactgtcgcaacctacccttc

SEQ ID NO: 87874 - DNA, 358 bp, Glycine max
agcttcagggatttgaaattccgcctgtcaaacaatttattaggttttattggaagtaaataacaaatttaggctactaaagaaaatcaaagaagaaaactaaaatacctgaatatcctcccatatcaaatccttctgagcagtagggacttccttccagctctcgtatgtcacgtcgaccttatcacaagcaacaatccccaaatatgttcttaatttcttcttgtggggacgtccgccttgccggtagcatgatcgatgttgaccaaaggtctttctaccccaagtggtctagtggccaacgatcatagccggggtgccttgcgtgtccacttcaacatatacggagatgctgatg

SEQ ID NO: 87875 - DNA, 374 bp, Glycine max
  unsure (1)..(374): unsure at all n locations
gccttagaaactccgcttctcnnnnaagagagcatagatattagaggggtgtgtgttctaanctctancttctcaaggaagttntctcaaagaagcttctcaaagaagtcttctcaagaaagcttctcaaggaagctacctattctataaatagaagcatgtgttacacttgttgtaactttgatgaaggagagtcttatgagacacaactcanagttcaacttctctccctttttcttccttcaatttcgtgctcccccctctctctttctctccctctttcttttcctccattgaagcatcctctccaagcttcttatccaaggctcatcttggtggtgaagctccttcttccatggcttattccctagtgg

SEQ ID NO: 87876 - DNA, 364 bp, Glycine max
  unsure (1)..(364): unsure at all n locations
agcttctccctcttttccctataaatatggaaaggagtggaagaacttaaatgttcaaccctcctagtatctgagaatcacttaaaattagagagaaaaattgtttccgtgaagaaaatccaagccgaagcgcttccgtaacgcttccaagacggtttcgtgggtgatttcgcgaagattttccgccattcttcggtcgttcttcgtcgntctttggtcttcaaccgggtaagttcccgaatccgacttttcaatcaatctatgttccttagtgtcatcatttgttcgcgggctttaatttaatttattggctttcggatcccttttgacgtgcttaatcattaattaagtcattttcccgcta

SEQ ID NO: 87877 - DNA, 426 bp, Glycine max
  unsure (1)..(426): unsure at all n locations
ctacattggaattgcgaaagccccactccatcattattatgattagtaccttccatctcaaacaaacaaatcaaacgtaacaagacaattatagttgttgtttgaatacctcacccactcaagtgtatcacacaattatgatttttctctaatgaaaacattcttgccttttaccactctaattccccttgagttcttaggcaattcaagagattatggccacaacaaagaacaattcaccaatatgtgtaaggtaaggctagaaagacaaggaaaaggttaaccaagaaaaaggctaacaatgtttttaggcacaaatgaaggaaataaaattcagaatttaggaattcaagtaacagtccttcatgcaaccaatatattaccttanagagattttttttcaagttcttcaagcatgaaccattc

SEQ ID NO: 87878 - DNA, 357 bp, Glycine max
cgcttccttgagaagctagaggggggctactcatacttctccaatatttaagctcacccccatgccaaaatacatgaaaatacaatgggaagcttccttgagaagcaaagaaggtagcttccttgggaagcaaggaagaaagcttccttgagaagctagaggggggctactcacacccctccaatagctaagctcacccccatgccaaaatacatgaaaatacaaaaaggtcttactacaaagactactcaaaatgccctaaaatacaaggcttaaaacctatactactaaggtacccttattttggagggagggtgcacttaatttgtaggtaccctacaaacctaaaagggccaa

SEQ ID NO: 87879 - DNA, 468 bp, Glycine max
ggacctataaaactccgcttaaggagtttagccctttctctcaatgtagtatctttatatgataaagaaggctaaaagggataacagccattactccaaaaatggctaaattatttgatgaccatttcgctatgaggaaggctcgtctcccttgaacaatttgatgcttatactttattttttctaaatcatcaattgtttttcgaggcattaagctaccatttctattactaagtatcaaagtcccgattgttttttgaggcagctttaacaattttattttgatgggctacgtggggaacttcatttcaattatacctaagcttatattgctttagatattttttcgtgattgatgcaatatgccttgcagtagtgggttctataatcgaataagcattattcaaaataacatttttgatatgagacggtccatcccaattctgtgaccattttccaatacttttt

SEQ ID NO: 87880 - DNA, 366 bp, Glycine max
agctttcttcaatcgccgatatgggtgataaggttttagaaatcttcggtgcctactatatactatcttctttccatgtttcagttggatgaagttggtggttctatcacatatagggcatgcatgatgtcttttgacactatatccacttaaatttccatatgttggaaagtcattaatagtacaaaacactattgaacgtaacctgaaggtctgttgcatattggcatcccatacatcaaccccgtcttctcacaattttctcatgtcttcaatcaatggattgagatacacattgatatcattgccaggctgccttggacctactatcatcatacaaagcttaatgtattttcgcttgatgca

SEQ ID NO: 87881 - DNA, 429 bp, Glycine max
  unsure (1)..(429): unsure at all n locations
ctcagctttgcatgttaggaagttcaagagatattttgtttttttccaagagttttgagagtttgctttgtnanatctgcagagacgagagttcnaancggaatccgttctgttagcttgatatgagtttgtgagtgattgtgagatcctagaggtgaaggagacatcctcaccacttgtatttttgcaatctttcatcttgttcttctctgttttnnnnggaggtttctggactatggaaagctaaatcctttgttggatcttccctgtaggtacctgatgtaaatatatttctatctatgtaatgatngtttgtgtgttctttgtgctatctgcttttcattccagtatgcctttaccttgatcacgtacatgcatgctttgttggatcattcatagtggaacttggctgattcttaagtccttgtt

SEQ ID NO: 87882 - DNA, 310 bp, Glycine max
  unsure (1)..(310): unsure at all n locations
agcttctatagaaggttcgttcctaatttctctacatttgcatcacctctcaatgagctggtgaagaaaaatgtggcatttacctgnggtgaaaaacaagagcaagcctttgctttgctcaaagaanagcttactaaggcacctgttctagctctttctgacttttctaaaactttngagctagaatgtgatgccctctgagtgggagttggagctgtattggtacaaggtgggccccctattgcttattttagtgaaaaacttcataatgccccccctaactaccccacctatgataaagagctttatg

SEQ ID NO: 87883 - DNA, 367 bp, Glycine max
gtagaaaagcttagaaatcaagtgatcatcttttcttaaacatagggggagtgaatacaatatattatgcatatacattacttgtatcttgatttcaagacttaaattgtcatcataaaaaagggggagattgtagaagcaaatgactttgatgttttgatgatgatcgtgatgattcgatgcacatgcacttctcaagtttaattcgagacaatgatttaagaatacaagatacaacatcaagaagatcactattattttaggaagggaattcctaattgaaatagcaaaaggtgtggccaagaaatttaagttaaaaagtctttttcaagagatttactctctggtaatcgattaccagaggatg

SEQ ID NO: 87884 - DNA, 362 bp, Glycine max
  unsure (1)..(362): unsure at all n locations
catgcagcttagccttggattgtcaccatgttgccagttatcttcaactcttggaatcgcanaaagaaaggagacattggggattaaagggacccatatctatctcatgagtttgaattcatagagaaagaagcgcgtgcctatccgtaagaaaagggagacacatatagtttctttgggccacactaataatactccttcttgaaaaaagaaagggaatattaactttggggctttaaaaaaatgggtctgaccatatatggaaagtctattccataaagaagtggttgaaaaaagacttgggtcttcacgaaaaaacggggcctaaaacaaacaaaaaaaaccatgggttaatgatggtc

SEQ ID NO: 87885 - DNA, 394 bp, Glycine max
tatttcattacatcaaaagcgccttgagtgttcatacacaatctaatcaactacattatgcggatactcaattatcattgagccctaaaagacttacctcttcgcttaaaacatggctctagttaatacgattaacacaacattggcaagtcaattagattcaatataaatttgccaatatttcaagagaagtgagatttgatgctttttctaacactttgaaattgattattaaacttggtaattggttacacaatgatgaactcattgtttctatgatactctgagatcaatacatttatcttcccatgtttgattaccactaagcatggataataaaactaagtctaatacacttcaacatgcatatgtctaaagacatttaattataaat

SEQ ID NO: 87886 - DNA, 294 bp, Glycine max
gcatgcaagctttaaaatctgaattaaaacgttcagaaacagcttgtaatcgatttctatatatttcgaaacgacgacacagggcaaattttgaattcaaattatcatatagcttgttcgtagcatcacgattttggccactcggtaatttcattacattcctcttggttattcgattaccactagaagtaaatttcttgtaataacactcttttaacatatattttttgttggcccaaacctatctgctaacttcaattgggaattcccttcctatttaatattaccctttct

SEQ ID NO: 87887 - DNA, 94 bp, Glycine max
tactcagctaatacattgaatcccacgtgatacacgggcgtgattatattatataatcctatacgaggatctcaggaatttaatatatatatat

SEQ ID NO: 87888 - DNA, 323 bp, Glycine max
agtcacctgcggcaccaagcttgtcacaagtatatttaacctgaacctcaaagattcttggcaatcataccagccagctgattgctggagttaacaatgttggttgtaatttcgctggaaagcaccttttctttaacaaagtgacagttgatctttctatgcctttgatcttttcatgtgtttgtcttccaattttagttgttggagtaggtgcctaagttccataagctcacatgtgactattgccatagaacaaaatccaacttttgcactggatctagtaattatggtttccttattggtccttcatgatattagggttt

SEQ ID NO: 87889 - DNA, 390 bp, Glycine max
  unsure (1)..(390): unsure at all n locations
tcggtacatatgatntatatgcctcaactngatagaattcattgtttgatacacacttatctacagtgtggacaattgcccccaccttatatgcgaatgcaccttaccacatgtggcaatccttacttgattcaataaaattattgtggacaacaaaaacattcccctccaatatatctttaatattagttatgtatgcaacaagattgttacatatgatttatattgcctcaacctggacggagccctttcagaagcaccctattttattggggggaaattgcctcaccaaaattttttttttgtgaaaggaattaaaaaaattgcctgcaaaaaaatttattttgcttattagatttttaacccaaccccaactattttcactttcat

SEQ ID NO: 87890 - DNA, 390 bp, Glycine max
  unsure (1)..(390): unsure at all n locations
agcttanacgaccttgtttgagtcgagaatactttattatttaattgttctagtttgaatatgaggtagaagaaaatgaatgtgagcctttttcccctttgaaagacttgtaaaaaaatgttttaaaaatacttttaactaatatttgaatttttttccctattagtatatatgtgaggggtagagggtgtcacattaatcatgttcaatttgttggtaagtttaggtcttttaatctaaaaaagtaaacttggttaccatgtgagagtaatttggataaatgaaaatagttttggttgttatatgcatgagtatttcgatgcttgtttgcaacaatgtattatacaaaagtacctaccatatagagagtggctatgcaatttggaatgg

SEQ ID NO: 87891 - DNA, 395 bp, Glycine max
  unsure (1)..(395): unsure at all n locations
tcctgccccagagatataggaggcttgngggatatcttatttaccttaccattactagacctgatatctcctttgttgtgggagtggttagccaatttatgcagaatcctcatttggaccattggaatgctgtcatgcgtattctgaggtatgttaagaaagctcctggacaagggttgttgtatgaaaacaagggtagtacgcaactatcangatattgtgatgctgattgggctggatgtcccatggataggagatctacatcaggttattgtgttttcattggaggaaatctaatctcttggaaaagcaagaaacaaactgttgtcgctcggtctagtgcagaagctgagtatcgatctatggctatggttacatgtgagctcatgtggatc

SEQ ID NO: 87892 - DNA, 336 bp, Glycine max
agctttaacctcattgtctctcacagtctttagatttgtgagccaatccaatccttgtgtccggactctcagccacttatgatagccgccgatgatcccattactgcttcccctaagctctttgtcctttcttcacgccgcatcccatgccttgcgaactccttggagtaccctcgcattgtggtcactgaaaccccgtgcgatgaaaggcatgatgcttttctctgatggcactcctctcatggggtagccaagctattttatggcgaggaccggatttatatttatatacaacccttgttcccatcaagggaacatttggacattcttcgcatg

SEQ ID NO: 87893 - DNA, 128 bp, Glycine max
ctcttggctgtgctcttatgacctgctttcaaaagggggagaaagaaaatagagaccccttttgaaaagagaacacccccccatagagttgtaactgagtaaaaagaggggagaaaagactaatttgt

SEQ ID NO: 87894 - DNA, 368 bp, Glycine max
agcttgcaatgtcttcttcaaagaggttgggatcaatggtgggttctccttgatgttcaaagtggtcaaggtggattggtgatagaggtgcttatagttgaactttatcatccatatcatcattggactcaacttttttcttcttcatgaggtgaataacctcagttcttctaaagcttctttcaaactattggatggtggaattctattctcgaatgggaggaaactcagtgggttgaggatcatgaacaacaatggtatcagcttgctcgttcgctggatgcttggtcctttgtgcaccttttttcactctcttgctggtgcaaagtggagttggaggaggaagagcttgtggtgttgggtttacc

SEQ ID NO: 87895 - DNA, 446 bp, Glycine max
  unsure (1)..(446): unsure at all n locations
tcccagatatggagagctaaatcctctgttggttctttcttgtaggtacttgatgtaaatacttgtatatctatttaatgatgttttatgtgttctctgtgctatcagtatgtcattttagtgtgctttttgacttgatcatgtagatgcatgctttgttaggaacattcaacagtggaaactggtctgattcttagaacttgataggacagggctagtttatcatattatcacaagggatcggggtatggtaacctagttgtttttatgtttgtcttaatgcggttctagtcgagtttagtccaacaattggaatctgaggatgatgcttgatcaggattaggctagactatcatgaggaatcggggtttagcatttcaggagacaccatagaacacatgagcattgttaagtagagaatatncttttaacatcaagcacctaat

SEQ ID NO: 87896 - DNA, 283 bp, Glycine max
  unsure (1)..(283): unsure at all n locations
agcttaaccttcttagtggttgggtgctcaacttcaatttcttattgtgaggttntctccaggntctagctagcacaagggtgtctgacaactcctactatacagagctcgtaaggagccatgccaatggtagaatgaaaactattataataggtgaactctatcaatgagaaaaaactctcccaactccctttttgttctaagaaacatgccctcaaaaggttctttagcgattgaatggtccattcagtctggcctggccatcaatttgaggggggaagct

SEQ ID NO: 87897 - DNA, 379 bp, Glycine max
  unsure (1)..(379): unsure at all n locations
cgcttcatgcctcgaatcctaaaattttttnnaaaggttatgtaatttgtcagcggataacatggagcatttatttttagcggatacataattctttacaaatgtgtgtggggataaaaaaaattgcgataatttagaggtcatttttttaagaatttaatagtcatctactcatccggttaataacatcttcttactttttaaattaaaaataaaaatctgccgactgcaatttttatatgttggtatgtgttcttattatatgattngcgtgaccatatatagaattgtcagcatggacctttaaccttaaaaatggcccctgcgtacataacccaaagcatatatatcggtatttcctatccctagcccccaccct

SEQ ID NO: 87898 - DNA, 409 bp, Glycine max
atcaatggtattacaagttccatcattttattttcttatatggcctgaggcacatgcagttgatgattgtgtataccacaactttagcgggagtaaatactcattcttggtgttataatgtcaatgatataccattgactataattctttacccaacaagaaggcattgtctataaagaaaccttttttccaatatcttcaaaggattcttttttaactattcatgccattgggaactcattttgatttagagcctcatcagatgaatgttaagactgtgttcctaaatggtgacattgaagatacaatttttatgatgcacctataagactttgtttcaagtgaactccaaatctattgtttgctaaacaaataaacccctctttggttgaaccaacttccccccaat

SEQ ID NO: 87899 - DNA, 369 bp, Glycine max
agcttggaaggtagtcatatcctcacaaaaaatatatgtatatatgtatgtttaggtagaaagataccttggatatgcatgtatatagcaaaaatatctcacaaaacatatatatgtatgtttaggtagcaagataccttggatatgcatgtatatagcaaaagtattatacgtatgtttaggtagcaaaatacctcatgaaaaaaaaagagagcaaaaagagagcgagcaagaaaagaataaaaaggaagaaaaaaaatagaaaataaaaaataataaaggttgtctagctaaaaaacaacatgcttgtgaaaagagataacttccagcttttctttgaaaaattcactgatcataaccagtttttga

SEQ ID NO: 87900 - DNA, 465 bp, Glycine max
  unsure (1)..(465): unsure at all n locations
gacctacgatactcagctnttgacaaggaagaagaagaaagattatatgcttatgtttcaagatttcacaaaagttgttcaagaagttctagttttcttggaatgcaagtcaaggtcttgcttttatagactcttcatgtctggtcaagaaaaccattggaagagttataaccttgagaaaatcttgagaaaaccattggaagagttatatctcttgaccttttattcaaaacttgtcactggtaatgtgaatcccacgcatgagnttatatgtatataaactcatgaataaaactaaattattattatatgtgatttatattgaatgaagacctgagaatatgaatctcacgcatgagtttatatgtatatatgtggaatatgattgtttgtgatggtgatgacattgagatgagatgatgttgataatgtcattgagatgagatgatgttgatggtgatgttc

SEQ ID NO: 87901 - DNA, 343 bp, Glycine max
agcttagatttaatccaacaccagactgataagggattttgtcactcaaagaaaagatgttaagaggtttcataggctaccccataatacatacatctagataccaaggtacaacctttcgattgcaacttatgataaatatcaatttttctcaaaataatttccagagaagaaaagaacgagaaggtgggatggcctacttccaaatcttcatcccccaaggaggttgcgaggagggttgatagtgaggtaagcgagtttgctatccaatacacttgaggttgaggatctccatactagcttatcattacaaggatgaacatgtatgattgtattcttgatc

SEQ ID NO: 87902 - DNA, 442 bp, Glycine max
  unsure (1)..(442): unsure at all n locations
ctccgctgtcccanaatggttttgagtttgcattttatttctattttgtaanatggatcattttcaaggtccaacgccttaaaatgatcacctcttaaagtaaaaaagaatcacttgataagaaagaactacgtaggtctgatttcctcatcacaaattgaggaatacgtaggagcaaagggaaacacccttgtcgaccacaaaaaaggaaaaatataaaaagggtataaaggatataaggacataaaagggaacataaaaaccaaagtcacgtttgcacattctattaaaggctgccgtcccttgggacggacgtgtggggtgctaataccttccccgtgcgtaaatacaactcccgaacctttcacttaaaagttcgtagatcgcgtcttttccggtnttccgacgtttcctcanataacgtggtggcactccgcgcgta

SEQ ID NO: 87903 - DNA, 375 bp, Glycine max
agcttgtaaggctttgggtgggaaatgatagtgagacttaacttggtttccaaccttgtgctacaacaattgcagcaagacccattatccacaatgagagaacaatttttgtttaaaaccttgcatcttgtatgaaagatgttttctctttgggtttgggttaactcacaagattgactcccaaggagccttctcaccattagaagatcaccttcttcataggggtaaacctctttaatatgctcattacccttggctttaccctcacttccacttgaggaaagagaaaaagtagcctcctcttggctattatagatgtcttgacccctcatgatcttggttttctttgggaacattgagagccatgtggttttt

SEQ ID NO: 87904 - DNA, 394 bp, Glycine max
  unsure (1)..(394): unsure at all n locations
gcaaaatgtctctctatgggggtatattattaccctcttaattcagttntaaccaccatacccatttactgctgcttttttaaatccctaaaaagtggtgcaaaagatagttgctattcagagaaatattctatggtgaggtgatattgaggccaacaagatcccttgggtgaaatgggacacagtttgtcttcctaagaacaaaggggggttagggattaaagacttgatcaaatttaatgaggttntgcttggcaaatggggttgggagttgactaataatcagaaccagctataggcaagaattttattgtctaaatatggtggttggaatgcattgctctctggtagaaataagtatgatctctcccattggggaaagacctaaaattgt

SEQ ID NO: 87905 - DNA, 388 bp, Glycine max
agcttataccgaagacttatctcatggggaacagctgtttgtgatcattctgaactctttgccagctgtacatacagaatgactgtgattgttttgtagtttggagtccaattttgaatctgttatttggagtctgacaattctaggactggcagaggtggttttgattatgtttattgtttaatttagttgatactctaatctgaatctataagcctcaactccaaacataatacaaggcattttgtcctcattctaatcaagatcatttaaggaaaatgactcatttaataccttgaaagatacatttatctgccaaatgttcgtctcacaattttgaatacaagggtttatttgtgacactctctacttccacatatatattaat

SEQ ID NO: 87906 - DNA, 447 bp, Glycine max
  unsure (1)..(447): unsure at all n locations
aactccgctctatgattctgattgctgggtgctgggttatttattttcagcagaanaacccagaaagtgatggatcggaggaatctctggatgtaaatgagttgcaaactgattctgcccctgcattggcaacaccaaatggcgatgaaaatgataccacagctgaagtaactgaaggcgtggctgatttgaagttaccggatactgtctctgctaatgaccaagatgaccaactgactctatcaactgcagatgtagattccttgttagataagtgccttctacaagctttgcacacaacagtgaaggacaaaaaccttcctttgcttgaaacacgcctttgtggaaattttctccctctttttctcttggtggacctanttgaaccatttgaaatagattggcccaagattctagcacaccatgaatttcagttgaaattaagta

SEQ ID NO: 87907 - DNA, 361 bp, Glycine max
agcttgtgatgaggaagtgtagaagggtgaaacttctcttcttttattcgttgaccacagagtggtacctggagatatgtcgcgggggtcaggagaccttggggacgtcaggtggggtgctattgcccaaaaccaagcttgaccaatcccgacccaacccgggcatagtcggtcagtgagaacctgtgatgtacctaaacaggcgagctcctggcagtgaacagataaaaggaacaaagaccacaaagcaaggaggcttgtggtggctggccaactgtagaatttgtgtgatatatgggttgtggcctgatgcaagctccattggagcttggaggcctaggatcttcttcatcaatggatt

SEQ ID NO: 87908 - DNA, 421 bp, Glycine max
  unsure (1)..(421): unsure at all n locations
agctgcataagtggacaagagccttgatcnttatgtaggtgctccttaagggtgcttaattttcagttttacctctctccactgttgttgnttcttcatttttttccatgtatcacctcacatgtcttgtgttgaatgttgttaacatgattttttagaatttccaccgattaaacttgctataggagatatatttgattttatatggttcaaaattcttgttcttgttctttaaccatgaatttgtgtgaagttaaggttccttggagtttataatggcattttttgtggctgaaacctaaaccataaaattcttacaacaccatttaaatagaagaaaacattgaaaatctagagtgacatgttcacctactgtatgtttgtcataaaagtcatgtcttgtcatgaaacttgacacata

SEQ ID NO: 87909 - DNA, 311 bp, Glycine max
gtccatttacatgctaacgaggttagttgattctattggttcaagaatataagtaacattttattatgagatgctccagttcattatcatgtatggaaaggtggagagctgtcacttcatgaaactaccataatggtggattatcttggcataccaggggcttaattattagcaaaggtcccagccgaataccagtctactctgaaaaacaaacaaatattggtggaatttcctggtaatcaatccaattgatatggtctaccttatagcacattctatatggatcattttctgaggacttattctattga

SEQ ID NO: 87910 - DNA, 205 bp, Glycine max
ctactaataacagtcaacgaattgatttttagtttgagccattatagcgctttgagcacttacacactcatcaccctccgtaagttggatcaaccgcccttgtaatagacggccgagaactataaactgctgcgaattccacatcaaggagagttgctcctacacggacttgagtgaatgtgataccacaagtggggatttgaaa

SEQ ID NO: 87911 - DNA, 238 bp, Glycine max
accgggaacttaagttacctgctgcatgcaacttccctactgataaggaatggttttctttgaaagaaggaacaggcccaaggctaccccatatacatacatctagagccatgtactacctattgattgcacttatgaaagagattaattttttccaagtaagtgtcgagaagaaatgaacgagaaggtgggatcggctacttacaaaatttcatccctcaatgaggttgcgatgagg

SEQ ID NO: 87912 - DNA, 188 bp, Glycine max
ctccgcttgagaggagcttgctggtggacaaaattatttttttattgtgaagagggctgaaagatctcgatactttacatccagaagatctccccatatttatccgagaaagtctctctgtacattgggtgttattttctgttatttatttttcagtttaaggttttgagatcttctacttggcattc

SEQ ID NO: 87913 - DNA, 327 bp, Glycine max
  unsure (1)..(327): unsure at all n locations
agcttcttatccaaggcactctctaggtggngaagcttttacttctttggctaangccctaccggagggcgcctccaatcacatattctcctttatcttcgagtgcaactccatagtggaaaattaccatctgaacgacctcattgcagctcaaaggcccacgctgtcttaatatatcagaagctagcttctattcaacatggtacttgcaataacgaatacaccttctattttttcatttttctccctcttaacgaccattgtcgcttatagcccttcaaagaaatctaccagaatatagaacttttcctctccaagccaacgaaa

SEQ ID NO: 87914 - DNA, 431 bp, Glycine max
gcatgtctagtgattctatagagagaaatgttctttttttttatagtattcgagagatctttctgtgcgaagatctgcagagactatagcttgaataggaagctattctgagagcttgagatgagtttgtgagtggatgtgagatcctataggtgaaagagacatcctcaccacttgaatttttgcaatctatcatcttgttcttctctttgttgtaaaggaggcttcctggttatggaaagctaaaattctctgtaggatctttcttgtaggtacccgacgtaaatataattttatctgtttaatgataatttgagtgttctctgtgctaatcagcttttagtctacaatgtctttaccttgatcacctatatgcatgattaggtatggtcattcaatagtgtgaactggtttgattctgatgcccttga

SEQ ID NO: 87915 - DNA, 369 bp, Glycine max
  unsure (1)..(369): unsure at all n locations
agcttgctaacccatggaagctcctattatctcccattctntttagggagggccattctaggatggccttgattttctcagggtccacttggaccccatttctaccaactacaaaatgtaagaagactatattatctacacaaaaggtacacttctctatatttgcatagagggtgtttttcctaaggactgaaagaacttgcctgagatgtcctaagtgatcatctangctctcactgtacactaaaatatcatcaaaataaacaactacaaatctacctatgaaatcccttaagacatgatgcataagcctcataaaggtgcttggtgcattagtgagcccaaaaggcatcactagccattcataca

SEQ ID NO: 87916 - DNA, 401 bp, Glycine max
  unsure (1)..(401): unsure at all n locations
cttgcctaactaacctgaaattgaanaaaaatgtttattttacacacaaaatgaaaatacggagtatttattacctatacttaacaaacaatacttataacattacaaaataatcataaattgggagagtttgatacaatttatacaagttttatacacaaaagttagtcattttcaccgactaacaactcccccaaatttatagttttccttgtcctcaagcaaaaagagaacaactcacttgtcctcaagtgacaatgacatgcagtgacaatgtacaaaggtgtatgctacaaagttactgattgatgataagagaatggagtaaaatgccctcatcacttgtctttcacaaagtatgcagttatccaaagagaagaataaatgtaacctgaacaaat

SEQ ID NO: 87917 - DNA, 297 bp, Glycine max
  unsure (1)..(297): unsure at all n locations
agcttgattaaagcatcatattcagatttcattgctttataccatgtatggtttgagatggcaaatntaacagacttaagttcaacatgaatcaaaggaaatgtagggctaagtctgggttttacaattccagatttggcctttgtacacatatagtgtatgttttctggtagacaaaaaatcttagatgggacacatatgcttgaagtgggacagtgggtgataaaatattatagcaaggtgagggtggggaatttgaaagttggtttaatgggggagggactaacaggcttaagt

SEQ ID NO: 87918 - DNA, 408 bp, Glycine max
  unsure (1)..(408): unsure at all n locations
gtcgggagttgntttattttttttgcatganatatttgactgagtgaaaggtcatttaaggcattggaccatctaacgatctttcgattcttttgaaaggagagaaaacattaaggcattggaccattaatgatctcttgtgttctgaaagaggtgacaaagcttatgtggtgggtttaaggcttttaaaatccacttttacccataaaagtggaaagggaccatttcaaggccgtggaccttaaaaatggttttttatgagatgacaaaggctcggtttatgaatngattatagccttagtttcactctggttattagtcaattcgattaagaaagataatcccatagaaaaacgtccgattgatttttttattattttatttaaagatatacttttttattattat

SEQ ID NO: 87919 - DNA, 367 bp, Glycine max
agcttggaagcagacacatgtcacttgtgttttatttttagctttgcagatatggaggccagagacaaaaatgaagctatggagttgggagagaggaaaactcatagatgaatattttttcctacaacattagagggctgggcagtggtagtcacaaaatatatatacagaaaggcagtagataaaaatatatatggggggtggagaaaattatatgagggaagaaatagcagcttacactcccattggtggaagggcctaaggcagctcaatcaaatagaggagtcaatcaaaataaaagagcaaattcagtggaaggtgtgctgtggagacatgaccggattttgggaggacaaatggttagggg

SEQ ID NO: 87920 - DNA, 405 bp, Glycine max
  unsure (1)..(405): unsure at all n locations
cagcttcaaccttggtgcccatttctgctccaaatcgcgtattgagagcatttttggagtcgtgaagtgcgtggctacgagtgggacttcgaaatttcaggtttgggtggacttctttccctcttgattttcgtgggtatggggttttgggagatattatgggtagtcttgctaggtttctgctgtgtgatgattatttgtgaagacatttgctgaaagcttgttgaaattgccatgtttggatgagttaaacatacccattctgttttagggtttttgtgataatgtttgtgatggttatatgctgaaatngcctatggaaaactgttagagatgacatgtagagttaacctacggttggaaagtgagaatgtggtgttatgagtggaaaagagtgaggctttg

SEQ ID NO: 87921 - DNA, 367 bp, Glycine max
  unsure (1)..(367): unsure at all n locations
agcttgtaatcgattacacaaatactgtaatcgatttctagagcagattttcagaaaatattctcatcagtcacatctttttatttggttcttgaatggccatcanaggcttatatatatgtgacttgagacacgaatntgctaagagattttcagaacanaaaggtcttatcctcttaaaagcaaaatcngttcatcctcttaaaaatccttggccaaacacttgtgattcaataaggattaattngagtgctcanattgtcaatctatctctttcaagagagaatacttcttctcttcttctttattctgaaaaagaattaagagaccgagggtctcttgttgtaaagaaatctgaacacaaagg

SEQ ID NO: 87922 - DNA, 383 bp, Glycine max
  unsure (1)..(383): unsure at all n locations
ccgctntccactctctnggaagatcattatttgctttgacttctactggagtatcttcattgcttccttctccttttcctttataatcttctccatgaatatgcatttgttctaaagattctgaaatatcatctaaaatatcctttcttggagaaataacattagactcatcaaaggaaacatgaatcgattctttaattgtcattggtctcttattatatattctataagctttactatgcaaagaataaccaacgaaaattccttcatctgatttagcatcaaactttcctaagttttattttccattgcttaaatacaaacacttgcaaccaaaacatgaagatgtgagatgtttggtttcctaccagtcgcaacctact

SEQ ID NO: 87923 - DNA, 380 bp, Glycine max
  unsure (1)..(380): unsure at all n locations
agcttgactaatgataacgactaattgcgatcatattttatataaaattgggatcatatgaaaagaaaaaaacaatacaattaatcaagactaagtacaaaaatttgctgcttttgaaatgacaaaaagtatatttaatcttttatttttctacaattcattaatgatgtgatattntattagttaagtcaatgtcacattatcactaacacataaatggtgagaaaaatcattnttgtacatattaatttaatgagaaactttactttagagaaaattttattaaaaactaaaatgaataaaaaattgaaaaatttagaagaatgatatatatatatatatatatatatatatatatatatatatatatatatatatat

SEQ ID NO: 87924 - DNA, 457 bp, Glycine max
  unsure (1)..(457): unsure at all n locations
tactcaagcttccactagtacaaacccaatntaataatctnttccttcattagcttcttcatgcanatacagatcagcataatgataaaatttacatttcttccaaaaaatcatgattctatctgcttactatcaaatgtgaaaaattaactaaagcctagcatgtagtaaagaacctttttatagttattgttggtactcaatttcaattaactgctatagaacactaaattgttcaatttcaataaaaccacattgtcgcattaatctaaactggaaatctttatcactataaagtcttctaaatcaacaggataaaggatntaaactatatccagtgtcaatgtaaaacactcaagactgccatagaacaatattgcaccacagattttattggtaaaagaaattatcttattttcacagaatatccttttacttgatagtgtattaaatttat

SEQ ID NO: 87925 - DNA, 324 bp, Glycine max
agcttgtcaacccaaattgatattcttaattaattcattgttttggcttataataacgtagcaaaattttgtattctaattctacaagataacattccaatttctaaagaatgaagagaagcaggttggagacaaggaacaaactgcgtgtcaaagggctgctgctgtagtcttaattggccaaattgggaaaattagccaaattggcgaaacgaaacaccgttggtttagaagacatggtcacaaattgggaaagttattgagactcctatgttgaatggactcaggctgcttcattctaattcttctgggaggactggagaa

SEQ ID NO: 87926 - DNA, 441 bp, Glycine max
  unsure (1)..(441): unsure at all n locations
ctgtcgcttcttaattgataattgatacgcactcattagttattagaccatcaccgtggcactgtcattctaaactctataaatagccctcattttctatgtctttatcgcatatccatcagtctccttccattcctttcttccagatcacaggtatgtatttatacacgtttccctgaatcttgggttttctttctttctttcttttattttccaatatgatcacgacatatttttagacactactctatcacttacatttaatggtgagttctaccctgatcacacgctgcaacttttctgatagtagggattcagagctagatatgaaaaaattctaataatttgatacatggaaatncanacaagctagctagctcgatcacaagatcaataccgaanaaaaaatgatgtcctgatagctagctagtcaaagatata

SEQ ID NO: 87927 - DNA, 388 bp, Glycine max
agcttgtatcaatgtcatctacacaacttctggcgtattgccaaggtttcttttcttaatttggcttgtataaaaataaaaatatttagtgcatttaactaaggggacgtttggcaggaaagcactttttcatgttgggaaatcaagaatcttgagaatcatatttcttggaatctttagatcaatttcctgaaaataaaaaaattatgaatatttttatcgataattttaattatttatcacatataatttaataaaaaataaattgatgtttctattatagtaaaagaaaaattaaattcgaaaaagtaagattttcattttttattataagaaagtttttgtgagaaattaagttttcaacttataatttttgaaaaactaaact

SEQ ID NO: 87928 - DNA, 435 bp, Glycine max
  unsure (1)..(435): unsure at all n locations
acactcacaatactcaagcttcaaaaccactaacacttttcacatttcactgctaacgcattgctattaactacttaacttaaattaaagcatgtagttgtaagatataaccaacccgtaaccggtggccatcaaaatcatagccatcacgaccacgaattgcatcctcagcatcttgagcatcttcaaactgcaataatcagtcatcaatcaggatagagggtggaaaaaatggaattttatgacaaactgaatggctccaaactcacctctacaaatgcataaccaggtggtcttgggggaacctttaagtcgatgtgtgttatgtgtccgtactacanagtgaaatttatgcataaacaacaaccaacttcataattatgaaagagtgaaagaaccaacatttgcactaaacattaatcacatggtacatac

SEQ ID NO: 87929 - DNA, 126 bp, Glycine max
agcttgtaggcggcgctatattgtggaaaggaaaggttttgtagcagtagtgagggcgtaccacaatcttgctagaggactaggggaaatacactgagctttggattccgtcacgcgagactctga

SEQ ID NO: 87930 - DNA, 346 bp, Glycine max
aaaactcagctggctttccaggaaagtgacgcttacgctttttttgctacggaaggcatagcacaaaaaccatatattcttttatatctgacacaacgacagaacacttgaatatactaaccagcccatggttgatacggtcacgagcaatgaattctaatatcatgctggagatagaactgaaggatgaacttggatagagtatctgggatgactccattgagcactttactaacgacgatagcttaatgcatcatcgtgataacaggatcgacaaagtgcctacatataggacattctcatgaggtttgcttttctccatacgtgcactaacaacagacatttg

SEQ ID NO: 87931 - DNA, 383 bp, Glycine max
  unsure (1)..(383): unsure at all n locations
catgcaagcttatccaaacaaacccaatttctatatatgggcttttagncatnataatttttgttntaagaatnaatatatcaatagatccctgaactatttcggtatttttatttaggttcttaaactaaaaaaattgtaattgggtccttgttcttctaacaatttttgaattagatccctctgaattttaagttgtggtataccaaaaaaatcaaatcaagaaatggggtagggattattgtggcaatgagtggaaaaaagatgtcgtggatgtaagaaaagtaggagatcgtatcataaccttaaaattgggtgtgggacaggacacctttaatgttattagtgggtacgcaccttatgttgggtagcaaaacacttta

SEQ ID NO: 87932 - DNA, 299 bp, Glycine max
  unsure (1)..(299): unsure at all n locations
aactaagctctcaccaagctgaacaattaataattttggcttatctatctctctggagctctaaaaaataagaagatttgttgtttggatggctgactaatttgctcttaatcgtntcataaacatatatacaatctaagcacctggtctttttctctcaaaatattcaatgtgtgttgagatcttttgagctttgcacanaatattccataattcttacaataagaaattcaaatgatagtgcatatgtttgtaacttcatttttctaaacctttagtattcatcacctttctttttc

SEQ ID NO: 87933 - DNA, 57 bp, Glycine max
  unsure (1)..(57): unsure at all n locations
cccgaacntcaganactgcagctgcagctattaatgttttcagacatcattttttta

SEQ ID NO: 87934 - DNA, 322 bp, Glycine max
aaaaactattttttttttacatcaagaccctcggcaatgtttgacaaaattattcaatacacccctagaggtatacatacaaagagtggtctcactacgcaacgggcatccataaagctcactattagtgcatgatgaaaagtcaaccaatcctaaggagcacacagtgctgttcttttaaatcccttagcttcatctgcataggccctttagacaaggctgttctttcgctcatccaccctgataaaaatttgaaaaggcgaagtactacccttgaatccgacatctatcccacagaatgtgtggtagcaaaatcctacat

SEQ ID NO: 87935 - DNA, 337 bp, Glycine max
  unsure (1)..(337): unsure at all n locations
agcttctttgagaagctagatcctaatctacccacatttctctatttttaaattaacctccttgaaaataattacggataaaaataacacaacaaatataatcaaacatcanacattattaataatatatatatatatatatatatatatatatatatatatatatatcaaggggttacagctgtcattatgtgattaacaacacatacaccaatnaatccctcttacatgtccattaagcatgaacgttaattaagcacaaagataactaatcaaacattaagcatgcatgaattatattagcacaaatacaaatattggtgaaggtaaaaactta

SEQ ID NO: 87936 - DNA, 444 bp, Glycine max
  unsure (1)..(444): unsure at all n locations
ngacaatttcaaaataaatntgaaagactcagctcttattggattctgattatttttgtgtgaccattattaagtcaaactcaaaatataatactatggcttcaagtttaatccaaactatttttctaaatcaagagtaaataactatgattgagttaaatgtatatgcactgagcaacaaacccattggccatcacctcttaaacacgaattattctttgttttgataacaaaccaacctctcccaatgtcttctgtactcattattccaaccatgtatttaagacaaaaaccaacaggcaaaaatatattaaattgaataaaaattaaaaagagaagtccaaaagctttttaccctgtccaacattgcaaccttctcggcgagcataagttctctggtagctgcatctttcaacttctttccatataatttctaacatgaac

SEQ ID NO: 87937 - DNA, 211 bp, Glycine max
agcttagacggcttgaaatgcacaatgtctttaagaattctaggaggatccctgcggaaccttcaactgactaagacactgagacaaacttatctaccacttctgggacaatatatgtgcaggtgtgggcaagcaaatatgcctcccatcagacacttggattgcatctgtcatccctttcccataacaaggagataactactaattcaaa

SEQ ID NO: 87938 - DNA, 384 bp, Glycine max
ggacctataaaactcagcttgaatcaaaacacgcatgccgattgcgatttctctttgtatttctcagaaaagacactcagcagtcgcaatttgtatatttgattcttagctggccatggaggagcatatctatattgtgtcttgagacgcgaaactcgcatgatgactttctgagctatatgagtcttattctcttataacgccacatcgtgtcaccctcttgcaaattccctggccaaaacacttgtgattcagtaggaattatttgagggctccaagtgctctaactatctcgtgcaacacaagaaacgtacttttcttcttctttatactgacaaaggagtaagtgacccatggactcttgtcgtaaacaacatttaacac

SEQ ID NO: 87939 - DNA, 367 bp, Glycine max
agcttgccaaccatctagaccaggcgtgtacggttgtttcctacatttgctacccacgactggaggaatcatgtggaaggccctagcgggcactgatgctattagcacacttattcttactaattacacccactgccatttttggcgatcccattctcgaaccgttacatagacttgcaaattttattggcggtccttgttactttacgtaaagttacagacgcttggagatgacataaatgtccggttacttgactgatggaatattgcaggaccttgctagttgagcacactatgcttcatttgataaacggagtgttgcggaaccttgacgactgtgcattgattaatattgttgatttccaaa

SEQ ID NO: 87940 - DNA, 254 bp, Glycine max
tgtgcttatgtggcatggcgggctatctcgtcttctttgttttcaacacaagcactgaccactatcctttcttacgacgacccttctctcatgagcacccgaatgggattattctctcaaacatactctccaccatatcctaggaaagctatcctgctaggaatgcccccgtagcctttgcataaacccatcccgagggtgaaaacgatccccaacataacttgggccattaataccgattgaacagaaaaaca

SEQ ID NO: 87941 - DNA, 328 bp, Glycine max
  unsure (1)..(328): unsure at all n locations
agcttgggccagagattctagagaaggtcttanggcttttattattcttacggggagaaacgagcccgggggctatatatgagcttgcttatcttcgcgcatattagattaaagtttaattattctagggccttgaattttcggctccacaatatatgtaaggcaccttaaaattgcagattttttacccatagaaatttatgggtcctaaactatttattgtattatggggtgtgtatggttattcaccatgcattactaatatttgatgtgtgtggtttgaaataaatttatttgaattgggaaaagccaatccaataaattttaa

SEQ ID NO: 87942 - DNA, 145 bp, Glycine max
catgcaagcttgtcactgtcatggatatttctaaggcaatatctttgacagggattataagaaaatgttttaccaatatccatcactacaaatacacgcattcgttataaggtggacacaatttggataatccagggcgggtcca

SEQ ID NO: 87943 - DNA, 178 bp, Glycine max
aaactaagctgtgccgacaatatacaaatgattctccacctttttttttttcatcacagcagatagcatgtcactctacattaacagcctgattccgatggctgaatatataaccattaatgcgggaattccacttgtagcagaaactacaacaaccttatttcaaaaatgctgcttg

SEQ ID NO: 87944 - DNA, 145 bp, Glycine max
gcaggcatgcaagcttgtaggattatggggtacccatcacacgcgagtttaagaggttttctggctttgttgcacaacaagaatcacacatccactaagtgtgcataaactcatcatgcccagatgcacacctacaatggagctc

SEQ ID NO: 87945 - DNA, 179 bp, Glycine max
  unsure (1)..(179): unsure at all n locations
gcgganagaaaaataacaactttgttttgacaaccacacgaggatccacctccaggacaagcaacccctcccactgcaacacaagaacaccaaagcaaaaaaacctgggaaggacatggagaagagggcggaaggcacaaagaggcccgggggccgagagcgaaaagagggccgaagca

SEQ ID NO: 87946 - DNA, 335 bp, Glycine max
  unsure (1)..(335): unsure at all n locations
agctttaggcacattgtgtcttacaatgtaacaaantttatgcacctttatgatctaacgtaattggttgagcagatgcatgacttgttgtgaaagtaattctttgaaaaaaaaaaacacagcataagaatttgtgaaaaggattttataatattcttttatggtacattttttcagttttttttgtgcgcatatacttttaatattctcaatctatataaataataaacgtacaattaattcaacaaattaaaataaaatggaattaacattttacttttaatattaaatttccaaaaaatatttaatcaaatcggaaaaaaaaaccttttaac

SEQ ID NO: 87947 - DNA, 228 bp, Glycine max
cttcatgtgtgctacaatggctatgtatatccaccgttttgttttattcaacatgcatgacctcaagacaatgaatgttccattcaacataaacacggaagaaacctcactattcaaatcgatgtcaagatttattaatgccttacaaacggaagatatgtatatatatatccatctatatataaatgaatatactgttatgtatatatatatatggctatactagtg

SEQ ID NO: 87948 - DNA, 368 bp, Glycine max
  unsure (1)..(368): unsure at all n locations
agcttctcaaggaagctacctagtctatttatagaagtatgtgtaacacttgttgtaactntgatgaatgagagtcttgtgagacatacttcaaagttccacttctctccctcttttattccttcaatttcgtgctcccccctctctctttctctccctctttcttttcctccattgaagcatccttccaagcttcttatccaaggctcatcttggtggtgaagctccttcttccatggcttattccctagtggatggcgcctcctctcacctcttcttctttgtcttccgctgcatttccatggtggaaaatcatcattaaaggacctcattgaagctcaaagatccagcctncatagaagccccac

SEQ ID NO: 87949 - DNA, 118 bp, Glycine max
cttgcaaaaattgcagctacccgatctttggctcttctccttcaaaacaagctacccgatcttggttctttcttgtaaaataataacagcggatctttatcctcttccatacaaatta

SEQ ID NO: 87950 - DNA, 285 bp, Glycine max
  unsure (1)..(285): unsure at all n locations
agcttgntaggcgaggatcttctccattaatggagtttttggcttcttgaagatcacggcagcggaatatagaaggaagaaagatgattggagaccccacttgaaggagatgatgagtcaagaagaatcttaccaccacaggacgccatggatgataacttgaaggaacgccaagatgagtggagggagagggagataaagggcacgatattttatgcctcaaatgaggtctgagctttgaaatgaattctcaaatgatcaaagatcaaaaggtgcacacacatg

SEQ ID NO: 87951 - DNA, 340 bp, Glycine max
gaactatgaaactcagcttcagtaaaatctggaccagccaggtttagtttacagagccattgccttctcgccagtattatgatcagccattgaggtgcttaactttgggacttccactatcaccatggtcaagaatagaagagacctggatgttctcttggggaaggaaccatcctcttctaggggtctcccctctcggcacaattctaaaagtccaattctgcctgaatcagaccccatacaagctaaatgggggtaggataccataacgtggagtcaacaaaattgaagatagcaaaggccctcataacatctacgtgtactccgagatcttctcaat

SEQ ID NO: 87952 - DNA, 344 bp, Glycine max
agcttgtaagtgtaatatgggttctatttcttgatttttatttttatgtcaggggctttgaatgatttagattgtcgtttgattgcagctgtagatattttaccattttttatatagaaaatattcaacatacatttgtgaggaaaaagatatgcactctagtcacaccagaaaactaattttacttttaattttctacagtatatatactaattaacatttttaatttattaatctctatatttactttctcttctatcgtactttaatcttatttttttcttctatatttttttccatctcattacatattacatctatcattttttttcctattaattctg

SEQ ID NO: 87953 - DNA, 406 bp, Glycine max
  unsure (1)..(406): unsure at all n locations
ngaaccttgaatcttgattcttgattcttgaaatcttatttcctcttgaaccttgaagtgttcttgattaaatcttgaacatcttgaactcattctttgattcttgagatcatcatctttgttatcatgaagtgttcttaacctttgagctttttgtcatcacctttgttatcatcaaaacttctttgaatcaatcttgattcatcatgaagcttgcttctacagaaatatctttagtgctatataactcactggtttaattgactaccgcatttgtgtaatcgattacataagtcttcgagaagttatagatagatctaatgtagctccatgtagagcttgtagtccttggatcttcttcatcaatggagacctttgcttcttgaagatcaatggcagcgaaatg

SEQ ID NO: 87954 - DNA, 320 bp, Glycine max
  unsure (1)..(320): unsure at all n locations
agcttctacaaagctgggaggttgatgttaatatctgtacttggtttgcttgccatcaagagacaccactagataacatattagacacattatgagatgcacaaaaatcttcattatccttataattaaagggtttagaaataattcacctccacaattgagccatcttctaaatattgtgcagctgaggaaaattctagtatgttatcacacacagatagaagacaattcatttctcttctgcacatagccttcttctcaggcttcagaggctccaactttaaattttgtccaacaacaattgctggggattnccaatt

SEQ ID NO: 87955 - DNA, 459 bp, Glycine max
  unsure (1)..(459): unsure at all n locations
tgtgttgcagacatatataataaacccccttatctgttataccaacaacagcagaataattatgagctttcaaacaacaaatacaatccaggctggaggaatcatccaaatctgagatggagaagtcctccacaacaacaacaactaatccctccttttcagaatgatgttggcccaagcaagccatatgttcctcccccaatgcagcagcagcaacaacaacatagacaacaagcaactaaggctcctcctcaacattccttataagagttagtgaggcaaatgaccatccagaatatgccatttcagcaagagacaagagcctccattcatagtctgacanatcagatgggggcagatggtctcaccagtgtaaccaagctcagtcccaaaattctgacaaattgtcttcataaactatgcagaatcacgaaaatgtgagtgccatcaccttgaggg

SEQ ID NO: 87956 - DNA, 375 bp, Glycine max
  unsure (1)..(375): unsure at all n locations
agcttgtaatgaagatgaacataaacttaggatcactttattttgttcagatttcactcattgctcaatccaactccttgcggcttggatttccaaccctgattactgccttgtgcaaggcccgaggagtcacctcagattctcttaccttcgagtcactcagcctagccattaatttggcctatattaagaaaaattgttggaacctggatgacccttttgtcacttttccaggacccanaaatccatggctagaaaatctgaggacccatctctctctgctccccctacttctgctcttccttcaccaccagcagctccaattctttcaagtccctccacttggagctcagagcctttcatgtttatgctaca

SEQ ID NO: 87957 - DNA, 364 bp, Glycine max
tgacctatgacactcagcttctaaggaagtgagcttagttatgagaggtgtgtgtttatctaagctctagcttctcaaggaagttttctcaaagaagcttctcaaggaagttttctcaagaaagcttctcaaggaagctacctagtctataaatagaaacatgtgtaacacttgttgtaactttgatgaatgaaagtcttatgagatacacttcaaagttccacttctctccctcttttattccttcaatgtcgtgctccccccttctctctttcttttcctccattaaagcatcctcttcaagcttcttatccaaggcaattcttggtggtgaagctcctctcccctcgccttattccttagt

SEQ ID NO: 87958 - DNA, 356 bp, Glycine max
  unsure (1)..(356): unsure at all n locations
gctntgacatgggatgtactaatcctattaagnttatatgtatccagntntaaagctaattactttatctgtaactcttatgttgatcacaaaaaccagctttgaccattaactatgtcttaacttaaggaaaacattggatcattgctttgtcttgacagttcaaccctttgctcaggaatttgactctataaggggttatacaactccaaaatgggtggaaccagcgacatttggtagcgaacatctatggctacaactttcatgaagatcacacaacctaattcattgatagaataatctctagaggttctctaagatttctcacgtttttcctttagttgctttgctagagc

SEQ ID NO: 87959 - DNA, 276 bp, Glycine max
  unsure (1)..(276): unsure at all n locations
tgttcttgattgatcctcagagctttatcattcttttgtcaatatacnnagccctcatttaacggggctttgtgcttggcgaccacactcaacaaagtacttttcgacacctactgtacgttgatttcaccaatgccggtatgagaatgttgcgacaatccatttaaaaccatattgatacattctgagatgtgcggttgtatgtggccatattgtcgtgcttcttttatcttagccatcgtccattttttctttgagatgccaatcatccctggt

SEQ ID NO: 87960 - DNA, 368 bp, Glycine max
  unsure (1)..(368): unsure at all n locations
agctttgagcacaaatcttgaaggtaatgcaagaacttgcacttggaggttaagagcaccaaggtcaaggcaagaactcttcttcaagaactcaacattntatcttctcttactcaaaccccacaactagaacagaggaaaatggccatctctctccctcagcatccacgacacactcaatgttttatttcctttgttctctcataaactatatttttaggaactttgccttaggttgtagactattaggctttaagaggttntagaggtgagttgacacaaatttgatggttgatggggctaggtgtgggcagccaagttatgcccaaaagtgggtgatttagcttttgcaactttgactatatttg

SEQ ID NO: 87961 - DNA, 437 bp, Glycine max
  unsure (1)..(437): unsure at all n locations
cagcttccaaaacatccaagtaattcaacatccaagtatcatgaactaacacagccaagagaacagggcagaggcagaaaactctgctcaaaacacaaaccaacatcacagcttttcacactcaaataccccagtaatattctcttcgttccaattcgttaaccgctggatcgactcgaaaattttactggaagtatctagcacataaatctacattatgaccgctgggatctgctagaaaacgtccagaacccaatctgtactactctttccacaaccagcaaatacacaacactttctgcacaaagccaaaattctgctgcacctatntgacagcaaaattctacataaagtgcagattttcgaaatcacactttccctcatccaatttttgccaaattgaatcctacaagttccaaatcatgtatctattatgt

SEQ ID NO: 87962 - DNA, 375 bp, Glycine max
  unsure (1)..(375): unsure at all n locations
agcttgcatcatttaagtgaattgcccatctagctattcataacattacatatgattatgataacaaagtaacttagcatgatgttggaacctgagtaacaaactttcaccaacaagaacagaggaaagcagtcagcagcattgtctccttgtcccaaatgatcttgacctttacctgcaccgatcttgagaatcaacacaactcatgaaagacaggcattgaattgtagatcattgtgaccttgtcccatgtgaaattgactttcttcaactgagggaatcttgacaatcaactcaactctcaagaaagtctagcagtggaatagggagaagcaataccggtactctacatggtntaacatatttaacattatc

SEQ ID NO: 87963 - DNA, 406 bp, Glycine max
  unsure (1)..(406): unsure at all n locations
acacttgaaactcaagcttgagcgaaacccactcctattttttgttttttaagangnacacacgctatcacaaggtggaaatatatgcttgtattcatgattttaaacatcccccggtccattaacatatgcccactaacttaaggtaattgctatattttctattgaaaaaaatataagttgtggccttgtacgtgtgtttgtaaatataaatatgccatgctaaaacactatttataagcaatatattaccatagagtatgatagtagtatttgagtctattgacaatgcaattcttacaaaaaaaatataaaaaggattgcttacatgcatcaatttttttctcacctaatgatcacaatataataaaaatctataaaatcaattaataattatcattatttt

SEQ ID NO: 87964 - DNA, 307 bp, Glycine max
aaatcagtgacaaaggtgaaagcattagccatttctaaggtaaattgggtgttaaggggtcaaattttgaatcggtggagttttcgccgtaaaaccagtttgagcaagtttaaattaatgttataggaaaggtagtacatattgggttctagacattttctagtagctcccaacggtcaaaatgtagatttatgtactgggaacctccagtaaacttttcgagtcaatccaacggttaacgaattagaacgaagagaatgttactgaggtatttgagtaaggaaagttgtaatatgtgaatgtgttt

SEQ ID NO: 87965 - DNA, 217 bp, Glycine max
ttatttttcactattctttcctattttttttctatccttacctgattcttttgttcttacccttatctttatttcttatcccttacgcccattgacaattttgaagttgagatatcaggttggcgcatatgatgcgtccttaacattgtccgtaggtacccccctggttcataaaactttgtggagcatctgtgtccttcgcagatgcttctacaga

SEQ ID NO: 87966 - DNA, 327 bp, Glycine max
gcttttcggatctggtcttcaccgacaaaaggatcaaagtgggtatttaaagaggcaaatatgatcatcctgctttgatgaatgcgaaaactggggcaaatgaagagggtgagaatgaaggagaaacccatgctgcgattgtcattcctacatggcccaacttcccaccagcccaacaatgtcaataacaaccattctccttacccaccacccagttatccacaaaggtcatccctgaatcaaccacaaagcctatctaccacacttccaatcacgaacaccacctttagcatgaaccaaaacaccaacgaaggaaggaattttgca

SEQ ID NO: 87967 - DNA, 348 bp, Glycine max
tgtgacactatataacaactaatcttacactcaagcatcatgaactaactcagacaagaaatcaaggcgacatgcccttgaatctctgactcacaaagaactgtgccactcatctcacatgctttgtcacatcgtcaagttaccacagtggatattctctttcgccccaattcaaataaaccgaatggatcggactacaaaaaggttctctggtagtatctaacacataaatattctttcctaccgctggaatccgtctaaaaacagttcagaaccctgtctgtactactccatccacatccatcaaatacaccacactttcttcaataagcctaatttatgttgaac

SEQ ID NO: 87968 - DNA, 324 bp, Glycine max
cttgattcttcctcagttctttttcatgctttgaacaatatactgagccttcatttaactgtctttgggcttggcgaccacactcaacatagtactttcgacacctactgtacgttgatttcaccaatgctgttatgagaatgttgcgacaatcatttaaaaccctatcgatacatcctgagaggttcgttgtcatgtggccatatctacatgcttctctatcggaagacatagaacatttttccttcgatatgcgacccatccatgttgctatggctggactcagctcacgaaattgttctaaattctgacacaaaaaatgcg

SEQ ID NO: 87969 - DNA, 364 bp, Glycine max
  unsure (1)..(364): unsure at all n locations
tcgtacccgggatcctctnatgagacctggaagcccgcaagcttncttaagaaaattcctaaagaagctaaagcttagctacacattcttctctaatagctaagctcacctccttgagatgagaagctagagcttagctacacaccccctataatagctaagctcacccccatgacaaaatacatgaaaatacaaagactactcaaaatgccacgaaatacaaggctaaaaccctatactactagtatggccaaaaatacaaggcccaaatgaaggaaaaacctattctaatatttacaaagatgagcgggctcatacttagcccatgggctcaaaatctaccctaaggctcataagaacccta

SEQ ID NO: 87970 - DNA, 327 bp, Glycine max
taacccattacccaagaacaaatctatcatggtagtctctgaatatatctccgcaagaagcagtaccagaagagggatatgcttgaactcgaggaagacaaggatatgcaagctcttgccctgaattctttttaagtttggtggaacccctctaatttcctgaagatgctcacaataactcacatcaagacttcttaaacgttgaaattcttttatgcatccaggaaggaatgtgaaattattgccccgtagacttaaagtttccacctgagcaagctgcgtgaaacttgttgaaaagaaatcattatgcaagaggctactattggc

SEQ ID NO: 87971 - DNA, 328 bp, Glycine max
  unsure (1)..(328): unsure at all n locations
agctngnatgcggttgtacttgagaggctcancccttggaacctcactgttaataaatatttttttaatagtaatatccttctttaccttctggttcatttggattatcattttctattttccccccatttacctttcttgaatctggggatattgtttctgatactaaatttctgtgttgtcctcatgcttgctggcaaattaggttcctaatgcttctccaacagcagcttctgcaagttctgatatgtatggagcagcggttttggatgcatgtgagcaaataatggaacgcatggaacctattgcttcaaagcataacttcaac

SEQ ID NO: 87972 - DNA, 333 bp, Glycine max
ttgcgttgcaaacatttataataaaccccctcagcagttaaaccatcaacagcagaataattatgatctttcaaacaacaaatacaatccaggttggaggaatcatccaaatctgagatggagaagtcctccacaacaacaacaactaatccctccttttcagaatgttgttggcccaagcaagccatatgttcctcccccaatgcatcagcagcaacaacaactaagacaacaagcaactaaggctcctcctcaacattccttataagagttagtgaggcaaatgaccatccagaatatgcaatttcagcatgagacaagagcctccattca

SEQ ID NO: 87973 - DNA, 118 bp, Glycine max
caaattcaaaattgatgttaaaagataagttgccattatgagtgctagaagtggcaatttttcaacgaattgcaccttagctttgtcaagcttcgtgcaatgccccaagattttttga

SEQ ID NO: 87974 - DNA, 313 bp, Glycine max
tgaaccttgaatcttgattcttgattcttgaaatcaaatttcctcttgaaccttgaaatgttcttgattaaatcttgaacatcttgaactcattctttgattattgagatcatcatctttgttatcatgaagtgttcttaacctttgagctttttgtcatcacctttgttatcatcaaaacttctttgaatcaatcttgattcatcatgaagcttgcttctacagaaatatctttagtgctatataactcactggtttaattgactaccgcatttgtgtaatcgattacataattcttcgagaagatataaat

SEQ ID NO: 87975 - DNA, 304 bp, Glycine max
cagcttcaacaaacaaattctgtgttggattattacctcaagattatatctctaattaatagatctctgggattatgtaatgaagctttccttaattgtttcattagtggtttaaatcctgatattacatgaaatgttgttgctatgtgtcctcctaccttattgcatgcaggtgctttagctaaactttttgaagaaaaatatggtcctgtttctaaaccatttcgaaattcttatactcacaaatattttcaaatttctgctaccccagtttctattaatgctcaaccaaaaacacaaatca

SEQ ID NO: 87976 - DNA, 313 bp, Glycine max
tttactcaatccttctttctctctcttatatttcttcttcaggagactccccttggtctctaacccaaagactgtgcctaacaactggtccgaacctgccggcgactacatggcagagcacaacacccgctccaaaaccacaaatcgtttgtaagaagtggttctccacttaacccagacccaccacgacttttccctacgcctggactccatccaagagcagttgcagctcctgcaactccaacaccagccacctccctcacctctacccctcccacctccatcaccctcctcaactttgacccgccaccat

SEQ ID NO: 87977 - DNA, 289 bp, Glycine max
agcttcttgcacacttttttacttttattcatcttaatggaatattcaggatgtttttataaatacacaagccccttaatgccaaagacaaagtgcgaatcttcagagcaactattcttgagtgataatgatggagacagagcacgcaaaaacaaaggctattcctaccctgacatcaacaggaaagaagaatatttttcagaattaacggtgaaacttcacaacttaacacaaaatgaaatgagagaatcatatttcacgccaaagcgcatgtgtgaaagggtaagtt

SEQ ID NO: 87978 - DNA, 313 bp, Glycine max
ttctaaatttttctggttttccaaaccttgaaaacaaaacttgggctattcatctatttcattcccttctccctttgccaaaaagaatttgccaaggactaaccgcctgaattcttttggtgtctctcttctcccttttccaaaagaacgaaagactaaccgcctgaattcttttgtgtctcctttctcctttgtcaaagaattcaataagacacagtctgagaattcttttgattctctcctttcccataaacaaaagatttcaaatgactaaccgcttgagaatgcttttgtttcccccttcacaaagttt

SEQ ID NO: 87979 - DNA, 299 bp, Glycine max
agcttgaataatcaaaatcaacttagacctgcgttgaaattccataaacttatcagcagatggaaataataaaatacataatctggtttcaacatttgtaatggattctagagttgaatagcatatatttgcatggaaatattggagcacgcgcattttctctatctcgttagatttccaaattgattgagagtatgtggaaacttgtattctgccttacaattacaatggtatttatacatggttacaaagagtttgtctaaagattcaactgttttgccaccaccacaactcacaaa

SEQ ID NO: 87980 - DNA, 313 bp, Glycine max
tggaatttttgctttcacaaaacctttatggccacaccgttttaaacaaaagatgggcatgaaaaaatctcctcgaaagacatcaaaagcctaatggtacaagcttatttcaccaacaaatatcttcaagtattaggagagtccattaaagaaaaggtatctcccaaacaaagaacctatgaagagtccacatcaaatgttcagatagaaaagcccttattcaaaccatttagggttggtgaaaaggaaaaacaaaaaattagggaattaaggaaaaataattcccttacagaaggggtaggtggcaacaata

SEQ ID NO: 87981 - DNA, 279 bp, Glycine max
tataaaaatttttttaataaaaattttcttcaacacctctctgcatcccttggaccatcatctacgatcaaccccccatgaaccaatattgaaactggggatattgaggatgataccaaacttctgtgaagccctcttgcttcctggcaagaccctgtcctaatgcatcaccaacaacagcatctacaaggtctgaactgtatcgagcacccggtttggatgcaatgcaacaaataatggaacccaaggaacctattggttcaaaacataacttcaact

SEQ ID NO: 87982 - DNA, 318 bp, Glycine max
tgttgattctaatatcaaagattctaaaccagaacccaaccgtccattgtgcgtcatacttctactactcaactttcatacccaccccttcccaagttacaatccgtaaaccagccaccccctaacttcccatacctacaatgaaatcaacctatatgcaagaccataaaacactaagtttattctacaactgcgatgaaaagtatgtgcttggccataggtgtagtgcgaagcattttctcctgttgctggtcgaggatgatgctgattctaaaaccattgtcccagcaactcctaacccaccacccttgatgacca

SEQ ID NO: 87983 - DNA, 326 bp, Glycine max
tgacactatattatactcatgcctaaccaattcttctgcctggggcatagacaatggtctaagcgctggacttcgcgatggagctctggatcctagccacacacaatgcccttgacaatctccattgattggcaactaaatgcacgcaactgggggatctcaccaagtacaaccggtagttgatgaatgaagcatccgacgtctatgaacgtgcttaaaagggatgccctggatggataaagaacatgcactctcgactagaggacctttttacaactatttcactaccctttatgatagccaatcaaggatctgggaacaagccc

SEQ ID NO: 87984 - DNA, 259 bp, Glycine max
gacatatccgtatggttttgctccggccttacaccccccgtgccccccggaagattttagcctagcctttcattcgggggccgctcccgccttatgaagactatccgggcaatacggtggggaaggggatcccctgtggccccctgcttcctcataaagatccatccccgcatgaactaccccagccgaaactattccaccgtatgccgggcttgcccacacccgaagaagaaaccgttccctttgcggaagaaaaggg

SEQ ID NO: 87985 - DNA, 297 bp, Glycine max
tgtaaattgttatcattagttaccataccagtttattacattaatttagttagaaaactgttaaggcaatccattatttcagttagaaaacggttaacacagcagtagtctgttaactttcattctcacttcctgatgaaccaatttgacatcaattcaatatatatccatttcttccataattattggataaggtttggctaatttattaattgttactataatgaacataactatgcacataatcatccgtaaaagagtatattgttctgcactatagttcctcctctctatcca

SEQ ID NO: 87986 - DNA, 316 bp, Glycine max
tttggccattctcttttatcctttgcgattttgatgcattcgcttaacgatggttcatctcgtgcggtaaaaggggtccaacaatcgtgccaaacccagtgccattgacaacctccatgaatggcaacccctgcattcgactgggggggccgactataaaccacctgtaaatgtggtatgaggcaattcaactcttaaacaggaattgaaagggatgcccagaaaggaaaaagaacctgcgctcatgactagaagacctttgtacaactatttcactcccctttatgatagccaatcatggaacttgggacaagcc

SEQ ID NO: 87987 - DNA, 335 bp, Glycine max
agcctgcaagctggtctgcatatatgtgcacaaagattacaatggaatggggacttgtattttcagaaaaatacttgtgtattgtgagagtattctctagattccaggatgaacctgttcggacttatcaggggttatgcatcacccttgtggcatctacctttagcttatcttttattgctggaagtggagccttacacctgtcatcaaacaatctgtaaccagaatcatatcatctgctatcaaagcttcagctcttgatacaagttctatttatccttttcatttgctgttcttttttttcatatgctattttctgctgtctttgatcgagc

SEQ ID NO: 87988 - DNA, 300 bp, Glycine max
ttatgatgatgtttgtgtgctgaaattgctgatggaaaaactgatagagatgaagggtatagttaacctagggttgaaaagtgagaatgtagtgatatgagtggaaaagtgtgatgctttgagggtttgaaaagctaaatctggatttaatggtaattggaggttaaagtgagttaatcctagtttgaaatgtcatttaggactgtgggaaagcttgggctgtgcaaaggaggaaaatgagtgaccaaagtgaaggcaagagccatttctagggtaaattgggtgttgaggagtcaaatt

SEQ ID NO: 87989 - DNA, 325 bp, Glycine max
tcttttctagagaggaggaaatatatatatatatatatatatatatataccttttatacaacaataaagaatctcaaagttaaactacatgaccgttgttggaaaccagcatcaaaacaaaagcaaacacgttacaatatgcattgacccactcaaattttttttatagaaaagatagaaaataataacggattttaaaacaaatattttattttataaaaacaaaattaatatgagtaatatatttttataaattttaaattataaaacaaatatttaccaacagtccatatttatcttaacctttaacctttgattttaatgt

SEQ ID NO: 87990 - DNA, 291 bp, Glycine max
ccactaatgaatatggttgttgtcttgtgctaacctttttgtgatcttctctccttctcttcatgcattttcttcttttgtagactctcagcaaggcaagaaaaagcctcattcatgaatttttattttcaccagtttcatcaaccgttagaaaacgttttagtatgatagagtccaacgacgctaatcatgtaaaacaacttctttcttttttttatttatttaagaagaatgctaaatatatccgctactgcttttctaattattatttttgtctaatatgaatggaaa

SEQ ID NO: 87991 - DNA, 342 bp, Glycine max
aatacccaagcttataagaacaaaattgcctaaatcatttccaaatatgcatgtgaattttgaagcatcaacaagaatcaagccaaggctattgtgcaagcaatcaatggggcaaaacacaccaaaagattatgatgatggatggctcaaattctcacaaaggtaaacttatcactttcaaattgagctttcaaaactatcatgacatgtagaggaaaaacaaggatttcaaatcacaaaatgtcaagagacttttattttcagaacaattacccatttcttgaacatatcctataattcaaagaaaaatatgcaaagttgtacatgcaaatagaattgacc

SEQ ID NO: 87992 - DNA, 334 bp, Glycine max
agcttacaaatcggtgttcttttcaagcccataaataaaataaaatttagataagataagatctagatgaaatattatctagatgaaataaaatctagataagataagataagatctagatgaaataatatctagatgagataaaatctagatatgataagataaaatctagacgaaataaaatctagataagataagatttggtagaataaaatagtctgctttcttcaagtccaagcccaattgcttataattctcttgaaattaaattaaaaacacaaaattaatccagtaggcccaaatgatgaaactgcataattaatttgacaattaa

SEQ ID NO: 87993 - DNA, 293 bp, Glycine max
gcaccttacaatttacattcattacgacatagaactgatataagcgacccctcctcatacatcacacgagaaaggagaagcacccggtaccgtgagaataactctttactcttgagtcatgtgttgcgctgcagccaactctaataaatatgataattacaacacttacacactacgtatttcatgcttcttattctgtcccttctcaatttttatcttcttacaattacatccaaacaattaaaaatacaaattaaaataaaataagcagacatgtccacacttcccttcta

SEQ ID NO: 87994 - DNA, 304 bp, Glycine max
agcttgaagctgaaactaatttaaatcctaatatatgataaaacgatagtcaggggaagcattaagacaacatgttcacatacgcaacattattccgggtacctgcattaaattgtggcttaatagtagaatcaatatggtctgcaacttgagatgttaagccctaaactttatcagaaaaattaaattgatcagcaagatcaaacctcttgtttaggtcaagaggttgtaggtgtactgtctctgagggagctccctgctggaagtgaatgttggatttcatatgcgttataggagtattgtt

SEQ ID NO: 87995 - DNA, 315 bp, Glycine max
tgtacttttcttctgatctttttcttcaaaatttattggtcgaccattcaacaagaccccatgataggttggagagaaactaatgtttgaaagaatacaaaagtaaaataagattgatacaccgtctaaaattatattgccttcgatggaggcatatagtggtggacgacaaaggttactggagagagagagttaagcgagaaataatctagtctaagataaaatgtggcgcaccatagataatgatgtaaaacttttatacagtcaattgtaatcctattttcttaactataaacttataatatagattttaat

SEQ ID NO: 87996 - DNA, 303 bp, Glycine max
agctttttatttttagtatatgaagatgaatccgtggccaccttatggactcctctaaagacaatagcatcatttcttgcactgaattgttgggagttggaagccatcttctcaatcaaattcctagcctcagtaggggtcatatcaccaagagctccaccactggcagcatcaatcatactcctctccttgttgctaagtccctcatagaaatattgaagaagcagttgcttagaaatctggtggtgagggtagcttgcacacaatttcttgaatctttctcagtactcatacaagctttct

SEQ ID NO: 87997 - DNA, 315 bp, Glycine max
ttggtcttttctcgttggaattccctccacctattgcactatcatatctccattctacaagcagccacacaaatttcattgctaatacttaaaaaagaaataaccaatcaagtgaaagtactgatttcacagcaaaatatcaaactttatccaataatcaagtgaaatggaactgctttgggcaacatgcaaggggttggaagcaacacacagaacactctccactcatccaataacaaaaatcactcattatgatggagaatcataagagtttgttttaggaaagaatagttacttatttttttcaaaagtatg

SEQ ID NO: 87998 - DNA, 298 bp, Glycine max
agcttcacatattgattttttgtgttgatatcaattgcgtggaaagaagataaaacttcatttgttcaaacgtttgataatttctactttcatttttgtcagaaaaaagatattttactctctatattatgaaaaaaaaaattataacttgattcttgtagtttgtcaaagttgttgaattggttaggttaaattaaagttaatttatgaattcacttattacttcaatctctactgttatttttagtctaaatcattttgaatattaaaaagtatttctaaaagcattaaactttaa

SEQ ID NO: 87999 - DNA, 300 bp, Glycine max
tgctactgctactgtttttattcgcttgctacatggaaatagagggctttgaccacaactacttgtgtccaactaaaatccactctcttatttgctctactggcactattaaactatgatgagcccatctcatcttttgtgatccatcttgaatggaattactgccgtatttggatcgtatttccttgttgtagatggatttgttaggcatttgataattgcttgatgagaaatttaagacccgatcatactgcttaccaccggttgctcatcctctctgctaattaacacgataatgac

SEQ ID NO: 88000 - DNA, 300 bp, Glycine max
agcttgagactggcgcgaagcccaatttcacttactcgtgctaagcgcagcatcgtgatttcagagcctatttaaagtctatcttgtgcagaattagggtaccacctttagcacttttatgacaacttctacagacaaccagggcacagaattttagagcagccacaggcctatttggggaaaagagccctagaagcagaaaataggagcagcttgtgcattgaagcctaggttttgtcatttgagaaagattattgagtagagagtgagtgtgagatgctgagaagaggagggtgaatc

SEQ ID NO: 88001 - DNA, 313 bp, Glycine max
tggcttatcacatgaagactgagcgcttatcgcaaggtctgtgcttatcggataggcaattgcaaaaaatttctaagtctttttctttttatctcttcacacaagcttaaaaacccttgttaattactaaacaagctaaaattaatcacaatcacaagcaaggtatcctaattacatgcaagagataagaatgaaaaatagaaaagggaaagaaaagctgggttgcctcccagtaagcacttttttaacgtcactagcttaatgcatcatcttgttatctatgatcgaacaaagttcctacttcaaggacttt

SEQ ID NO: 88002 - DNA, 311 bp, Glycine max
tgccagcttgatagatggacctctttaacaggttaaatcttcttctgaccagtaggtgtacaattaggatctgacgtttattttctaattactgagaaagcaaaaaaatgggatggttatatgcttctgatcagctagttgtttcttcagctgtattggaacttatttcatttttttttgggcggggttgtaatctaagagcactgtaccttttgccaataaacataagcagccaaatgtgtatgatttaatcataaaatattgaaagatgtccttttttatttctgataatatatattcaatatagctat

SEQ ID NO: 88003 - DNA, 317 bp, Glycine max
tatggatgtttgaatttgccaagagcttccatgttcaatttcgagtgtcttgctatcttatgcgcgtgaatcggacatccgagtgaaaaattatagtcatttgaatttctcaagagcttccgttgttctattttgagcgtctcgatatataatcagcatcgatcatacattcgagtcaaaggttatggctgtttgaatttgttgagagcttccatgttcaatttcgagggactcgatatatgatgcacgtgaatcagacaaccgagtgaaaatttatagacatgtaaatttctcgcgagcttctgttgttcaatttt

SEQ ID NO: 88004 - DNA, 250 bp, Glycine max
cattgctagcgttcagcaacactgttggcctcgggacaccagaccccacgcccactgaacaagattgaatcaaaccttctgagatgccatgtcacgagcaacatcacaagcgctatcttaaggtaaatgggatgactaaggagaatgaagcctcaaatacaatgagaaagaaaaatggctaccgactctcttgttgaagggacctcgcgaatggcatgggggggcctaatcaacactggaaacaaatata

SEQ ID NO: 88005 - DNA, 275 bp, Glycine max
aacttgatagtgaactttatgccctggctaacctggcaacccaactggccatgaataaaaaatctgcacctgtcgccagactctgtggtttatgctcctctatcgaccaccacacagaccttttcccttctatgcaacaatctgacacaattgaacagcctgaagcttatgctgcaaacatctacaacatacctcctcaaccttaacagaaaaatcagtcacaacagaataattatgacctctccagcaacaggtacaatcccgggtggaggaat

SEQ ID NO: 88006 - DNA, 298 bp, Glycine max
tgttctttctattttccttcaccctcgttgtcgggaaaattgtttcggtgaaaattgctcgttcgttgttgtgtcttctttggtggaagtgcattgtttacgatggttcgtgggcaagtgatgattgttgcggcggttggtatggccattaacagcggacgtaaagtgtttgatttggtttttttcgcgttaaaattatggattgataatccgtaagttgtatacaatttacgaattgataatccgtacgttgtatataacttacaaattgatcatccgtaagaaccttacggatttt

SEQ ID NO: 88007 - DNA, 329 bp, Glycine max
  unsure (1)..(329): unsure at all n locations
agcttgntgncattggacatatcattcgtagcaaatgctattgtattatagtcaaacaaaagtagttccaattcttcttcattgctatcatttatttttacttttgtcttcatgacatctgttcccactccaaatgaacaagatttaatcaaaatatttagcatcccatgttacaagccttatcatatgctctatcttaagttaaatgtttttctaatgtgttttaactaaaaaatcaaatgaaaatgaaaattgtctaccgattttctttttaaaaaaacaaaaagaatggaatggtttggtctaataaatattggagagaaataaaa

SEQ ID NO: 88008 - DNA, 320 bp, Glycine max
tgtgaactcccttgctttgttttcaaatattgaggtctatccgcgccctgatgagactaatgaaggaggtataattgttgaaattaagctaaaggagttagaacagaagtcggctgaagtcagtactgagtggagtattgtccctggacgtggagggcatcccactctggtatttatttctgtcaaattgaatatcaattctctttaacaaccgaggaatttttggcccacccaattaatttgtttactttctatttgactttgtgtaggcttcgctccagcctggtggcactgttagttttgaacatcggaatctgcaa

SEQ ID NO: 88009 - DNA, 369 bp, Glycine max
  unsure (1)..(369): unsure at all n locations
acccgagatcctctagctgacgcccttgcaagcactgcaccnctngtacaatggctagacatgatgcatgtcagggtttggtttggtttttggataaaagggatgccccacattatttccatgacacaaatgcaaaaatgatgatttggaaactttatgcaaaactggtcatgcatgcacctatgtggacactcaagtgtcaaatttttatggtcatgtgatgctagggctcaggattcatttcctctattttagtcaacccaacgtttccaaaatatgttcttttatcaatttgtgcattcatccgagtccattttgggcgtctgggaaaatcttcacagcattcacccttcaggtgtatacacattt

SEQ ID NO: 88010 - DNA, 327 bp, Glycine max
agcttctcaatctgtctacttaacaaatctttatatccagagatgtgaaattctttgagaatatattcgctttcaaaaaccaacaatccaacaacagtgacagagagttgttcgacccctatgtcactcctaatctcatcacctccaataactcagatgacacaaatatcacatctatcacagaaacaccacaacatactccataacctgctcagttagatcctgctacaactattcaacttgaaattcctattgaagaacccctaagaaggtctaccagggtttcaaaccctccaagacatctcattaattatcattgctagaatg

SEQ ID NO: 88011 - DNA, 339 bp, Glycine max
aatacccattcttgactttgattcaaacatgattgatgcttgatttgggaactgtttgatttgatttgggcaaaattggatgaggggaactgtgggtattccaaatctgcacttcgtgcaaatttttgctgtgaaattgtgcagcacgattttgcacaagtgcacaaaaatgctatgtatttgctggttgtggaaagagtaatgtaaaacgagttatggatgttttctactataccccaacggtcaaaatgtaggcttatgtactggactcttccggagatgataggccttcatattccccttttacttgcatgtattggctatgagacaaattgtgtt

SEQ ID NO: 88012 - DNA, 326 bp, Glycine max
agcttcaaaccaaagcaattcaaaatctaggtatctaaaacccctcaatttagtggattttcaaggtttgagaagtgaaaatgagaatggggtaaatttggagcaaactctcacctcacacaagtctataacattaatctaaacttgctcaaactggttttacgcctaaaattccactgaatcaaaatttgactcctcaacacccaattttaccctagaaatggctcttgttttcactttggtcactcatattcctcatttgcacagtctaagctttctcttaagtcctaaatgacatttcaaactaggattaactcactttaacc

SEQ ID NO: 88013 - DNA, 328 bp, Glycine max
tactgtgccatcaccatttcggcccaaacccattccaggctcatacccatcctttagcataactcgagctaccatcaaagaggtatcagacagacatggtcataccagaggagactacacataagcactattcataatttcaaatgcttgaaacaaggtttctaatgactcctccactgcttcaacataaggcgtagaagacagataacttactagtatgtgctcctcacctgatactataacaagctgaccctccaccacaaatttcaatttctgatgcaaagatgatgggaccactccagtagaatggatctaaggccgacctagt

SEQ ID NO: 88014 - DNA, 312 bp, Glycine max
  unsure (1)..(312): unsure at all n locations
agcnnctaccatggttggttttacattgatgngttgcttctgcctttattgtggttaagcattcaaaaactgtgttttgcttctgtcttgagtggttaagcaccatgtttaacttctgctcttgatggttaagctttggttagcttctaccttttaggtggttaagtgtgtttgcttctgttnannggttaagcattgtgatgaggcttctgcttaatggttcagcatattccaattgtccttgaatgtttttcaancattttcaatttgttgccaatgtatttatggcatgntncattgtctatttatcta

SEQ ID NO: 88015 - DNA, 336 bp, Glycine max
tcttctttgcaagccaatggttagaggagaagactagatggtgaagttgatttgtggagtgcataatcatgaatttgtcaagtcattagttggacatccatatgcgggacgattgactaaagctgaaaaaacacttattgctgatataacgaagtccatggtgaagccaagaaacattttgttaactttgaaggaacacaatgtcaatagttgtatgaccattaaacagatatacaatgcaagaagtgcatttcgttcttccataagcggaaacgatcttaaaatgcaacatctgatgaagcttcttgaacgtgatcaatatattcattggtacag

SEQ ID NO: 88016 - DNA, 304 bp, Glycine max
agcttgagtttacagctatttctgacttacctaatgaataaatcggtccctttagtgaggaaaaagatgaagttctacacaatcaaacccaggaggaagatgatgacgaagaagctgagcttgttccaccaatcacaatcataccaccacacatgcaaaattttgaagaatctaattttcaagattctgaatacggccatagcttatatcgtgaagaagtctgacattcggtgaggactctctttgaaaggatgtgttttctgacaaaacaagaagtacaacatgttttgcagcaataccatgt

SEQ ID NO: 88017 - DNA, 313 bp, Glycine max
tcaaagagtattttgatgatgccaattattattaaagatccattcaaataagattaaagaatcaataagattcaagtgaagaatcaagagaagactcaagatatgcaagaacctcaagaaaagcatcaagataagtataaaaagaatgtttcgaagaaaaaattgaatagcacaatttgtccaaaagaatttttcaaagaaaaatcttttaccaaaatttttactctctggtaatcaattactataaggcagtaattgattaccagaagcccaaaacagttttataactgttttacaaagtagtaatcgatta

SEQ ID NO: 88018 - DNA, 303 bp, Glycine max
agcttagcaacagtcctcaaacccaatttttcccgaaaccaaatgtcatgatttctatattaccaattttactaattgttaatgttgcatcatagttttgctatgtcatctacctttggtctcatctctttaccttacaattcagtcaattctatcattaccctttttcaatatacagaattagcaacatgcaaacatatctaatccaggaagttccaccactaatagtcagcctataatccataaccaatgaaatacctcatctccgatttattccatcttctaattttattgtagtttctg

SEQ ID NO: 88019 - DNA, 313 bp, Glycine max
tataatgatccaaaacttttggaatttttatgttgtgctggaaatttaaaatggtttggttgtttattgaatatagttggtagcagaagtggtggggacgtacttcttgatatttgcagggtgtgcttcagtggtggtgaaccttgacaaggacaaagtggtcacacaacctgggatttcaattgtttggggcctcactgttatggttttggtttactctgttggtcacatctctggtgctcatttcaaccctgctgtcactattgctcatgctaccaccaaaaggtttccactgaagcaagtgagtgttaat

SEQ ID NO: 88020 - DNA, 299 bp, Glycine max
agcttttgctaaagaattattgcatttgaaaacgctcatgcatacgcatgtacatgcatatttgttatcttgtgacagggacgagatcgttttaagcaatggtcaaataccacaccaaatccaagacagagatgaatcgaggtaagtggtaacgcgatatcaaaaaataccgcgcaatgtcattttctgcttccaagtacttggggacgggcacgaatggacgctaggcccatgatcaacagatcgctgtcccgcatccagctccggacaatcgaaaagcgctactgggaagcagccta

SEQ ID NO: 88021 - DNA, 303 bp, Glycine max
caattgctccaagttgctgcatggaaaggcaaaggtttgtatggtggtcaacagatgaacacaaaccaccaacccttgcgacaggtacatatttctgattcaaagccagctgggttaccaaattaaccaatgcatccaatttgccttcaagcttcttagtctcaaatgatgcaactgagtttgtatctacctcatgcactcctctaatgactatggcatcatttctggcactaaactgctgggagttggaagccatcttctcaattaaatttttggcttcagcaggagtcatgtctccaaggg

SEQ ID NO: 88022 - DNA, 300 bp, Glycine max
agctttactgtgccgcaattctttacaggtattgtgcagccagaggtgtaagcacacaacatcacatacccacattctttaattcagttgatacaatggaatttatttcatggtctacccaacgaggacccatatgcatatttgacaacatatattgagatatacaatactgtcaaaattgtcggtgtgccagaagacgcgctaagcttgttttcattttcactatccagtgaagccaagaaatggctacactcattcaagggcaacagtttgaagacttgggatgaggttgttgaaaaa

SEQ ID NO: 88023 - DNA, 312 bp, Glycine max
tggacatatagactgaatcctagttcctcttaaggacttagttaaaatatttgttggctgatcattataattgatgaactcagtgataatctccttggacaatagtttctctcgaatgaaatgacaatcaatctctatgtgcttatccctctcatgaaagactggatttgaggcgatgtgaagagctgcctgattatcacagtataacttcatttgcaccacttcacaaaatctcaactctcggagaaattgtttaatgcacataaattcgcatgtaaccatagtcatagatcaatattcaacctctgcact

SEQ ID NO: 88024 - DNA, 112 bp, Glycine max
  unsure (1)..(112): unsure at all n locations
agcttgagacttgnntttttattttctaaatgttctctgaaaggaacttcatggccaagtgggggttggacattatggcacccaaaacatttatagacgggggacccaaaag

SEQ ID NO: 88025 - DNA, 192 bp, Glycine max
ttactttttgggcatccgcttgatcatgacttacaccaaaacgtcctttgtactgtggaaacatatccatccaaactctaaaatcatgttgaaaatgatatgggagcgctaacattggtaactgaaaggacacgattctgaagggagaccgctgggattacggacaccaaatcatttgagattggtatggga

SEQ ID NO: 88026 - DNA, 176 bp, Glycine max
ctaccgcctttaatgaaaaaccccgaaatcaccatatctttaaagaatactggagctctggaattggtttgggaataaatgtgggggggtttaactagtatcatcggatcacctgcatagtcggctctgcttggagaagtatttctggccatacttgatgtacactgtatatcgac

SEQ ID NO: 88027 - DNA, 319 bp, Glycine max
tagtgacctatttttactcagctgtctagcttttcattggggtatttttatctcccttcggtgctctaaattatgggaacatgcctcaaatatataaggcaattttactttgtttccttgcttgattagggtgaactaggggtgtgtatggaatggccctatgcctataatgcatttttgaacaatgggacatgccacatattccccattctcttgctattgacgcctaatcgcgcgcccaccaattgttcagtgaaatgcctcaatggcattatcgctggacttttgtaaggaaacaacccattgtgccttgtggttt

SEQ ID NO: 88028 - DNA, 249 bp, Glycine max
ggatccttcaattgaggattttttttgccaatttttcccgattaaaatgaacttatgttacatttcactaaaaaaaaaactacctgctggagtaaaatctgagattgattggaagaaatgtatatgaaatttttattttttttaaaagaaaatacattctaagacggtttttccaaaaaaaccatagggaatcctcaaaatattttttaatttttttaaaataaaaatacattctaagatggtttttca

SEQ ID NO: 88029 - DNA, 302 bp, Glycine max
cttggacaaccttttaatttttaaaggttaaatataaaaacatttggggaaacaaatttataatgggaaaatataattaaggtgaaaattatatggtattggtacaacctatccttccaccggtaggcgaagcatgataaaaaaagcacatctttcaaaaaggaaaacgcgttggatgtcgcaccaacatttatttcttgatatcgtctaattaaacaaaaagagatctacggattttgaaaataatggtttgggaattgcttacacataaggaaagtattaacaccccaaatgcctatctt

SEQ ID NO: 88030 - DNA, 303 bp, Glycine max
attggctaacttggtaacccagctggccttgaatcaaaaatttgtacctgttgcaagggtttgtggtttgtgctcctctgctgaccaccatacagacctttgtccttccatgcagcaacctagagcaattgagcagcctgaagcttatgctgcaaatatttacaatagacctcctcaacctcagcagcaaaatcaaccacagcagaacaattatgacctctccagcaacagatacaaccctggatggaggaatcaccctaacctcaaatggtccaaccctcagcaacaacaacagcagcctgc

SEQ ID NO: 88031 - DNA, 328 bp, Glycine max
tgtcttcagcaaatcgaaatgacaataactttatacacggatgtccggttgagtcccgtaatatatcgagacgctcaaaatttaaatccgaagctctgagaaaattgaattgacaataactttatacacggatgtccggttgagtcctgtaatatatcgagacgctccaaattgaaaacgggaactcttagaaaattggaacgacaatatctttttactcggatgcccgacagagtgtcgcaatatatcgagggatgctccatattgagaacgaaagctcggatcacattgactcgactatagcttttcacctcggtgtctgatggag

SEQ ID NO: 88032 - DNA, 329 bp, Glycine max
  unsure (1)..(329): unsure at all n locations
agcttncatcacacgtcctcgccttcatagggctacatgccctaaccttcagagaactacgcgtcctcaccttcagagggctacacgccctcgccttcacaggactgcatgtcctcgccttcgtagggatacacgccctcacctttagaggactacacgtcctcaccttcatagggctgcccgccctcgccttcagaggactacacgtcctcgtcttcagagggccacacgccctcgccttaagagaactacacgtcctccacttcagattgttgcgtgccctcaccttcacagggctgcatgcccttaccttcgaagggatacatgcc

SEQ ID NO: 88033 - DNA, 233 bp, Glycine max
gaagagagagggagggggataaaaaagcggggggaaagggggaaaagggagggagaggagaagggaaggggaaaaagggtgggtgggggcactgggggaaggagtgaatctttggggaagtgggggatggagggggggtggggggaaggaaagggagaaaagggagatgggggggaaatatagtgggggaaaaatagagaggggggcacgaaggagggggaggggggagggaa

SEQ ID NO: 88034 - DNA, 324 bp, Glycine max
agcttgttcgcatgtagccctcgtgcctgatatccactcgacaaggtttgaagtagaagagaccttcaatcctataatgcaacggggcggacaaaagtgggcagttaacttgaatggccattattgtcaatgcggaaagtattctgcgcttcactatccatgttcacacattattgcagcttgtgattacgtgagcatgaactactatcaatatatagatgttgtttacaccaatgagcacatcttaaaagcatactccgcacagtggtggcctcttgggaatgaagcggcaattcctccttctgatgaggcatgggcactaat

SEQ ID NO: 88035 - DNA, 333 bp, Glycine max
ttcttcttgaggaagctacatggagctgcctcagttaaaatgctgtccagccttcattaactgttggatcttctcgaaatttggtctacagctttacaagacacttttccatgatctgaccatcgggatctatgagaagatgtctagagtatgctcgaagcttccgttcctgagagcatttcttatttaagcatttcattctttgcttttgtgtatcttaagaaaaacgctatttcttctcctttctttcttccaaagccatttctaacatcccaaccactttctccatcacccacagccaccattagccaccacaaaccatcgttgttctcc

SEQ ID NO: 88036 - DNA, 326 bp, Glycine max
agcttggtcttgattcatcccttcggtcaagtggtgtctccaatcatctttcttccttctccattctgttgccattcatcttcaagaagcaaaggaatccattgatgaagaagatccaaggcctacaagttccacatggagctacatcatgtggtatcaagagcatcttcatctaggtgatgttcttttgcttcctctatctttttggtcggtcaattcactttaactccttgttcttcatcttattctccatgtatatcctccattttcttgtggtttggttctgttcagagtagattcaaaaaaataaatcgattaaatcttat

SEQ ID NO: 88037 - DNA, 328 bp, Glycine max
tgaaggtgtgtatcccaccatcttttcatagtagaatactggtaatgtgtctactatcattgtcatcattttttctccgtcattgaggtgccacttgagctgccaggtctctccacctttgggcgtattcttttgaaagattcgtgccccctttttgcacatgttcagtagttgcatcctatccaaagacattatactgacactgcctaacgaaggcaaccactatgtccttccaagaatggacttgggaaggttccaagttagtgtaccaggtaacagctacccaagtaagacttttttggaaggaatgtatcagcaattcctcatc

SEQ ID NO: 88038 - DNA, 335 bp, Glycine max
agcttgaagacaagtaatatcctaggtatcttccttgggtatagcaatatctctaagggctaccgtgtctacaacttgcaaactaagaaactcgtcattagtcgagatgttgaagttgatgaatatgcttcttggaattgggatgaataaaaagtggagaagaatgttcttatacccactcaactacctcaagaagaagctgaggaagaagacccaggtgaaccagcttcacctccaccacaacaacaagatcaagaactatcatcaccagtgtctactccaagacgagtaagatctttggtggacatatatgaaacctgtaacttggccatact

SEQ ID NO: 88039 - DNA, 335 bp, Glycine max
ttgactctttcaatccattgtgtgatgattgttgttagaaagcggcgatgcctactgtatactgtttttctcccatgtttaagttgtatgtagcttgtgttttcttcacagatggggcatgcatgatgacccttaacactgtaaccgctgagattcccatatgctagaaagttattaatggtacaaaaaagcattgcacgcatttctaacgtctccttgcgaaacgcatcaaacactacaacccccttgtcccataactttcttagatcttcaaccaacggacttagataaacatcaatgtcatttcctggctgtcttgggcccgatatcatcat

SEQ ID NO: 88040 - DNA, 315 bp, Glycine max
tgcatgcatgcaagctttaatgtgttctcccttgtagagctactaactgcagtaacagttacagcccaactatccggtagtgatgacaatagaatgaatgctttcacctcatgctcaaatttaatctgcactgattccaactgggcaagaatagtattaaattcattaatatgatcagttacaaagacaccttctcccatcttgaggatgaacaaccggcgcatcaagtatactttattggctgccaacggcttatcgtacatatctgataacgccttcattaagcctgcagtagtcttctcgtttacgatgttg

SEQ ID NO: 88041 - DNA, 312 bp, Glycine max
  unsure (1)..(312): unsure at all n locations
ctctatgttttctgaatcattntatcaataaacacatgttgagttttattcacaaaattagagtttatctcttttatcttaatgagagtgattctcctaaattcttgagtgattcaagaacaccttggctgtatcaaaggactttcacaacctttgtgtgttgccctcgctggaaagagtgattctttccttcctttcatcttcacccttgttctttcaaaccacaattctagaaaatccacctctgcccagaattatatcgtggccataactcccattttgcgcactcaaattaagtgattcttgagccta

SEQ ID NO: 88042 - DNA, 303 bp, Glycine max
agcttgctctaaaattacattgatgtttgtatttatgggaggaggttgtatgccatttttgttttaagagtagtgtctcactggtaagactaactttccaaatgtttgccttcgcaggaaatggccccgaggaagcttgcctcaaagaagtccaggaaggacaaggcagctgaaggaactagttccgctccggagtatgacagtcaccgctttaggagtgctgtacaccagcagcgcttcgaggccatcaagggatggtcgtttctccgggaacgacgcgtccagctcagggacgatgagtat

SEQ ID NO: 88043 - DNA, 313 bp, Glycine max
tcatgtttttcttcgttggagatttttgttcctccaaatgaattcatcatatttccaaagacattaaggccatggagattccattcctaatagcaccaacaaaccccataaacatcaaaaaatgatccaaaggatcatcaaatgagaaaaaggttctataagggcactgtttttgcagtttcatctttggcctcgctgttgtttgagtctttcttgttgttaggatctccattcaagtcaatatcctctgccattttcttcattgaagactttaaacacccttctactaattagtaatcactgtaaacagaaa

SEQ ID NO: 88044 - DNA, 301 bp, Glycine max
agcttctagagatgacattaacatgaactgctgcccttccaaaactgcagacacaaggatccttattttcattggaaagggaggacattgtacaaaacctcaatttcctttcttcaaactgctctccagcaaaccagtatatatcatcaaatccaataatataaacagtataaagctcaccatgggtttatcaatagttgatcaatttttagatgatcgataaccagtgatcagctaccacagtccccgttaatatatttgtaatgagttcattcgttcaagcaccattaaagcaacttgt

SEQ ID NO: 88045 - DNA, 276 bp, Glycine max
gctttacctactcactgttctgatggatttatggtcccctggcgtgcatctctaatattgaagggtcctaccgttggtgccggctattgctagggcttgatgctgctagttatgcccttttatgattgatcttgtttcaccataatggctgacggtgcatgctgagttcatttgattatataaagggggactgtgatgtgggttcgaaaacaaactttaattacatactgctgctttcctattgctcaaatgacggtatcccctatgacccttctt

SEQ ID NO: 88046 - DNA, 277 bp, Glycine max
  unsure (1)..(277): unsure at all n locations
tgctccaactttaggggagtattttttttatattntattctcctatttattattagatagcaattagggatttagtcattattactcattaatagattgatcctatgtaatcaatactgattctatttgcttattataaataaagactaagtgtggtcatccaagcacacaacacattacagtaaaccctttcaacaggaatgaatagatccaagaacacgagctagcatatagcttgaaagagatgattgcaaccatacgggcagaaattgatctt

SEQ ID NO: 88047 - DNA, 309 bp, Glycine max
acttgtattctgcaaccataatataagttttctgttttttcctcccgtggatgtatcctttctcaaggtgaaccacgtaatcatgtgtgtgttctttctcattcttctctctttcacctttgctgcacaattcggtgtgtatgacatttctggtctgctgcattttctgctgttgttcttgcttgttcttcatcacttccataacagactatatataccttctttgctacatgggttactggcaatgaaaagtgtatctaagcaatcttaaggaaagaattcatggacatctcccttgatatctgacta

SEQ ID NO: 88048 - DNA, 311 bp, Glycine max
  unsure (1)..(311): unsure at all n locations
tgcaagcttatgctgcaaacatctacaacagacctcctcaacctcagctttttaatcagccncnncagaacaattactccagcaataagtacaatcccgggtggaggaatcatcccaaccttagatggtcgaatccttctcaacagcagcaacaacaaccctattttcaaaatgctggtagcccaaacagaccatacattgcctccccaattcatcaacaacaacctcancagccccatatatatcgggcaagggaggctcctacacaaccttcccttgaagaacatgctacgcacatatatgttgcgacg

SEQ ID NO: 88049 - DNA, 318 bp, Glycine max
ttgaatgctctattcaatggagttgacaagaatatcttcagactgaccaacacttgcacagtggccaaagatgcatgggagatcctgaaaatcactcatgaaggaacctccaaagtgaagatgtccagattgcaactgttggccacaaaattcgaaaatctgaagatgaaggaggaagaatgcattcatgacttccacatgaacattcttgaaattgccaatgcttgcactgccttgggagagaagatgacagatgaaaagctggtgagaaagatcctcagatccttgcctaagagatttgacatgaaagtcactgca

SEQ ID NO: 88050 - DNA, 344 bp, Glycine max
agcttgtcaccattgatccttctactcgtacccgcggacctatagagagcacccgctagcctgccagcttctaaggggaataaacctatataaatcatttggcccaatcttctcaatatttacacaatttgccgcaactcgggatgattaacacaccatttatcccaatttcaattttttctgagatattttttcgagttttcaactcagtggattaaaaaaaaccctttcaacttaactagccttctttatttttctgctctaagttttgcctaaattggcctttcatgtttccagtctggctagcttttttttttgggctctaattttttcttaaatcgctc

SEQ ID NO: 88051 - DNA, 313 bp, Glycine max
ttttttctcaagctgtgagccttttctaacgataataactttttactcggatgcccggtcgagtcctgcaatatatatacacgctcgaaattgattgtcgaagctctgagccatatcaaacaacaataaccgtttactcggatgattgattgagtcccgttatataacgagacgctcgaaattgaatgttgatgctctgagccaattcaaacgacgataactttttactcggatgtctgattgagtcccgtaatatatcgagacgctcgtaattgaatgttgaacctacgagccaattcaaacgacaataact

SEQ ID NO: 88052 - DNA, 304 bp, Glycine max
tgctgcacctgctacaactccggtaaattcataaacaattgcttattaagtgaggctgttcaattcacattccctatcaattacttatcattgatatttttttaattatcctcaattaattatttttttaaagttagtcctaactcctaagtaattgtattcttagttgtctattcgcatataattgaggacaatttagaaaatttcaattaaaccaagttaatgagtaatgtgaattaataattctttgtctcaacagtctctgactatcatccttgtttatccttactggagattgtactaa

SEQ ID NO: 88053 - DNA, 329 bp, Glycine max
agcttgtcaccactgatctcactgagatttgctctgtccatggaagcatcattgtgttcctaaatgcctcttcacccttcaagttgttaccctcttcttccattatggactctcaccaaactataattcaattaattttcacagcagaactcttactctcaactcaaggcaaccccacttatcgtgcatatatatacataattcaactaaaaactcttcttatataaagatttagagaatagaaaagatttgatcttgaaatctctaatggtataatttgataagataaaagatataaagattatatcgtgacctttcccagacgtttt

SEQ ID NO: 88054 - DNA, 320 bp, Glycine max
ttattgccatgtatctaacttttttttgtttaatagcgattactgtctatattttgtacctacagcgcactaccccttctgcgagtgtaaacacatagccagaagtagattgtctataatcaagatcacctacaaaatctgaattgacatagcccatgacgataaatttggatccttcaaaacataatgcaacacctgaggttacattgatgtatctaaggatcctcttcacaacactacaatgcgttttaccaagatctaccatgaacctactaatcgctctaatggcttgtgcaacgtttggtcttatacaaataatg

SEQ ID NO: 88055 - DNA, 327 bp, Glycine max
agcttaaacattctatttccatcgtggccatatattacgggactcattcatacatccgagtaaaaagttattgttttttgaattggctcagaggttcaaaattcaatttcgaacgtctcgatatatttcgggactcaatcagacatccgagtaaaaagttattgtcttttgaattggctcagaggttcaacattcaatttcgagcgtcccgatatattacggcactgaatcggacatccgagtaaaaagttattgtcgtttgaatttggtctgagcttcaacattcaatttcgagcgtctcgatatattacgggactcaatcagaca

SEQ ID NO: 88056 - DNA, 329 bp, Glycine max
tgccgccatggagttttccgactatgctcttgtgtggtggaacaagctacaaaaggagagagcaagaaatgaagagccaatggttgatacatggacggagatgaaaaagatcatgaggaagcggtatgtgccggctagttactcaagggacttgaaattcaagctccaaaaactaacccaaggcaacaagggggttgaggagtatttcaaggaaatggatgtgctcatgattcaagcaaatattgaagaagatgaggaggtaactatggctcgatttcttaatggtttgactaatgatatccgtgatattgttgagctgcaggagtttg

SEQ ID NO: 88057 - DNA, 322 bp, Glycine max
  unsure (1)..(322): unsure at all n locations
agcttttctcaatgaaccttggacgcatagnttttgcgaacattaaaaatgaaacaaaaagaaaagagaattttgacctcgaaggtcggcatgttatgatcataggaagcataaatcattcatagagagcaaacatatcttttggaaacaagggactgacgctaagagtttattttctggaataaccgagataagaatggatggattcattgaactgatgaaaaaacataatttggaaatgttgggtctgtttgtgcagatccccaaccgtagtatcctaatgccataaactggacgcttgagtgcccacctagctatggcc

SEQ ID NO: 88058 - DNA, 335 bp, Glycine max
ttcttgcatgtgtgtcgcccacaatctggttttgtgtctactattattgtcatcatttttttttcgtcattgaggtgccacttgagctgccatgtctctccacctttgggcgtattctttgaaagatctgtgcccctttttgcacatgttctgttgttgcatcctatccggaaccatatcaaaattgtactgatactgcctaatgaaggcaaacattaggtcctttcaagagtggactcgagaaagttccaggttggtgtaccaggtaacagctaccccagtaagattttcttggaagaaatgtattagcaattcctcatctttgcgtatgcccc

SEQ ID NO: 88059 - DNA, 332 bp, Glycine max
gcccgcaagcttccttagcctttgtagtgtcctcaatagcctcctcaacctccttagtgccctctgcagcctaagcatgtgtatcctgggcctcaagagcctcacctccccccaaaaaggaaggttggactccgggccaagctaccagtgccagatactccttcatgctcataatcagctgttgttgagatagattctgcatactctgcatcaccaggcaaatgccatgatgaatactccacaccataggcacgagctggaatgggtgctacaggtgtaagagctggaactggtgcatcagaaggagcctgggccttggccttgtgggaccc

SEQ ID NO: 88060 - DNA, 296 bp, Glycine max
ttttgctcctctttggaatttgcatggatatgcatgtttttaacgctttctagcctgatactttgatggcatcaaatcaagatgaaatgagtgaccttattgctttttttttttccagcttaccgggaccattttaagagttgtaatgctaattttttagccttattatttacctgttttttatactaaaaccctaaccattgtccatgaagtgttctaatgtttcatttgtctttgattcatttgaaaaaaaaaatgttcatggcaacccttatctttttattgataatccccac

SEQ ID NO: 88061 - DNA, 329 bp, Glycine max
  unsure (1)..(329): unsure at all n locations
caagctngaaagcgttggttttgatgcgtcggcagcttggttataacttttttcactatcttctcggacagagtttccgaactctctgacgatgatgcttattacgcactactatagatctttgtttgtgagaggagtataaatttaaaaaaatgtgaaaggagcaaggagtgtgtatacaatgtacataagaatgggacataaagtgactgggacgtactaccgtgcgcacaaaatcaatgcatnaacttccacctatgatatggggaggaatcattaacacagaccatnatacagctttgctgttccgtaaatataagaataaccat

SEQ ID NO: 88062 - DNA, 331 bp, Glycine max
ttagtaggatagaaaatttggaacttggttgtggcttagtggtgtacaaagttttggtcacgactaattctccatctgtctttgctctgtctgtcaaattgcgtgtgactgtatcgtgtatgcgcgtctctctgtttgtttgtttaagcccttaaggttacagttggagagcaagttcaacacttttaagcttttctttccatcacattcaaacaccccatctcttctcatgcctttctgctaacatcaccaaatacagatctgaaacatacaaacaaaagaggtaagcttcatctttcatcttttgctttgcaccaccacccttttctgt

SEQ ID NO: 88063 - DNA, 304 bp, Glycine max
agcttgcaaagttgggtttagccccttagctagtggaagatggtacggtacctttgggatgaggtgattttgagtttatttgtgcatcctttgaggatgttcacaatgtttggatggtggaaacatagagcttgcatcgactacatcacatgtaatctttaacaacattttttgccttgcactaattaaaaatgttgctaaaatcgtttggcaagatttaaaaaatgttttcaaatagaaataaatgttactaatatgtttttccaatattttatcaagtgttgtgtatagcccatgttgctaa

SEQ ID NO: 88064 - DNA, 312 bp, Glycine max
tccgttgttatatttctagcgtctcgatacgctatgcgctgaattggacatgcgagtcaaaagttatggccatttgaatttctcgagaaaatacgttgttcaatttcgagcgtcttgatatgttatgcgcctgaatcggacatgcgagtgaaaagttatgaccattggaatttctcgaaaacattcgttgttcaatttcgagcgtctcgatatgttatgcccctgaattggacatgcgagtgaaaagttatgaccatttgaatttctcgagaaaatccgttgttcaatttctagcgtctcgatatgttatgc

SEQ ID NO: 88065 - DNA, 302 bp, Glycine max
gcttgagaaacccttaagaaaaagagttctacttgtgcattgagttttagacaaatgccaaaacttctatgagctggaaaacatcaaaaagaagaaagatatgatctttggagagaatgtgcacaagcacacaaatattatgatgaatttaaagtgagtaaacacaatctttgggtggaatgtgaaaaacacaagaaatttgtaagtttttctaaaagatgagcttctgaagcatcaagaacttaaacgtcaatcttaagatgttgtaaaacttcatgaggaaataaaaaccttaaatacta

SEQ ID NO: 88066 - DNA, 310 bp, Glycine max
tgcatgacaagttacgtgagttgttgttttaatgggtgtgagcttaaatgggccaacttattcgcttacccaactgtataatccaatggaacgattgttatattcattcttattttgtaaagttcattccctatattttttgtatttcttcataaacatgcctgtttttgttgtgacaaatgcaaaatcggaaacgtatatattttcactttattgtaaaattatacaaaagcacaagcacgctttcatttttgtattgtgaattggccttacgtttgagaaaatatatattgtttttatatttgtagtt

SEQ ID NO: 88067 - DNA, 306 bp, Glycine max
ccgcaagctttccaaagctttctggttttctaaaccttgaaaacttgtgctattcattcttttcatctcttctccctttgccaaaaagaattcgccaaggactaaccgcttgaattctttttgtgtctctcttctcccttttccaaaagaacgaaggactaatcgtctgaattcttttgtgtctcccttctcccttgtcaaagaattcaaaacgacacagtctgagaattcttttgattcttcccattcccttattcaaaagtgttcaaaggactaaccgcctgagaattcttttgtatccccatt

SEQ ID NO: 88068 - DNA, 315 bp, Glycine max
tgaatgttttctttatgccttggtttacctggtaaccaactggccatgaatcaaaaatctacacctgtcgccagactctgtggtttattctcttctgccgaccaccacacagacctttgcccttctgtgcaacaatttgaagcaattgaacagcctgaagcttatgctgcaaacatctacaacagacctcctcaacctcaacagctaaatcagccacaacagaacaattatgacctctccaacaacatgtacaatcccgggtggaggaatcatcccaaccttagatggtcgaatccttcacaacagtagcaacaa

SEQ ID NO: 88069 - DNA, 300 bp, Glycine max
agcttgtgactcttggttatttctttaaaactagtcacttaaaatgttgtgacttttgaaaaaatcttccgaaacaagtcacttgaagaattgtgacttttggaaatgtatttttcaaaatcagtcactggtaatcgattaccattaagatgtaattgattacacatcaacagatgtgactcttcattttgaattttgaaaattaaaacatttagaagctctagtaatcgattacaagtattgtgtaatcgattacacaagtttaaaatactttaaaactgtttaaacataagttgtaac

SEQ ID NO: 88070 - DNA, 316 bp, Glycine max
ttgatggtgttgagaagaaatcacatgtttgtcatcatcaaaaagggggagaatgtgaatgtatgtatacatgattttgatgatgtcaaaagaagaattaaacaaggctcagtttgcttcaagattaatacaagattgtttcaacaaacaaagtcttgattcaagatttcttcaagatcaagccttgcctcacaatgaaaggtttcaagtcattcaaggcacatgtaatcgattaccaatggtttgaaagtgtgtaatcgattacacatcatatgtaatcgattaccagagactctgaatgttgggaattcaaatt

SEQ ID NO: 88071 - DNA, 315 bp, Glycine max
tgcaagcttgcataataatcccaagttagacaagggttctcaacaaaggtatgacacacggaatcaaagcaacaaagggagtgattacgggggaaaacacacaagcgggtctatgaaagctaaacagaattcggaggctaaaagagtacttactaagaaaaggctacatgaaaatgtttctggtgtccccaacaacaatgcccaccactaataaggcatcaaatatggtggacgaagatcaccacataatactgaattcttgtagggatgactgtatacctagtgaatcaatacaaaagcagaatttggatgcta

SEQ ID NO: 88072 - DNA, 318 bp, Glycine max
ttgtaagctatattcaagccatatatcttatttgatgtgagactaaaccaccactcttgaggctgcaattaatgcagcccccaaagtggccccaactaagatgggctatgggtgaccacaatttaggcagctttccaaaaatctcttttatatatcaatttatgtttaatacctttttatcataaaatctatcattaaaattttaaaatctgttataattcttcaaatactattatttaattaatatatgacaatcttaatagcattatatttattataaattttaatattattctactataatataatattaaaata

SEQ ID NO: 88073 - DNA, 248 bp, Glycine max
  unsure (1)..(248): unsure at all n locations
ctctccgggagagggacggnttttaaagtacaaacaccaccccacaaaattcaattgtgggaatgtgtgaaaatgagtcccaagggtggtgtttgaatttctggatgaaccaacggttaacgaatctaagatcgtagttttaatggaacaagtttgggtgtatgcgaaaaaaaaaaaagaatattgggaggaaaagaagaaaaaacaaaatgggaagataaaaagcgaggaaaaatatatcgtaaata

SEQ ID NO: 88074 - DNA, 297 bp, Glycine max
ttgcggattttgtcttcgccagtgatatgatcgatgtgggtcccaaaagaggcaaatttgatcatcctactatgacgactgagaaaactggggcaaatgaagagggtgagaaagaaggagaaacccatgctgtgactgccattcctatatggccaagttttccaccaacccaacaatgtcattactcggccaataacaaaccttctccttacccaccacccatttatccacataggccatccctaaatcaaccacaaagcctgtctaccacacttcctatgacgaagaccacctttc

SEQ ID NO: 88075 - DNA, 249 bp, Glycine max
  unsure (1)..(249): unsure at all n locations
cagccttcaatttcaattttctccatctcgaaataataccggactcatccggacttccggggataaacctattgtcaattcaattttctcaaagcctcagaacaaaatgaagagcctcctgatataaaacgggactcatttagacatccgagtaaaaatttattgtcgctagaatatgatacgagcttccgttaatcatcaggaacatctagagataaagtgcgacanctctgccggcatccgaaaaaa

SEQ ID NO: 88076 - DNA, 302 bp, Glycine max
tcaacatcttaccactttcatggtactggaactacttcacatggacttgatggggcctatgcaagttgaaagccttggaggaaagaagtatgcctatgttgttgtggatgatttctccagatttacctgggtcaactttatcagagagaaatcagacacctttgaagtattcaaagagttgagtctaagacttcaaagagaaaaagactgtgtcatcaagagaattaggagtgaccatggcagagagtttgaaaacagcaagtttactgaattctgcacatctgaaggcatcactcatgagt

SEQ ID NO: 88077 - DNA, 226 bp, Glycine max
gagaaggacatttctttctctacaaacactatttcacaaatttcaattgtgggaaagtgtgaaaatgagttccaaggggggtgtttgaatttctggatgatccaacggttaacgaatctaagatcgtagttttaatggaacaagtttgggggtatgcgaaaaaaaaaaaagaatattgggaggaaaagaagaaaaaacaaatttggaagaaaaaaagcgtgtaaaa

SEQ ID NO: 88078 - DNA, 295 bp, Glycine max
cggtgggactcttttttgcgaaccttattatttgatccaaccaatttttgcttggtatcttcccacctgatatctttctacacaaaattccttacaatgcaatttatataccaaaatagaacgctgtacccttgccaatcccattaacacaaaccctccttattgtgtaatgctttcctataaaacagggatgtaatgtggggtcaaaaaatggaatggtctcaagcgcaatattggtaaatgcagaggggtatatttaacaaacacacataagcggtttgcaaaatttacatag

SEQ ID NO: 88079 - DNA, 364 bp, Glycine max
  unsure (1)..(364): unsure at all n locations
actcgacccggatcttattgaacctgcaagcctgcaagctngactcgggtgattcttggaggctggatctttgagctccattttggtccttcaatggtgattttacactatggagatgcagcggaaggcaaaggagaagaggagaggggaggcaccatccactagggaataagccaaggaagaaggagcttcaccaccaagaattgccttggataagaagcttgaagaggatgctttaatggaggaaaagaaagagagaagggggagcacgaaattgaaggaataaaagagggaaagaagtggaactttgaagtgtgtctcataatactttcattcatcaaagttacaacaagtgttacacatg

SEQ ID NO: 88080 - DNA, 328 bp, Glycine max
tgtaagtctccagacgacgagagtaattacctgcaaaatttttgaaaataatcagaatcggacgaccaacatcatccagataccgtcgaatttgttcacctcgattgatgaaaggagcggatgatcataaggtatctctgcctgccacctaacttgctgtccctggatgacaaaaggtgcggaagacgatgttattctctgtatgtcaacgggctcgtttgcccctggttaacgaaaggtgcggataaccatacagtatccccgcatgtcacctgacttcatgggtcaggatgacaaaaggtgcagaacacgatgttagtctctgcgc

SEQ ID NO: 88081 - DNA, 324 bp, Glycine max
  unsure (1)..(324): unsure at all n locations
agcttgtcagnaattattctttatcgcatacagcaggggaagggcgttcaacaccatgcatctgtgaggagtttctaagttcattatttatgcggggaactgcaaataaagagtgcacacaatgcaaccatcagaccatatatccatgaggcaatcaggaaaatccaaatatctaactgcaatcatgtcatgctcctttgtaactgaaacttttgcaatggttgtccgtttttaatagtacttggccatggggaatcagtttgaaaattctatatcagacttcaagcaaccgagcatatgaagcaaaagatatactgacattca

SEQ ID NO: 88082 - DNA, 336 bp, Glycine max
ttcttgcccgaagccccaacatccaatgtccttttctccaacaccttcatctcgccctcaagatccaaatgtacccattcagaccaacgtgaggcaataatcacagttacttaatcattaggttaggccacttaaccctacttagaggatggattacctagatggtaatcaataaacacaagcccaaggtccatagcccaacaagggtggtataaaaagggtaggacccccagataaaaaccttttttcattgaatgcacatttattattcggatttactactctaggttgaatccttacttgagcattggagttccttttgcatgtactccccct

SEQ ID NO: 88083 - DNA, 326 bp, Glycine max
agcttgaagaagttttgaagatgttttggcttttacatgcctaaattccttgagtggcatttgcattggttgttatcttggttgtttcatcttagtacattttgatatttgtattgcatcatgcatcaccatggtatatgtgaaaaaagtttctaagttagaaaagtttcttcataagcaaaaactctttattttaatcaattacagtctcactgtaatcgattacaacaagttgtctggagcttaaaaagttgagtttcgtatcgatttaatcgattatagtagtcttttaatcgattatgctgttgtttgagacaatgattgat

SEQ ID NO: 88084 - DNA, 332 bp, Glycine max
tttataagcgtcggtgccgagtgtatactgtttttcttccatgtttcagttatacatagcttgagtcttcttcacagatagggcatgcacgatgtcccttaacactgtatccaatcaaattcccgtatgttgcaaagtcattaatggtacaaaatagcattgtacgcaacttgaatgtttcatttcgatacccatcaaacacaacaaccccttcgtcccacaactttgttaagtcttcaatcaagtgagtgagataaacatcaatgtcatttcctggttgtcttgggcctaatatcatcatagacaacatcatgtattttcgcttcatgcac

SEQ ID NO: 88085 - DNA, 337 bp, Glycine max
agcttgtcaaaataatatttttattttttcagtaaacttcacactcatgtttacaaataagctctcattttataataacttacagaataaatgcttagttaacttgtttaccaaaacatgccaaagtctcaattaaaaaacctggaaaggaagctataaagaatttaaaaggtcagtcacctgtagtttagtaaaaagtcatataaagcatgtacattgttgatgccactaaaagccagcaaagatgctgggctattatcaacatcagagaatgaccttaatcgccaagtctgtgttatttcaaatagcaagccccaattaatataaattatacata

SEQ ID NO: 88086 - DNA, 335 bp, Glycine max
gtttaacctttggttctacactctatattcttgcaagcaaaagcttgtttgatgaatattgctaatttctgctaaagttaggctaaatttcctccatttagatgatcatcccatatccaactcattatgagtatacgttaaatgcccaaattgcagtcccattctgtgtcacttttataatgaacgcattctgtgtcacttttataatgaacgcattctgcctaatgtcaatacagtacaagagaatttatttgtttcataaacaaagaactggacgacaggtagaaaattatgattcaattcagaaatccattgcaagaaaattgccttgagat

SEQ ID NO: 88087 - DNA, 281 bp, Glycine max
  unsure (1)..(281): unsure at all n locations
ccatgggtccttaattaataaccctgttctatnngcgtacataccgtcatataaaaacggttaaccattattgcaggtgaatatttgggagttacggaacccattccacccaatgcaaacactagcggctcggacatacttaaaggggccaactatgcatctggagcagctggtattctcttgaagagcggcaagcacctggtattaatccagcaaattacattcatcttttgtttttttaaattacacataacatcattttttttttaaatgtctacatc

SEQ ID NO: 88088 - DNA, 313 bp, Glycine max
tttcaattcattttatgtacccgtggtggtccacatttcatttcatgtatttttattctcgttttcatttactttttatacccccttttgacgtgcttaagccaattatttaagtcatttctcgcttaatctaagaataaaataaatttccaccgatcgtttgaattgtatcatccattagttttggttaaaatgaattccgaccgttcggtcgtgccgtaaccacgttggaaatcaaaaaagaggtaaaataataatataataatcaaaaataccttttagtaaaataaaagcgaaagatcaatcagacgtt

SEQ ID NO: 88089 - DNA, 301 bp, Glycine max
agcttcttagtttcagtttatgcagatgggtttgtagctacctcatgcactcctctaatgactatggcatcatttctggcgctaaactgctgggagttggaggccatcttctcaattaaatttctggcttcagcaggagtcatgtctccaagggctccaccactggcagcatctatcatacttctctccatattactgagtccttcataaaaatattggagaagaagttgttctgaaatttgatggtgagggcaactggcacatagtttcttgaatctctcccagtactcatacaggctct

SEQ ID NO: 88090 - DNA, 311 bp, Glycine max
tcctattatttgagttctattttactttcatgatttatctttcaaattagacatctcccctgccggtttatctttctaacatttttcttctctagtcaacaaatcatccctgggcactaattgcctgcaccttacctgcatgtcattgatgagacatctccattgttgaactccatgtctttctattgtttcggatctctgttgcgcatttttctaccatgttgcaaactgtcttccagttgccatgtcctcctttcacaattttgaacaggatccctgacttgttctatactctggctgtctgcttcact

SEQ ID NO: 88091 - DNA, 302 bp, Glycine max
agcttctcaaggaggtgatcttaattatgaaaggggtgtgtgtagctaaactctaacttctcaaggaagctttctcaaaaaagtttctcaaggaagctacctaatctataaatagaagcatgtgtaacacttgttgtaactttgatgaatgacagtcttgtgagacacaagtcaaagttcaacttctctccctttttcttccttcaatttcatgctcccccctctctctttctctccctctttcttttcctccattgaagcatcctctccaagcttcttatccaaggctcatcttggtggtg

SEQ ID NO: 88092 - DNA, 319 bp, Glycine max
cttaaactttggttagaaatggcatcttctcattataaaatataaataccagtttaatttcattaaatacaataaatatgcgtttaaatttagctaaacatattcacaagattgattaccaaaatcaccaactctctatacaggacattctagtggtgatgacctaaaaaaaaattagaaaacactcagatccaaccttgcattacaaaaataacatggtctctttacacatcaaaccttctcaagaacacaaggtttgcttcctcagcatttccctcaacctactcaaagatattcatcctagttgagtcaagtcatt

SEQ ID NO: 88093 - DNA, 304 bp, Glycine max
agcttttggcaaggaatttagaagaagaagaagaagttcaaagagattcaaaagttgtaaaagagtatgtggaaaagttgtttgtaaaggttgttaaagattgtaatgaatatttctaaatgcaagtcaaggtcttgcttttatagactcttcaagtttggtcaagaaaaccattagaagagttataacctttaaaaaaaatgaaaaccattggaagagttacatcttttgatttttgttcaaaacttgtcactggtaatcgattaccaaatccttataatcgattacacaaagcatttttgtg

SEQ ID NO: 88094 - DNA, 316 bp, Glycine max
ctgagacttaattgctttgttcttcccataagcagtagtcagttgtgcactctcacccatctccattacaagcctttcttcttcctgaacacacatggtcattaattcattgatagaccatttatctttatgtgtgttgtaggaaatcttaaatggcccatattcatgcggaagggtgttcaaaatgaaatgcactatgaaggactcagacatatcaacctctagtttcttaagtggagctgaaatatctcgcattttcatgatgtactcacgcacacctttcacactggtgagccgaagagaagaaaacttcatg

SEQ ID NO: 88095 - DNA, 298 bp, Glycine max
  unsure (1)..(298): unsure at all n locations
aaacgattactctaatttggcaatcgaataccagtgattgtttctgaataaaatcaaaaaatgtaactcttcaaaagggttttgactttttctaattggatataagttccaccnnnnnnnatnnctnttntaaatggttgtcttgaccacacatgaagaacctatnnnaacaacgcttgtttcgcatntatcaacgatctaaaatacnnnnnnngnnnngctattactattcgttacaagccnngaatctctgtgaacttcctattgggannnaacaacttcttacccgtgccaaaag

SEQ ID NO: 88096 - DNA, 316 bp, Glycine max
  unsure (1)..(316): unsure at all n locations
tctcgccaatggtatttgaggtntattgataccattatttcctttatatttaaggaaaatactgtttatcagtgtatgtatctgaacgtcagtgggagtaaggttattttctaattctgtatattgatgatatcttgcttgcagcaaacgatcttggtcttcttcatgagactaagaaatttctctctagaaactttgaagtgaaagatatgggtgaggtaagttatgtgatagggatagaaatattccgcaatagatcacaaggattgttaggcttatctcagaaagtatatatatcgataaagtgttagagaga

SEQ ID NO: 88097 - DNA, 298 bp, Glycine max
acagaacctgacccatcttctgccctatgctgtactactttacttataattctgccaacaaaaatgtatatatgtgtgtgattttagcattgaacaaatcgtactgacacatcactatatggaaccaatcatgaatatcataccctcatgtaactctcgctgtccttttctgtcacctaccaataaagggcccgcaaccatcatatcatagttgcttaataattgaggtgaggatatcaatggtgatggcactatgctaatgatataaagaatgatatacagtactcactcttgaaag

SEQ ID NO: 88098 - DNA, 305 bp, Glycine max
ctcaagcctgttcaactgcccaaatctggtctcttcattatcgccatcttcactctctccggtttcttaaaaaggtaccataataaacaagaaattgtcatgatcatcccaatcaattttcctgtaacacagttaataatttcaatttactagaataattgaattaaactcaattgctctgtacatgaaaattaactggcaaagtaaacgccttatcgtgtgtgtatgtcactatgtgtgttgcgtgagatttctgcacatataaacagcgtttacacatataaaaaccgttatctaataatgga

SEQ ID NO: 88099 - DNA, 303 bp, Glycine max
tatcccatgcctccctagcgtatgtttcataagaaattttctcaaactcatcatcacctaatgcttgatagatgaggaagaaagctttcttgtctctctttcttgaatcctttaaagtctccttttgtgcttgggatagtgaagtctcatcttgcggctccttataacctttttcaaccatttttcaaacatcatgtgctccaagaaggaccttcatttcgatgctctaattgtcataggcgctcccctttagaaatgaaacttggaaggatgccgctcaattgcttgccataactatagagg

SEQ ID NO: 88100 - DNA, 328 bp, Glycine max
  unsure (1)..(328): unsure at all n locations
agctnggattgattgagcatataattcaaaaagaacctgacccatcccctcccctctcctctactacttttctaataattctgccaacaaaaatttatatatgtatgtgattttagcattgaacaaatcatactgacacatcactatatggaaccaatcatgaatatcataccctcatataactctgtttttccttttctgtttcctaccaataaagggcccgcaaccatcatatcatagttgcttaataattgatgtgaggttatcaattttttttttactataatattgatataaatattgatataatgtagtctcttttgaaagt

SEQ ID NO: 88101 - DNA, 331 bp, Glycine max
cttaccttgaatgataattatatcctttgttccctttttgagctgaatgatattgtcaaaaatttgaaccttgaacttaaataattatctccagatacctcgtttatattcaaggagagcatatagttaaaggcaaatttaccccaaatttggtggagtggaactaattgggatgcaaagaaagagataaagcatcaacacacacaacacataagttgcctattaaaaaaaataaaaaataaaagaaaagtgtgctgatgtaacaaggtcaaaagcaaatgaaagtgaaaagctagtgagcaagccaattgtattaaaaagaccattggga

SEQ ID NO: 88102 - DNA, 291 bp, Glycine max
gaaaccgaattttgatgagctagataaagcacgagaacacaccccaatgggggcaaggaaactgggattcaaaaacaacccagcctgccccgaccccgaagccggagcagggggagggccccaatctgaagtatcatccaagacagcccctccacaagaagaaaacggagggccccaagtaagaggcaacgacggcgatagcaggaaccacgcaccccctggtgagggagcctcaacaaacaaaaacggggacgtgctacacaaaatgagcaacgaaagacgcaaaagcac

SEQ ID NO: 88103 - DNA, 290 bp, Glycine max
gctcaatttttaaggactgatgccatgtttgaccctccatctccaatttaatggcacgtgcagtggaagatggcccgcatgaaaaaaacaatcctgacgacgtctgatgcaggaaaggaaaatgctaagaagaatgtcagacactttcaattaacaatggtaagtgtcgaaacataccattatgcgggagggcgacgcacggatcacgagtgtgtcttacaataaaggaaaatgagtggagtaaccaacaatgttgattcgaagaaaacgtccggaaaacaaataagggg

SEQ ID NO: 88104 - DNA, 324 bp, Glycine max
agcttgagatgatgtattttttataggtgaaacttcctgcttttattgttgaccacagagtggtacctggagatatgtcgcgggggtcaagagaccttggggacgtcaggtggggtgctattgcccaaaaccaagcttgaccaatcccgacccaacccgggcatagtcggtcagtgagaacatgtgacgtacctaagcaggcgagctcctggcagtcaacagataaaaggaaaacaagaccacagagcaaggaggcttgtggtggctggccagctgtgaattttgtgtaatatgtggattgtggcctctggtaatcgattacca

SEQ ID NO: 88105 - DNA, 333 bp, Glycine max
ttgaactacttatactacattcttatttttgattccttacccacgtgttaaagctttgatggattaccctaacttaaaaagcataccaacccactgaaagaatagttccctacaggagtgctgcttccctatagaggagtgcggtacagggagcatggctaagtgcacatgagagaggttatttttgttcttccgggtgccataacaacaataatcttggtatattttactccaaaacacaaggttgtttttaaaattattctgttattccttttcaaagtagttttatatttaaatgttctttgtgctgtatataaaaactgaaaatcagag

SEQ ID NO: 88106 - DNA, 324 bp, Glycine max
agcttggagatgaggcttcaatggagaaaaagaaagagggatagatttagagaggggggagcacgaaattgaaggaagaaaaagggagagaagttgaactttgagttatgtctcacaagactctcattcatcaaagttacaacaactgttacacatgcttctatttatagactaggtagcttccttgagaagctttcttgagaaaacttccttgagaagcttctttgagaaaacttcctgaagaagcttgagcttagctacacacacctctctcataactaagctcaccttcttgagaaacttccttgagaagattcctaaaga

SEQ ID NO: 88107 - DNA, 332 bp, Glycine max
tcttaaaagggtttgaaatttgaattttgaatatgtaatcgattaccattgatgtgtaatggtaatcgattaccagcaacaaaactcttgaaattcaacttgaaaagtcatgaaccttcaaaatataattgtgtaatcgattaccagaaacctgtattgattatcagtgaagaatttcaaaaaaagctttttgaaaagacacatttcttcaaaccatttttgaaaaaggcacgaagggcctatatatatgtgtctgacttcaaaaagtaagagagagatattctaagagaacttcgttgtcaaatgctctctcaacaactcttgggcaaata

SEQ ID NO: 88108 - DNA, 276 bp, Glycine max
ttgaaaaggtaattggacctagactacactatgaacatggatagcataaatatttatatttgagcgggcgttggattcatgagttccaaacttgatgaaccaatccaaccaatattatacattatgcgtcctatgtgtgtcctagttgacccaaacattatatttcctcagagtctaaaactgtccaagactcaagctgtcgttgtcatgctcatatgatcttcaccctattaacaccatccaccccaccactggttgatcacccacctttttttt

SEQ ID NO: 88109 - DNA, 298 bp, Glycine max
cctggcccagctttgtccccggctgctggacaacataatcgatatgccctctgcctaccaaagttgatcatacattaggaagagaaacgaggctctcagtgtttctggcccgctcaattttggtccactcccaagagtaacagcccctctttactcgaaagttatactgtcctgtttcctaccaataacaggcccagacactttttctaattaatgaccgataaaagtagagaagatatcaactagttcgggacaattattgtgacatgacaaatgactataagatctcgctattgaa

SEQ ID NO: 88110 - DNA, 313 bp, Glycine max
tggcgttttaacaaagttgccatatgtttaaggatagctagcctatatgctcaacttttaagcagatgaaaaataatggccaaacaatgcatacaaaaaaaacaaatcagatgatgacaattacatctatggtgatttgaagaatatatggaatctcccaaccaaatgccagtttagaagttaggaaatgatagatttaaagataatatcttatgtttttacgattattttttctttttaattataaaaatttcactttatttcattttatttcctgattttaaagttttgtctggtagaagaaataatgaaa

SEQ ID NO: 88111 - DNA, 302 bp, Glycine max
  unsure (1)..(302): unsure at all n locations
agcttttaaggctgtattctttgtaattttcctgtccttctcttttaatatatagnatatagatttatattaaataaaataacaaatgatttaaaaaagaaaaaaaaagtcaaaatacattaatttgtttcaatttttttccataaactaggtgaaccaattcgaaactaaaacatgtatgtaccgttgtgtaaagctaataaacatgtcctagtcagtcccacgaaaatttcatgacaactatttagaaataggactgactcatattattaatattaatatttaatattaaatatataaat

SEQ ID NO: 88112 - DNA, 313 bp, Glycine max
taatgtaatcttgacacacctaaagattgagggttcgactgctatttacgatgtctaactctctagctaggacactggtcacatcaagggtttcctattcaagctccaactactaagctaactctaatggttgaaactaaactcacaacaagattcttaagaattctacccatctcttgtacctcgaattcaactcctaaggttcccacaatatatcaaactaacgataatgcctccaaaacatgaaggtgaacaccatggctaccaactctagatcatacgtaggataaatcctttcatgagtcttgagttg

SEQ ID NO: 88113 - DNA, 316 bp, Glycine max
  unsure (1)..(316): unsure at all n locations
actggagcattcattttatatgtnccatcttggggggagtgttagaactaatgtcttttgggattttgcatatgtacttatatatttctttatgcttgtactgtctgttcttttcttttcgtgcagtctgcaacctttcttgtcttgtactcatgaccatgtgtctatatatatatatatatatatatacaagtcttttggctgagtgataaacactcaagctttaccaaaatacctagagttctaaaatctgaagtgtgaccatttagtaactttcttacagaaacaaggaccttccatgaatttcagatttgtc

SEQ ID NO: 88114 - DNA, 303 bp, Glycine max
agcttcaaagtattaatttgtatcttgagactgaagagccatgctcattaaacaaatatgtgcaatttcttaattgttaagatataatatggaattgaataataaaaatgactattgttttctatattttttaaattaacgatattactacttaattacacttattttaataactagcacttggattcttttttatgaactgtaaaattgtcaaattaaaggtaaactcttgctttacagattactttatatacactgtcgatataaaatatttttatccaaatatgtaaaattatcaaattt

SEQ ID NO: 88115 - DNA, 319 bp, Glycine max
taaccattcatacccttaccattattgtctaaaagtaaaaaattgttaacaataaagctccctaaccctttcatttaaatcatgcccgggatcactcatataaccatctctgtcccctgatggcatagtccacatagacttcataaatggttccgagtatttcctcaaaagtgttttaccaaaggtaggtggctttgcaaccccgctatatttagacgacccatttcctcctccaaatttcctttcagcatgggatttgagcgctaaaacacaattcactatccttgaagactttcctccctgtaaatacaacacatgg

SEQ ID NO: 88116 - DNA, 286 bp, Glycine max
  unsure (1)..(286): unsure at all n locations
tgccagcttggtcagacgcaatttttcaaaagcattaagggtgcagtctgataatgctaaagaattagccttgactaattttttgcagaatgcaagagtagttcaccagtttttttgcccacacagaccccaacaaaattcngtagtagagaggcgccatcaacacctattgaatgtagcatgtgctttaatgtttcaagctcagttgccaatttatttttggggagagtgaggatccatgaaagcttacatcatcaatagaacaccaagctctaatctgcggaac

SEQ ID NO: 88117 - DNA, 304 bp, Glycine max
tgtacggccctccgctctaacatctaatccatgaaaggaaggggaaagtgatccatccctgttgccttgttaaaatttttataatctatgtacattctccatccggtcattgttgttgtgcgaattaattcatttttctcattcttaacaattgtcatgccacccttcttcatatccacttgcactcaactaacccatgcactatccaaaattgggtaggtcattctagcttctagaagtttcaaaacctctttccttaccccttccttcatcacaagattcaatcttctttacgattgagcca

SEQ ID NO: 88118 - DNA, 299 bp, Glycine max
ctcatgattatataagattgattcaaataagttctgatgattaaaaaggggatgacaaaaagctcaaagggtaagaacactccatgattacaagatgatgatctccaagaatggattcaagatgttcaaaattgattcaagaacacttcaaggtccaagacgaaatttgatttcaagaatcaagtttcaagattcaagttccaagaatcaagatcaaaattccagactcatgattcaataatcaagagaagacttaatcaaaaatagtatgaaaaagtttttccaaaaactgagtagca

SEQ ID NO: 88119 - DNA, 276 bp, Glycine max
agcttcaaaccacagctttttcaaaaactaggtgtgcaaaacccctcaatttaatggattttcaaggtttgagaagtgaaattgagaatgagggtaatttgaagcaaactctcaccttacacaagtctattaacatcatttatacttgttcaaactggattgacacctaaaatttcaccgaatcaaaatttgactcctcagcacccaaatgtaccctagaaatggctgtttgctcactttggtcatttgattttctctctaacacaacccaacctt

SEQ ID NO: 88120 - DNA, 304 bp, Glycine max
ctgcatatcttgttaaaaggtgtcagttatttttatacgattagacatagacaattgtagacaatagctctggattgtatggtatgccctcactgctttctcatttatacatagtcaagataattacaacaacaactctagatacaatcaaaatgctagaagcaaggatcactacaaaagcttgagatatctcaaataaactgagatccacctgcacctgcactttcccaattgttcctggacagcaaagcatgctcaagctctacctccacttgaacaattgttgcttgcacatttggttcat

SEQ ID NO: 88121 - DNA, 299 bp, Glycine max
  unsure (1)..(299): unsure at all n locations
gaanagaaaaaacacgattatcaaanncgaaaacagntccgtaattcttccgtaacttttccgtaaaatacgaaaagaggggtgaacttagtaattcggtgcgcttagaaatcttcttcattaagtctttgggcggcaagcacctccctttttttctataaataggggaggggggagctgtttcaaaatgttcaagacccctttgggtatgcgtttcggctattttgggcaaaaacacgttttcgtgaagaaaaatcaagtcgaagtacttccgtaacgcttccgtaagcgattctgtg

SEQ ID NO: 88122 - DNA, 327 bp, Glycine max
ccccgcaatcctctataaataggggtagaagtgaagtgaaaaatggttcagccccgtaggcacttctctctctttcgaatttgcttggaaaaattgtttccgtgaagaaaatccaagccgaggcgcttccgaaacgtttccgtaacgtttccgtgaggaatttcgtgaaggtttcgaccgttcttcgacgttcttcattcgttcttcatcgttcttcgatctttaacgggtaagtacctcgaaccaagcttttcaattcattctatgtacccgtggtggtccacatttgggttcatgtatttttattctcgtttcatttactttttt

SEQ ID NO: 88123 - DNA, 317 bp, Glycine max
cacaatttactttctctcaaactaaagtttataataccaattactaagtcctttttaactagacaattgaggtggtgcatgtttacatgtgcatccctacgaagcaatagtcaaaaatcatcaatcttattttccaagcaactaagctcatgaaatgatgcatgttcaatattaagcatgtagatattacctatttttctacctatgtgaacaacctcactagtttttgcttcacaaatgagacaacaattcttgttgaatgcaattttgaagcctttgtcacatagttgacttatgctcaaaagattgtgcttaag

SEQ ID NO: 88124 - DNA, 295 bp, Glycine max
gtgcttcctgtttagttttcaccctggtgtatgctccttttttatattgtggagactgatacgaggcgatgtcctttctaaggatggccatggggcaaggtgcttactaaccataaatgcgccttgtataaaatgcgcggttagaatgtttcattggacgtatactcagagagagagagatagagttggcgagagcatgggacctcgattttgaaggatgaaaagggggaaagaattcgaactttgaattgtgtctcacatgactctcattcatcaataatacaacatgtgaggc

SEQ ID NO: 88125 - DNA, 290 bp, Glycine max
  unsure (1)..(290): unsure at all n locations
ttcccatcacatgaggnactangnggctttcgggcgatggcgcacaacaaagtttcacatccacaaagcgtgcataaacccaccataccctgttgcccacctccaactgagctcacgtacttgcacgtagcccatatcctcgtttctatcaacaccgggtccccatcaatcctcccaagcttcctcaacatccaagtaattgcacaatcaaacagcacacaccatcacagcccagaaaacagggcataggcagaaaactctgctcgaaacaccaaccaaaatcacaggtt

SEQ ID NO: 88126 - DNA, 289 bp, Glycine max
tttcatgggtacctgacgaattatggtttatgtgtactcaactagtttggggttagtgttacttgaccaattttggtttatggttatttgacatattacggtcacttgactaattacggtttatggttatttgacaaattagggttacttgactaattatgatttatgcgtggataacttattagggttatgaatacttgacttattatgggtgagttttacttgaacaaaaatggatttgggttattttaaaaatctcggtttatggttgcatgactaaatatggttt

SEQ ID NO: 88127 - DNA, 329 bp, Glycine max
  unsure (1)..(329): unsure at all n locations
gcttgntttgcatttcacaataaattcaatcaatcattctacatatctatcttttccaattcattctttacacaagcaatttttccacattgatttctgagtctctttgaacttcttcttcttccttgtgccaaaaagttttccaaagttttctggttttccaaaccttgaaaacttgtgctattcatctttttcattctcttctccctttgccaaaaagaattcgccaaggactaatcgcctgaattctttttgtgtctctcttctcctttttccaaaagaacaaaggactaaccgcctgaattcttttgtgtctcctttctcccttg

SEQ ID NO: 88128 - DNA, 332 bp, Glycine max
cttgcttatggagtttctatggaggctggatctttgagattcaatgatgtccttcaatgctgatttttcaccatggagatgcagcggaaggcaaaggagaagaggagaggggaggcaccatccactatggaataagccatggaagaaggagcttcaccaccatgaatgtacctcatataagaagcttgaagaggatggtttaatggaggaaaagaaagagagaaggggggagcacagaattgaaggaataaaagagggagagaagtggaactttgaagtgtgtctcataaaactttcattcatcaaagttacaacaagtgttacacatgctt

SEQ ID NO: 88129 - DNA, 268 bp, Glycine max
agcttttaaggatttacttatttgttttgctatcaatgttcatggtacttaaaataattgaagttaataacatgaagaaaaccaaaatacatggatgacttcattaaacaaatagagtgaagaaaaataatagaatatgataccttaaaagttggctctgctgttgaattgcaatcaatatatagagacttttcctttgtcaggtcgcaacaagcttggctttccaagttcaacttgcacttgtgtagctaacaaatatatcatggtt

SEQ ID NO: 88130 - DNA, 290 bp, Glycine max
agcttttagccaaatttacttaccttgaattaattcctttgatagcccctttgagcctatgttcccctttctttgttttgaagctcattacaagccttaagtgaaaaaccatgatatcaccttacccttaaggaattttggagctttggaattgttttgggaataagtgtgtgtgtgtggggggggggggaaacaacccacttttttttgcttcacaaatgaacatctcttttgtagaatgcatttataaacctatgatgcacatttgccttttcccaaagaatgtgctt

SEQ ID NO: 88131 - DNA, 312 bp, Glycine max
tcaccatcaccatatccaacacaccccataacattcaacaccttcgatctgcactttcttcttctactactcctaatcattcaaatccatcttgctgagttagtacccttcaactctacccatcactccaacaaagacaacgactcacaaaaggctcctctcactgacctattgaaacttggctatgcatcactcacccttgagcctccttttcgctccttgatatcacagatcacagaagaagacggtcaccctccactttgcataatatctgacatgttccttggttgggttaacaatgttgcaaagagc

SEQ ID NO: 88132 - DNA, 300 bp, Glycine max
agcttgtaagtgtgatatgggttctatttcttgatttttatttttatgtcaggggctttgaatgatttaaattgtcgtttgattgcagctgtagatattttaccattttttatatagaaaatattcaacatacatttgtgaggaaaaagatatgcactctagtcacaccagaaaactaattttacttttaattttctacagtatatatactaattaacatttttaatttattaatctctatatttactttctcttctatcgtactttaatcttatttttttcttctatattgttttacat

SEQ ID NO: 88133 - DNA, 317 bp, Glycine max
gcttgacccttttgatgatgcatcttcttctttcttaatcattcttgacaccatttcattgaaatgcatatccacttgcaattccaaggtattaatcactctcaccaacaaaggtttgaagaccatcaaacctttccataatcttctaaagaagagatgaatcttctccttcatgtccttcttcaccaacatttctagcacccttcttcacccaagagccatcatgctcctttttataaccaaaggatgctatgaatgaagcgcctataaggaatgatctcttgattggaacataaggttcacaatcaagagggatg

SEQ ID NO: 88134 - DNA, 304 bp, Glycine max
agcttctacaagctgttaggttgatgtaaatatctgatcttggtttgcttgtcatcaagagacaccactagataacatattagacacattatgagatgcacaaaaatcttcattatccttataattaaagggtttagaaataattcacctccacaattgtgccatcttctaaatattgtgcagttgaggaaaattctagtatgtaatcacacacagatagaagacaattcatttctcttctccacatagccttcttctcaggcttcagaagctccaactttaaattttgtccaacaacaattgc

SEQ ID NO: 88135 - DNA, 317 bp, Glycine max
ttgattttggttccccactaacaaatcagaggaaagcctttattgttcttgtctttttcttttgcagctgccactagtgtgctactgatctccggtcaccaacaggttagctaaaacaagatctgtaatcaatttcagatgttgtcttcaactttggttctaatccctgtgaatatcagcttatgttttatgttgggggtttcgatttgaactcaagggtatctgttcttatcgcacatccaacgttgaagcttgttatgataattactagttagtgccttcgcttatttcctatctgcggattatgagctttattt

SEQ ID NO: 88136 - DNA, 307 bp, Glycine max
  unsure (1)..(307): unsure at all n locations
gcaagcttgancttggacttttggtggcataccctgaattgcatctaatgctaagtgaagctggccaactcgaccgagaagatcgatcaaacaggtacaatgttctactgtaggagctatttcaaaatccttttgcatacttttgaagtacttcagtcgctcttctaccaatccagaatggctacaggccagcaaaacactagtgtaaacaatggcatctggcaatggcattatcccttctgcagtagtcattttgtgaaagaggctgatagcctcattccccatcccatggattgcataactattt

SEQ ID NO: 88137 - DNA, 314 bp, Glycine max
tatgatacttgttaatgttttcttactaattgtggttatttgattttttttattaatttcttttataataaactcattcctcgcaatttttgtaccgtgtggttggtacttgtgatgatcgcaaactcttgttcgtgggagcagaatgactacagtagagtacgagaagtgagattctttcgtggagctgccgagccgacatgatgacgttgggattattttgggagagagttgtgttttgttaatcaactcctccatagctagttctataattcttttgttgaattgaggatgtaaatcacaaatttattttc

SEQ ID NO: 88138 - DNA, 285 bp, Glycine max
  unsure (1)..(285): unsure at all n locations
agctttgtacatgggagtttctaatcctattaagttcatatgtatcttggtttaaagctaattattttatctgtaactcttatgttgatcacaaaaaccggntggaccattaactatgtcttaacttanggtaagcattggaacattggttttggtggacagtacaaccttggctcaactaatagactgtataatggggtggacgactacnaccagagaggacccacttactttngggatgactattttccgggtgcttcaatagagaagctgaatttggcggct

SEQ ID NO: 88139 - DNA, 250 bp, Glycine max
ggctagaaacaagcccttggaggtttaaaaccccaagggcaaggcaagaactcttctttaagaacttaacattttatcttctcttaactaaaccccacaactagaacagaagaaaatggccatctctctccctcagcatccacgacacactcaatgttttatttcctttgttctctcataaactatatttttaggaactttgccttaagttgtagactattaggctttaagaggttttaaaagtgagttg

SEQ ID NO: 88140 - DNA, 267 bp, Glycine max
tgttatcaacttaaataaagagtttttccttctaaagaaacttttctaacataggaatttttcttctcacttactcatgatgatgcatgatgcatgaaagatatgatacgaactaatatgcaacatccaatataacaatcaataaatgccactcaagggagttgggcatgtaaaagacaaaacatcttcaagctttagtttacatgttgttcatgttgctccccctatctctaacacttagggaatagataactcaccccttatacc

SEQ ID NO: 88141 - DNA, 243 bp, Glycine max
atttttattagtacaccattttctaacttcatgtgatccgcctgacttgacactaatgatgatcacatactcatgatcttcatgatcacattgaatgctgatggtgccgatatatgacacactttagatgttctgcctttcacagttggaaaacttggcaatattcagggagagagacgtgacttatatatcaaaaattcgatacataggtctataattctgttgatgaaccgaagaagttaa

SEQ ID NO: 88142 - DNA, 261 bp, Glycine max
ctcgctaagccaatctactggcttagcgagcatccgcttagcgcaacactcctgtgctaagcacgaggaagaatccagaaaaagatgagctgttcaggttcgctaagcgcaccgctttatctctctaagtgcaccgcttcagttcatccgctaagcgagaaaggcactaaaccaaaaatcattaacgtgcgttaagcggtccatacgtgcactaagcgcacgagcacgaacaaggccacctatttaagcctgaaatcatat

SEQ ID NO: 88143 - DNA, 320 bp, Glycine max
  unsure (1)..(320): unsure at all n locations
aaaaaacagggtgattgtagaggcaaaactttgcctttgatgttttgacgatgccatatgatcattgatgtttgatgtcttatgaaaatgcgcttctcaagtttaatttcangacaaaaattcaagaatacaagatacaacatcaagaagatctctagtgttttaggaagggaattccaaattgaaacaacaaaagggttggctaagaaatttaagctaaaatgtctttntcaaaagatttactctctagtaatcgattaccagtggccaaaatgatttataacagttattagaaatttgattcaaattntacactgtgt

SEQ ID NO: 88144 - DNA, 383 bp, Glycine max
  unsure (1)..(383): unsure at all n locations
attacgagccgcagctgggacctactacagcaatttgtcattgaaaaacctaacccaattttggaagtttactctggagagccttacattcaaatgaaaggcatcacaaaacatgaaaggttgtgtgatcctcatgcttncacaaaccctttcaatccgttctttgactgagaccccaaaaatgaacactgagcatgtttcaaagcatttggacaaactcattggtagaaaatgtttgcaacacccaagccttctaaggtctggctgctttctgttacacatttgtacatctagaaacagtaatttatgaatcaatatgatatagtacatatttgattctgtagaattgcaaaccacctaattatcaattatatttcattatt

SEQ ID NO: 88145 - DNA, 346 bp, Glycine max
  unsure (1)..(346): unsure at all n locations
cttaataatttaatttacgggtggaataaatgggtaaactgataaaggataattctcgccacctaagataagagactngcttgtgaatcaagggaacaatgcattttaattctaatattttctagttcaattttactcgttgtgtaagttacaaaagcanacaccccccccccccaatttgttgccatttcctactatctgttatgaacatatgatttatcattgctcattgggaaacgacctacgatcacttcctagttactacantttaatggttatttgattcgggtatggtctcgatcaatcatggcatagcaaaaagcanaatagtgttgcattatgaact

SEQ ID NO: 88146 - DNA, 371 bp, Glycine max
taaaatgttggtataagtagtctatataacaagtatagacccttttacctcggttgtttatccctaataaaatgtgaaatgatattatttctaaggtttaatgacgaacacctattagctatccttattgataaagtttttctttctattttcacaattgcgtgtcattaataattaaacagttcccctcccaataccatttttggctaaggttgaacttatcattattaatcaaacagttccttccctaataccctctttaattgaggtttacttatcataattcactaaatagctcatcccaaattccttcttcgaccatgtgtgaacttaacattattaattaaacagttccttccacataccttttt

SEQ ID NO: 88147 - DNA, 441 bp, Glycine max
gaatcaagatcaagattcaagattccagactcaagatttcttgatattacttattcaatattagtatgaaaatgatttttcaaaaactgaatagcacatgaacttttcacaaaacaatgttaccaaacggtttttactcttctggaaatcgattacgcaaatttgctgtcattcgattaccacctgcaaaactgttttgaaaaagatttcatattgaatttacaacactgcgattaatttcaaaaagttgtaatcgattaccatgtgttggtaatccattaccaccgcccttgaacatttgaattcacattcaaatgtgaagagtacatcctttcacataaaagcctcgtgtaatcattacactgattcggaatcgataccacgatcgttatgaaatatacaaatgaactttcacaaggtctgacttttcaaatggtttaa

SEQ ID NO: 88148 - DNA, 426 bp, Glycine max
  unsure (1)..(426): unsure at all n locations
agcttttggacaaagaagaagaagaagttcttagagattcanggcttgaaaaagattgatagaataagtggtaaagtgtattgaaaagcaaatcaaagccttggctttatagactcttcatgtctggccgaaaagaccatttagaagagtataacttttagaacaacttaaaaccaatttgaaaaagtaaaaacctttntgaagagttacatcttttgatttatcagaaacagtcactggtaatcgattaccaaataagtgtaatcgattacacaaagcttttatgtgaaaggatgtgactcttcacanttgaatttgaatttcaaacgtcaaaggcactggtaatcgattaccaaaacattgttatcgattacaacatnttgaaataattggaaccgtgaaaatcaatttgaaaacttttcatac

SEQ ID NO: 88149 - DNA, 393 bp, Glycine max
acctaagggaaaaaagcaataagcgccaagtttgtattctttaacaacgtggataaggcgagtaagggggtgcaaaataaagcaagattaattgccaaaggctactctcaacatgaagagataaactatacaaaaacctttgctctcgtatctcgtctagaggcaatacgcattatactttcatttgcagctcatactaaaatgagactatgtcaaatggactatgattggatccctactatatctaactgcgttcaaactatacatacttgttagtgttggactatgtactaaatttcaaccagaccccagggaagttcacgtcattattgcgaaaagaatattcatatattgaattgaaacttttaatcttggtctttactcaactataac

SEQ ID NO: 88150 - DNA, 424 bp, Glycine max
gaacatcgaaactaagcttaaagtcctctcatcatactttaactttgagagcctttctttttcttgcgtgagaatacttagccctccatgataacctacgatgacaccattaccgatgcccctaaactccttgtcttttctcaacgaacttctccacgccttgtggactctttgtatcgccttgagacattgtgcgcctagatatctcaccaggataggcgaaagacattcttcggttggcgctcccctcatggggtaccctagtcgtcttatggcgagtgcgggattataattaatacacaccctcatgggggaccctagttggcccactacgcccgtctgagtttgcttcgtgcgatacaactcctttgctgaatctccaatcatagctacaatcttgctcaacgaaagaagaaagctggag

SEQ ID NO: 88151 - DNA, 346 bp, Glycine max
tgatgaaagaggccattctgaatcatttaatgcatgtcccttcttcatacaaaaagttcattcttatacgctatggtgctgagtacttcaacaaagagacctttcacatttgttaaagcaggtctcacatcgcaacacatcttctgaccatgatcaacactttcaaatattgaacttcatttattttttatacgactccgatatatcttaagagaatggtgttgcaaattaaatatcacatatagagaaatcaatgatcttcttatatgctcctcgaaaatgtcttaccagatcataacttatatatatcgtcgtatggagtatctgatgcacaatactaagatat

SEQ ID NO: 88152 - DNA, 422 bp, Glycine max
  unsure (1)..(422): unsure at all n locations
agcttgttgacagaactttgacagtatgcctttaatgctgngtagngatctgctgtcatgtatctgtactatgttttgacgaatgcatttccaaattcagtgtattgactatcatctacagtgcaccatacaataaccaaatttctactatgctatctgataaagatgattccatttttgaataatttcattcacaagtggaataatatagctataatatgatcccaatatctntgctctttcggcttgtatttgttttatatcgatttgctggttcggtcctgacacagcagtaaaatcctgccttggtgaccacatggtcatgggttcaaatccgaaaatggccctttgcatatgcacgattacgctgtgtaaaatgacctccttcactccttcagataccctaggttcgtatgtttact

SEQ ID NO: 88153 - DNA, 438 bp, Glycine max
  unsure (1)..(438): unsure at all n locations
agctntacatcaaatattagtaatgatccacttacctagaattaaaagaacttaatgtctgagtgtaactgaaattgtggcaaccaaaagtcacccccaacagccatcaagtcagccaccatttggtctcccaaaaggctgatgcctatggttccaattgggcccttattacaacttgaactaaacctaactaaagtccttctagttgattaacccaaaacatattgttggtcagccaactttacaaggattgggccattatttatacaaactaaacactctaaaattgagacaaagtggtgccatttaatcctccttcatttgggccatgatacaactcacaacctnggacttttctccttgaaacttacgcttgtattcaaatagtatggacaacacttgttgaagagcttccttggctttccttgctctaaccct

SEQ ID NO: 88154 - DNA, 433 bp, Glycine max
agcttgcagagtaatgtcttgtattggtttaattgattacaaccttatcataatcgattacatagttggttttgagacaatgattgatttgttcacggagtcttgttttaatcgattaccatgtagtataatcgattacttctctttctataagtgttttagaagtgaacaagaacactctaatcgattactctgagtatgtaattgattacattgttcttcacttgtttccagaatttggaaagaacactctaattcattaaaaagataatctaatcaattacttcattgaattaatcgattaccttgtcgatttaattgattacagatgattacaatcgtgttctctataaataatcagcttgtgttctctttctaacaatctcagaaaaacaatgaaataagcttttgatgagctaagatcatgtgctgt

SEQ ID NO: 88155 - DNA, 458 bp, Glycine max
  unsure (1)..(458): unsure at all n locations
acactatgaaactcaagctgacaacctcaactctcgcacctatcgtggttgtctcttgttacactaccgcaataactcctacaaacaaggaactgaagctcccatccaactctataaatactaggttctatttcacctttttcaatctcattcacaactcattcacatatttacttgagtgtcggagacatttgttttgtaagtccctcctattgtcctcctaacaaaggatacctacagccagacatgtgaaatcgnggagattatacaggctacttctatcctgacgatagtcagttgcagaatttggtaaatacaccaagtctcttcaatacaccctgaatcacatttttattctagctagggaacaagtttataatccatgtctccactatgaacttgtatatatcgcaaagactcccatatagcgagacttctcatgagatgaagtaattata

SEQ ID NO: 88156 - DNA, 160 bp, Glycine max
actctaagacctaacacccaaccgcgcactcatccacaacttccaacacacccggagattcaaaaaccgtataccccatcggcgagtactatcatttctaatagcaggacctatcacaaattcaactattttgagtcatgatcacatggtatagagatcg

SEQ ID NO: 88157 - DNA, 454 bp, Glycine max
  unsure (1)..(454): unsure at all n locations
gtgcagccattataagagaatgagcatgtgattgtatgtattatttgaaacgnncgtcagttcgtcagagtgattgctaaggaatgcatcgatcttatccccgtgagagtgtgatccttaaattttgagagaaacgactatcatatgttggatcaagtggcctctgaataattaataagggggggttgaattaattattaatgaacctttactaattaaaaaacttatccttcttaatgttactagattcaattatgcttttactactaagttgagaaagtaaagaacctatctagaaacttaacccagagtaaaagcgatattttaagtgcacagcggatattaaaagtgtagggaagaagaagacacacacatgatgtttatacttggtcggccacaacccgtgcctacatccaatccacaagctacctgcggtccttgagattcttttcaa

SEQ ID NO: 88158 - DNA, 432 bp, Glycine max
  unsure (1)..(432): unsure at all n locations
agcttcatggtgaatcanatgtgattcatatatgttttgatgattacaatgatgatgacaaatgtaatgactaaaagctcatagatcaatcaaagataaactcaagtgaatcaagaacaattcaagagttcaagataagaattcatgactcaagcagaaagtctagagacaagaatcatgattcaaggttcaagatctcaagaatcaagatcaagattcatgaattcagagaagactcaatcatgataagtattaaaaagttttttcaaacatttgaatagcacatgaatttttgacaaaaccttttaccagagagttttactctctggtaatcgataccatattgttggaataattaccagagccaaatgaagttgaaaaggtttcaactgatttacatgttccattattttaaaaagtggaatcgataca

SEQ ID NO: 88159 - DNA, 445 bp, Glycine max
  unsure (1)..(445): unsure at all n locations
agcttcctagctnttcattggtgtattntgatctccttttggtgctctaaatggagggaatttgctcaaatatgtggggcaattntggtttgttttcttgcttgattgggttgaattgagggtttgtatgagatggccctaggcctataatgcattttgaagcaatgggacatgccacattgtcctcgttctcttgctattgatgcctaaacacgcgcccgccaagtgttcggtgaaatgcctcaatggcattagcgcgtgattttcgtagggaaacaacccatggggcaatttggtttgcacatattttctattttttgggacatgcattcagtttcgaaagggctagagtaattgccccacatatnttctatgcctaggaaccaatagttttatgcaaaagaacacaagagggggtgcatattgtgtaaagctaccctttttg

SEQ ID NO: 88160 - DNA, 463 bp, Glycine max
  unsure (1)..(463): unsure at all n locations
tcttagtctcggctgatgaagatgaattcngggctacttcatgcactcctttaatgacaatagcatcacttctggcactaaattgctgggagtttgaagccatcttctcaattaaatttctggcttcagcaggggtcatgtctccaagggctccaccactggcagcatctatcatacttctcttcatgttactgagtgcttcataaaaatattggaggagcagctgctcagaaatctggtggtgaggacaactggcacatagtttcttaaatctctcccagtattcatataagctctctccactgagttgtctaatgcctaaaatatcctttctgatggtcgtggtcctggaagcagggaaaattttttctaagaatactctattgaggtcatcccagcacatgatggactgtggagcaaggtaataaagccagtcctttgctactccctctaaagaatgagg

SEQ ID NO: 88161 - DNA, 476 bp, Glycine max
  unsure (1)..(476): unsure at all n locations
cctcagagttgaccagcaggcacgcaagcttctatggagaaacttccttgataagctagagcttatcttcacacacccctctcataactaggcgtacctccttgagaagcttccttaagagaattcctaaagaagctagagcctagctacacacacatctctaatagctaagctcacctccgtgagatgagaagctagagcttagctacacaccccctataatagctaagctcacccccatgacaaaaaaaacatgataatacaaaagaaaaaggccttactacaaagactactcaaaatgccccgaaatacaaggctaaaaccctatactactagaatgaccaaaatacatgggccaaacgaaggagaaacctattctaatatttacaaagataagcgggctcatacttagcccatgagctcaaaatataccctaaggctcatgagaacnctagggcgcttccttggatctctag

SEQ ID NO: 88162 - DNA, 451 bp, Glycine max
tatatagaaagctactctcccatgggttgtttttgtaaaatcatggtattactatgacgatgagtatatgacatggtataagtgggggggggtggtggtcactttgatgaaatgagaaatctgggggctctaggtcaatcccagtgaggagcttatcccgatccagtgagttagtgtgagattgaccattggaattgttgtcttcacccatttcctataacaacacaatgggaaaacacccaatagagagagttaaagaagacaaaaaaaattatctatgtattgtagaaaaatcaatgatcatcacattcatagaataaaaaaataaaaagaaattatttgtctaattggtgtctcattaccaaagaagagatccacttctcccacgagtcttccatcctaagaaaaagtggaagaactgagatatttgctccacccatagatcagtctt

SEQ ID NO: 88163 - DNA, 429 bp, Glycine max
  unsure (1)..(429): unsure at all n locations
gtgactntaggcaatttctataaaactggtcacttattaaagtngtgactcttgaaaacattttctaaacaatcacttgacgaattagggactctttggaaaatgtatatctttcgaaatcatgacactggtcatcgattaccattaatgtgtaatctgatacaccataatcaaatgtgacctcttcattttgaattttgaaaattaaaacgtttagaagctctggtaattgataacaagtattgtgaatccattacacaactttagatatctttaaactggttaacataacgtataattattgaaaattgaaatcttaacgtttataacactggaatacgttactaccttctggtgatcgattaccagaaataaaactccttggtatgatttaaagaaacttcttggctactcatttttgaaaacatt

SEQ ID NO: 88164 - DNA, 459 bp, Glycine max
  unsure (1)..(459): unsure at all n locations
cgtgacacacanaaactcaagcttntaaactttgtgcaagaatgaagctctgataccactagttatacatgttgcctcagatatcttaagaaaggggggttgaataagatgttccaaacttgctttccctaattaaaaatactatctcactttttactctcagttatgacattcccttaatgacaatcttcttatatattaatctaatgaagccacctgcatatgaatattaagctatgataataaaggagataacggaagagaaaatgcaactcattttatactggttcagccacaccccttgtgcctacgtccagtccccaagcaacccgcttgagagttccctatcttgtaattccttttacaagttctaaacacacacagacaatcccttctttgagtttagagatcctctacaacaagagactcacagtctcttaattcctttgagaatgagaa

SEQ ID NO: 88165 - DNA, 355 bp, Glycine max
agcttcctttagtgcatcacgattaaaacctatctctttggtggtgcgagcctttgatggcactcggcgggaagtgatgggggaaatcaacattcccattcagataagcccccacacctgcaacgtggtgttcaaggaatggatataaatcccgcctatagctgcctcttatgaagaccggggattcatgccctgtgagtggtcccttcaaccgcttaccacaaatagaagttcgcagtgggtggacttttaatgatagcgtccggtgaagaggacatgttagtgagctgccccttcttcgcaccatacgtagaaacggcggaagaatcattggaaacgggcttctcaatccttt

SEQ ID NO: 88166 - DNA, 329 bp, Glycine max
tagtcaaagagaagttcaagtccatatccatccaagtctgaagagagtatgatgaactaacggacgttcatatggccaccgatgaatccttggaacgagaaaccaagaatgtctgatatgaagaacacgacctaagcacagtttaaggcgctgtatatggcagcaatagtgagctcaagctcctaagaggtgaaaggaatcatcacgggtctaaggcatgatcttgaatgaccagctaaatgcttttcttacgtcgaaaagaaatttgtctcaactagtaagcgagactgaagggaatatgtgggccatcatttatgagtgcaaagaga

SEQ ID NO: 88167 - DNA, 407 bp, Glycine max
  unsure (1)..(407): unsure at all n locations
gaataagagaaaaacanaacatgtaactatatacaacgtctaaatgtaaggaaatggataaactactattaataaggagtgaggaaggagaaacaaactcaatgtttggaggctcagttagtattgaatggattcacagagtttatgatcaatttataggagaaaataatgagagaagtgaataaaaaatagtgacaaggagagtgaatttaacttaaatattaaataagaataacactttttaattaaaattgagttgaccttccaccaaaacggtttaatcgatgttatttcatatgagatattgatcctttcttcctaagtagtgcgtggggaccattactctcaacgaaaatatttttttataataatatttngagactaatctttatttacaatatgtatgt

SEQ ID NO: 88168 - DNA, 454 bp, Glycine max
ataataacattgaacgcatgaaataacctctttttttttttaaaatatttacatcaagtactcagtagaaatcttcaacaaaggatcttacccctccattacaagggagtagctttcacaaataggagaagggtttcagagaacataccagattacaaagcaatggggatgtctcctccacctctacctccacctctaagaacctagaaaataactctaaaatctataatctacctaaaagttaggacctttgcttccttgctcatcttttcctctgttctctacacataattcgcagtcgattcagacctctttcacgtcatcacgctctttctcaattttttatgtgcaaatcacgcttaaaaagggctttctgacctccatagcgtgcttatcgcgagtaagtggtattgggcttaatgccaatcttgcacttatcacagaagagacaacc

SEQ ID NO: 88169 - DNA, 429 bp, Glycine max
agcttgtgcatatgaaaagaactttctaccttttgttggtgaaatttactatacttgcgcccgcgccgatatggaaaggacattcgttttctactattaatggtgtataaatggttatcgatgatacaagttggaatgaggtaaccggactggacatgggtggagtctgcaagtttgaacaatttgttgatggttacaataagatgcagacttacagagctatgcttcttgacccaacatggaatctgaggaatcacttaagtgtaggtggtctaactgctatagacataatgctcgtgtaccttataacagacattctcacaccgaagtcctacaaccacgcacaggtgactaacaatgactacatatcgtgtttggctaatacaagtattcacatgaatgggtacttcttattgaaacattatgtta

SEQ ID NO: 88170 - DNA, 435 bp, Glycine max
  unsure (1)..(435): unsure at all n locations
cctatatctctatagccttacaggtgttttctttctcatccttgnngccggactctcagccacttatgataaccgccgatgctcccattactgcttaccctaagctctctgtcctttcttcacaccgcatcacatgccttgtgaactccttagagtaccctcgcattcgggtcactgaaaccccgtgtgatgaaaggcgtgatgctntcgcctgatggcactcctctcatggtgtagccaagctgtcttatggcgaggacgggattataattaatacaaccccttgttccatcaagggaacatttggacatccttcgcatgaagatagaatcctgattcttcctctcttctagcgagggaacgaattaacagatgcgcctccatgctagccaagagttggtcccaatacgcctttcttttttcgacgcacgagcg

SEQ ID NO: 88171 - DNA, 439 bp, Glycine max
tgcttcaacctagaggagacgaactcttccttttgtggagaagaacaacgacaatgcctacaagattgacttgcctagtgagtctaatgtaagtgccactttcaatgtgtctgaactatctctttttgatgcacatggaggagccttggatttgaggacaaatcctcttcaaggagggagtgatgaggacataaccaatggcatggaccatgaagcacttgaatgtcccatgaccagaggcatacttatacaagcccaacacatcatagagacaaggctggtcatttgatagctgttattgatgatgattgaatgcccaagtggtaaaagatgaaggcccataggcagaggcactaccaagactactaattgctgtgtaggcgctaactaacttgaaggcccaagttaaataagtctttagctataatttattttctat

SEQ ID NO: 88172 - DNA, 334 bp, Glycine max
cccggaacttaagaaccgcagcagcagcttagtattgtacaacgcttttccttgttttggagaccagaaaagaatgcgtcgccactgtagttcatcgtatggaacctgggagattgcctacattcatggcctctaggcgttgcactatcgtgggccttgcagccggccagagatacacatactactacattgcgctctccatgtcccatagcctcattcatttctacttttcccacccaacgacgatggcgggtggggagatagctctctttctaccccacacaagtttgcgattggacggtcttggtacacacgagactgtatggctcattca

SEQ ID NO: 88173 - DNA, 417 bp, Glycine max
  unsure (1)..(417): unsure at all n locations
gcttntgaacaagcaaagaaatcttcaggacgcatttttggcactacaggagatattgacattgagaagattcagaactcaaagtacttccaagctcttgtcaagcaatctaaagaaaaagatgagaatcaacccgtaagacatgctgacaatcacaccgtatttaaaataaatttatttattgtataattcaatttttttattgcttttctgttgttccagattcttgagtttatggtttgtaaatataagatttcttataaattaattcaggttgatcacctggggaaacaggacaaagcaggcagcatagcctcaaagcaaatggtgcaaactaagttaccatccatgtatgggaaaagcagcttgagaactagcaatggtcccaagagtttttgaacatgaaaataatagctc

SEQ ID NO: 88174 - DNA, 438 bp, Glycine max
  unsure (1)..(438): unsure at all n locations
ggccgcccagctcgcccaggcgagctcagctcgcccaggcgagcaaagtcgcttcctccagaagcaacagccttctggaggaatcttctagagggcccaagtgggcctggtggctatttacacccccctgtttactaaatgcacccccctttctatttttttgtaattctttttccgtaacgttacgaaactttacgaatttcgtaacgatacttattttccttccgcaaggttacgaatccttacggattatgtatttactcttttttagctttcgaagaagttacggaaacttacggattgcacaaaaacacctcttttcgacatccgccacattacggattttcatggattgcgcaagcctgcttcctttagatttctgagatctctcgggacttcatttattgtgcaacanaggacgccaaatatctcaaagca

SEQ ID NO: 88175 - DNA, 422 bp, Glycine max
agcctatttcttcattcattatcaatatcttttactataccgctagaaaactaaagaccaacatatgcatattattccactatttcctttcgggcatttggtcgtaatgacgacattaaccttacaagctcatatatatgcgaacctatatattatacttgtaacatctaagtgtcgaatcctacccttttgtgggcgaacgaggcgaggttattcggtgcgtattcctaaggacgaaaatgcgtggagtcgccaccaatgtttatttgtggaatatgtcagaaaaactcgatgatatctggtcataaagaatattccagatgtcggagttgtattaacgttcgaggaacgaattactaactttacttatgttccaaggacaacaccttaaattgaattatgtgaaatgtgatctaaatatt

SEQ ID NO: 88176 - DNA, 346 bp, Glycine max
aatgggttttgactttttcataatgggtttaagtttttctaaaagtttaaactgttcaaaatgatgcctttgatccgacatgaagagtctataaaaccaaggctttgttttgtatccattcattcattcaatcatcaatctttcaatcaattcaatcaattcattacaatcctttacaagccttgaatctctttgaacttctttttcttctctgtgccaaacgctttccaaagatttctggtttctgaaccttgaaaactcgagcctatcattatattcatatcttctccctttgccaaaaaaaatacgccaaggactaaccgcctgaattctctctgtgtctctc

SEQ ID NO: 88177 - DNA, 442 bp, Glycine max
  unsure (1)..(442): unsure at all n locations
agctcttactatttcatcccatattaacatctgtatgatctaatcgnnnatngnganctattaaatatataaatttgtggttgcctttttcgtttaaaatataactagtattttaggctattttttgcacgaatttacaaatttgatgtgtatatttattattataattgtttatcgtaaaaggtaaagtattatgattacaattaattatttatcatacaaagtcataaatgttcgtatgtaattaaggtaaatatatcacatgatcaccttgataaaattaataaatttgttcacgagtgaatatttaaatatatccaaatatagtagctattgacgtaataagtgtataaagcttaaacatactcttagtttttaaatttaaactatttattttcgcctcaaatttaaaatatattttttatctttgttattcaagaga

SEQ ID NO: 88178 - DNA, 411 bp, Glycine max
acacatagaatactaacctcgctcaatcagccccaactcttttctttgcagatgatctatttctttagcaacactataggattctttcaacttctcaagcgcaaggataagcaacttggtatcatgcttatatgataaaggtggaaagggaataagggagaacttcctagattccaacctatgtacagttgttgattatatggcaacagcttctttaggagtaacatatggaccatatttcacataattagttggcgttccttcaacacgcatcaatgataaggaagctacttctcgagataattatgtaatttcttatataactaactctaacaacaattcttttaaaactgtaccagctcaaaaattatttcatatgtatataactattaacactcctgttttgtctat

SEQ ID NO: 88179 - DNA, 432 bp, Glycine max
agcttcaagaaaaggccaaactcccttcacatatctgatttcatgcttaaataggtggctttgttcgtgctcgtgcgcttagcgcaattctgaactgcttagcgcacattagtggatttagacttagtgcggcttttcttgctcagtggatggaccgaagcggtgcacttagcggtatggcccttcattcagcgaacaagcacaactcatccttctttcagattcttcctcacgcttagctgaggaatgttgcactcagcggatagctcgctaagccagcagattggcttagcgagagggtgaagatcagcacttcaaaacttgcctaattatcctgaaattgagacaagatgattattaaacacacaaaatgggagtactacatatttattacctatcttttacaaaaagtaattataacactacaaaata

SEQ ID NO: 88180 - DNA, 317 bp, Glycine max
accttacatgctaataacagcaatgtcttttttagactcctcctcttctttattctatcgaacggggttaatcaatggacaaccatgtttatatgaatccaccaactttaactgtcaacatcatctttcatattacctaacatcacatttattatctacaacaagttggcacctacaatgcatcaataaaactcattcctaattttcatgattttaagaaccatttatatatttaactcatacataatattcgtgacctacactatccaaataattggcctaattaacttaatgtactactctaactaatattgtta

SEQ ID NO: 88181 - DNA, 417 bp, Glycine max
ctgagctgcaccttatggaagaggaccttccattagatttttatttcaacgaccaagacactgggtattgattatataacatataatcgatacagctttttgaaatcactcggatcgttgttaattcatttgaaaacttttcctatatcattttgctactggtaatccattactataatctggtaatctattaccagagagtaaatactctctggtaacatgttatgagaaaatccatggcctctcatttatgaaaaaatctttcatactattttgataagccctatcttgatcttaaagcttgatcctgaatctagatcttgaatcaactttctcttgaatttgaagcgtctccactttcttcttgaactgaagagtcctgatcttcttgaacatctgactcattcttgatgacct

SEQ ID NO: 88182 - DNA, 437 bp, Glycine max
  unsure (1)..(437): unsure at all n locations
agcttggagaaaaagcttgaagactgtttgttntttacatgtccaactcctttgagtggcatttatatttgttgttttattgaatgttgcatcttagaccatatcatatctcttgtgcatcatgcatccttatgagtgagaaaaaaatttctaaagttagaaaagtttcttcaaaaggcaaaactcattgttttgattgattacagccttatcataatcgattataaaagatgtctgaagcttgtaaagttatgtctcgtattcggctaatcaattacagccttctcgtaatcaattacacaattattgttgagacaatgacttatttattcagtagtctctgctttaatccgataccatgtgatataatatattacttctctttctataagtggttcagaagtgaacaacaacactttatatcgttactttgagta

SEQ ID NO: 88183 - DNA, 339 bp, Glycine max
ataagaaaccctaagctcatttataattgatataacatcatgcccagggggtccttcgaacgaagcaacaaacattaccacaaaatactttgtgacacaccgaatgattattattattaaacaggaaatgcgttgccataagatcactgatctatttccatttgcatgttgataagaaatccatggacattatgctgtaaagggtcgtgtgggagggttatttgagtctaccggctgaattttataaggtcaatcttaatctaaactaatccgataaacataaatactggacagacatgccacttgtacatatatatttatacatctgctcactaaaaa

SEQ ID NO: 88184 - DNA, 417 bp, Glycine max
gcttcatacaattaatatagaacctatatttttatgattcatcctatcagagcgttgtgttctcgtgtcttctaacatgagattctctatagtcatccacctattcatctgctcccgcgaacacacgttctagatcatcacaggatcccaacacaacaacacacagggaatgagttatcacattcctagctattagagaaacaagacagttgaatatacatattatataaatgagataccacttgcttaaacatagctcacgtaacttcaccacttcatcattcaaaattcacttttcaattatcaatcacattacacaagaatctcacccttcgattaagatggttatacccatcaattatcaagcatattgcatagttttgctaagactcaatcctattggcatagtggtaccat

SEQ ID NO: 88185 - DNA, 375 bp, Glycine max
  unsure (1)..(375): unsure at all n locations
ncagcttgcttgtggagcttctatggatgctgttatctatgagcctcaacgaggccctttaatggagattttccaccacggagaatgcagcggaagacacatgaaaagatgtgagaggaggcaccatccactatggaataatccatggaaaaaggagcttcaccacctaagatgatgccctggataagaaacttggagaggatgcttcaatgattgaaaagatagaggtatagaaagagagagaggtgagcacgaaattgaatgaataacagaagtttacaagtggaactttgaaatatgttttacaagacttttattcatcaatgttactacaagtgctacacatgcttctattattgactacgtagcttactt

SEQ ID NO: 88186 - DNA, 289 bp, Glycine max
cccacctagggaccagagaccttttttatcctcaccagcgcgagagcattcacaacaatcaccccacccctataggtcaacccctcttgcatcctttccaaaatggtgactgtaatacatcaaggccctaaaacatttattcactaataggcagcgacccagactaaatattcacccactcatacaagaatacttaaggcggctgtaaaaatcaaatttcgtctatatgcagttacatttcatattactttttttttaaatatggctcttccagaaatatttccacttt

SEQ ID NO: 88187 - DNA, 426 bp, Glycine max
  unsure (1)..(426): unsure at all n locations
agctntccccaacatacaggtaattcatcatttcttttatcacaaactaacataccaagcagaacatggcataggcagaaaactctgcccaaaacacaactctaaatcacagcttctcacatacaaataccccagtaacatttccttcgttccaattcggtatccgctggatcgactctcaaattctactggaagtctctagtacataagtccacattttgactggtgggatctgtaagcaaacatccagaactcattctgcactactctttccacaaccagcaaaacatagcatttgtctgcacttatgcaaaaatctgctgcacaatttcacagcaaaattctgcataaaggtcagattttgaaaaacacatttcctcttattcattcttgcccatatcaaattctacaaggtccaaatcatgt

SEQ ID NO: 88188 - DNA, 278 bp, Glycine max
gaggtccatgaaggacaaggcggccttatgtttcttttacgcccctgagtacgacagtcaccgctttatgagcgttgtacaccaccagcgcttcgaaaccatcaaaggatggtcgcatcttctggagctacgccttcatctcatggactactattttactgtatttcatgaagaaatatggcgtccggctgtgtcacccctggttactcccatggcgaaaattgatccccaaatattccttgagttctatcgcgatgcttggccacataagaaagcgt

SEQ ID NO: 88189 - DNA, 352 bp, Glycine max
  unsure (1)..(352): unsure at all n locations
agcttgtagataacactgcggctgttttattctttgctgacctttnccaacctctgtcacccttgttgtcccaactcctttgatctctaagtacattaactcatacatgttccatttccaaattccatgtataataacactctggctgcctcatctatttttatcttaaacttttcttttgtctgccatattcacattagatgactccattgaagtcaatgtcacttattcaacctgcacataacaaattgataatatgacctatcttattcatttgactattccactgcacaatcatagataatatttccagcaatcttttatgcataacacagatcattaaactctatct

SEQ ID NO: 88190 - DNA, 440 bp, Glycine max
  unsure (1)..(440): unsure at all n locations
ctgcaagcttgatctaccaccaccaccgccaccattatcttnagtttctattatttttaatattattagtactttgatttctagccgtgtatttggctatattattatgacatttgaacaaattagtatttcctttatttgcatggtatgattgaacaattatgaattatgttatatgactatgtattttttatatatttgatctattcatgtttcttgcttcatgattaggttagatttctcaatgaatgtcttgtgaataattactaatttatgtatgttttatatttgatacgcactttggctttttgttgatgccaaagggggagagaaatatggattaagtcaaaaactcacataagtaattaactttatttcaagtgaagcttatactcaaaaacaaaggtggagaatatggaacaataagtgagtgattgact

SEQ ID NO: 88191 - DNA, 338 bp, Glycine max
  unsure (1)..(338): unsure at all n locations
ctcacctatgaatctgaatgacagattgagcattcttttttttcttccatcaaattaatcttaaaatgtggacatttaaactaccttgtattcctcagaagagagacatttcattctggtaaagacaataaaatcagaatatgcttaagctccattgcaattatgctataaaaatagatcgtgatacaaatgattgtctgttcaaattctaatagtgcataaggcacctaccctaccaaaaagattgatttatctacaaaaagaagaagcaaatcttctagaaaatacagaatatctngatcatactttgtactgcactctttctgctctacaatcta

SEQ ID NO: 88192 - DNA, 272 bp, Glycine max
  unsure (1)..(272): unsure at all n locations
agctntntggagtagaaacatgggaccaactcattttatttcatataggaagtcgtatccagtcaaggtctgagagaccatacaagtttcctaacgatctctaattatgtgggccattaagtctatcatatgctgacaatagccgagaagcccatgaatctcttccggggtggagaaggtgtctagcataaccttggccttggtcacacgcggagaagtacttgattcctcttcattgtaaaagcaaatccggtcctatccacctgggtgcc

SEQ ID NO: 88193 - DNA, 380 bp, Glycine max
  unsure (1)..(380): unsure at all n locations
cactactggaaaaccccaatgccaatttttatttgaggcaataaaatctaaaatatttggggaagcccataaaataaggccttatatacccaccacagtagaaaagagttcaatagatggtagttcatcaagtgaaagcataaccataaaaaaacctaaagatagatggtctgaagaggatagaaaaccagtacaatacaacctaaaagccaaaaacataataacatctgccctangaatggatgaatacttcagggtttcaaattgtaagagtgctaaagaaatgtgggacactcttcgataacacatgaaggaactacagatgttaaaagatctangataaatgcactaactcatgagtatgaattatttataatgaa

SEQ ID NO: 88194 - DNA, 322 bp, Glycine max
agctcgcaatggaatataactatatatacatgtctcttatatttgaacgagggacacacaaatcttattgtgaatggtcatcctttattctaaaatcgagagaaatactgattaaaaaatatcctaaattacttcaggtgtgaattattttctctttaaaaaatgtgattaataagctagcgggtatgcacctagtttaaaccacgggttaaataaactgggtttaaaacccaccatcataaattgatcaaattcttttttttttttgctctggtaggttatgaattaaatgggcacccaatggactttaatccatgaaaac

SEQ ID NO: 88195 - DNA, 361 bp, Glycine max
tgccaacagactagggtagttcggttgttaacttatacctttgacaccggcatcgtatttgctggagtgaccaaccaaaggggcgccttgcgttttgtatgagtacataccacaggtggaccttacgtcttggaggagcgtgtaccaaaggcaaaccttaagtcttttttatatcattgtattcctgcacagactaaaaataggaatatagaagattcgtaagggcaagccttgtgcttgagttcctatggacatggaacttatcaacagatactgctcaccaatagtaaatcttgggtttgtctaaccctggaccgatgacgtgttcgccctgcgatttgttaagcttgttgagctatgt

SEQ ID NO: 88196 - DNA, 430 bp, Glycine max
  unsure (1)..(430): unsure at all n locations
ttaagcaccgcagctgcagctttccttatgctttgggacatgctatattgacgcagaccctccggtagaccttgtatttttaaataaagagaaggaagaacaccacaactttttcttcatgtatgactgcaaaaatctgatatctacatgtaaacatcccatatgatgactttaccatgggagtgctttgaattttaaacatggccccttcccaatttcatctgaatggttgggcggccatttaagtgttctgagccctttgttcaccatttttgttgtcagtcgaagaagaaagtgaggtgagttttgttggtccagatgcctacttgtcttttatttctcaactttacaacatcttataaaaattntaagatgagttacttttanagtggtaataaagtcaaatgcccgaaggaattatttttacaac

SEQ ID NO: 88197 - DNA, 369 bp, Glycine max
  unsure (1)..(369): unsure at all n locations
ttgctgggtttatggaaatgaggagaagaaattctttttgaagagaactgctganaaaaaagaggctgatgaaagagaaaaagcttttggtttaataaaaagttttctcttttctatatttattcagctctccacatgtcctattgatggagcaaaaggcccacttctcttttgatgtacccatactcagtccaaaagtgaaaaaattgcctttaaacgctaaaatctgcctcggttgcgtgtcatttctctggtccagtttctccgttttctgcgtcgtcgggccagttcgaaagcagcatatattataaaacctcaaataaaccccacgggtcaaagtggttcgtaatctagtccaccacacatgat

SEQ ID NO: 88198 - DNA, 425 bp, Glycine max
  unsure (1)..(425): unsure at all n locations
tgatacattgtgcctcctcagagggaaaggttcttctctataatngacaacggacaagatagctctcaaaaatattgctctaccaacaacatcaatagtgtgcaagactgaagaattgaatttcgtacatgacaaatgacgaggcttggtcttgatctttgtttctttctcaagctcttctgatctaaagtaaaaatctccaccgagtgatgtggctagatcatgcatgaagtcatgcatcacaaaacaattgcgatgaggccaactaacttgaactgaacgttggaaaaacgatctcgaaaccaaatcatcaaaatactcatgaccaacctcttttaaagcctccttttcttggttcttcaaaagatctctatcttcctcacaagaataattcattttttcaatgcgtaaccttgggatcaacg

SEQ ID NO: 88199 - DNA, 358 bp, Glycine max
agcttagcgagcctgctcgctaagcctatgctatgtttttgtgatgttgagctaaccgcaccttgtcacgttaagcttaaatctccctcctgttggaaaattgtggatatatgcttattgcgcctgttgcactaagcctattttgcaaaaaaagattttttgtgttctcgcgctatgcccatgggcaaatattcatatagtgcgctaagctcagccttttgcgctaagcgcccagtcttggttatcagttttaattttttatttttcattggggaataacccaattaatcctgtggtggccaaattcttcaaaatggctcccccaaagaaaagcaccggctaacatcttaggccggtt

SEQ ID NO: 88200 - DNA, 391 bp, Glycine max
acgaacctccgccaccctgcaatgagacacacacaagaaactcacacgcacacgcattagagaccatacccacgcagacactgacaccgacgcgcacacacacacataaagagacgcacacactcactcaccgagtcacgcacacataaagacccgagcaaacacaactcactgagctccagacacactcagagacccacacaccagaacacacacactgagtcattaacacacacatacacaaacacactcacacacatggacagacacacacacacataaagagacaaactcacacacacacacacacacagataaagagacagccactaacacacacacccacgcacacacagatagagagacaaacacacacacacacacacactgt

SEQ ID NO: 88201 - DNA, 431 bp, Glycine max
  unsure (1)..(431): unsure at all n locations
agctngaagccagtagaagaatattatcttttggtgattcaactntcacncaccatcactttatacatgcaaaaactatctttgtcagttacataatctcttgatgctagtttgggcatgactatgttgagcagataagtgttgatgagcctgcacatatgtgagggtagcggtcctcagaaagctgaccaaacccttcttataagatgattttggacactgttttccatagagcataaagtccactgtttcacaggttatcttctctctccaatctttatcaaagactagacattcttctagacatccaatcgcagcaacaagagttttaggtgagatgaccacctcccttccatttacgattcctcatatgctgacatntgcttgccttgttgtgccctaaaatatggcatacgacccatagtgccatg

SEQ ID NO: 88202 - DNA, 449 bp, Glycine max
  unsure (1)..(449): unsure at all n locations
tcctatatttngcatctaaaatcacacaagattcctttttgtttctgaatgagaactntatagaacaccctttttgaattctaagtatgaatctttgcgaattcgagtaagcaagtaatgatattactgcgtaaaaaaagataatgatatatattcctctggacttaaatatatataaaaaaactaactcaatctaatgttgataatctcatgagaaaagataattcattttttaaagtaccattcatattaattgcataagacaaaaaacataaggttattgaaaataaaactctaattaaataaagagtatgtcggggatattattattgaataggagagaattaattaagaattacttatattttaattcaacacacattaatttttttgttacttaattcagaggagtatcagtatcgggatcctacatataaatgtttacttat

SEQ ID NO: 88203 - DNA, 423 bp, Glycine max
  unsure (1)..(423): unsure at all n locations
tgcaagcttcgagatatgaaacacggtgtggatcttgttctgtggtggaaagccaggcgataagccaccttgccaatcacttcagtaattngataagggtcgtaaaagcgttccgagtttctagaacttattggcgacttttgttggccggtaggacgtaatattacatagacccagtcccctacctgaaatacggcctctcgacggtgacaatcaacgtgatcctttattcgagcttgtgatcgttcaagctttcgtcgaagagttgtgaacatgtcctaccgtgaagtgaggaggatatccacagcctcgacatcagatgtccccggaatatattcagggattgccggtaggggtttaccataagtgacctcgtatggggttactcccgtagcagaatggcgtgaagtgttgttacaccac

SEQ ID NO: 88204 - DNA, 466 bp, Glycine max
  unsure (1)..(466): unsure at all n locations
aaactcaccctcacgctaaattagtataaactttcataagctattttatgtattttagtccaataagagggatctaaggacgaagcttattttaagttactctaaacatacgagggatgtctaaattaagcctagtccaccaagagcagttgttggcgtacaaccatttgtattgaatcaatcttggtgttgttatgtgatgtgagggactggacagccatttgtgcgaccatgttgataactgggccaaataaagtgcatcctcagagagtgacactgtgtaaagcactggcataagcttccattatgccttcaactcctacagcctgtgcatgatagagaaactaaactgttaaatttaaattgatagaacaacaacagtacaattgctattccacgagggataaagaagataaagaagaatntctcacctcagaggcacctggagctccatttagattaaaac

SEQ ID NO: 88205 - DNA, 444 bp, Glycine max
  unsure (1)..(444): unsure at all n locations
agcttgctcaaaaggtgatcacgtttttgtattaaagccttgagtggagcgggatccttatgatcaacctcgtagtgcatcaccgctggtggaggtctaccaaaaactgcttgaaatggtgtcatgcccaacctttggcggaaggaaggattatactataattaagcccaaggtagcatagtaacccaccttttatgatgttcaaatacaaagcaccttagatacatctcaatggtcttattaatattctcagtctggccattggactgagggcgatatgaagagctcatggtcaatgttgtgccttaagctctgaataattgttgaccaaaagtgctgataaatattctatcattgccataaacnaatgtttttggaaaaccatgaattttgaacatgttggcaatgaaaacttcacccacactctctgtattaaattcaaac

SEQ ID NO: 88206 - DNA, 439 bp, Glycine max
  unsure (1)..(439): unsure at all n locations
tgcaaacttacgtaaatctgggacttactatggtgttgtctcccagaggccattgcctccctcacccagtattatgatcagccattgaggtgcttcacctttggggacttccagctatcacccatggtggaagaatttgaagagatcctatgatgtcctctagggggaaggataccatacctcttctcagggttctatccctcattagctagaatttctaagatagtccaaatctcggcacaggaattagaccacaggaagcaagtcgaatatggggtggttggaataccgaganaatgtttggaggcaaaagcaagaatcttgtgaggtaaaggtgaatgggccctgttcatatacattctcgcactgttgatctttagaggagttctctntccaaatgtggatgggttggtggacctagcagcgactgacgcttttc

SEQ ID NO: 88207 - DNA, 442 bp, Glycine max
  unsure (1)..(442): unsure at all n locations
agctnttacattatgaggttctgcgtataatcttctgtcagaaatcagaagtagtgttgccacactcatcgatccacataaaggaaatattattaataataaaaatacatatatgaagagataaaacaaactaacatatttagattagattcttgaacttcattgatatgaatggtggcagtagtaaacaaagttgaatatatgtataattaaagcttcatgttatgatatgatgcctagccagctagctatatatttatttgcgggttatcatagtaatattattttatttggataaagtgatagaacgaagagatatctctgatactatcaagtagaatgtgaatgacatattaagatattaagaccgttagtaaagattcatctacaggattataaataatttaactcagctgtagttattcaataaagatatttttga

SEQ ID NO: 88208 - DNA, 428 bp, Glycine max
  unsure (1)..(428): unsure at all n locations
ccgcacattgacggacctaagcggtcatcatgtgagaattatattgcagagaagaggatgttatatataagatcaacatccattcgtgcaagagccttcacctcacagcagcaggaggcataggaaagaaaagagaagctcaggcagctaatgtaaagaaaaacttctttcgcagctctggctgatgcatttcaccttatatatctatcattgcattctaccatggatacttgcaagcttgtcatgacgatgacaagctaaaaccacccgttcttggggactctgcaaaccaaactctctttgatgggatgattctatactatctattaatataatgtcaatattattgctctttcatgtgctcaatcacatgtttgtgttctaatcattcatattcatgcactattntcagaattagacattaaaaa

SEQ ID NO: 88209 - DNA, 444 bp, Glycine max
  unsure (1)..(444): unsure at all n locations
agctntaagaaataagctaggtgtctgcaatctttgttgctaggaggagatctgttgaaactatgcctacaatagctgcatacgtggatgttttagctaattattaaaattcaaatgtttttgttgcttaagaattattctttaggagttttgattatcgttttttatcatactagaaattgtgttagtcatacttaaaaataagagatattctggtttgtatatttgactctaactctatttaaagagctaatgaataactattatgcatccttcaaaaatatatctccgcttctctgtgtttgatctaatcttcaacacatcaacaaagtgcaagcaacaagtcagaaggctataacacatacataagtaccacaattctaatagataggatttaatttaattaattatctgatctctacccgtggaacttttcgtttattc

SEQ ID NO: 88210 - DNA, 334 bp, Glycine max
ataagtttatgggcgtaactcgtctagattatgggtgattcttaattaatcatcaaacaattaacttgaacagtaaatgacttataagagtaatttgataaaaatactctgtttgagccacaatattataggaaagagtgataatatagatttgagcacaatatgctctctcgtgatagaaaaatagaacgcaatgacttcgcacaattggttttgtataaaatgaatgagcgcaatcttgaatctcttatatcggcgaaaaacactagcagatgatgtctaaatatttaatacaaatactttaacacctcttgattgtgaaaaaaaatttttg

SEQ ID NO: 88211 - DNA, 422 bp, Glycine max
agcttgttaaccatatcaagcttctgtattatattgagcacaccaaaaggatgaaccacatagagtctgctatggggagcatgagggtgaagttggtggccatgttttctatgaaaatggaaaagtataacaaggctgcaagtgatattctcactcccaaagtggggtacagttttggtagatgagctcacaccggctggtgttagcgttctaacagtgtcggattatccacaagctgctgatcaagcactgcaaagccacattgtggatatcatggatcatatgcgggttgagtgtgtggtccttgtgtctgatgattctgattttggtgatgtgataaacgacacaaagatgcgatgtctgataaccgcttgcaatgtggatattgatgaaagttcttagagaggactgttgatctgcat

SEQ ID NO: 88212 - DNA, 383 bp, Glycine max
  unsure (1)..(383): unsure at all n locations
acggtcattgccctcgtggctgttgttaattcttggtntccattttatggctgcatcccactctctcgattactctcttctctcatatttcattctaaggctgttagagctaaatcaaatgaatgaaattgacaatgtgggacattgagagaaaaagtttagttttcatgatcaagcaaagtttgtcccagcacaaatatagaagttcttaacattaactcctaatacgtatttaaaagacagaaaataattgaagatgtcgctttattatattctttcgaaattaagttccattggataacttcctcacaagatgtgccgtttcggaaagtatggtactgcgaaactacgcttgtaaaagcatgaaacaaatttgagcttca

SEQ ID NO: 88213 - DNA, 425 bp, Glycine max
agcttcacacaagcaagtgtgtcatcttaatttctaatcacagatatgtcacaaatcaatttggccagtcattgcccatcaagtcctaggatactatgcataatcatcatggatcaatatgactattttaagatctgacttgtacgaaatatccgctttgttagcgactggtttcctcctttctttgacgtgagtacgagagcacgcataaagatttggttagtaacttatataggcgatcacttcctattccctcacatcttgactaagatactatgatccttcttcctgtatactctttaccacaactctatacatgtgttagacattgtatgttccaataaacttggttatattattcatatactcttactgtgctccattttgattgacccgcgcactttatattatgattgctcttcttt

SEQ ID NO: 88214 - DNA, 384 bp, Glycine max
  unsure (1)..(384): unsure at all n locations
cctcganagttcgatgattgctgatccggatattaactacctttctatgagccaagtcttactgggaaaatatggaattatgccgtcaaatgatatgcaattgtatcgagctaacataaagatgctagaaacaaataatggtatacattttgtatcatacaatgatttgccaccatggatagttgatgttagacatagcactatacgaagactattgaaactatgtatggagtctaaggtgtctaagaacccccaatctaagaggatttttgtctgcatgaatacaatgaacaaggtctttgtaagagggtgtatgccataggttggtattgatggatgccacctaataggtccttttggaggtgacttaattttgtgattcat

SEQ ID NO: 88215 - DNA, 413 bp, Glycine max
  unsure (1)..(413): unsure at all n locations
agcttatgatctangagagcattcattccatttaattatttatataccacaacttagaatttttcacaacaccaaccttgttgtgttgctactcttttcaacacctttattctctttgatgatggcttaccccatcttttattctttaaatcttcattttttttttcttcaaatgtaaaaacattcatactgggctggagtaatatgatatttngtaactcaatttaacttgtgttagatatttattttcctacaatagaaaattacccaaaaacattcccccaaatttggaacaagtttgtctacatccatgagtacccttctacaacctaagaaagggtaagtagtaaatatcacattttgggcttccgttcaatgacaaatatttacatttgctcacaaagggcagggat

SEQ ID NO: 88216 - DNA, 464 bp, Glycine max
  unsure (1)..(464): unsure at all n locations
ctgtgactctcggcaatntctttanaactagtcacttaaaatagttgtgacttttgaaaaaatcttcagaaacaagtcacttgaaaaattgtgactcttggaaatgtatttttcgaaatcagtcactggtaatcgattaccattaaggtgtaattgattacacatcaacagatgtgactcttctatttgaatnttgaaaattaaaatgtttagaagctctggtaatcgattacaagtattgtgtaattgattacacaagtttaaaatactttaaaactgtttaaacataagttataactcttgaaatttgaaatcttaacattttaaaacattggtattcaattactaccttctggtaatcgattactagagagtaaaactctntggtaatgattntgtgaaaacttcttgtgctactcaatacntttaaaagctttnttagtacttatctcgattaagtcttc

SEQ ID NO: 88217 - DNA, 354 bp, Glycine max
agcttgtcatactacatctgtctcaacaccttcttcttctgtttcacctgcagctgcagcatctgtcaattcacctgcagctagcgcatctgtcaattcacctgcagatgctacaccagccttatcaacatctaactcttttccttagctacaatgaaatcccgacttacctattattccaccagcaacagcatcatctgttcctcagatgcatcatctaatcttgaggccgctactgctgaggtgtgttgatctttttctaccactgcttctgtacagcatgtcactgtctctcataatgctcttgtcagacctgataatgtgcactctatgtgcacaagagctaaagctggt

SEQ ID NO: 88218 - DNA, 151 bp, Glycine max
tctcttgagggataatgtcgggcttttttacttacattcctgtacccacatctaggcatgacaattctccccacaactcgggtatccccgtggggactaccccataatgggccttgcggtcagggaaaaattcctcctgtggatggggatg

SEQ ID NO: 88219 - DNA, 389 bp, Glycine max
aaatctatccttatcttcaaagcttcacaaaaatgagagaactggcctaagctctggcctttaagaaacaacaacttatcgtatcgtgaagtgcttggaccaattggaattacaaggcccaattcttaccctcttaatctaagcactcttaatgaccattaatatgacttattgtcagctaagaccaacccttgatgtgcttttcccgagcttcaaccatgccttatataacattcttgcactttttcacaactatactttcaagggataagttgagtttttccacaatgggataaactataattgctacaatcggtaatcctattctaatcttctctatagggtgttaacttcctaaattatgagctaaccttcctcggatatgtgta

SEQ ID NO: 88220 - DNA, 387 bp, Glycine max
  unsure (1)..(387): unsure at all n locations
tatgggcttatagaaacaacacttattctctgcttaatntanattgacaggacagagccttcgcttgcttggttctctggggccaagtctgtcaatcacctcaaatagaaacccatcattcataagctatattgttgatccgaggtagaatccactgctgcaacaaatgtnttaagctgctatggtcggtgtagacctcgaagctcctactgaaaaggtaatggcgcctatgctgaaccgagaatgccaacgccatgatttccttttcatacacagacctctttcttggtcaacattgtcaagggtggacaatctttgcctaatcgttcatgaatctcatgtattagcctgtgaagcccaagaatcctctcacttcttttgctgtac

SEQ ID NO: 88221 - DNA, 367 bp, Glycine max
  unsure (1)..(367): unsure at all n locations
agcttgtgagaaacagtagcaacacaccttttattctttttttaaataatcacaaggtgccaagtcgcgtatgagactccgtcagataagaggtacgaatagcaccactttgcgatcttcataaaacttaaccactcataactaaaaatatgctcacaaaaatatgctacagaatgtttaataccatttctctaccttagctagttttaaatattttctgtctcgaatataagcaataacaannnctcatcttttattttaaatatacaaaaaccctgagtacctatattatatctaatgagactctccctcaaaaattcttcatttaataaagtaaaaaaaacatatgtttgatatcataatcctc

SEQ ID NO: 88222 - DNA, 357 bp, Glycine max
  unsure (1)..(357): unsure at all n locations
agcttganattgagcaacgaaagctctcgagatatncatatgtgtcattacttttcactcggaggtccgattcatgcgcatcacatatagagacgctcgaaattgaacaacggaagtttctttaaatggttataacttataactcggaggtccgattcatgcgcataaaatatcaaaactatcgaaattgaactatggaagctcttgagcaattacaatggtcttaacttttcactcggaggtccgattcacgcgcactatatgtcgatacgctcgaaattgaacaacggacgctcttgacaaatttaaatgtgcattacttttcactttgtagtccgattcacgagttatatatta

SEQ ID NO: 88223 - DNA, 469 bp, Glycine max
  unsure (1)..(469): unsure at all n locations
ctcaagcttctgccgcgacatcttgacttgctttccaatctgacattctctcacatattctgccttcntctattttcagatagggaatgcctctaacagcacctttggcaatgatttttttcatgcctcttaagtgcagatgtccaaatctttgatgccatattctgacttcatctttcttggaggatagacatgtggaggagtacctagattcttggagagtccaataagaacaatgtgcctttgatctggtgcccttcattagaacttcactcttctcattngtcaccaagcattctgactttgtgaagtatacattgaacccttcatcacacagctgactgatgctgatcaagattgcagtcagtcccttcaccagcagtactttgttcagactaagaatgccatcatgagctagctttcccactccaaagatcttttctttgagccatctccaatgtcacataac

SEQ ID NO: 88224 - DNA, 444 bp, Glycine max
  unsure (1)..(444): unsure at all n locations
agctngtcttcttctagagtcttttcttgctcttactccataagtgttacgcttagcggaagctcactaagccagcagattggcttagcgagaaagtggaaaaaaacactcttctgagcttgcctatttaactcgaaattgagagaaaatgtttattaaacacacaaaatggaagtactaagtatttattacctatacttaatagaaaatacttatcacacattggaagagtttgatacaatttacacaacgtttatacacaaaagatagtcttattcacccactaacaaatgtctcattgctctcatagtccttggatagaaggttgatctacttctccgaatcattggatgagtcattgtcatcccatgcaatatacgccttcttggatcttctctcttcatgactattcttctcattcttctacggccatgactcatgtgt

SEQ ID NO: 88225 - DNA, 465 bp, Glycine max
  unsure (1)..(465): unsure at all n locations
cccggatccttacagcacctgagctgcagcttgagcggtattatagccattattatttcttaatcgcnncccnngatatgggccttgagatagcttaagacccgatggtttattacctgttggctattattagcacacttggcatattgtaggagaaataaaggtgcaggaagatgatatctttattcacatgagagaatatgtttatattcacatattgtagtactatcgtgatcctattattaagctaggattaattacactaattatagaaatgaacatatatggaaagaattggtcttgatagctacacatacgcagaaaccaatatatagatcaatcaatgtcatgatacacgatcaagagattgacataatgatattgtcatcatgtgtaatcatttaaaatattatcttctctaattccccctctaaactgatggtgacataatcaccccaagtttgt

SEQ ID NO: 88226 - DNA, 423 bp, Glycine max
gacctaagaacactcagcttataacttacctgtgacattgaataagaacatatattgtcttctctaaacaggagattttgacaatttttaataggatgctacgccacccaactaattaacgtcttgcaacgaaattggggtgggatggactctctaattgtatgttatcaatatgatttcattgctcacagacataattttaaagcattatcgtgattaacgaggtcattggctcttacaaaacgtctacaaaaaaatgctcaaagaacttaaaagtgaacttcgaaaaataaaagcatgtgatctttcgattggaactctctacattatatgtatgcaatatgtgaatttcatgacaactagagaacatcaataaaggtgaacatttcaatgggaaaaaccagtcttggcacctggaacgaa

SEQ ID NO: 88227 - DNA, 448 bp, Glycine max
  unsure (1)..(448): unsure at all n locations
agcttcagaagttgagtgttcttttgatatatatanaataaaatcataatccgataagtgtcactgctcaattctcttttagtgaccttctaacccactttagttggtaggcaaagacggactctctgaaagcacttcacagtgcaagaagaaaagatcccaaagaagtaatgactactgtcaaaagagggaccatacgaattaagaaattacaaggtaattattttttatcctcttccttattttggcgattttcaactatccatttttttttgcaaatttaatgtataggtatcacgtcaatatttctaaaatattaagttcatgaatagagtaaaatagctaagttgataataatacataaatttgcaataagaacaaaaagagaatttctaaaagatgaatagataaccaaaatcaacacccgatgcacaatacctctctgata

SEQ ID NO: 88228 - DNA, 417 bp, Glycine max
  unsure (1)..(417): unsure at all n locations
cgcttgaagtctacacaacttggattctcaacattttttatcatcancctccttacgaagtcgcatccaataaaagtctctacttctgactcgtcatgaataaatatcttccttaatgatcaatctttagcccttttattgtcattaattccatttatctcgaagaagctaattttcctcttactgtctattttcattgcttcaagccaacaagcatattagtgattccactcatctgatataagttgactctcatttttctattcaaaataccctccaagacctcgccatcgacatgacgaaattgcttactagtacccaactttgttcaccaatccacaatgtaactaccttggtatttcatgtatgccaattgacaactttgttcaccatatgataacggaatattacacttga

SEQ ID NO: 88229 - DNA, 464 bp, Glycine max
  unsure (1)..(464): unsure at all n locations
cgcttgccaaacctgtacaacaaaacttttcacaatattagatttcttttttngcaagtacatgtatccatacaggatccatccttaattagatgtttaggaattgaactttcacgttttgatcatcactcattaatcaaatcaaaataacatgttacgttgtgggaaaattaattaattagtcacttgtgatatacaatgccacaatcattttgggaaccacagcttccgcttatgggtgccctaaaaccttttaacctagttaagtaacttcagttttagattagtaccaaatattgaccaaccattcagccacctaactatgttttctaagacaaaagttagataggaacacataacgcattatatgcaaaatcgatcctgctccgtaccaaaatcatttcgtgcataaaaatatgtttagcatatatttncagcgactataaatttttgatctttttgga

SEQ ID NO: 88230 - DNA, 404 bp, Glycine max
agcttgctctaaatttacattgatgttttgttttattggacgaggctgcatgccatctttgttataacggtatcattacttgataaaactaacatttcaaatgtttgccttcgcacgaaatggcctcaacgaagctcgcctctaagacgttcaggaatgacaaagcggccgaatgaactatctcctctcctgagtatgacagtcaccgctttatgagcgttgttcaccagccacgcttctatgccatcaatggatggtcatttatccgggagcgacgcgtccatctcacggacaacgagtatactgatttccaagaggacatatggcaccggctgtggacatcactggttactctcatggcccaagttagaccataaaatatccttgagtttatcgcaatgctt

SEQ ID NO: 88231 - DNA, 370 bp, Glycine max
  unsure (1)..(370): unsure at all n locations
cctacacaaacccaagctaacanaagcatgcgaagtgggaggaatttctatatctattcactcatgttatcatacatacaacgggcaaagggtatattgtagctgatgctctatttcggcgtcatgcattactttctatgcctgaaacacaactgattggtctttaatgattgaaaaccatgctcgaatacgatgatacttatggagaaatgttttaaaattgtgaaattttattaaaataatggattctctaaacatgaaggctgtcttctcaaagaaaacaaaatgtgcgtgcctaaatgttctactaaaaatttgcttgtttgtgaaacacatgaaagatgttatatgggcatttctgggtccataa

SEQ ID NO: 88232 - DNA, 431 bp, Glycine max
agcttaaccgaaggctactaattatgttttttatcccaaaatatacgcttaacagaaggctattaaataggaagcaatatcccaaattattcacttaacaaaaggctataaaataagaaaccttttatctacgttgaccaatatatctataatatatttaacatggatcacaactctagtttttctcttgcttgctctcttgtcaactttttcgtcgttttgtcattcttagattaaatcatgtagtatttaaaatatgcgagagcactcctagacaacaaagtgtatattgtgactatcacatcatctttaaaagttttcgttactaaagctagaatcggtcttaataaatatgacacaacgtcatatttaattaacaacttattattattgacaatccaactaagataaattatataaagcatattata

SEQ ID NO: 88233 - DNA, 450 bp, Glycine max
  unsure (1)..(450): unsure at all n locations
tctaataatgctcatctgggtgtcgtttctttatcctgattgctttactggtnggacagcgaacatattatataccagtagctgagacttcttatgcctcttgttgttgtagatataaaatctgataactagatgatacaattattaaccaagaagtttatttgtggttgagctattacagaagttttcacgctttacttgctcaacatggttatccacatagtgttactgtttgttcctatgtgaaactttcctcgttaggttggatgtcgtgagtttaagcttagagccagatagctatacattatacactgcaagttcctgtattacttcagaaatgaattagagcattatcttgtgttctattatcttatctgataatattgggactgcatcattccgactccagctacattttcatgcaactaatccaaagaanaattatatatt

SEQ ID NO: 88234 - DNA, 449 bp, Glycine max
  unsure (1)..(449): unsure at all n locations
agcttaatgaggtcttcntatttgnnctttaatgcattgtattcctttgncgagggaccgcgattgtggtgttaccgacaatgttttgagtagtcaacctttggtggggtgttagcccttatcagaatggtcaagatgtctacagtcaaagcttgatctatgatatgagatctattggcggtaaagggggtgtattgggtgtaatgcggttctcggggaggtctgtccctccttccatcgtattgagctttgttggagttggatttttcattatcttgcttggccaatacggaatccattcgtacttggttcctgtacttaactaactcctttatttgcatgtacgtagccactcttctccgcatntcgtcaaggttagatgttagttttttgcatatgctatacaccaaaactcttaagccttaaccctgttatcaaatggtgcatat

SEQ ID NO: 88235 - DNA, 461 bp, Glycine max
tctcaccttttcctaagagtatattgtgtggggattaaattcaagttctttttcacaaacatgtattgtcaaccaacttacattcattgagtaaccataatttcttttaactgttaacaactaatcacctaatataaattactaagcattgcatatttcattttatacaaataaaactctattttgttcgagttattctttttctcaatctctttcagtcatacaacttattcaatattaaacatttaactttatttctaatttaaatttttatttatattttcaagttttattactcaagttttaatttaatttaaatttaaaatgtttgtttactatatcaaattaaagatatatttatttttaataatacaaaattataagaatactctaattaatcttaattgatattaatatgaatggacacactatataaataaatatgatatatatgttgatca

SEQ ID NO: 88236 - DNA, 439 bp, Glycine max
agcttatggtcatagatggcattaatgcggatttgatttatttaacgcataacaagaaaagaaacttggtgtacttatcctaatagggcggataagtataagtagcactgttcttagcctttctaccacaacttaacagtaagtagaaatcatcataccccaccatactaatatctatacccaaaaacaatggttttcattgcgttattagggtccattctatcaacaacatcgattaatttgttaaccaactttgcttttccacgctcacaaggctattcatgtgtatacgccctttgcctttataattaagattagaattcttttttataacaacggaaacaactttcctaaacttctcttcaattaggctgattactgccaacatttccatatgcctcaccactctttcatactttcaaattatcctcgtgaaaaa

SEQ ID NO: 88237 - DNA, 405 bp, Glycine max
gcctattagcttgagagcagacaactgttctttttttttatcttgaggcacctgaggagcactgttactaattatctcccctttgtcaatatcctttaatacagactgtttcaacggaaaaacaatgtattaaaccactataaatgacagcggcatctataacaaaatatactgtaacatcacattctcagtcctcctatattggtgcgcccagagctataggctccaatggttcataccgtgtaacagaaagtacctgcacaaacttcactacgttgttacatcgtttgcatattagctactctggtcccctcaagccaacttgccctactatatataaatggatgagcccacttctgttactttcagcttatacaataaacgtccagggattgataatgctat

SEQ ID NO: 88238 - DNA, 432 bp, Glycine max
acctgcggcatgcagcttgattggaggcacgaatttattattctttgagatgaagaaacattgagcgcgaggaaaattcatggctcgcgctctcatattttaaaatatcagtacaacatcggttttctttaaaaaaaccgatgttaatccatagatgttaacgttaacatcggttttatgagaaaaaccgatgttaacatcattagttaacatcagtttttgaaaaaccgatgttaacgtgtatgcattaacatcggatgtttgaaaaaccgatggtaaaaagtatactttatttacaaattgtagatgcaatggtctctgatgttttgatgatgatcatgatgatgtgttacaattgatgcacatgggctttcaagattgaattcaggacattacttcaagattacacgttcccacttcatgatgatcact

SEQ ID NO: 88239 - DNA, 456 bp, Glycine max
cgctatacatgttgaattcataatccaactatcgcattatatgttaattaataactatgtattgcagactttcattaaaagtaaaagttcacttaatagtgatctaataaaggctatagtaactttggctttaatatatctaataaggtatatggacttgtaatctgtagagagtggagaatacatttattttcacgatggaataagatagagataccaaaaataatcttagggatgtctattaaataggttatggttcctaagtaacatgtacattaatcatgctcttctcttttgacattccatcatcagagagaaaactaaaggattcattcaagagaatatgtgttgatctggaaggtcacatcgcataatcttaaagagtgatcattcatcatgaatatacgtaggcttccacttcaatttcttaatgatgaacatgactcattctgcatt

SEQ ID NO: 88240 - DNA, 396 bp, Glycine max
gaaaatgtttggactacgagatcaattcaataatataactaccctattttctgactacttaagtatcctctccatataatgattaataagatcaaagcgtttgctcataataagtgaacaggcgccacttgaaacatcttctcttcttatggtatcatttcttcttcaaatatcctcagcttgcagaactttctgggctgttagcacaggatacatctaataagattatctcatgctatatggaaagaaacaaaatgaacatcaccttaatcattatctttacttcaccaaacagaaacttgattacaccccctgggatgaaattcactcgaaatggaataactgcttgtttccctgactgtcgcccttttctattgctcactgcatcttaaacta

SEQ ID NO: 88241 - DNA, 444 bp, Glycine max
agcctgtgcacaaatgcacgcagtttattctatgtttgtgcatcaagccatcaagacacatggcataaaatcaaagctagacaccacgctctgtggcacaagactaacgccatatctggagggataaaatgaccaataactccacacaagtgcttgatgtcagacatttagccttgggcacaatagacattttgttgccttctcttttttatatagatatagatgactataagattcatgaagtaattaaagtggtaatgatagttaattttgcttcacaagtgattaattatatcaagttattacacatggttaattatatgtgttaatatgactaagcatctaccagtcgtctatagtataatgaaattatcaaccacccacgtggtttacttctacctatatttatatatgactaactctttctgagaacttattatgact

SEQ ID NO: 88242 - DNA, 301 bp, Glycine max
  unsure (1)..(301): unsure at all n locations
ctaacctctagacctgttgttctgagttctcgaatgatgatatattgtctatttgganggacgaataatagaacctttctaatggtcggagacttccacggtcacaattcgatcaggaacgggggcgtctacagaagaaaatggagagatatgagagcttagatatataacttattaaggaagttgatctgttggtctatagtgttgtaagcccatattttcaccatataatgtctttagagtggtattaatacttatataggaagataagttgtcccgccatagtgatcaaagtcaatat

SEQ ID NO: 88243 - DNA, 394 bp, Glycine max
  unsure (1)..(394): unsure at all n locations
agcttcgagtaaacggtcgaaccggtttcttgtttatgtctcttcgccttcacacacgcgaacgtataataacggcatgcgatccacgaggtcgttngcactgcacctccgatcgcctctctaagatcgcagttcgggatcgctcacgttcagatccgcacgcttctgcacttcgccgtgcttttccttcagcggctctggcttctccgtctgcgcaataggtggattctccacctccggcggtggcggagccgccgcctccgtcgtagcctcctactttggtttttcttcctttgatatttctctagggctattctcatcatctttctcttccttttccggcggctcccctccgccgctgtgctgacttgtttctctaccggtgtttctgttc

SEQ ID NO: 88244 - DNA, 398 bp, Glycine max
  unsure (1)..(398): unsure at all n locations
ataagtggtaatcagagcacanaagcttcaagtaggtttttcttaaacctccattagatttttggctttaccttctctaccattgctgtttcttcatttttctccatgtatctcctcaattgtcttgttctaaatgttgttaacatgattctttatagttttcaccgattaaacttgctatagaagttatgattgattttctatggatcacatctcttgttcttgctcttgaaccatgaattgtgttaagattatgttcctctgagctttgtcttgttattatttagggctgacacctcaaccatataatncttacaaaaatattatagtagaataaaaccctttaaatttagagtgacctgttcacctattgtagtttgtcatagaatcatgtctag

SEQ ID NO: 88245 - DNA, 330 bp, Glycine max
tgcgcgcataaagccaccatcacttgttgtctaacttctactgagctcacgtacctacgcataactcatatcctatatttgtttaacaccgggtcctcatcaatcctttcaagcttctacgacactcaagcggaacaactattaagcagctcatctatcacagccaagctaaacatatcatacgccgatatctctgttcataacccaccaaaatgacagctttttctcgcttaacgtaccccagatcaaattcctttgatccaacttgttaactcgtggaatgattcgaaatgtcactggaagtctctgtacataagcctcattgcgacc

SEQ ID NO: 88246 - DNA, 390 bp, Glycine max
tggttcgaggtactcacccggtgaagatctattaactttttacaacgactgatgaccgtctaagaacggccaaatcctttgcgatgatcctcacagaaaacgctacggaaacggctccgaagcgcctccgcttagatcttcttcacggaaaccgatttttcacgccaattctcaagagagagaagcgcctaacgggctggacccatcttctttctcactgcctcccctatttatagcaaaatatgggaggtggttgccgcccagcttgcccaggcaagcaggggtgcttcctccagaaaccaccgccttctggatgaatcttctgtagggcccacagtgggcctcgtgtgctatttgtccccccacttttacctaagtcacctccctctg

SEQ ID NO: 88247 - DNA, 421 bp, Glycine max
acctgaggcatgcaagcttgcatctttccacatacccagaaacagattaacactgatattcactaaaaactttcaattaattcaagaatttgagaaaattcacctgcctgcgcatgaagtatttgatgccgaaggccaaatcgccgatgggccacttcccgagagtcttggaatacgtgaaccttatagtcttcgacagcgttacgatcgactccagcatcgttgccggagcctgcgccggccgccgtgaaagccttctccggcgaaccgatctgctcaatttcggcacctcaccgccgtgatcctcgccatcgtcctactccttccgcgccatccgcctgctcagcacgtagtagagcatcaccgtcgcaccggccgcagtcgccattgtccccgccgccatgcgccgctggagatcggc

SEQ ID NO: 88248 - DNA, 448 bp, Glycine max
  unsure (1)..(448): unsure at all n locations
aagcaattaaagacccagtgaatatactaattaattattcactatgtgaagaaaccctanaagtaccttgtgtgctagtggtgtatggcgacggcaattgctgactttcaattaactaataagattagcacaagaacaattaatataaccatgaatctaagcaaatataaaatcaaacttgaacacacatttacaggttctatagaacagaaatgttggaaaattcatgtaaattaatctcgggaattcatcaaccaaaatgaanaggtttagccagtcccaagattctcttctatgaaactcgatcagatggaactggggaggcttcttctgaactttgcttgaaagatgaatattcgtatattatattctcgaataaataggcctcttacagaagtacatatgatatatatgaatgaatctatcatcaatattacaatagagagct

SEQ ID NO: 88249 - DNA, 386 bp, Glycine max
agcttgtcaactctccaaccttgacaagtggttgtttttttcatacggcccaagcgaacatgcttctggcgttaccggcgggatctaatatgtcatgggggtagagaccctggatctgggtattattcccttgtctgaccattaaagaaagccttgaagacaaacatttatgttttttctattgcttgcagcaaatgccacgtacgcataatactcttgcatatggtgttcttatggagtagcacatactacggacattgtgtgtgggtgaatggaacttcatcattgtgcacaaaattaaggcaccatttcaactcctaccagttaccgaagagttgtgccttcacattaaatggaatgaacgtttgatttgtgactaccgtcac

SEQ ID NO: 88250 - DNA, 425 bp, Glycine max
  unsure (1)..(425): unsure at all n locations
accaactccctattgnnaaaaggactgttgattctttctttatgatcttttgcgacttcaaaccacacttaattggagtgtttacatatatgcaatcatgcatgtgaaatctatccgaaatatatctcacgtatttcttttgaaaaagagaaattccaacatctgattgcactatttctatacccagacagtaatgcatcatgccaagatcagtcatcttaaactcattcatcataaacttcatgaattcatcaaacatgagagtacaattcccagttaatataagatcatcaacatataagcttactatgagcatttttcatgtttcatcagatttaataaagaatgaatgctcataggggcattctgtataaccaacatttatgaaataagactcaatgcgactattaccagctcgaggggct

SEQ ID NO: 88251 - DNA, 403 bp, Glycine max
  unsure (1)..(403): unsure at all n locations
cgcaagcttgtcagcctgaatgaactatgctagtttatatgttgttatgaatggcntcacctatcactcgtttgaacaatattgtaatattctgctcctctgtgcactttatgtgtggttttacactctcttggatggtgccaccgtgtgttggaaccatacaactactggcgtgttgttgtagaactcccacttgctagtgtcatctttggttataactcactattgcactttcaaaaccaaaacctgcccacgtggcacattcttgtggtttttacaatactttgcatggaccacgtggcttcaacattaagtgttgggtgcttcgttgaatctactcttgtgcgcttttggttaatccattttcaggcttgaacccaaactacttctttttctctgataa

SEQ ID NO: 88252 - DNA, 212 bp, Glycine max
gcatgtaaaacaaactatcaagctttttcaacttaagtttagttccatgttggcatgttgcccccctaatcttacacagacatctttgttgaggagacaccatatgcactggcacataataaacttatgctcagcagattatgcttacgacctctcacaaataaaacattatcaaaagaatggtagggttggacacatatcctacccactct

SEQ ID NO: 88253 - DNA, 440 bp, Glycine max
  unsure (1)..(440): unsure at all n locations
agcttatggctataaaagaggactgataggttcgtgtttagcggngagggattccattaagaattaccatcttggtgagggaagcactgcgtgcttacgggctgataggttttcaccattaggtgtattttcagctttattattatataaatgagtttttctgatactggttcattcatttatccgcctatttttttcatatattcttttaagaacccatcaatttgtttgacattataagttaaatagttcgtattaatattaaattatcattaacaaattgtatgttctacatattccagataagttaattacaaagatttacgcttatcttttcttccttcaattttttccattgctgnataggtgacttttcttgttcaatcagttgtcacacctgcgatcgagttattattcattgatctatctcttgtgcaatg

SEQ ID NO: 88254 - DNA, 342 bp, Glycine max
  unsure (1)..(342): unsure at all n locations
gaccggatacttacagacgacgcagctgcagctgtgacaccggagattacttctcttctcgctcacaagaactgtcatactcaaaattgagtcacgctgacgggcggaaatacccgagtgggtatccgtattaacattctttnttgttgactgtaagacgaaaagcctgatagtcagctgagactatcgttgtttctgcgcccttcgtcaatcgcgggcgacaagttccgtcgacacgcggagaattacgtcatcttccgcgcacacaagatctgtcatactgacatttgagtcacgttgacgggcggaaatacccaagtggtcattcgcatgaactttctt

SEQ ID NO: 88255 - DNA, 374 bp, Glycine max
atcggacatccgtgagaacagatgtgagcattttgatttctcaagagctcccattggtcaatgacgggcagtcacgaattatataaccctgaatcggacatacgtgcgaaaagctaagacaccttggaatatctcaagacgatccgtggttcaatttcgagcctctcgacatcctatacgcccgaatcgaacatccgtgtgaaaagttatgaccatttgaatttgcccgagattccgatgtctaatttcgagcggatcgagataatacaagcctgaaacggacattcggataaaaagaaatgaccattagaatttctcaagagcatccgttggtcaagtcgagcctctcgaatataatgcgcccgaataggaca

SEQ ID NO: 88256 - DNA, 450 bp, Glycine max
gatcttaagcaccgcggctgcagctgcttggggcttctatgggctgtatcttgacttaatgaggtcccttaatggtgattttccaccatgcagatgcagcggaagacaaaggagaagaggagagaggaggcgccatccactatggaataatccttggaagaaggagcttcaccaccaagatgagccttggataataagcttggagaggatgcttcaatggaggaaaagatagagggagagaaagagagaggggggagcacgaaattgaatgaagacaaagggagagaagttgaactttgtattgtgtctcacaagactctcattcattaaagttacaacaagtgttacacatgcttctatttatagactatgtagcttccttgagaagctctcttgagaaaacttcgctgagaagcctctttgagaaaacttccttgagaagctagagct

SEQ ID NO: 88257 - DNA, 447 bp, Glycine max
tgataccaggatgaagaagatggaaatagtcctaatattgtgtcttatactggtcggaagaaccttgttcaaccacctatggtgaatgatcctatgaatggttcaagatgatggaagacaacctacacttagatcctcgacctacctaattaagttgttgggatttctttatgacttttttatcgataatacaaaccttaattactatcatgtcataaagtgaaataggagccattatcaaaaatggccaatgatatgccactagtttggttcaaaaaaaccatcctaaagttatttgtctttatgaaacctattgtagatttgagaaagctcatgttttttttggcaaatgcttatacatgacgcttgtattatttatgaggcaaactaactcaaaggcgggatttgggttgtgtgtgagattaacagggataatgggatcaatat

SEQ ID NO: 88258 - DNA, 431 bp, Glycine max
  unsure (1)..(431): unsure at all n locations
ncgcttcatgatgatgaaccatgcaggtgtgatgatgccttatgttcaagcgattgattcaagacttcatgatctggcatcaagaatccgctcacagattcatgattcatgacaagacatcgagaagcagcgagtcacgacttcatataagataagtcttaaaagaatgttcctaacaccaaatagcacactcttgtcctacaaacgatttttctcacattttctaagctaccagagtgattacgctctggtaatgcgattaccatgtctcagcaatccatgaccagtgaccaacttggttttcaaatgatttgtaacgttccacaatgatcttccaatagtgttattgatgacactatattagtgatcgagtacacgcgaatcttgacattggaattcaaaatcaagtgcgaagagtctcgcattaacat

SEQ ID NO: 88259 - DNA, 289 bp, Glycine max
  unsure (1)..(289): unsure at all n locations
ccttaactacctgggttgcctatggctagctgcgtgggactttatggctttctggtgttttttgtgaccctgagagaaatatatagtattttttatatttgccgcttggcgctctggtgtaaaacaactggcccaaaaaggttgtttatttagttggaagaaccaattttttttgttgtttcgccttctnaaaggcaaatggagttcacattggccttgtgaatgctcaaattctttgacttaaatgagaacccatatatgagttctgttcttcttccaagagagaatg

SEQ ID NO: 88260 - DNA, 377 bp, Glycine max
  unsure (1)..(377): unsure at all n locations
agctntanacgtctatatcactattaacaacctgttctcttatgagaaaatcaataatgctagtaatgaattgcatattacataatttcacaattttacttactcatggctcatgcagattagttgattacacaaagatatcgtcctgttataatcggctagtattaataactcaaactaatccatctattgaggtaacgcgaggtgcctgaatcatctaatctacaagcttagagttgttggagaatggatgtgtctgatttagttattgagagggcatgcaactggaatgagaaaacctttggtcaatcggctgatgggtattaggagggaatcacacctgttctacctgtttaacaattgtacataaatgtatc

SEQ ID NO: 88261 - DNA, 241 bp, Glycine max
atgcgtatttttatttttagcctatatacctgcaatatgacttaggtcgattgaaatctctttatattcactccgaaaacatcttcgcaaaattggcagcctcagcgagcagcagataccgtcatagtagcaacacgcgcaactaataacatcagattcagcttttccaacgagctttttaattattacttttgtaacaagaatagactatcgggaggacggaccaccaacttgtcttgag

SEQ ID NO: 88262 - DNA, 446 bp, Glycine max
  unsure (1)..(446): unsure at all n locations
gcttatgagaattccaagccttatangcatattcgtatattttatcatgttaaaaaacttttgaaaaggaaatttcagcctggccaataaggtctgttatttaatctagattgatattgngtctaaggaaactaaaatctaagcggtctatactatttatcatcaatgaacttattccacatggagctatgatattaaaggatcccgccattaataagacatggactgtgaatggaagcacaatcaaacagtacttgtgtggtgatgttgagaagctcaccactgttgtctaattgcaggaagtctgagccacaagaagggcatccaacttataagacattaaagaagcgctcctgtgaggcgaccctatatttctaaactctgtgttaatttgtgtaatccgaattntatgtcttgtattttctgaacatgaatattaagttttt

SEQ ID NO: 88263 - DNA, 337 bp, Glycine max
ttccgaaaattacattcgcgctctttataattttatttcaaaggacacaatggtagtttcaattaattgctgggtgcaccagcaatattgctgggtgcacctagaaactcccggcttttcactacgtcaagcccaaggtatagaagaaatcttactctaaccttccacgtctgtcatgatacctactccaaaccttagtaatatagttgtaataggggtagcccatgtacttactgtgatgtgggctgaggactaaaagcctaaactattgtttaaaataccacccataattattaaatgtacctaatcttttcttaaattaaatatacttaaatat

SEQ ID NO: 88264 - DNA, 300 bp, Glycine max
ctgattttttataaaaacgaattaatttaaaatcatattttgtatccggtaagataatcattttaagagggcaatttttttaacggcacttatcacttacaaagatcaatttgaaaactcaacctgaggggtcagatcacaaagtttttaatgttgaggatccaaaatataattaatataataaccttggagcaacatttgtctaatgcagtgttgagtattatcaaccacaacatttaaagaaattccccatttacttgaaatattaagataactatgaatgtctgcttcaatgatata

SEQ ID NO: 88265 - DNA, 432 bp, Glycine max
  unsure (1)..(432): unsure at all n locations
agcttgngaaatcaatggaatccaatattttgtttgtcacaagncgatcaatttttgtacttagatatgtgacctaagcgcttatgccataatgctccggagtttggattatcaaatctatgcttactaccatgctattctgcattaaaggattcaccatatgcagctacagtatcaagtaaatataaattatcattaactaagagtgaaccaattccaacaatatctgaattaaaagacaacctgagcacattgtttccaaatgaatacaaaagtatcttttcaattccaataaagaccagtacataataataatctaaaaggccatatagcttctacctccacccgattaccatctctaacaaagatccatcttctcaaatcaattggcttctggtagcataagcaaccctgcattgaaacactgatgtt

SEQ ID NO: 88266 - DNA, 410 bp, Glycine max
attgcaaataacaacacagcagcgataaatttcttcttcatatagcacaaccagagttaagcgacgtggcattgttgctcaccttcttcatgaaactacaacatctattcacacatcctatacgactaatagacttgagattaaacatctattgtttaatatcatggattgatcaatgagcaatttcaattcccgcaacaactttatttagcccacagacacgaaacccaatactagaccaataaccataactgacgtaaaagaactatcaatactctatgaaatgccaaaattggatcatctaataaacaataatgaaatatataatatcagttatatcacgatcctatatatttatgtttcatatcaataatagatactagtctctgtaagatcaaaggtcacaccta

SEQ ID NO: 88267 - DNA, 362 bp, Glycine max
  unsure (1)..(362): unsure at all n locations
agctnttcgattcattctatgtacctcgggtggttcatattgtgtatgggtatttctattcttggtgaatttacttttataccccctcttgacgtgcttaagccatttcatttaagtcatttctcgcttaacctaataataaaatatanttacacccggtcgattgaatcgtattatccgctaacttcagttaaaatgaattccgaccgttcggtcgtgccagtaccaccgtggaaaatataaagaggaaaaaataatataataatagaaaaaaacgtcttttagtaaaataaagcggaaaatcaatcgggcgttttctctttgggatttctcattcttaattgaatcgactaataactaaa

SEQ ID NO: 88268 - DNA, 426 bp, Glycine max
  unsure (1)..(426): unsure at all n locations
tacatggcctanaaggttaagatgattatggtgagggtctttatatccacgattcttcctcccactaattatctcaagtacgatgacaccataactaaaaacatcagatttggttgagaaagacccatgcactacatattctggaggcatataaccactgcaaaacaatattagttaggaaaggagacattagcagaggatgtagcatagtataacaaaaataagtttcttactatgttcccatcactctatttgtatttgcctcagcttgatctcctccaaatgttctagctagaccaaaatctgatatctttggaatcatattgatatcaagcagaatattgcttggttttagatctctatgtatgattcttagtgtagaatcttgatgaaggtcagaagtccacgagccattacttctataat

SEQ ID NO: 88269 - DNA, 471 bp, Glycine max
  unsure (1)..(471): unsure at all n locations
gatccttacagtcacctgccgcatgcaagcttggcaccaagtaaacccgtttcttgaattatgtccaaagtatatttacgttggcataagaatatcccacttggattccttgcaacttctacaccaagaaaatacttcagggtccccaaatctttcatgtgaaagcacttgctgagatatactttaaatttttggattgtagtggagtcattcccacacacgatcaaatcatccacatacaccaaaactaccagttgcactccatgattaataagagtaaagagcgagtggtcagaggatgattgttgaaacccaaaattcgtgaaggcaaatgatagtttggcaaaccaacatcgaggggcttgcttcaagccatacaatgatttgcgcaacttgcaaactaatcctggttgagatgtgcganagcctgcgggcaacttcatgtaaacatcttcatgaagatcaccatgg

SEQ ID NO: 88270 - DNA, 452 bp, Glycine max
  unsure (1)..(452): unsure at all n locations
aacactcaccctctctagctnttcattggtgtatcttgatctccttttgtgttctaaatcgcgggaatgtgctcatatacgtggggcaattttggtttgttctcttgctcgattgggttgaattgggggtttgtatgagatggccctatgcctataatgcattttgatgcaatgggacatgccacattgtccccggtctcttgctattgacgcctaaacgcgcgcccgccaagtgttcggtgaaatgcctcaatggcattagcgcgtgatttttgtatggaaacaacctatgggacaattaggtctgcacatgttttctattctttgggggcatgtattccgattcgttagggctagagtaattgccccccatatatactatgcctangaaccaaagctctttatgcaagagaacacaagagtgggtacatattgagtaatagtaccctttt

SEQ ID NO: 88271 - DNA, 416 bp, Glycine max
agcttcagagtagaatcttctaaacctttttccttgataaaaacatcagggactaaattatgccaattcctctttcaaggacacattgtcatccctctgatctatatgctccaatgctcctctatccacaaaatttaccattctgtgaggcacaaaagccttaagtaaaatgagatgcttcttaattaaaactcctattcttctcgtagtgcttcttctggggaaagtactccagacttatctatacatgtggcatgacaagtaccaatgatcaatgagagtaagttattccaagattttttcaccagttgaaaaaagattaaataccacagttccaaccaaatacaacccaactgaaaccttgaaaacatcatcccaggagcctgataatagtcgaagaaaacaaaccgttatat

SEQ ID NO: 88272 - DNA, 405 bp, Glycine max
ccttagccctagaggagatggaccttataggttttgtatatgatcttaacaatgcctatagagtggacctcccacaagagtattgagtcagcaccactcttaacatttctgatttaactccttttgcacgtggagcttatattgaggaggaggaactaatatatctgaggtctaatcctcttcaggggaaggggatgatgcaatcctccctaggaagggaccaatcactacaaccatgagcaagaggctcccagaagattgggctagagctgctgaagaaagccctatggttctcatgaaccttatggtagatttctgagcccatgggccaagggtgggccaattatttttgacatattacactaggatgtcattatatttggcccctgtatataaggctccata

SEQ ID NO: 88273 - DNA, 444 bp, Glycine max
  unsure (1)..(444): unsure at all n locations
agcttgaagcanaacaatatatattaccattatgtnttgcatggcaaccctattcctttcgtaagaaagaaagaacaaggtctgtatgtacagaaaaaagctgtgtatccacgaacagctgtttatcacaaggcaacaaagggataaaaaaatacagaaaacagaattagtagtctgaatacaaataccaaaacagaaagatctcagttaatatagaaattttttatcatctaaataacgcaaattagacaaaacaagcttaaattgattggagaatgcaaccataatatgcatatgttcaattgactttgaaaaatttgcttctcattaaacacactcgtgttctcacacatacttatgggttggtgcatctaataacaataaaatcaggtttgtcattgctggagactagcacaagccaactccctaagtgagtgcacttga

SEQ ID NO: 88274 - DNA, 462 bp, Glycine max
ctaagctagcagatgctgcagctgcaagttctatggatgagatattttattcagaggatccttatgctaagaaacgcaagaacttattagctcgtaactcctcaattgagaggagtctcagttgcgcaaacattggtggaatatcaaagcgacccagtaacataagtggaggagcatcttgtctcactctgaactgtagtgaagagggtagtatctccacttcaatatcgcctccatgccctcttcctcctcttcatccccgtgctattaatcggtcatcgctgcctcaaccttcttcaactggacgaaatcctccttggagatcatattcatggactgatctgcactctgttgctgaggctcatgatatatctggtttggctatctgtagtggaagctaaatgcactgaattattgacaccaatataagcttttaattgatagccagtgcccatgagtttg

SEQ ID NO: 88275 - DNA, 445 bp, Glycine max
  unsure (1)..(445): unsure at all n locations
agcttcctcggagccatntcctgcgatagcttaaatttggaaagtntagtttaccagtgggacactactcttaaaacaaaaatggcatacaacctcctcccataaatacaaacatcaatgtaaatttagagcaagcttatgcgcatatttccttacgaacgttcacttgcacaagacattctatcaactaagaaaaatgcacccatatacaatcaaggtagcttcattacctagattatttacatgtacttccaaggtgtatttattatttacatcacacacgcctccttggctgaatttacatacatgcatactcaaagcattttggggtaccataaactgcacatgcgctcatcttggtattnctaatacccatacatatacaaacttcacgatgaatcttgactacctacancataaggtgctacatttcatgccttttttt

SEQ ID NO: 88276 - DNA, 353 bp, Glycine max
  unsure (1)..(353): unsure at all n locations
tgaatcggacctcaatgtgagaagctgtgttcatntgaatttctcgagagcttccgctcttcaattgcgtgcgtctatatgtgtgagtcgcccgaatctgacattcgagtgataagtgatgtgcatttaattttgtgcagagctttcgctgttcgattacaagccattcgatatgcgatgcggctgaaatggagagttcgtgtaaaagtttcgaccattggattttttcagaacttacgttgttcaattcgagcggggacatattatgcgcccaatggacttcatgggaaagggataccaattgattttcggagctccattttgatggtacggctgttttaaatctgatagac

SEQ ID NO: 88277 - DNA, 420 bp, Glycine max
ccaagtcatatactgaacacttatagctactaccttattgttatcagataggtaagcgcccacttcatcataactacaacattagatattaacaccccttgtcaagtgcacaatgactttgattggacattcgttgataaacacccactttgttaccaatatatgagattgcctacgacacgatttgaaaccgtgaaatttgctgttaaaccgataatcaacctgatagctagaacatttagctatctcttgagtgcataatatgatctcagaacgcgattatgatagggcctagcatgcctaactatcctcgaagcaatatttatgcttatgtctatcaatcgctatctcaatttctaacctatatactgatctgcttacccctgtatccttacgacgaagagactgatttatatcttc

SEQ ID NO: 88278 - DNA, 349 bp, Glycine max
agactcaattttataaatgagtcaagtccaaacttgatattaataattgattaataactaattctaaaaaagctattgctcatctttatattcattttcttttaatttatcaatcaaatataatttaatccttaaaaacgttacattgaaagaaaatgaaggatcatgacgaagattaattcttttaaaaaattataagttactcttttgatgatatatatagtagaaacttatagtcatacaaatttcacaatttcatgacacatctttagtacatatttttatttatagaatgttgtattaaatactaaattgataaagttaaaaaataattcaagaaaaaatttca

SEQ ID NO: 88279 - DNA, 392 bp, Glycine max
ttctataaaggttcttatggactgcttgtctcatcattccagtaataccttcacccacaatattgaatagcaagggagctaggggatccccttgcctcaaacccctagaaggattaaactccttagaagggctaccatttatcaaaattgatatcgatgctgagtggaggcaagctgatatccaagatctccattttggacaaaaacccattctgcacagcatgtaatccagaaaagaccaagaaactgaatcgtaggccttttcaaagtccaccttaagaatcatcacaggtttcttatttctccttgcttcctcaaccacttcattaaggatcagaataccatgaaggatgtgtcttcctttaataaaggctgactgcctttcatcaatt

SEQ ID NO: 88280 - DNA, 326 bp, Glycine max
caacaaagtactttcgcacctactatatgttgacttgaccaacgctgttattggaatgctgtgacaatctttcaacaccttattcacacattctgataggctggttgtcatgtgaccatatcttcatctagatgtatcgtaagccatgctccatttttcctttgaaatgcgatcaatccatcttgctatggctggactcagttgacgaaatttttctaagttttgatcaaacacatgcttgcaaggagtgtacgctgcatcaaatttgttatcatcaaaagttatacgtcgacatcaaacataaattaaattaatgtataaaataa

SEQ ID NO: 88281 - DNA, 393 bp, Glycine max
ggcaggattgaagtctaatccatcacacaacacattatacacatgaagaacaaattaaatgcatacagtcatcaaatcatagaaatcaattctaagaacataaaacatggctaaattaccacacacaaaccatcaattcatgacaacaagaaaaagtattttagggtaattacaactcgtctaatcaaattaaaaacaattataataaatcaaaatgtaaactacacaattaacttgagatctaagatcaaccctattactcacaaccaaacatccattataaatcattatctaatccctaacgttaccaatataaccaagatggggaaaaggggaaaataatcaaaatcatatagtaaaagagaagggaaagcgaagggaaacactcatcta

SEQ ID NO: 88282 - DNA, 361 bp, Glycine max
agcttcatagatcctcttccaatctctttgtagaggggacttaagtaatttgcatattgatactgcacaatggagtaagcattccttagaccatcatttctattctttctttcagaactttccctagcttcaagaaaagcaactgaaagaaatgatcgtggtaaactcatcgatcacaaaaatatagtacaggttagtggtcacatgcactcatgttcatgtaccttaatgagcacaaaacacaatagcagtgcatggactctacaattttattttggatatgtggaagcgctgaaatgcacaaaacttgttggttgtacaagacaataatacaattgggtgtacaagacaagtgtttaaa

SEQ ID NO: 88283 - DNA, 389 bp, Glycine max
  unsure (1)..(389): unsure at all n locations
tgtataatntcataaaatcccgagagtaattactgttatttactctatactaataagccacaaggaccatgcagtgttagctgcgagcatcaaaagagagcctctaatagtatcacctttggagtgcacaattgttaaagggtgagaagtatggttctaattttctggatagcatttcatgaaacccaggtgaggtcctttgactaaagcaaatgttattgccccagcaaggcttaaaacggaccccaaaatcttggccaatccatgcacacgttttacggaaatgctttccatcctgaaatttcgaaaaccaatttcagttttcaccatatcaaaactttgatttctctctataggtcttgaccctgcttcagaaaaataaatggatg

SEQ ID NO: 88284 - DNA, 426 bp, Glycine max
gctcggccccgggatccttgatactctagctgcacgcatgcaagcttaacactaagaaggcagatgtcatgattccagcaactgcctcttgtctcatttgtggagaaggcctgtgggctcttcccgcttccattcttgctcttgccaaagttaacccgcctatctgcatgaattttcttgcttcctagaacttgatcaactacatcaaaccaatgaatgccataattagttagttaattaatactactatatatgttagcaggtacacttcatacataaccaaaatgctataaatattccaagtgtctggccattgggcttaggaacattgtattattgcttactacaactttgtaggaaaagtcagttcctgttaattgatctctcggaagggaatttcttcttcacaggagtcataattaattc

SEQ ID NO: 88285 - DNA, 391 bp, Glycine max
tcctattcatcaaagtaggataatcaaattgttctcttctcatacccacttcgatcctttcatcgacgaaaactaaattggcaaaacttgaaggcatgtaacccaccatcttctcatagtagaacaccagtaacatgtctactatcattgttatcatctccctctccatcattaagggcgctacttgagctgccatatccctccacctttgggcatattctttgaaagattcatgctcccttttacacatgttcttagctacattctatctggagccatattagaatggactgatactgcctaatgaaggcaaccattaggtccttccaagaatggactcgagaaggttccagattagtttaccaggtgacggctgccctagtaagacttt

SEQ ID NO: 88286 - DNA, 386 bp, Glycine max
  unsure (1)..(386): unsure at all n locations
agcttacaacacctangtatctctgcttaattgctcctcttgctgccttcggagctcttttcctgaaataagcactatggtgtgtgctgtggaattctgtgccctggacttcttaaaattctctaccctaattctgcacaagacatgctttaaataggctctgaatttgcgatgttgcacttagcgccatcctcgtgctcagcgcgagtaagtggatttgagcttagcgtcagtcgtgcactgagcctggctgaagagaactgttgcgcttatcgcattgatcttgcgcttagcacgtggccttgatattgatgccttgccagattcttctgtcgtgctaagcacattgaagctgcgcttagcggtggatgcgcgcttaacccact

SEQ ID NO: 88287 - DNA, 393 bp, Glycine max
  unsure (1)..(393): unsure at all n locations
ngagtatgtttaaggggttgctataagctgtcatcatcatggctacccaccatagagggtgatatacatattctatgggggactatcataacaccacagatcatgcctagatgttgtagtacggtgaacctcatgcacaaactgacagatgcaacattggagatcattgaggctatggcttctaatgcttataatggcattagagaaatggatcaaaaaaggatcttagagaaaactgtgagtgcgtctcaaaaaaattggtcattgaagttggacgctacactctgggattacaaaacaacctttaagactcccattgggatgtctccatttaagctattttataggatgaactatcattttcctgttgaattgaaacacaaagccatgtgg

SEQ ID NO: 88288 - DNA, 327 bp, Glycine max
aaaaccactggacatacaaccgatttcaattgataatataacactgaaaacggtatgctgaggctaatcctagaagaaaatacattcacaagaaaaatgacagaaagggcttgacttcatccgcaacatcaaggtatttagagtctctgtggccgaattatgactgcattaaccgcatttattatgcaacagaaccactactgcgaccagaatttaagaccttaattgcattggcatgttagaaaaagagaacgctacccgaaattccattctgcacagacataatgtccaatgcggagatgagcgtaaagccctgctttctgtatt

SEQ ID NO: 88289 - DNA, 397 bp, Glycine max
tcaatctagaaataccttattctccattatagctcaataaggactacaaaaatccaactaccaaagaaacaatatagtagaaatagaaataacaatagatactcagcgcaaaaaagaaacaaaaatcaacatatcaacatctaaataatacaatagaaacctccaacatatagagtgagcagaaaaatcaagatggaaaaaactcaccagaaaacaagggaagcaaattcaaaaataaaatgtacctgcatgctcataatccattctgcagaattggcaccataaataccacattttacaccctgcaaatcagcaatatatgaattaagctgaaatgaacaaattgctagaaactataaatataatcatatgcaaatatgaaatatcaaaatcatat

SEQ ID NO: 88290 - DNA, 348 bp, Glycine max
  unsure (1)..(348): unsure at all n locations
ctcacttatagcacacctcttactttanatcacttacacctgcatattctacccatgaaactacctataagtgcatcatcttcttttgttctcaccaaataggttattagacccagaggtctaagactgactttgtccacactttataattattttttatcgngtttgtatctttttgtgtatgctagatccgtgagtcaagaaacaaaaccccattcatggacctccattgcagatctactcagatggaatttgttgaccatgtctcatatttctttgccctctcttttatgctttgccgtatcgtttgttctaaccatggccaataaacatcttcaacgaccatga

SEQ ID NO: 88291 - DNA, 391 bp, Glycine max
ttctcccaaatgggttggactatcgtatctgtttattcatcaataaaggagtataccgattcaaaacttttgatgggaaggccatgcctcacacatggaatatagcgaatcttccattttattacaactgaaattacaactgaacaaatcagtataagtgcataacctcatgttctttaagcttatttcattatgttaataaggcagtcagcataaatggggtgccaacgttgttgggatgtcaactatatgttggggttggcacgtgccaacgttgttaggatgtctatcaccaaccatacaatatgccctttatgcttacttactttatagcatttttcattatcgacaatttataaaaaatgaggtatgtagaaatattatttggtat

SEQ ID NO: 88292 - DNA, 319 bp, Glycine max
acctaactaaatatatattggctgatatattacctatatatacatacacactcacaaaggttggataataatctattaattatcacttatcagtatatatagatcctagagttactttaattaataaagagcaaggatcttcttgagctgacacaaggagaatatcacaagatgggggtacaaaggcctttggaatacttatctgacttacttagcaccaaaaagaagaagaagaagaagcaagtccaaactgtagcactgaaaatcataatggactgtgaaagctgtgcacccaaggataagcatgtcctatttggtg

SEQ ID NO: 88293 - DNA, 396 bp, Glycine max
ctctagcttctcccccaattatgtataaatagggggttatgttttatagacaagggttgagctccttacgcactttctctctttcgaaatagctgaggaaaagtagttccgcgaagaatatccaagccgaggcactttcgtgacgtctccgagagtaattacgcgaatattctcgaccgggcttcaagattcatcggtcgtatcttcgttttcttcaggcttcaacgggtaagtacctcagaccacgttttccaatgcattctatgtacccgtggcgggccacattttgaagcatgtatttttattctcgtgtacatttactttttgtaccccctttagacgtgcttaaaccagttattaatgttatacctcgcttaagctagaaataaaataaat

SEQ ID NO: 88294 - DNA, 362 bp, Glycine max
agcttgtgcatccaataccctgattatgatgtcccatatgttcttaaaactggattgatccattcacttccaaagtttcatggccttgcacgttgtcgcaacatgcccttttgcgggtgagcgaggcgaggctcactggtgcgctttccaaaggaggaaagatgcgtggagtcaccaccaacatttatttgtggaaaacgtcacataaaccgaaggaaaccgatcaaaaccaaaattctaagttcgggagttgtatttacgtttgaggaaggtattatcacctctcacgtttgtctcaaaggacaacaacctattttttagaattgtgaaattgtgttatcttaccttttatttctttttat

SEQ ID NO: 88295 - DNA, 391 bp, Glycine max
tttctcagtcatctgtaaggatgattgggtgttataaagcggcgatgcctactgtagactatttttctcccatttttcagatgtgtgtaacttgtattttcttcacagatggggcatgcatgatgacccttaacactgtaaccgctgagattcccatatgctgggaagtcattaatggtacaaaaaagcattgcacgcatttcaaacgtctccttgcgaaacgcatcaaacactacaaccccctcgtcccacaactttctcagatcttcaaccaacggacttagataaatgtcaatgtcatttcctggctgccttgggcccaatatcatcatagacaacatcatgtattttcgcttcatgcacaaccatggaggcaaattgtgaattacta

SEQ ID NO: 88296 - DNA, 338 bp, Glycine max
tctagctttcactagtacagaatgttttgctatttcgaagacatccttagcatgatggatgacatctgagatgcctgaacgcagacagaactgttaatggaaaataagttcatgtcgatgaccatgtgatctaatctggtactacaatatatataagtggtgtacaggttatcatgatctcttgatgagaacacttaggaaatggaaaagagaacatggaatatgccttgtctgcacatcgtagtgctaacactttcaactattaaaaccatagcgcttttcagatcgttccataacatgtccctacccttgtccaaacaatgtgagcacaagacatt

SEQ ID NO: 88297 - DNA, 384 bp, Glycine max
tgtcagacctacaacgccttcaccaatcgcggttgtgcatgtgaatcacgacccatctacctgatacaagccagggcttgagaccccgctcccactgtggcaatactcagcactatatcatcttgatggatggctttcacacttacttcagatatatactcaatttgaaagagaccttgaaaactggcacgacctgttggaatactcacagatgatacctcccatcatgcctgtaacttctattatcaaatcaattacacatttattgaacatatcctataattcaaaaaaaaacatgctacaccatgcgtgctcactaaatcgtgcctcagatttatattcataactcggcaacactatcatcattcacgtatccactctgct

SEQ ID NO: 88298 - DNA, 294 bp, Glycine max
atttaaaatgaagcaactttgtgcactccgctctggcaaaatactgagttactacgtaatatattatcaatgcggaccacaaaataatctggaaattagaacaaatactaatactagaaatttgaaacaagaacaaaatgttacctttatacaaccatcataatctactgaggcagcagctgactcagtcaggcttatcaatctattgaccgcagatatgcatcacatcgctgaccccttacaagtccaaaaagcagatgaggatacttgtgattcttctgtaacccaaatcac

SEQ ID NO: 88299 - DNA, 378 bp, Glycine max
  unsure (1)..(378): unsure at all n locations
tgctggcaaatgagaaaagagctttgtgaagtttttcagcatcttcgaaccactgtatcaggaaaaaaaacanatatatataagatatcacatgccaaagaagaaaataatacacctttaaacgactgaaacaatttatataagaaaaataaatgggcaaaaaaacttcaaggaacttgattttagaaaaactagtgaattctaaagccatatgtttttacttaattctatttatctatcctccaatccagaatgaagtacttgcacttcaggttctcttggtgtggtttcttgcaagttctttgtttaagtttctaacctattctcttaatcattaaatgtatacttgataaatccatttggaagaccacaacaccc

SEQ ID NO: 88300 - DNA, 336 bp, Glycine max
gcttttttttcgcagatttatatgaatctgggccacatcatggactcctctaaggacaataacatcatttcttgcactgaattgttgggagttggacgccatcttctcaattagattcctagcctcaacaggagtcatatcaccaagagctccatgactggcagcatcaatcatactcctctccatgttgctaagtccctcatagaaatattgcagaaggagttccgcagaaatctggtggtgaggacagcttgcacacaatttcttgaatctttcccagtactcatacaaactctctccactaagttgcctgatgccagaaatgtcttttctgat

SEQ ID NO: 88301 - DNA, 381 bp, Glycine max
tgctcgctaagcctgtgctgttcagtagagtagtcgcgctaagcgcaaatccttatctgtttgaaaatttgtggaatcgggcttagcaagtctgctcactaagccaattctgtagaaaaaaattggatacgtgttcaatggctaagcgcgtagctatcatgcttagctcttgagtagttttctaagacgcgctaagtgagtcacttgcgctaagcgctcggtctgatttttagttttattttctactttttattttgaataaattcctgtctaatcttgtgtttttattcttttgtatagcagatggcttcccataagagaaaagccataactttagtgtcgcagggcggttatgatagatcaagatttatatcagagaag

SEQ ID NO: 88302 - DNA, 351 bp, Glycine max
aacataagcacttagactatgaaggaaagctggagttgctgctcatgatgtccaacgttatatcaaggaatgagatcgggctgcacaatgcacaaggcaagataaaatgtcacatgaagtattgaagttgcaggatccacgatgtcgaatacaatgtcctgacatcctgcccgagaatactggagttgctgtacaatgcaagataaaagtcaagtgcataagtgaagttgcaggatccacgatgtcggatacaatgtcctgacatgctgcccgagaatactggagttgctgtacaatgcaagataaaagtcaagtgcagaagtgaagctgcatgatccacgatgtcggaca

SEQ ID NO: 88303 - DNA, 186 bp, Glycine max
aaatttactggtttgaccttcgcggcccatatgtgccctaagcgcttgagcacgaacaaggccgcctatgtatgtctgaaactagagtttctagggagagtctgggctgacattcagagctttccttgtgtcgggcttctagagagagaaaagatcgagttccggagagttttgagagattttggt

SEQ ID NO: 88304 - DNA, 389 bp, Glycine max
tgcgagctttagatcaggactgaatcgtttaatattatattaatcttgaaatttttttaaggtttaatgaatactctgatattgatgatcttgatttatttttagaattgaaagtactaaaagaagtgttaagagaagaaattagcacaccaatgagttatattaaaactttagattctttttcaaatgtttatattgcatatagaattttattgacaattcctgtaacagttgctattgctgaaaaaagtttttcaaaattaaaattacttaaatcatatctaaaatcaacaatattacaagatagattgaatgtattagctattttatttattgaaagtgaagtattaaaattgcttgattataaaactctgataaatgattttgca

SEQ ID NO: 88305 - DNA, 395 bp, Glycine max
  unsure (1)..(395): unsure at all n locations
ntgaattcaatctatgaacccttaggggtccttctttttgcttttcacatcttcatctcattcttctacatcagtgatctcatttctttgtgtgaagcgattttagccgattgtttgtgtcgtaatctcacataatcatcgtaagataaaatttcaaccgatcgtttgtatcgtaatctcacttaatcattgtaaaataaagtttcaactgatcggttgtgtcataacctcggtttatcaatgtaaaataaagtttcaatcggtcatttactttgcaagtcatcttttaatgagtttgaaagtcaataagtgaaaccaaagttaaaatcaacacataaacaagcttttatccatgaaaatcgcttgaatatgttcaaaggtccaacgccttaacg

SEQ ID NO: 88306 - DNA, 383 bp, Glycine max
  unsure (1)..(383): unsure at all n locations
agctntttttaaaacttgtacttcttgtaatcgattacaatgcctggtaatcgattaccagtggaaaaatgcctttttcagaaaatgttaaaaatattctaaaaccttttataatcaatttaaaaactacgttgtgaggccaaacctttgcaatcactaagagactattttaacaaagatagactaagacttagcttttttcttgatctttgttttcttggtcttgatttagtcttgaatcaatctctgtttacttaaccttgaatgtttcttgaattaatcttgtttgattatactttggcatcatcaaaaacctgtattcatacattcacagtgtggatatctaaatgaagactgagacaacgtctatatataggccaaat

SEQ ID NO: 88307 - DNA, 342 bp, Glycine max
gataagggctacgcggggcgacgagagctcacgtgaaggagggcaactggggatggtgggcacatgtttgatttgtggatgtgggatacatgaattgcgccattgcccgaacgctacctagtaccacatatgaccgagaccctataatcctacaagctagaagcgagaaaacgcagaagagctaacctccctacttttatttgatgaccacaaactgagacctggagataagtagcgggggtcaagagaccttggggatgtcacgtggggtgctaattgccaaaaccaagctagatcaatcccgacccaacccgggcataggcattcagtgagaaccagtga

SEQ ID NO: 88308 - DNA, 351 bp, Glycine max
ctgtttttttcttatatatgacgcacggtttttcctttgggtatatgacctcctaccacaggttttttttaacagtgcattaaaaagcgaatttgcattatttgcttttctatatttatttgatctcacctgtcttatttattaatttaatgtattaaaaactactgtatatatgcaaggatatcaaaattaaggtcaaaactctcacaaaagtaaagataggcttggatcatgtctttaagacttagtgagccgcgggatgcgcggatttgatagatcaattaattgaagtaattatttgacggctgaatgaaatgtaaatttgaatatttatacaaccgacttatatgt

SEQ ID NO: 88309 - DNA, 392 bp, Glycine max
tgataatcagtacaaaacctccacttaccataatgtttcttaactaagacaataggtgatgaaaaagggttagttcttgggtgaatgatgccttattctagcatctcatgtaccatcttttcaatgtgctcctttaaccgactttgaattgtggtggaggggaatggcatggttttgatccctgattctggaaaacccgtatgtgtatgaaaaaccactttatacgtatgcagcaaggtcgctatctcaggagcaatatacacaggaaactaagtaagaatgtcatcaggattatcatgttgcatcatgtggatagcaaaactattagaaatggcactagtatcatgcaaccttttgagttggtgaaggtgagcttgagtaggagtactgga

SEQ ID NO: 88310 - DNA, 387 bp, Glycine max
  unsure (1)..(387): unsure at all n locations
agcttgcggactataccttcgacttatacacggccgngtttctgtctatgcctggattcaaagcgggctgcagcaccggctccgcttccctaactgtactggaggcggttgcggtggctttatcctctatggttttctggagttttaacatgacctccgagatggaagccatttgatcctttaaagccaatagatcggccttcatctgttcctacacgccctcttcattatccatttttctggatcgagtgttataggggtgccttggtgttttcttagttatgatgaaattcctaaagaaataaacaacggtgagtatgccaccaaaacatgagtatgcaaatggatgatcggagcacttggatccaccccaagatttttagataa

SEQ ID NO: 88311 - DNA, 388 bp, Glycine max
  unsure (1)..(388): unsure at all n locations
tatttagttgtgactctaatgtgtatgttcttatctttgaaaagctgcatgtttgggaaaagcaattgattgaagcagtccataatattcaattcatatggttgaatttgtctatgaagcaaacaccattttgagtgattactgtagcttgtcacttgaggacaagtgaattgttctttctttgcttgaggacaagcaaaactgtaaatntgggggagtttgttagtcgtcttatacgacaaacttttgtatagaaaacattttccaaaacttgtttagttccccaatttatggttattttgtagtgattttgtaaataaatcttgttttattgttaaagctatctctagaatatgtctatcggatttaatgatgaaatatgtagaat

SEQ ID NO: 88312 - DNA, 360 bp, Glycine max
ctttaaattggggtaacttataattttactcattgatttgccgagaaaactaatggaaaaacgagagtgtgtaatgatttttttttgtcttgtatgaacatcctttagtcaaatgaacatttctctctatatgattaactttggattttgagtcataccttatccaaaactagacatacatgactttttgtactggtaaagtttataaaattttgttatatgataagtataagttatgcaatagttttataaatactcgatagaaggaaaaaaaacgtaaacttgagtataaatataaatttttaatcagataaatacatttatgtataaatttggtttgggttggattagattgaattt

SEQ ID NO: 88313 - DNA, 393 bp, Glycine max
tgaacagaatgaggctctcaaagggcatccttttatgttgttaaacttcattaagagattaactttaagagacactctatccaaatttgtcggaggcattgaaaaactagacaagttgttaagatttaacaaatgcccatctagtagatctagacatggatatgaaggagaaatttataatcataatgataaaactgttgttagctatttttatggaaagactggacacatggcatccaaatgtagacatatgccaaaaattaggtcatccaaagttttcaaaactaacaagaaaggacccaaagaggtttgggtttctaaaaagaaaataattcttgttgcatatatctttaaccaaaagaaagatacatcattcatggtatttggacaacg

SEQ ID NO: 88314 - DNA, 337 bp, Glycine max
  unsure (1)..(337): unsure at all n locations
aaacccttaattcctaagntagattcctaattccttagtaaacctaacctaaaaatcagagtttgcatagataatctctacaatgcaaaaacctatttgtattcctaaaattagattctcacacatttgcaattcagatctagaaccattttttttttccaacacaatttgactcctaaaagcaaggttgatcaagcctaagcatgcatctaagcaaagaattggaaaatgatcacataacaaagaacacaaataagaaattggagaatcacatactttaagctacttcattcaatccaacaacatggagtgtaactacaatggatgatatttggat

SEQ ID NO: 88315 - DNA, 391 bp, Glycine max
tttcccaaataaaattacaattcacatgccacttgtatatacatgggaatatttgtagggtattttcctctccttatactgtattcatagtatatttccttgtataagatgaggctattcataatatatttcctggtataggatgaggctctactagcatcctagaagcagcaactggatcgagaagttgagactcaaaattaaaggaaatttacatcacttgcacatagtgagtgccttgtgcttgcttgttaatttaattcgttggcataattgaaaggcatgtttattgcaacatctacatattttcatgcaaaaacagagttggagtgtaacttcccattttttttcataaataaatttaaaatattttagtgaaaataatccaaat

SEQ ID NO: 88316 - DNA, 367 bp, Glycine max
ttttttatctttcatctaaccaaagattatttttatgtgttacaagagaacctaacgatttctaattatatgggccatcaaatctattatgtgttgacagaattgaatatcccatgaatctcctcgggggccgcacacacttcggccatggcttttgctttggctaatagacgcgggaagtcttgacttccattcaaggtcaaggcgaacctatccatccacatagtcgcttcttgatgcaatgcatcaatcaccctccctcttgcttctttttcggcgtacacttgtgcaaaatcctccactagcttttgttcatgggccacagactagttcaactcctccttgtattgccctatgatagctaaca

SEQ ID NO: 88317 - DNA, 387 bp, Glycine max
agtccttggctcttcccacttccttatattcttcgtggtattggatggaggttgtttggggtcactaaagttgctaccatactcaagaaaatcgaaatagaatgtcatttttcttttttgaaaacccaatcatttctaccttggtttctggattaaggatttgcatatttgaacaaaaccattatgcaaatgaaaaataatctctaatagaaaagaggccacctagaggagaagcaaactagattcttctaaccattttgcatatcacaagggcatgggcaacattttgggggagagaccacatatggggcaaacgttctcccatgcactcccagcttttaaagatttgtcataactgggatgatgtctttgcaagctcttcaaacc

SEQ ID NO: 88318 - DNA, 389 bp, Glycine max
  unsure (1)..(389): unsure at all n locations
gggatccttttgacccctgacagcttcaagnctccatcaaagnctatgatctttattcttcaatacttgtgttgattattttgatataattgaatatatacatgactatttgttttaaaaaaaaggattatgcatgattttgaatgtgatatgtgaattacttgcttaaggttctttcataaagtgttttcaaaaatttaacgttatatatatttttntgaaaagtattttgattttcattcaaatccaattttcccttaagagtcattcaacatttagtttggctaaaatgctctctggtaatcgattattacaatagtgtaatcgattacaggcagttaggaagagtgtaatcgattaccaaatgctgtaatcgattacaacgcatc

SEQ ID NO: 88319 - DNA, 390 bp, Glycine max
  unsure (1)..(390): unsure at all n locations
ttgaaggtgcgtagcccaccatttnccatagtataatactggttatgtgnctactatcattgtcatcgcttttttcgtcattgaggtgccacttgagctgtcaggttctccacctttgggcgtattctttgaaagatccgtgccccccttttttgcacatattcagtagttgcatcctatccgaagccattatactaacactgcctaacgaaggcaaccattaggtcttcccaggaatggactcgggaaggttccaagttagtgtaccaggtaataactaccacagtaagactttcttggaaggaatgtatcaacaattcctcatcttttgcgtatgctcccatcttctgacaatacatctttagatggttcttggggcaagtaatcccc

SEQ ID NO: 88320 - DNA, 373 bp, Glycine max
cccaatttatattgttgaaaaagaggtgaagaccatctccctttgcttgcttttgatgtttagtatagacatctctattgtcttaacgttcgaagggttgtcaatcaccgtagcgaattatctctaatcatgcaaacatttcttctttcacattctttggaaaacatcctttatgacgttataattagtataatatttggtgctttgcgtaaatttctataagtgtaaagatattgtattttttttataaaaataattttaaattataatttgtttcaaaagtaaaacaactactcttttaattagcaactaagttttcaaaacttacacacttatatttactatcatggacttttccaaacatttttgcttc

SEQ ID NO: 88321 - DNA, 392 bp, Glycine max
  unsure (1)..(392): unsure at all n locations
ntgactcatgtcgccaacttgcccggatttatgttcatccggtatggcgtnntttatttttaaaaaaaaatttgtgaaaaataaacacaaaaatgaaaataatatatttttttggaaaattgtatttttttccttaattatctccaatttcaattttaatcctcttttaaatttatgtagaaatttaacccctaattatgtcaaataaatatgattcgcaagactcttgctcacacctttgttttataagcatttacaaagaaaaaataaacacaagagaagtgataacatcttgaaattaacaagagagttaataaaaaataaaggtgtaaatatgtttttagtaatttaatgctttttttattaaaatatcattattcttaatgtttata

SEQ ID NO: 88322 - DNA, 334 bp, Glycine max
gcagcttaagcaaatcaaggacttttctcttgactcggatgtccgattgagtcatttaataaattctgacgctagagattgaatacataagctctcaccaaatttaaatgacaataactttttactcccaagtctgattgtgtcccgtaatatatcttgatgctcaaaattgaaaacagaacctctgagcaaattcaaacgacaatagcttatgactctgatatccgattgagtcatttaatgattccagacgctcaaaaatgaaaacaaaagcgtctatcagatcacatgacataacttttgactcaaatgacgattgatcattttataattt

SEQ ID NO: 88323 - DNA, 383 bp, Glycine max
tagctacacatacctctctatagctaagcttatctccttgagatgagaagctagagcttagctacacaccccctataatagctaagctcacccccatgagaaaaaacatgaaaataacaaaaaaaagtccttattacaaagacaactcaaaatgccccgaaatacaaggctaaaaccctatactactagaatggccaaaatacaaggcctagacgaaggaaaaacctattctaatatttacaaagataagcgggctcatacttagcccatgggctcgaaatctaccctaaggctcatgagaaccctagggcctttccttggatctctagcccaatctacttggagtcttctagccaatgcccttgcggggtaggattgcatca

SEQ ID NO: 88324 - DNA, 308 bp, Glycine max
ttacattttattaaagaacaattttaaaaaagcttattcttgagtcgtcaagagtcctatgtcccaccttgactgaatttggcctttcccacaagtcaatgatcttatcttgaattgtaccacttctacaaatttatccttgaaatggaacaatgaaaggcttcacagttttgttccccacagaggcttatatatactaaggtgaattaatgtcgtcttgctttttcaagttatgcatggaaaagctaacccttctcatatagaagaagtttaggaaggcaaatggcaacctggtaaaatgttcaaaa

SEQ ID NO: 88325 - DNA, 380 bp, Glycine max
  unsure (1)..(380): unsure at all n locations
tanagccttttaaccttcacaagtcgnatagttatctcctttgaattatacaccatcaaccagagggcattcacatactctcccatggaatgtatcctgagcatatacacacatgtaagaaaataaaaaactataagctcacattgcttttttattagctagttatttcacagagataaataccttgcaagcagtgatgttagctgctttatcctgccagcaaccaccattgtttgtcaagcactcatttgtctccacatctgcccaataaagtatgccagtcagaaagaatcaggtcacaaagtatattttccttgtatgaataaaaaaagaagtaaacacttgccactgctcaagcaaatagctggatcagtagtttc

SEQ ID NO: 88326 - DNA, 337 bp, Glycine max
ttagaaaactaaacgttataaaatgaaagaagaaatcagatcgagtaatttatatatagaaaagaaaagaaaaaaagtattaagaaaagaataaaaaggaaaaaaaagattattgatccaaaaaatggatgaaaagaaaaaaaaatagttaaactagaaatgaaatagaaaacacaaagggatcagtaaaaaaaaagggaaagaaaaagatgaaaaaagaagaaaaaacacaagggaaacataaaacgaaaaaaatgtacactatgtggcctattcggctatccttgagagcccattatgtcatgaggagagcacaatgtataaaagaggaaagtct

SEQ ID NO: 88327 - DNA, 340 bp, Glycine max
gggagccgaaattgaggaagaaaagggagagaagtgaactttgagttgtgtctcacaagactctcattcatcacagttacaacaagtgttacacatgcttctatttatagactaggtagcttccttgagaagctttcttaagaaaacttccttgagaagctttcttaagaaaacttccttgagaagcttctttgagaaagcttccttgagaagctagagtttagctacacacacccatctaaaaactaagctcacctccttgagaagcttccttgagaagctagagcttagctacacacccctataatagctaagctcacccccatgacaaaaaaacatg

SEQ ID NO: 88328 - DNA, 384 bp, Glycine max
ctttctgcagggaagctaagtgtgaagtatgcaatcctgcataggattggcactgcaaactgggtacccaccaatcatacttccactgttgccacaggtttgggtaaatttctgtatgctgttggaaccaagtccaaatttaattttggaaactatatttttgatcaaactgttaaacattcataatcttttgctgtcaaattacccattgccttcccaactgtattgtgtggcattatgttgagtcaacatcccaatattttaaacaacattgactctgtgaagaagagagaatctgctctatcccttcattacaaactgtttgaggggacacatgtcccagacattgtctcgacatcagggaaagttgctgcttcaagtgct

SEQ ID NO: 88329 - DNA, 393 bp, Glycine max
tctgattctcccaaacattttagtaggactctatctattctctttctatacaattcttctccaataataatataatttacaggtttatactttatcttttgatccacaaataaattaggattttgaagataatcaactaaagtctttcttcagtcactagttgtcaacacatctatattcaaaatttctacgtcttccaagtaatttttctttaatagatatcaaagttttgaaattttgtttactcaatttacaaccaaatgcaatttgagtcaaatcattagtcttgttgatctttctctcgaaacacatgttctaattgaactgtgtcaaatgtacttaacaacttggatgcatatgaaacgtatttcagcaaattactttcgatacact

SEQ ID NO: 88330 - DNA, 356 bp, Glycine max
  unsure (1)..(356): unsure at all n locations
tgaaacttcctgctntcatagttgaccacagagtggtacctggagatatttctcgggggtcacgagaccttggggacgtcaagtggggtgctattgcccaaaaccaagcttgaccaatcccgacccaacccggtcatagtcggtcagtgagaacctgtgatgtacctaaacaggcgagctcctggcagtctacagatcaaaggaacaaagaccacaaagcaaggaggcttgtggaggctggccagatgtgaattttgtgtgatatgtaaagtaatggcctccggtaatcgaataccaagggtgggtaatcgattacaaggctcagaaatgaatacaggatgctaatatggtctctg

SEQ ID NO: 88331 - DNA, 378 bp, Glycine max
  unsure (1)..(378): unsure at all n locations
ntcatcaagaagtactgtccccctagtaggttttggcgaaacatttcaataccctgtggatggatggcagcgggcatcaaatgcactgccaccacctctagagttcatctcagctcatccacgataaggttagagcattgcctacgacacatggacgaccaataggcgaccatagtccaaagccaaaggttagcaaattactaggtccgtgaccgacaagtcatcatgcgtccagcttaagacgttaaagaagcgcttctaggaggcaacctagtaacttttaaatttctgcttgttatatgatcaccttttgtttcgcaagtcatagtaagacacacctagttgctcatgatcctaggaattgtaataaaacaagcg

SEQ ID NO: 88332 - DNA, 374 bp, Glycine max
gtaacccacactatattcataatagaaaactagcaatgtgtctactatcatagttatcatttctttctccgacattgagggaaccacttgggctgccaaactcctccacctttgggcgtattctttgaaagatctgcgccccctcttgcatatgctctgtgattgcatcttatctaaagccatatcagaattataccgatactgcctaacaaaggcaaccattaggtccttccaagaatggactcgggaaggttccaagttagtataccaggtgacaactgccctagtaagactttcttagaagaaatgtttgagcattttctcatctgttgcgtatgcccccatcttccgacaatacatttttagatggttct

SEQ ID NO: 88333 - DNA, 395 bp, Glycine max
  unsure (1)..(395): unsure at all n locations
tatatgaatntgttgcaaaattaattgaaatttcttggccaaaaattcacaatgtcgttcaaaatttcaatggttgttacaagcaagttgttgctttgaagaaaagtggttacacaaagaatgatgtgatgattaatgcatatgttatttgaaaggaagacaaaaaaaaggattttgcattggagcatgcatggcggctattaaaagattagcatagatggttagaacaatgcaaagaagttccttcaaaaagaataaagttgaatgaaaattggaattactcatcgtcatctaattcagagacatcgattgatgtttccaaaagtgatactcctacaccactggcttgcccaatgggacaaaaggtggaaaaaataaggtcaaagtgaaagaag

SEQ ID NO: 88334 - DNA, 323 bp, Glycine max
agccgaaaaaacacaaagaacgcccgctaagttccttagagcaagctcaaccgaagatgggaaacgaccgacacccgcacgatgtcatttacccggcgaggaaaacattaacccacctcggaaaaaaacaggatacaccgacacagaacgaaacaaatggtagccgaaggccgccccgaaagaagacagaccgacgtgtaaaaaagaagcaacaacggaagacaccgagcgaacaaacgccgaaacacgccatccaacaaggaatcacgggcagaaaagaaaagactacaaccgacaacggacgtcgtgaaaccacgactgac

SEQ ID NO: 88335 - DNA, 349 bp, Glycine max
tagctagacattcttttaatcccattattttcttttttccttcattctttttcattccttgcttgctctctttttcttttcctctttttttccttttttaggtatttatcatttgttcatttcctctctcttctttctttttttttctctttttctctctgaaaaagtcctgcggacaagggcacacactacctactcacgtctaaccacaaggtgaacgagaaacgcacaaaaatggtaggtcgtaatatggtgacgaaataaatgagagccataacgccgaaaatttctaacagaaacgagcaataatgatagtaatgttagtaaccatatgaacaaaatagaaaat

SEQ ID NO: 88336 - DNA, 392 bp, Glycine max
tttagacgtcttatattgacaattgcatgtattatctgttgctaccgcaatattaaaagttttcttatattagacgtgccactaaaaacaactcatttattcaatattaatgatttggttaccctcgatacaatttactcaattatgaccaattaaagctaagcaattgtctgctacggtgtttttttgtgaagcttttatacgtcttaaattgacaattgcatgtatcatctgttgctaccgtaatattaaaagttttcttatattagacgtgccactaaaaacaactcatttattcaatattaatgatttggttaccctcgatacaattggactgcttttaatgatacaattgatgatttatatgcttcttacaaattgatgtatgaatt

SEQ ID NO: 88337 - DNA, 271 bp, Glycine max
taagctcaaaatgttacctgatgaaaacaacgtaggaagttaaagaccaactgatagggctgatttgccaacacaactacaaactgcaatataaaggatggtaacactcactgaaggaacctcctcactaatgaatagctaaaatgaacaaacactctggaaaacaaagtctgtaccaagatcgtctaacaactctttgggaaacttacaacagtagtttctgatcatcaaacccttacggttattgactaaaacctaatcgaaactgaat

SEQ ID NO: 88338 - DNA, 396 bp, Glycine max
actcagctagtgcaaaattgtggatccttaaactcttccccttcccctatttataggagaaaagggaggtacttgccgcccagaggcttcttgaggaagatttatgatgcacccccaaaattactaaattgacctccccttttcataccttacataaaagttacggaagccatacagaagcacttcggcatggattttctgcacggaaataattttttaattccctttcaccaatttcaagtgaaatatgctttttcagggtttttagaaattttttggaagcattacggaggcctcggaggccatttttcaacaaaacaggggaggtggttgctgcccagctcgcccaggcgagctaggttgcctgaaccttaagcaacccaacttccaaaatgt

SEQ ID NO: 88339 - DNA, 319 bp, Glycine max
acatgcttcaacaaatgtttcacatattaccatcatgaagcataaactcagcataactacccatcatatctaccaaaaccccatacccacgaaaatcaagagagaaagaagtccacccaaacctgaaatttctaggtcccacacgtagaaatgcgcttcacgactcccaaaaagcccacctttcgcgatttggaacaaaaatgatggccaaacgttggagctttgttggagcttcaatggtggaggaagaaaaatgagaaaagcaatctgagggagagggagagagctccgaaaatgtggggctcagtgatgagagaga

SEQ ID NO: 88340 - DNA, 393 bp, Glycine max
tatgctgcaaatattcacaatagacctttcttatctcagctgctaaatcaaccatagcagaacaattatgacctctccagcaacagatacaaccctggatggaggaatcaccctaatctcagatggaccagccctcagcaacaacaacagcaacctgctccttccttccaaaatgttgctggcccaagcagaccatacattcctccaccaatccaacaacaacaacagccccagaaacagacaatagttgagacccctccacaaccttccctcaaagaacttgtgaggcaaatgactatgcacaacatgcagtttcaacaagagaccagagcctccattcagagcttaaccaatcagatgggacaattggctacccaattgaatcaacaacac

SEQ ID NO: 88341 - DNA, 343 bp, Glycine max
ttttcgatttcttttcttccgtctttaacgcgctcttaccggttaattaagccggtttctcacctaataaatgataaaatgaatttcaaccgatcatttgtgttgtaatctcatttaatcacttttaaaatgaaatctaaccgatcgttcacgctataacctctgttaaaccaaaataagtaaaataataataaaataatcaaaatatcttgaaaaataataataaaataatcaaaatatctttgaataaaataaattaaaaaaaatcaatcggacgtttttctttggaagtttccttgaatgaattgattaataaccaaagtgaaactaagactaaaataga

SEQ ID NO: 88342 - DNA, 392 bp, Glycine max
tcaagctgacagacagttgagaagtttggattatctaacttcaagctgtgagttttcattgataattttcacattcgttcaaccttccttactcgagaatgtctctgaaattgctatttttttaaccatatactcgatctgaaatttctgcttaaatgtttttttttatgaaaatttgtttaaaggtgttaattaaaaggattaagccatatatagtttaacatgtattgatataccatttatagacagactggttaatcaggttcaactgttcaaatttattatctccctcttaagtgctgacactagcattaggcattgcaaaaatcagaatgttgtggtgtatgagtagacttataagaatagataagatcaagagtggacatatgaag

SEQ ID NO: 88343 - DNA, 313 bp, Glycine max
  unsure (1)..(313): unsure at all n locations
atttttgccccaacaaatacttatttgttacaaaagaaactatgccaagttatcctgattcctatattgaccactgacttggacacacttctatcattttaaggattgtgaacaagtgctgcaatcacaatgattacagggttaaaagatgaaggagactcgggaaaaaacaaatctcaaaagaagaagaaaatgaattcccatggagtgttatgtagtgtatgtgcaaaacgttcttttatattctttcattgtcaaatcatgtcacagtgatgagtnatttaaagactctaataagaagtatgagtaaaac

SEQ ID NO: 88344 - DNA, 397 bp, Glycine max
gacacataaaactaagcttgtgcgtttactgccatatttaaggtcggctttgtgcatatctgcaatgaataggaagacatgcaattaatgagaaataaattaagaaacatgatgcatgatttgataaaccattttactacatagacaactgcatatgcctctgttgagctatgaaacatgatgcatgattggataaaccattttactacattgacaactgcatatgcctctgttgagctatgaaacatgatgggtggaagtggaactaattaaattgctgcccagattatgtaaaatccagtagaagagactgtaacttcttgttactgctagtgtctctgatgtagcctttatgccctatggtgtcatttttgcatgtgtaccttcggctttatat

SEQ ID NO: 88345 - DNA, 262 bp, Glycine max
aacaatctctccccaggaatatactccgctgtcatccaaaaaaacacgtgagaatgacaaaaattattaaaacctggcagtaattgataatgaaagcatgaaacatatagaaagattggtgggataaaccagttcttctggtgacgtaaaattgagattggggggataaaccaactcttcatttgatatgcaaagccatggaactcaaaatatgtagctcaaaataatgggtttacagatgatcccgtcatccaaagaagca

SEQ ID NO: 88346 - DNA, 379 bp, Glycine max
  unsure (1)..(379): unsure at all n locations
gtccttggtttaaacattattgatacatgattagtgactcngaggaatcgatttgggcaaaattggatgaaggcaagagtggttttcgaaatctgcactttatgcagaattttgctgttgaaatgtgcagcataattttgtataagtgcagaaaaatgcttgtgtatggctggttgtgaaaagggtagtacatatggggttttggacattttctagcagatcccaacggtcaaaatatagacttatgtactagagacttccagtaaaattttcgagtcgatccaacggttaactgactgtaatgaagagaatgttactggggtatttgaatgtgaaaagttgtgatattggtttgtgttttatgtacatgtttctgtct

SEQ ID NO: 88347 - DNA, 388 bp, Glycine max
agcttaatagaatcttcatggtatctctcggaaatttaaggattttgatcatattattgagaaactttcttcattcaattattgacccaaaaattagttttaccaaaagaccataattgattctatgcttattttttagattggagcagactcaacagactaacagtgtattagtgtttagtgacagcctaactgcagactcaatcttgtcaaaaaaagaaggaaaaaaaataaaagaatcccaggagctataattgcagagactacttattcatcaatgtccataagtttggcaaattttataaatttaggtaattcatttttcacatttatatataaaaattaaatataatgtcccaaaaccacaaaataagaattaactctaaac

SEQ ID NO: 88348 - DNA, 395 bp, Glycine max
tataagaacaaaattgccttaatcatttccaaatatgcatgtgaattatgacgcatcaacaagaatcaagccaaggctattgtgcaagcaatcaatggggcaaaacacaccaaatgattataatgatggatggctcaaattctcacaaaggtaaaatcatcactttcaaattgagctttcaaaactatcatgacatgtagagaagaatcaaggatttcaagtcacaaaatgtcaagaacttttattttcaaaacaattacccatttcttgaacatatcctataattcaaagaaaaacatgcaaagtcgtacgtgcacacgaaattgacccaaaatattaaactgaaaattcgatgaaactaacaacattaacaaattaacacaactaacaaatta

SEQ ID NO: 88349 - DNA, 390 bp, Glycine max
tgcaagctttgacttcagtcatcaagatattataaatatgtgaccatggcatgagtttaaataatcatcatcaatcatctttgaatcatctatctttcaatctttttcaacatcatctctcaaacatctttcaatcaatctttcaatatctttctacataattatctgattcatttctcttcatatttctaaaagttttttatcaacactttctcttccaagaaaagttctttgttcaaaaacttatgctattcatctttttcgttctcttctccctttgccaaaagaacgaaggactaattgccttaattcttttgtgtctctcttctcccttacaaaagattcaaaggactaaccgcctgagaattctttcgattcttctcttcccct

SEQ ID NO: 88350 - DNA, 392 bp, Glycine max
gtaggctttgggtgggacatgatagagagactcttcttggataccaaccttgtgctacaacaattgcagcaagacccactatccataatgagagaataatttttgtttaaaaccttgcatcttgtatgaaagatgttttctttttgggtttgggttaggtcacaagattgactcccaatgagccatctctccattagaagatcaccttcttcgtaggggcaaacctcttcaatatgctcatcacccttggcttcaccctcacttccacctgaggaaggagaagaagtagccttctcttgactactgtagatgtcttgatcccacatgatcatggttttctttgtagtggcattgagaaagaatgtggcctttcccaatacattttaagcact

SEQ ID NO: 88351 - DNA, 391 bp, Glycine max
tcctagtgtacggtaaattctattttattctttatgcacttttaaagttggcatgcacgaaaagttaatagtgtaattcaaagaacaaattacctaggataaggattcacttcaatgatcaatcaactaaagagaaaaaaaatttaatttcaaactttatagtatttatttttcaacttttataaaattaataaaatataaaaaaaaaattacttttgtccctaaacgtgtaattcgctgacaaatactttagtggaaaatgaaaatatacaaaattttatcccaaaaagtgtaaaagtgtgacaaatatatctaaccattaacttccgtccgtaaccgttaataaaataacctatgtgacacaaaaagacaaatttgtcacttgaaacat

SEQ ID NO: 88352 - DNA, 390 bp, Glycine max
tcttaaattagcgtgtcattagaaattgcattatcaacaaatttttcatggttagtgatgcaaatagtagagcacgggtgcaagtagcaaggcccaaaaggcaaagcatcacgcccatgcatttgaaggactatgtgagaaactgataagcatgcaagttcgtagaaaggcgctagaatattctagaaagaataatcatgtagtatgatcaacaggcttgctgttaggccgctagattctgttgtaaccgccatttttgtggctataaaatgtacacaccagctttgatgaatgcaagaaagaacttccattctctccctatagcttagcttctctttctccctcttcgttctcagaggttgcttgggcctcgaatactatgcactacta

SEQ ID NO: 88353 - DNA, 352 bp, Glycine max
gtgtatgaacaagacttcctttattcccaatattttctttgttccttcattctttttcattccttgcttgctctcttttccttttcctctttatttcctttttttagtatttatcatttgttcatttcctctctcttctttcttttttttctctttttctctctgaaaaagtcgtgcggacaagggcacacactacctactcacgtctaaccacaaggtgaacgagaaacgcacaaaaatggtaggtcgtaatatggtgacgaaataaatgagagccataacgccgaatatttctaacagaaacgagcaataatgatagtaatgttagtaaccatatgaacaaaatagaaaa

SEQ ID NO: 88354 - DNA, 387 bp, Glycine max
tctcaagaaaagtgccaaactccctttgtttatctgtttttaggcttaaataggtggccttgtttgtgctcgtacgcctagcgcagatctatgttgcttagcgcacataaatggattttggcttagcgcgcttgtttcgcttactggatgagctgaagcggtgcgcttagcgaacttgacaactcatcttcttctggatgcttcctcacgcttagccactaaaggttgcgcttagcgaattctcactaagccagcagcttggcttattgaaagagtgaaaaatagcactttgccaaagttgcctatttaacctgaaattgagagaaattgattattaaaagcacaaaacaaaggtataagttatctattacctatatttaacaaaaa

SEQ ID NO: 88355 - DNA, 308 bp, Glycine max
ttaagacctagggaatatgaccttgtaaaattttccatctttgtgttgaagaagaaaacagagtatatacatgtgttgtagtactccaaaaaaagatgtaactttaagataagagttagccatatcacaaagtatcaaatttaaactatgacaacaacatgaagtatataatgatcgaggattaatgtctaaaattcttttttgcacaccttgatgttttcctttcatatttgatccattatcataaccttgtcctcttaagttactaatattaagtccaatattatttatttcattcataatagcat

SEQ ID NO: 88356 - DNA, 399 bp, Glycine max
ctcagcttagtgcaaaaattgttggatccttaaactcattccccttcccctatttataggagaaaagggaggtacttgccgcccagaggcttcttgaggaagatttatgatgcacccccaaaattactaaattgacctccccttttcataccttacataaaagttacggaagccatacagaagcacttcggcatggattttctgcacggaaataattttttaattccctttcaccaatttcaagtgaaatatgctttttcagggtttttagaaattttttggaagcattacggaggcctcggaggccatttttcaacaaaacaggggaggtggttgctgcccagctcgcccaggcgagctaggttgcctgaaccttaagcaacccaacttccaaaatgg

SEQ ID NO: 88357 - DNA, 373 bp, Glycine max
tgcagcatgcaagctctaaatggtgcatcttttaatataggagatggacattgcttcgcctgagaatgacaattggctaaccataacaatgctatccgcggtaaaggacaacaatctttcaaataaaattgttgacatgcaaaaataaaataaagattaactcaatcgtaatacaacttgattgcataaatataaaaaaatttatatctacaatgtacctgaacaaaacgattgtcatagacgtgaccgatacatattatgcgatgcaccgaatgatctcccggtggttgacttctaagaggaaagaacgccatgctttgttggtgagacaaggatacaaggattacattataccttgatgcaatcacatatc

SEQ ID NO: 88358 - DNA, 394 bp, Glycine max
  unsure (1)..(394): unsure at all n locations
tcaagcttatgcaaaaaaagaccccaaagatagagttttttgagagatntttcaataatagggaaaagcataactacattgtaatgaaaaatgaatgaataataataagagagatgaggtgaacaagttttaaacactttgtgattatgattttttttataatgtagaagtttttaaagtctccatgattgtaattgtagtagcattggttacatttatatgtaatttctctcaatatcaaggtttgtgacaaaactgtgacaacaatttaaagccctaatataaaggattaccttaaatgatttaggcaaaaatgattcatgatttacaaagaaacaactaaatttatttttcaaactaccaaactaagcaataacaactacatttgcatggt

SEQ ID NO: 88359 - DNA, 399 bp, Glycine max
  unsure (1)..(399): unsure at all n locations
gacctctgaaccctgagcatgcagcttaataactacaaattccaaggacngaaagccaaangcgcgaaaacaccgtcatgatccatggcgattcaaactctaagaataaaactcacaaaattattagatacatttcacataaatacgtggtcagtctttaataatatagaatcaggtgtttcgaaattttaaatccctctggtaaaaaaaaaatactttaaatatctcatcatctatagaattattgaagatcattgggtcttaaattcctactatttggttaacatgtgaagtgatcatttcaagtgatatataattacctgtgtttgttctaatatgtcatcatgtgataccactaaatttttttctaaatcttaaaaataaatattatttatctat

SEQ ID NO: 88360 - DNA, 388 bp, Glycine max
agcttccacaacagccgcactctgcatatatgtacaaactttgcaaatgaaaacgtgaatctatgctcagaacagcatagccagaaatgatgatattggtgtttaatggccaaaagttttgaactaagataaaacaatattaaatcatgatgagccttttcaataaataaattaaagatccttcgtccgatcaaattagaatagttttctttttaataccaacaaatgattaaacacagtgataagtatgatcctctccatggttaatctcataaagaatctagttcttgagaacaattttcgatatattccatctaagatgtatcctacactgttacttctttggattaatcctgagatgtcaactaggaatatgatcttacatcaa

SEQ ID NO: 88361 - DNA, 387 bp, Glycine max
ccgggatccttatagtcccctgaggctgcagctactgaggtaagggtatttataatttcaaagattacagggtgttttctggtgattaacagataataagtcattgaagttagtagcctataaaataaaattagatacaaagccactcatgtaacaattcagagcaatacctctgttcggccaggcatgggtggctttccagcaagtagttctgccaaaatgcagccagcactccaaaggtcaacgccaacaccataggaggtagaccccagaagaagctcagggggacggtaccaaagggtcacgactctactagtcatgggatgctttttcttaggatcaaagaaagttgccagtccaaaatctgcaattttaagtattccttca

SEQ ID NO: 88362 - DNA, 392 bp, Glycine max
tcgcggaaggaatgagcagcagcagaaatgtttctttcggagaggggggggctttttataattttttattaaagggcaaaattgtccattcataaaagttgctgggtgcaccagcaatattgctgggtgcacctagcatctcccttaacttagtgtgctttgtttcaatttattttaaaaaataattacttattttcaaaatttaatcattttcgattaaacaaaggttgagtataaacaggggaactgttatgaaaatttagtaaagacgcttgtttcctttttctttgattatttcttttttctagatatagcccgtaccaataaatttcttataagtattttcctgcttttattaaaaacataatacatggtagtagtactacataact

SEQ ID NO: 88363 - DNA, 335 bp, Glycine max
agcttgtagaatggctagacatttttcatgtcagggcctggtttggttcaaggataaaagggatgccccacattatttccatgacacaaatgcaaaaatgatgatttggaaactttatgcaaaactggtcatgcatgcgcctatgcggacgctcaagtgtcaaatttttatggtcaggtgatgctagggttcaggattcatttcctctattttaaatcaacccaatgtttccaaaatatgttcttttatcaatttgtgcattcctccaagtccatttcgggcgtccggggaaatttttacagcattcacccttcatgtgtagacacgtttttttc

SEQ ID NO: 88364 - DNA, 381 bp, Glycine max
tatgcacggaaaatgtaattatgaaattgagatgcccgaagaaacaccatttcctagttaaccatgcattatgtaccatgttcaattattttgtttttaagtgaaacgggtttatgatcccaacatggttggctcctaacacatgaaactaagaatgtagtgtgaagtttcacgcttcccccttctttgtttttgttttgtagaggaaaacgcaaggatgagcaaacatgaaaacaaatggtatgcaattttgcagatcaaaaagtttgttgaacgcatatgcatgatgatgccatgactcatgcaaaatgtgaggctggaatatgataacggacaaatgcaggatatgtccattatgatgttatgaagagatgcttatgc

SEQ ID NO: 88365 - DNA, 314 bp, Glycine max
ttaagagacaatgcaaaaccaagtgagcaaatcatcccagccatgcccaaacagagccagtggaagctccaaactctttacaaaatatggatgcatccttgatgaacttggctgtgaagagaacaggaagtacaaaacttgccacaaagaaagggacccaaatcaaaaaccattctaacttaacaagaaagctctttgcatcccgaataccggccattctacccacttttctcaaatgaaaaaagatggaaagcagctgtaccatcacagaaaagactttcttaagttacacaataaccccttaacattaagca

SEQ ID NO: 88366 - DNA, 377 bp, Glycine max
  unsure (1)..(377): unsure at all n locations
tgacatgatacccgacacagtggtcctattgttgactttcagagcgatctctaacaccagcttttaccagctacttgaaagaatagagcaggttcccaactacctcatttttatcatgcttaattgaacttttggtcctttaattatcattgtttctcgaatttggtttctcattttttctttcgaatttaatccttgtaatgttttatttatacaattttgggccatctattaatttgacatctaatatttaacaaaaatactaacattggcagtacaatgctgatacggatgcgctgacatgaatgtggagtgtcaagttagcatttctgttaaatactaaatgtcaagttatcaaatgcatcanaattgcataa

SEQ ID NO: 88367 - DNA, 385 bp, Glycine max
  unsure (1)..(385): unsure at all n locations
tgcatgcttcattctcagatccctcttgttggactatgcttaatttagacatttctcctaggtttagactaacttatactatgctncatcctcagatccctcctgttggactagacttagcttatatagcttaagaaagtttagaccaatttagcctaagctttgtcctcagatccctcttgttggactagacttagaccaaacaacattatggggacaacatatttaaaaccaaaacttaatccatagatccctcatttaagactaagtttaaattctgcttcattccagttctaaggtaacaatacacttcccaatgataaagtcacctaaccaggcacacaaatggtggatcaggccaagaacatacaaaaattatgctctg

SEQ ID NO: 88368 - DNA, 396 bp, Glycine max
ctcaagcttctacttatgtggcagggcgggcttccttcactttcttgtctccatcgcgagctttgaccactgttcttccttcccgcgatgcttcttttcatgtccgcctgagtgggcttatagcctaaaccatacttcccacgatttccttgggtatttatgaggctagttatgccgccgttgtctttgcctaaacccatcccgggttcataaccgttccccaacataactcgggccatcattaccgctgcatcggacagacaaggctgcccaaagagggagtccacggaggaaatgctgaccacctcaaaagactggaaagcagtttctaacgattcttctgcggcttccacataaggcatggaggatgggcagcttaccaagatgtcttcctcg

SEQ ID NO: 88369 - DNA, 398 bp, Glycine max
cttctacacgcatgcaagcttagcctgctgcgctaagtgttcagtcaataattcagtttaatttttatgtttatgagaaaataacctgagctaatctcttgtgtgttggcttatatcatgcagatggcatctaagaaaaggagggctccttctacacctttccaagtcagatttgatctgtctcagttcacatctcaagaagcttgtgagaggtatacaaatattgtgtggcctaggaaactactaccagagaggaatgtgatatgttattacactgaattcgacaagttcaaggatgaacttgagagaaaagactacgatgaggagttgactgattttaatgacagcagcatagacattggcattgtgaaggaaaattacaccaacctccacgacct

SEQ ID NO: 88370 - DNA, 387 bp, Glycine max
tctacttatatggcagggcgggcttccttcatcttcttgtctccaacgcgaactttgaccattgttcttccttcccgcgatgcttcttttcatgtccgcctgagtgggcttgtagcctaaaccatacttcccacgatttccttgggtatttatcaggctagttatgccgccgttgttttttcctaaacccatcccgggttcataaccgttccccaacataactcgggccatcattaccgctgcatcggatagacaaggctgcccaaagagggagtccacgaaggaaatgctgaccacctcaaaagattggaaagcagtttctaacgattcttctgcggcttccacataatgcatggaggatgggcagcttaccaagatatcttcctc

SEQ ID NO: 88371 - DNA, 381 bp, Glycine max
attgacggggacccgggttgaattttttttatatgggctacatgggagtacgtgatctcaattggaggtgggcaacatgggatggtgggtttatgcgcgcatcgtggatgatgaaagcttgttgtgcaccatcatccgaccgccacctagtaccacatgtgatgggtaccccataatcctacaagcttgaaatgaagaattgttgaagggagaaacttcctgcttttattgttgaccacagagtgggacctggagatatgtcgcgggggtcaggagaccttggggacgtcatgtggggtgctattgcccaacaacaaacttgaccaataccttcccaacccgggcatagacggtcattgagaacctgtgatgtacctaagc

SEQ ID NO: 88372 - DNA, 388 bp, Glycine max
cctaggaacacgatatggaacttatgacactttttcaacatgaagaaaatgacaggaacaagaaaggaattgcacttaaagcctcatcttctattcaataagaaagtgacaaagaggacttgaatgaaatatagaaagatgatgattttagactcttcgtgaagagattcaatacatttattagaaacaaatgaaatcaaaggagatcatacttcacttcaaagaagaaaggagaagattcctccttagttccaaaatgctatgaatgcgatcaacctgggcacttgagattagattgcctgtctctacaagaagaatggaaaaatctgacaagagaaatttcaaagaaaagaaagcatacatcacttgggaagataacgacacggat

SEQ ID NO: 88373 - DNA, 386 bp, Glycine max
  unsure (1)..(386): unsure at all n locations
ngactntggtttagacatgattgatacatgatttgggacttgtatgaattgatttgggcaagattggatgaggggaagtgtgattttcgaaatctgcacttatgcagaattttgctgtcaaaataggtgcagcaggattttggcttgtgcagaaaaatacttgtgtgtgattggctatgaaaagagtagtgcagaatgagttctggatgtttgctagtagatcccaacggtcaaaatgtaggcttatttactagagacttccagtaaaattttggagtcgatccaacggttaacgaattggatcgaaggaattgttactggggtctttaagtgagaaaagctgtgattttggttggtgtttgagcagagttttctgcctttgccct

SEQ ID NO: 88374 - DNA, 213 bp, Glycine max
tttttgctacccaccccgggatccatcagctgccagataaacaaggtattattcgttaatactccgattgttcccatatatgataccctcaactcaggaggcattgacttttcctcatgagtgacaagcaaattgtaacctctttcactcaaaaccttggacatgatctttaaataggactcactcaccctaaactactttttgcacctcaat

SEQ ID NO: 88375 - DNA, 341 bp, Glycine max
  unsure (1)..(341): unsure at all n locations
aaagaaaaaacgcaagcagaagaggcagccaccccccncatctttgacgcgacacgagcattgaccacagtttttcctccccacgaaggtgccactaaaggcgcgccgagaacagccagagcccataacctacaggcgaagaattacgagagatatcagcccgctaactacacacgccctgtagttgcatacaaccacaccccgttaaacagacacaccccaacaaacgcaagcaataagtaccgccgcaacagaaagacagaggggcccaagaaagggaaccacggaagaaatgcccaccaccgacaaagacggaaggaaagtatcaaaaaaaactcctg

SEQ ID NO: 88376 - DNA, 387 bp, Glycine max
tagccatttatattttacctatttccctgtttttatgctaccttcgattcaattccttatttttgactgacaagattttaccatcattccttatatctgtttcggttgtttggtttgaatctgatatatttgtacgaattattgacttatataaattgctataggtggactttataatggggattctttctcgccttgtgatgaagcaggtgaatatattattgctatctgtctttgtaatttattcaattgttcagtgtacttacatcatatgaactgatgcagatatggaaatacccaaatttatgggtgggattcttgaagtgtgtgcatgttgacaaaaccacagtcatttggcattatgcttcaagtatatctctcttcact

SEQ ID NO: 88377 - DNA, 360 bp, Glycine max
  unsure (1)..(360): unsure at all n locations
cttaccttaaaaanataaactctcccatccacaggtcgaatcatgttacttggcttgggatttcatctttggatgcccgcgaaaaaaaagtgaatcaattaaaaattttaaccctaatatatttcgagaattaattattctgtattgggatgagattgcttgaaaattcttttcatgggtttcacaattcatactactttgatttcaagcttcaaagctgagtggcaagaataattcccaatttcccattatttggcctccaacatagactacctgtaccaaagacagagttaattggttagacaaatagttaattggtaagcgtgatacaacacaaggcanaggaaaaagctcactcac

SEQ ID NO: 88378 - DNA, 393 bp, Glycine max
tataccttgacttttatattctcctttgtgttttctatggtatttaagtatgaaatctgcaaacataaagcttatacgttctactatattacatattacacattcatgttcatcattttcaattgaactaaagttttagggagggtttatttattaaatatgatctttagattcactgtttatttacgttattacgttttctatatcttattgcttactaatcttttattttgtttatgtgaactatcaaatttttcagctaagtgtgtcgtttcgtttccccttgacctgactctctatttatagcggctgaagcggactttaagttttcgtagacacgcttagcgcgacctccctcgcttaacacgtgtagatcgcgcgcttagcgagctc

SEQ ID NO: 88379 - DNA, 245 bp, Glycine max
taatggcccacttttttcaagaggagggggaccactactggaaaaaccgaaagcacaatttcattcacgcaataggctaaaacatttgggaagccatagaaggtggacactatgcatccaccatggtggctggaaatacaacaatagagaaacctataaaagagggggctgaagaagaaagacgaaagagcagcacaagataaaggctaaaaatatcattgcttctgccctatgaatggatgaat

SEQ ID NO: 88380 - DNA, 373 bp, Glycine max
  unsure (1)..(373): unsure at all n locations
tcttaaggaagttntctcaagaaagcttctctatgaagctacctagtctataaatagaagcatgtgtaacacttgttgtaactttgatgaatgaaagtcttatgagatacacttcaaagttccacttctgtccctcttttattccttcaatttcgtgctccccccttctctctttcttttcctccattaaagcatcctcttcaagcttcttatccaaggaaattcttggtggtgaagctccttcttccttggcttattccctagtggatggtgtctcccctctccacttctcctttaccttccgctgcatctccatggtgtaaaatcaccattgaaggacctcattgaagctcaaagatccagcctccataga

SEQ ID NO: 88381 - DNA, 310 bp, Glycine max
ttatggtaagtggtaaaattaaaattctttttttcccgaaaatgcatgcctaaatatgcattccatacttcaaattagcctgtgtttttatatgaacgcataattggttcccttctaaactataaatacggggaccccttcagcattaataagattgaagcatttgacattgccataaactaatctgatgaattatcttgttaggcttggggtgctatgcctctgcagctacatcacccttccattatatgctcttgttactcaggtactatatgcttttccgttcctgatattcttgtatttgatcgga

SEQ ID NO: 88382 - DNA, 381 bp, Glycine max
tgtgctgtagagagttgatattggggtcaaagtttgaccatgacccactatccaacttcgaagtggacctctgttctgtgggtatctgctagattcttcatgcacgcttgtgatttcaaaagcttcttctgcaaactagcgaagactgtctctccgttagtcggtaactcatccacaactattacctgagccgatcctatgagatattgagggatgctgggtggtttccggtcaaaggttatttcgaatggagagatactagttgcgaagtgaattgaggtgttgtaggacattcggcccacatcaggaattttccccaagtggttggtttcgagtgaacaaaagcgcagaagtactgctccactacttagttgatgacct

SEQ ID NO: 88383 - DNA, 375 bp, Glycine max
cgcttcttcggttctttcttgatactagagcatgttggaaacgtagcttatcatctgcagttgctgaaaaattcaaaaattcacttagtcttttattattcactccttccaccacaccatggtccactcattcctaatccaaaacctttacttcttaccgttgttgaaaatcaacctgtgctggagcctctctccataccatcctccaaaactgattcctccactgatcctccgacccgcttggttttggtacagtggctcggtttggctccaaaagaaacaacttgggagaaatgggacgagtttcgcgacatttatcaccttaaagacaaggtgactttctcaagtggaagtaatgatagcaacacatatgaa

SEQ ID NO: 88384 - DNA, 392 bp, Glycine max
tgactcaatgtaggtgaagtagaacaagcttgtctcacatgaggtgcagtagaactaatttaaatcactaggggtgtagtagaactaacttgaatcactgaaggtgcactagaattaccttgactttgtggaggtgcaacatatgcacatgcggttgaccttgtagttctcaaattaacacatgcaattgaattagcagtagatactaattgggatgaaccatttggagttggtacatgtgcaattgattgagcaataattgcttgttgcgttgatgtagatgtttcactaggtccagacttaaagattggctccatccttgatttatgcaaacatcaacaaacaaacaaatagttaaatgaaacaaacataaatgaagaaatgtagttttc

SEQ ID NO: 88385 - DNA, 239 bp, Glycine max
  unsure (1)..(239): unsure at all n locations
caaaaataagggccggacgaacacagttctggaaccatgcactacgaaaaggaaaaatactacattaaaaaatacccagaaatgataaaagaactatgcgtcaccacaaaagaagaaaccaaccgcagaaaagagagcccctctctcatnnnnatgacaccccaagtacaagacttaagggacaagcatggggctacactacataactaaggatcagttcgcaaatctatagacagggg

SEQ ID NO: 88386 - DNA, 397 bp, Glycine max
gatccttgtaaactctttctgcacgcatgcaagctttgttgtctgactatggttatgattacactccaccataactcattatgtcttgtgaggaagcagacattgattatcaattaacagcttcttacacctctaaacaaataggggtttgtgaaagaaagaatcaaacgatcctggaaacggtcagatgtatgtttcatgaaaaagagttacctaaggcatattgggcgaaagctacaaacactgcagtatttttgctaaatagacttcccaccaaagcagtagatgagaagactccttttgaggcttggtatggttataaacccttcttgaaattttttaaagtatttggatgtttgcgctctacttatgtgcctcaaattaagagagacaagct

SEQ ID NO: 88387 - DNA, 393 bp, Glycine max
tgaaagtgatgcagcagctgcttcaaatgagattaaccaggagccatgtgacctctttgtagttctaaaacgggattctggattggactctgttgaggcctcacggacaatggactatgaaatcgacttttccttctcggagactaatagaagatcctccattgatgattctcatgaaaaggtgaatgacagccttcctgttagtcctgcgaaaaccaaagtttctggaacaagaagttctgaaaaagatggcaagtcaaaagcgctgcgatgttcctctgggaagggcaagcctgaaatcatgtctagggccagaaagccagctctccctaaaaagcctgtatttcataagagcaaaagggaacaggtatagtgatttgtcaattcttcagt

SEQ ID NO: 88388 - DNA, 416 bp, Glycine max
atccttgagagcctagctgcacgcatgcaagcttgggaaagatataagagacttattctaatattcatgagaataacttttgcagacagtattaagacagatctccctaagactaataatgctaaagagtttatggggttagtgggagaatactctcaaacaactgataagtctcttgctgggacattaatgagtacactgaccaccatgaagtttgatggttcgtgtactatgcatgatcatgtcattgagatgacaaatattgcagcaagacttaaggccttgggaatggttgtgaatgaaaactttcttgttcagtttattctaaactctttaccgtttgagtatggcctgttccaaatgagctataataccatgaaagataaatgaaatgtacatgaattgcacaatatgtt

SEQ ID NO: 88389 - DNA, 392 bp, Glycine max
  unsure (1)..(392): unsure at all n locations
tattgattntgaaattttcatgcaacgttacgaacgccaacaacagttgttccccaccattgctaactttgttggccgctcttaaggttcttaccatgggaagaaattcaccctctctcataaggcctccttcaactgcaataacctatttcctcatgacaacaatcaaggtgccaaatgctccatgcctgtgtgccaatattgtgttacacggggtcacatgataggttaggaaaaccactcatggctaggttcaagaaatgattggccaagcaatgaagtcctttgccgaatgccaacggtaagagaatgagcaattttgcctctctttgcaaaatgccataaacacaattctccaaccttggtgtcgtccttttacagaacatccaaca

SEQ ID NO: 88390 - DNA, 421 bp, Glycine max
  unsure (1)..(421): unsure at all n locations
ccccgggatccttgataccctatcagcacgcatgcaagctttttaggaagctacctactttataaatagaagcaagngtaacacttgctgaaactctgatgaaggagagtcttgtgagacataactcaaagttcaacttctctccctttttcttccttcaatttcgtgctcccccctctctctttctctccctctttcttttcctccattgaagcctcctctccaagctttttatccaaggctcatcttggtggtgaatctccttcttccatggcttattccctagtggatggcgccttctctcacctcttctcctttgtcttccgcttcatctctatggtggaaaaccaccattaaaggacctcattgaagctcaaagatccagcctccatataagctccacaagcaagcttccattaag

SEQ ID NO: 88391 - DNA, 398 bp, Glycine max
tcctcggggccattcctgcgaaggcaaacatttgttttttagttttagtgggacattactcttaaagcaaaaatggcatataacctcctcccataaatacaaacatcaatgtaaatttagagcaagcttatgcgcctatttccttacaaacgttctcttgcacaagacatttaaccgaaaaaatgcacccatatacaatcaaggcagcttcgttacctagattatttacacgtacctccaaggtgtatttgttacttacatcacacacatctccttggctaaattcacatacatgcatactcaaagcattttggggcaccaaaaattgcacatgtgcacatcttggcatttctaatacctatacatacgcaaacttcatgatgaatcttgactatcta

SEQ ID NO: 88392 - DNA, 308 bp, Glycine max
tcatcatggaattatctgcaaacaagatatccatataataaaccacaccaaaattccctaaaaattcccttacacatggatcattaaatctatgaaagagctaggggcattggccaacccaaagggcataaccagtcatttattccacccatacttagtttttaaagttgttatccatacatccccctctctaatcctatttgatggtacccacttttcaagtcaatcttatagaaaacacaaactccatgcaaattattcaacatatggtttagcctatgaataggatgtctatactttaccgcgat

SEQ ID NO: 88393 - DNA, 390 bp, Glycine max
tgtagaatggctagacatgatacatgtttgtgtttggtttggctcaaggataaaaggggtgccccacattatttccatgacacaaatgcaaaaatgatgatttggaaactttatgcaaaactggtcatgcatgcacctatgcggacactcaagtgtcaaatttttatggtcatgtgatgctagggctcaagattcatttcctctattttaatcaacccaatgtttccaaaatatgttcttttatcaatttgtgcattcatccgagtccatttcgggcgtccggggaaatttcacagcattcacccttcaggtgtagacacattttccaaaaattggttatgatcaatgaactttttcaaagaaaagttggaaatcgtctcttttcaaaag

SEQ ID NO: 88394 - DNA, 336 bp, Glycine max
tgttgctccccctatctctaacagattttggtctatcttcattcagaaaccaatcaaaactcattgttgttctttctcaaagcattaagtgctttatcaaagttggccttattgtatgcatggcacatgcccaaaattggctagtcaactaaagagaattaaacttggtcttatagcggttcaacattacaacaaaacctacatgttcaatcataaaatagtttaaaatcatgcagtagtcatttacaaataaaataaaacatattgataaatgtcaaatttaccagattttcatatgtattttgtgacatttatttgacattttaattaactgtt

SEQ ID NO: 88395 - DNA, 392 bp, Glycine max
tgtaggattatggggtacccatcacatgtggttctaggtggttgtcgggcgatggtgcacaacaagttttccacatccacaaatcgcgcataaacccaccatcccctgttgcccacctccaattgagctcacgtactcccacgtagcccatatcctcatttctctcaacaccaggtccccatcaatcctcccaagcttccccaacatccaggtaattcaacatccaatcatcatggactaacaaaatcaagcaaaacagggcaaaggcagaaaactctgcccaaaacacaactcaaaatcacagcttttcacatacaaatacccccgtaacatttccttcgttccaattcgttaaccgttggatcgactcgaatattttactggaagtctct

SEQ ID NO: 88396 - DNA, 342 bp, Glycine max
  unsure (1)..(342): unsure at all n locations
aaaactcagcttagagacaaattccaacaaatttccctccctgggcctgagcttgctttaattccatcgtatggatgttatgacgagccttataacaaaataaaaaatgcaccagtttacggataatgacgcctaaagcatgtttatgaaacagacactgtagaaaatcaccattgcatatcctttcaacaattccaatcagaaattttgaaaggatctcaatcgactatgaatgttgctacataacaatttacaataacttgattccaagaatgaacgtacccaaaagataactcaacaccagcggccttcccggtttttcataattntngncccttatca

SEQ ID NO: 88397 - DNA, 194 bp, Glycine max
aagggaccattttttaagaaaatggatgtttcacatgcccattttctcgcagggggcactgacgcagtcttacacttggctatctttaaaatcggccctaagcacagatgagccaccttcaaacatactgaatgctacgaaggcaccatagtcttcaaaggactcgaagtcagaggaccggtacactaccataa

SEQ ID NO: 88398 - DNA, 143 bp, Glycine max
gcttattgagagatagtagatgcgccatatctttttctattctattccctctccgcaccagttatgtactgattcgccctaattgtcaaaataattaggcagatttattatctgggcccatgaacctaatttgatgtattaaa

SEQ ID NO: 88399 - DNA, 328 bp, Glycine max
ttgcttcaccattattgatctgatcttcctgattctttagtaaatcttccaattccttattatcttgtgcaagtcgaacaattttacgttctagttctctcaccaccatctctttcttctctagtgagtttctcagctgggctatctcatcatttctcagaatggtcaattggtgtatctctgacttctttttctcacattgactgaaaacattctcaaagctagacttgaattcataaaattcagcctccaagagtttcctcttgctctcttctgaaccaatgcatgggtacacatcttcaaacgtgattgaagtccctccacattt

SEQ ID NO: 88400 - DNA, 391 bp, Glycine max
  unsure (1)..(391): unsure at all n locations
tatctagganagtcaatttctaaggctgtttttattgttccatcttacttcaatgatgctcagaggcaggcaacaaaagatgctggtagaattgcaggtcttgacgtgcagagaattatcaatgagcccactgctgctgcactttcatatgggatgaacaacaaggagggtctcattgccgtttttgaccttggaggtggaacatttgatgtgtccatcttataaatttctaatggtgtttttgaggtatgctgatttgtttcttctgtcttcccttattaacctgtcagatggaataatatgataaaaattgtactgacaacatcttcatatcaaggtgaaagcaacaaatggtgaccctttcttgggaggagaggattttgacaatgcc

SEQ ID NO: 88401 - DNA, 314 bp, Glycine max
aagaagagaagctgtattgagaaaacaaaagagaaagggggagccagatatcgagagaataaaaagggagaaaaacggcacgtagaagggtgaatcataagacttgcaatcatcagagaccaacacgtgtgacacatgctgatatttatagacaaggtagctatccagagaaaccttctcgacaaaacgacctagagaagcttatatgagaaaactgccatgagaagctagagcttagctacacacacccggcgaataactaagcgcacctccttgggaagctggctagagaagattcctaaagaagctagagc

SEQ ID NO: 88402 - DNA, 381 bp, Glycine max
tctcccttattttgctattaatatggggagatttgaagaagaaaagggttcagccttcttggcacttctctctctctcgaaattgctgaggaaaattatttccgtgaagaaaatccaagtcgaggggcttccgtaacgtttccgtaacgtttccgtgagtaattacgcgaagattctcgaccgttcttcaagattcatcgttcgatcttcattttcttcagtcttcaacgggtaagtacctcaaaccgagcttttcaattcattctatgtacccgtggtggtccacattttgtttcacgtatttttattctcgttttcattcgctttttatacccccttttgacgtgcttaagccatttatttaagtcatttctcgcttaa

SEQ ID NO: 88403 - DNA, 272 bp, Glycine max
agatgagccagtccaacctgtaaaaaagggagcacacccaaaagaaaagcttacacaaaatcgtaaggccgacactcacaaccaagaaaagcgcggggtgcaccctcaaacccaaaagataaggggaagaccatagaaaaacccacctctaagactaagtcccaagcaaggaccagcaattaaatgcatcaaatgtctcgggagaaggcacaatggtctccaacaccccacaaagaataccaagattatgaggggccaagacatttaaagga

SEQ ID NO: 88404 - DNA, 87 bp, Glycine max
  unsure (1)..(87): unsure at all n locations
tagagaggaagcttcaatggatgaagagaatgttagagggggggaggcgctccccnctcgtctttaccctccccgtctccattaatg

SEQ ID NO: 88405 - DNA, 384 bp, Glycine max
  unsure (1)..(384): unsure at all n locations
agctntcttgcgacttgctcctttctttcctatcattgccaatgtcatcattagtgaaaatctttttgaggtgctgagttcatcaactggtgctcgccttcaattccccatctatgacaagtacctcactggcctggaaaggtatcaacctttaccttgaaatacattgtagctttcccctttgtctggtattgatttgacttccaagtttttttatgcaagccacctttccttcattttgtgtatgtttatgtatatatgtttaattgtttattttttcctcctatcctttcttcattttttgggggtagggcatatgacatatctgtaggagtggctgaacgtatatctctttcactgttgatttgtactttaaaagaaaac

SEQ ID NO: 88406 - DNA, 393 bp, Glycine max
tgtaccattcctttttctttcaattcaaaccctactttcatgtttttaaatattgatatttttattacatatatgtttcaaacaatccaaaccttcactatgcatcaagcacacaaaagtacgaaaatagccactgaccctttcgcagccaagtcaacaatgtagcaccggttggtcacaacgaacttgttcattaccagcgtcttccttgcaacgaccattaccatacatcagcactaaaccaagcttaaatggtacccgcgacatgtcttcaacactacaccaagcttaacctaagtaagtaagtaagtgaccaacgtaccgtggacaaagccctgatcttcacgaagtgccactccttgattcaaattaactgcgacccgggaagagtcg

SEQ ID NO: 88407 - DNA, 310 bp, Glycine max
tggtcttaactgcattttttcatggtatctgcgctcaagagtttcctttcccactacacattcaccagcttctaaatctgacacctcattgttcatctactaaacgagggtcaatcttgacttatttactagtctatattgacaatatgttgcttactggtaacgatgaatggctattcaagcaactccgagatgcactgcgcctacaattctacctgaaagacctatgcacaaccatacatcttttgggtgttgaaattgtgcccacgtcacatggacaatttctcaatcaacatcactaataacttta

SEQ ID NO: 88408 - DNA, 351 bp, Glycine max
  unsure (1)..(351): unsure at all n locations
cctctctattgttctattaataggacntatattatgataaagtccaatccacttacaattttgggcttttatgcatatggtgaaaatcatgcacgttttaacacaaaacttggatataaaccctcaagtcgctctggaggttgttctcaattcaaaatagagcttcacattgagaattagcgcaacaaaggttttcattataagttaccaactgtagtatttaatgatcggtctgtaatctatgttctttactttgcgttaaggacccctttatgttgatcacgccccatcaaaaagaacaaggttgattatagctagaatgcatgacacttaaacttttgtcgtgaattg

SEQ ID NO: 88409 - DNA, 269 bp, Glycine max
aagctagccaacagagcttgttttatgggaactgggggaaagacacataagcgatccacatgttcgtactcaaactggacctacccgtagaagaggagcttcatgccagagaacacatgaggcatgctcaaaagcagacatctctatggatgtgaaaacacaagtacgtggaggacagtctaacactctaatcaaaaacgccgatacaagaacacgaaaataagaacagaggccgaacacaagtgctaaagaagaaaagcggggaaaca

SEQ ID NO: 88410 - DNA, 390 bp, Glycine max
  unsure (1)..(390): unsure at all n locations
ngtttaccccatgttgaattagctaacattattanctggtcatatcaccactaaatggtctccttatgaaggtgtttaaggattaaacccactaactactcttgatcttttgcctatgcctaacagacctgcttctaagcataaaaaaggtcaagcaaaagcggactatgtgaagaagcttcatgagagagtcaaagatcatattgagaggaaaaataaaagctacgctagacatgccaccaaagagagaaggaccggtgtcttcgaacccagacatagcggttgggtgcacatgagaaaagaaaggtgaccagaacaaacgagaacaaagcttcgaccttaaggagatggaccatttcaagtgcttgaaagaatcaatgacaatgctta

SEQ ID NO: 88411 - DNA, 322 bp, Glycine max
  unsure (1)..(322): unsure at all n locations
aaacccttcaacaccagtacttgtagtaataaagctgacactactactactaaggcaaggataaaatgcaacatcgaccaaagtcttctgaagaacaaatctgtaaagggtaccacggaacttcttgaacagcatgtgtggaggccccagagagggttgccagaacgtgcagtggcaattcttaaagcctggttatttgagcattttcttcatccgcatgattgtctctatctatgtctcttattaataattttcttgctccgtgactctcttttctgcattctaaagagacatttggatagaattggggccttnttttgct

SEQ ID NO: 88412 - DNA, 285 bp, Glycine max
tgagtgcgcttatgatccagaatatggacggttttgtcttccctccttgaacaacacttagctgaatgtagagtctctttcgagagtataactatccggctggaaaacattgttactaggctgacccttagcagccttccttaacccgatgaggataaagccgacgatctggggaatgttatttgtgtctctgatcacttggttcgtgatggtttactaaggagcgagggttgctcataatagaggcaacggttttctatgatagaatgctatgacccttccata

SEQ ID NO: 88413 - DNA, 413 bp, Glycine max
gtgacaacataccacactcaagcttagcttggagcttcaatggagaatgaatttattttttggctacgtgagggagagagagagctgtctgaaaagtgtgggggctgagtgaacagagagaaaagcttttcggctttaaataaaaagggttttctctttttctattattctatgataaaccatgccacatgtctccatttaagtggagcaaagatggcccactttctcttttgatggtgacccatactcatccacaagatgtgagataaacctgaccttcgaaacgctaaaatcctgcctcggcttgcatgccatttctctggatccaagtcctcgcgtttctctgggtcccgcggggccagttttctaaagctatgcactttttatatcaaaacactcagaataataccccg

SEQ ID NO: 88414 - DNA, 357 bp, Glycine max
  unsure (1)..(357): unsure at all n locations
gcttgcattccaagacatatnttttgatagctttacattcgcaaaatgtattcaantgcatgataaaacaataacagacaacgaagaattgaattaaattgaatgattgtaacatcaaattatggagatctgaacgagatgtaaaatgatcatgtnacattgagaagcgatatagtgatatgtataatggaagataaaatgagggaatgcagatgaaaggtaaaagacctgatgtatggtgaaggtgttggatttggcttcatgggttaagaattggaatctgcacaacttttctttttcttcaagagagcgatcttaggagctagattcgtaaaagctcctaattgcaaaacattt

SEQ ID NO: 88415 - DNA, 390 bp, Glycine max
  unsure (1)..(390): unsure at all n locations
tgttgaaactcattaactgagcaaagacatttttctgaaaaccttggttagngagatgtggtggatttgaattgagcattaatttaatgtttctatctgtggaagatgggttactgattgatgtaactcatgagcttggtatttaattggcagttaaataacaatcttggagaatttatgtcttgtccaatctagcattttgaatatggaacttctggttagacccaaaactaaaaacaatttttgaaaacagttgctatggttgaattgtggggaaacaaggagacagtaccttgttcactgcattatctttttatcttcatactctcgtttcatatctttcattctatttgatacagatccattgatagagattttctgtcaataaac

SEQ ID NO: 88416 - DNA, 394 bp, Glycine max
  unsure (1)..(394): unsure at all n locations
ggacctttaatactcagctatttgataagntattttttataaatttactgagagaangaaagacacatgcatttacattgcaaaatcattattacactgatttttatgtgactttttaagatttttttaactgaatgtgacgttgaagattgttactgtaaaaatcaacacactatctaccaaatattatgaattgtgagatttttatactgtgtcatttattcttttgattggattattatactcattattgtgaaacaaatgaatatttatatgttacgcgttctaacaaaatggtttatatgataggtgaggaagagaacagagaaaattctgaaatttaattttaaatggaagaccatttcaaagaaaaaagtcgacttttacttttaag

SEQ ID NO: 88417 - DNA, 224 bp, Glycine max
gggccaaccactaagaaagacgccatggaagaaagaacatcggcaccaatatgaggcatggataggaagcttggaaggaggcatccacggaggagaaaaaagagggacagaaagagagaggggggagcaccaaaggcaaggaataaaaaagggagaaaagaggaacaatgagagaagtctcacaggagtctgattcatcaaaggtacaacaagggtgacacatg

SEQ ID NO: 88418 - DNA, 282 bp, Glycine max
gacactaagaaactcagcttctttccggaacttcttttttggtaggcttttggtcaaacccagcgggcgtagcactctgatcgccgatggcaagtctaatgcctcatgaaggaccagacttaatgtgtgataccgctgttctcggctggcgacgattggtggaatgaaaaagacctatgttggccgactttagatacgtggcaccatttggaacacatgccatgaagggccgagacataccccatgggaaccgcactcattcttattctttccatgataccc

SEQ ID NO: 88419 - DNA, 340 bp, Glycine max
aaacagtcgcacaatcccaattttacaaaaccatatgcatatgtcattgaggcatagcaccgtgcactaggtgggcgcatggctaggcatgaatatgcaagagagagggagcaatgtggcaagccccagtgcttcacaatacaacataggcctaaggccatcccctacatcccctcaactcaaacaaatcattcttgataaccacccaaaactgcccctcatatgtgagcacatgctcacactttagagcaccaaaagatgaacaagatgcactcatggaaagcctaaaaactcatagataaatacctactcgttggagagagaaggagtttcaaataag

SEQ ID NO: 88420 - DNA, 342 bp, Glycine max
gaggagttttttggaggaagagaaagagagagagaggggggcatgggaattgaaggagattagggagagaagttgaactttgaagtgtgccacacaagtttctcattcctcatagttatgaccagagttacacatgtttctatttataacctagcacattggaagcttccttgagaagaaaggaaggtagcttccttgggaagctatagggagaaagcttccttgagaagctagtgggtagaaagctcccttgagaagctatatggaggctattcacgcccctccaatagttaagctcaccttcatgccaaaatacatgaaaatacaatggaacgattcctt

SEQ ID NO: 88421 - DNA, 392 bp, Glycine max
tgcatgatttacattctccccctttctcaagcttattcttaattcttcttgacatcatcaaaatcttcatgatttacattctccccctttttgatgatgacaaccacctgtaggttaggagcaacaacaaagaaaaaatatctatttgcatatagtttactcccccttggttttgcaatgattgcttatatgagacagttgaagatttcatatttttcatatgtaaacaaattgtctcataaacaacagataatttttcttactattttatctccccctttgtcaacataaaaaacaaatcatgaatagataggagaaagatgttaccacttgttgcaatgtatgagaatcaagtgataccaaaaggcattaaaacaatcattcaatattaa

SEQ ID NO: 88422 - DNA, 327 bp, Glycine max
attgtcatgaaatgattggaaaagtcttcaagatagaatgaatgaattgattgaaaaaagcgaaacaaagcctttcttttatagactcttcatgtctggttaagaagaccgcttataagagttataacttttagaaaaacttataaccaatttgagaaagtcaaaaaccttttgaagagttacatctttggatttattaaaaacagtcactggtaatcgattaccaaattagtgtaatcgattacacaaggcttttaagtgaaaggatgtgactcttcacatttgaatttgaatttcaacgatcaagggcactggtgatacgatacc

SEQ ID NO: 88423 - DNA, 393 bp, Glycine max
tacaaataaatatttaaaagtcattttcatatatcacaaaattgaagataacattcaatggttcataataaaatgttgcatcacatgcacattttgaatggcaacacatgcctctcagttaaaatgtatcagactgagtaccacattcaacaatgtcaaaagacacgggaaaataataatgcaccatagtgccaataccaaactggaagagataacctgtcaattttaagagtgaatgttattataattggattttgctagcaaaataaaaactgaataccatgtatggctgctcaatcttgagtttatcttaacttacaatatgtagtaagcatattaatgcgatcaaaagatatttttgaatactaatatcaaatactccttccatccccc

SEQ ID NO: 88424 - DNA, 357 bp, Glycine max
attagaagggggtctataactaatctctaacttctaaggaagtattctttgaaagcttctcaaggaagctacctagtctataaatagaagcatgtgtaacactatgtgtaactttgatgaatgagagacttatgagacaaacttcaaagttcaacttctcttcctctgttcttccttcaattccgtgctcccccctgactctttctctctctctttctttacctccattgaagcatcttcttcaagctttttatccaaagcacattcttggtggtgaagcttcttcttccaaggcttattccctagagggtggcacctctttgcacctcttctcctttgtcttccgctgcatataca

SEQ ID NO: 88425 - DNA, 397 bp, Glycine max
tagaattgaatttgggtacccatttcgaattctctatgtggtccttatgtatataaaacagtcccacaatcccaatcttacaaaaccatattcatatgtcattgaggcatttcaccgagcacttggtgggcgcatgtttaggcatgaatagcaagagagtgggagcaatgtggcatgccccattgcttcagaatacaacataggcctaaggccatcccctacaacccctcaactcaaacaaatcaagcatgaaaacaacccaaaactgccccacaaatttgagcacattctcacaatttagagcaccaaaagatgaacaagatgcaccaatggaaagctaaaaaactcaaggattaaatacttacttgttggagtgagtaggagtatcaaaaatgaa

SEQ ID NO: 88426 - DNA, 383 bp, Glycine max
gcaagctttaaaatttgaattaaataactgctggtaatcgattaccatatatttgtaatcgattacacagtgcaaatttttgaattcaaattttaatagctgttgtaaatcagttttggccactggtaatcgattacattctctagtaatcgattaccagagagtaaatttcttgtaaaagactttttaacttaaatttcttggccaaaccttttgctacttcaattggaattcccttcctatttaatataccctttctaagattctagagactgtcttgatcatccatcttgaatatctttgatatctttgtcttgaataaagctttgtgaaacatgtaaccctttggcatcatcaaaacatcagcttgatcctttgtctac

SEQ ID NO: 88427 - DNA, 393 bp, Glycine max
  unsure (1)..(393): unsure at all n locations
ntgttctttntataaaataagaagttctggactcattacgttatctaaaaatcttggggtggatccaagtgctccgatcatccatttgcatactcatgttttggtggcatactcaccgttgtttatttctttaggaatttcatcataactaagaaaaaaccaaggcacccctataacactcgatccagaaaaatggataatgaagagggcgtgcaggaatagatgaaggccgatctatcggccttaaaagatcaaatggcttccatctcggaggtcatgttaaaactccagaaaaccatagaggataaagccaccgcaaccgcctccagtacagttagggaagcggagccgatgctgcagcccgccttgaatccgggcctagacagaaacacg

SEQ ID NO: 88428 - DNA, 249 bp, Glycine max
ggctaagtattctccatcctacccctattatacaccctccctcagggaaaatgtgatgcaatgcctcaggaagccactacgctatgtacacaacattccttctgtttacgaggttgagagcttcatggtactgagacaattgctggttgctccgggatatgagagagctttgatgctgaagcgttactggtagcttagacaaatttcatagatccgcactctgacaatgtgttgatgcgagttgcggac

SEQ ID NO: 88429 - DNA, 390 bp, Glycine max
  unsure (1)..(390): unsure at all n locations
tgaaagacatgcacaaagtgtgactattttatgttgcaatggggtgtancaagcaaatgctcacctccccctctaaaatttatttggattgggcttctcccaatttaatttaatttatttcccaacacacacatcaaatattcacttaatgcatgtgaaattacaaaactacccctaatacaaaaacttgtctaggtgccctaaaatacaagggctgaaaaatcctacatttctagggtaccctacgtacattatggagccctaaatacaaggccaaaaaataatgaaaccttaatctaatatgtacaaagataagtgggctcatacttagcccatgggcctgaaatctaccctaaggtttgtgagaaccctatggccttctcttgcatc

SEQ ID NO: 88430 - DNA, 365 bp, Glycine max
cagcttgccatagggatagattgttttaagctagtaactaatgccagccaaatttgtatgtatggatagactaaagcagatagtgatcaatataaagaggctcaaaggtcgtggtcatgttgtcaagtatcaaatgaagtgaaagaaatgctattttatggacaacaatatatataggagatatgataaacatatgaaagggaaaaggaaaaggaaaagtaagaaagcaatagacatcgttaagtatgtaatgaggtaagtatgaaaaggaataatgaaatggaattaaaacaaaaattatagaaaaatgactatattattttataagttaaaacttatttaaaaaatagaatataagtgatact

SEQ ID NO: 88431 - DNA, 383 bp, Glycine max
  unsure (1)..(383): unsure at all n locations
ntggcctccataagagaattatgtcatctccgcatcataaaagtttgactctctaggacatgctctacctccttaatttgtcaagttttagcagtggcctcaatgtacttgaagtgaatattatgatccttactttacaagacagaacatagaaattactataatggaaaaacaaagtgaagcagaccaactagtgaactgaggtaatgttcactctactattagaaagaattggagctcaagtatgcacccaagaaaaggcatagtccttcataacatgtgaattgctcaaagagtttgatgcatgcatcaacacccacttgctcaaaatattccttagagggatgtaaatcatgtactatcaagactcccttataaatgaa

SEQ ID NO: 88432 - DNA, 352 bp, Glycine max
gcttcaatggttgaaaaaaatgagggagagaaagagagaggggggagcacaaaattgaacgaagaaaaaaggagaaaagttgaactttgagttgtgtctcacaagactctcattcatcaaagttacaacaaatgttacacatgtttctatttatagactaggtagcttccttgagaagctttcttgagaaaacatccttgagaatcttctttgagaaaacttccttgagaagctagagcttagctacacacacccctctcataactaagctcacctccttgagaagcttccttaagaagattcctaaagaagctagggcttagctacacatacctctctaatagctaagctc

SEQ ID NO: 88433 - DNA, 389 bp, Glycine max
tgaaggtgcataccccaccattttttcatatttaaacactggtaatgtgtctattattattgcgatcatctctttctccatcattggaggtgacacttgagctgccaggtctcttcacctttgggcatattctttgaaagattcgtgctcctttttgcatatgttctgtagttgcatcctatctggagccatatcataattgtactgacactgcctaacgaaagcaaccattaggtccttccaagaatggacttgggaaggttccaagttagtgtactaggtaacagctaccccagtaagactttcttggaagaaatgtatcaccagttcctcatgttttgtgtatgcccccattttctgacaatacatctttagatggttcatggggc

SEQ ID NO: 88434 - DNA, 297 bp, Glycine max
aaagcaagccaaaataaagggaaaaaaaagaacatagacaacacttaaaagacctgattgtaaataaacagaaccaacaagatgaaccgaaacaaaaaggttatcagggtatataacagaggtggaagacagatcaaataccataagaagggggcacctgaatctaaaatccaaataatagaataagttgaaaagagataaaacagcaaaaagtacctgcaaaatctgcaacagggtagtaatcaccaatgaagaaactgagatggaataaaattatacctaggagcagagaccgaa

SEQ ID NO: 88435 - DNA, 383 bp, Glycine max
actcagcttctggctaaaagaagtacacaagacgttttatgagattctattgctgcaaaagtatatccgaaaagttattgatatgcaagtcaaggtcttgcttttatagactcttcatgtctggtcaagaaaaaccataagaaaagttataaccttgataaaaacttgaaaaccgttggaacacttacatctcttgattttaattcaaaactcgtccctggttatcgaataccaaaaccatgtgatctattacacaaagaattttatgaaaaatatgtgactcttcacattcgaatttgaatttcaacgttcatatccactggcgatcgcataccaatatatagtaatcgatttcacccttttacaaacaattggaacgtctc

SEQ ID NO: 88436 - DNA, 325 bp, Glycine max
gctattagaacaaaaatggcttttacatctccaaaatgcatgtgaattatgagcgccttacatgaatcagaccacggcctttgtgcaagcaatcattggggcataacacaccatacgattaatacgatggatggctcaaacacttacaaaggctaaatcattactcttaaattgagcgcttacaacgattatgacatgtacagaagaatcaaagatttcatgtcacaaaatgtcaagaacttttattttcaaaacaattacccagttcttgaacatatgctataattcaaagaaaaacatgcaaagtcgtatgtgcacacaaaat

SEQ ID NO: 88437 - DNA, 375 bp, Glycine max
tccgaagaaagggacgaggctttcgcccttactgccgagcttgactgagcccgggttgtcgacaagaagttctagttcatatccatgcccatttgacaggagtacgatgaactatgggacgtgagtctggccaccgctttatccttggaatgataaaccactattgccctcgaggaagaacacgacctaaacacgttttgagggagcttttatgtctgcaatagggagctcaaactctgatgacgagaaaggaatcatcatgtgtcagaggcatgatctacaactgactatctaatgcttgccttaggtctaacatagacttgtccctacacttaaattgaaactgaaaggaatatatcggccatcatgcatgac

SEQ ID NO: 88438 - DNA, 312 bp, Glycine max
cacaattgaatttgaattccaacgttcagatgcactggtaattgattaccaatatcttggaaatgattacaccattttgaaatcaattgtaacatttgaaattcaagtaaaagcttttgaaatcaaactttgccactggtaatcgattacaggaaactggtaatcgaataccagaaaagaaaaactctggtaacttagaaaattttgtgaaaattcttttgaaaaacaaaactgtgctatgtttgttttttgaaaaatcttttcaatgcttcccttgtgaagtcttcttgatttcttctctaggaacctgaa

SEQ ID NO: 88439 - DNA, 378 bp, Glycine max
tggcatcatctgaaggggatgacaaagtctgtagaaagcataagttaagggggagttttatggttgtttctgccctgaaacattttattttgtacttaaaacacattttcttgaggtgaaaatctttatatgaataaaaaaatactctaccaagaaaccgcccatgttcagaggtatgaagtacgactactgaaatgagcgaatgaaagctcattttaagtctattcagattgacctatgagacatggtagaaaatggaaatcatgttccatatcatgatgagctaaatgaaatcccaaggagccaatgaacgaaggagcaaaaactcagattcctgcttaactccgaggcttggaacgttatgttgtatgccttatc

SEQ ID NO: 88440 - DNA, 297 bp, Glycine max
tgagaaaccatggttaaaaatgatgacctcataatccattgttagatgtgtgttgaagtatgtattggttgtcaatcttcattttccatcttgcgtcaagatgatgcattgtattgatgtaagaactcaaacatgccaaaaaaaaatgtcatttaattggttgtaagtcaacgaagacaaattgagggagtagaactaagaaagaaaaaaaatgttggaggcaaaatacattgagcttacaggaaagcaaattcattaatattgtgatgagcaataacagagcttaaataataaatc

SEQ ID NO: 88441 - DNA, 385 bp, Glycine max
tccatagctccttaaatgctccatcctgttgtgtgttcaactatttcccccctcaacacataattagcagattttgccgtgtattgcccactcggttctgccttccactcccacttatcacctatgtgcggctgaattgggtgatgtgcaacctccgataggaatgaaaccgccatctctatttcattatcaaacaatggtcttctccacctaaaatcctattcccaccccacgtctttgaaggcccccatgtgttgaatactctggttttgctgtgtagagatactaaacagcctagggtatcttgcaagtaacgtgtcctcttcacccatccatctatcctcccaaaatttaaacttgtccccacttccaaccctccatgatg

SEQ ID NO: 88442 - DNA, 394 bp, Glycine max
  unsure (1)..(394): unsure at all n locations
agcttctngcgtagcccctcttggtgctcagattatcccattaacaaatccctcttattactagctattttgaattctttagttcctgaatgtacagctttcaaattggtgctcgttcccctctttgttttaggctaaaaatcaaatcaatatcaaacaggtttttccagcagagattttcagaacctatgcagtgcaggccacaactgaatgggatatccttcagtaacattggccagcagcaaaatcagatgttggtgcgtaattnttatgagtaggaaataagggctttcaacaaggcactacttggaaaatggaggtgggagatgcttcagcaaagtaacaagttatgggccaagatactggattccaagtatggtggatggagaatcat

SEQ ID NO: 88443 - DNA, 215 bp, Glycine max
ctcttgccctatctactggttctcagcctgtggcgttggttccgtgtgattcctgatgacaataatatatttataatcttaccccttggtgaagaaaattggtgctgcatctttattgaactcttgatcaatgtgttttattaaaataatcctttttcaatgtgatcctatactcgatatttctttttaaaactcataactttctttctttctat

SEQ ID NO: 88444 - DNA, 344 bp, Glycine max
agggttctcaaatattgttttcaagtgtgtagatataccatatcatctctgtggtcgaggatcatacaatattggaacacactctgccattggtgatttgaatggcaaaaaaacaacttctggttgcataattggactttagcctattgcccagccctgatattccagccatctccagagaatctgcagccacattgcatacttcatccccatgtcattggtagtgctgatggctgctccacataacacccatattgctcgcattgcatgttaattgtgggctgcaattggtgatcagatgcggaacattacgcatcatgctttggaagatattgacctatggt

SEQ ID NO: 88445 - DNA, 360 bp, Glycine max
atgatgcttgtgatgatgatgtgctgaaattgcttatggaaactgttaaagatgaagggtagagtttacatatggttagaaagtgagaatgtggtgctatgagtggaaataaagtgaggctttgagagttggaacgttaaatctggattctgctggaaatggagattaaagtgagttaatcctaacttgaaatgtcatttaagacttatgagaaagattggactgtgctaaggagataaacaaatgaccaaagtgaaccaagagccatttctagggcaaaattgggtgttgaggagtcaatatttgattcgggtgaattctaagtgtaatccattttgacaagttatatgatgtttggac

SEQ ID NO: 88446 - DNA, 405 bp, Glycine max
  unsure (1)..(405): unsure at all n locations
gctcagctaattcactaccttatacaacattgcaagttgagtgttgaaaggcaagaacagctattgcaaatttatagtctgcagttcttcctccaagtagtaataaagtggctattccacttgatgcaactgtgaaaataatatttccattcaagcgcaatgcataagacaatgtcttccacataaaaaattttcccattcgaaggataaaaattcctccacattgtagattaacagcattcatgattatatcaaatataaatttttgctcatctgagacanagtaaatttgaatcaaatgtagatgagaatatttagtagaaaaatgtattcgtatttgttgtctaaactaaggttagatacatacacatgcacacatgcatatatgtgtgtatgtgtgtgtgt

SEQ ID NO: 88447 - DNA, 409 bp, Glycine max
  unsure (1)..(409): unsure at all n locations
agtcacctgcggcatcgcagcttagccgccacaaattactttagaccanattcttttttttgtccanaatcaacatcaaacgttgtgtattacgatgcaaacatactagtctaacgtcttatagatacacaatattaagctcattgtctctttctctcaggatatacaagatattttgaaagctttctacaacttagaaattttgaattcagagacttaaaagatgaaaaatgaattcgacaaaaaaaaaatactaataatttcatcgcaacaaaattcacaacaaaggttgcttgagggaattgtcacacaagtatggaaaggtagaacttcgcaaagtccttgacagtcatcgttcttaaacatttatgttatactttccaaagtcattcattattgttccctcaaa

SEQ ID NO: 88448 - DNA, 423 bp, Glycine max
attctaactactaagagaatgtgaagttctcccaaatatgcaaaaaaagaataagagaaaaacttacgttatatattcttacttcttatgaattctatattgtgctgattgccagtctaaaactctaaatggctgtttgaaagaatagagtatgcgatagtgaagaacaattatggatgatttatacaaacttattgcttggtaatcttgaatttatatcataacttatcttgaaaaaaattattgttgattgttttaaaaaaaaatatgtattgtgcaggattattgcagagtaccatcttggagagtctatgatgcatcttggtcaaccgtacataggcaaatgatcgggatatactagcaaggaagtgagtataataaagatgttgaaaatctattttggactaactcatattactacac

SEQ ID NO: 88449 - DNA, 482 bp, Glycine max
  unsure (1)..(482): unsure at all n locations
gcttgtagaatggctagacatgatacatgtctgggtttggtttggntcatggataaaaaggatgccccacattatttccatgacacaaatgcaaaaatgatgatttggaaactttatgcaaaactggtcatgcatgcacctatgcggacactcaagtgtcaaatttttatggtcatgtgatgctagggctcaagatccatttcctctattttaatcaacccaatgtttccaacatatgttcttttatcaatttgagcattcatccgagtccatttcgggcgtccggggaaatttcacagcattcacccttcaggtgtagacacattttccaaaaattggttatgatcaatgaactttttcaaagaaaagttggaaatcgtctcttttaaaagcatgctgtttttagctagacaacctatttttctttttctaccttttcttacttgccttctccctattgccctctttctttcacttctttt

SEQ ID NO: 88450 - DNA, 376 bp, Glycine max
  unsure (1)..(376): unsure at all n locations
ctcgcccggccgacaatgcccacttattcgccagttccaacgcaatgaggaactatcccncgaggccaattccataattcaccccactcccaatgatgtacgatgacctcttgccgtcccttatcgccaaccaactggccgtaataactcccgggaagatcttccaaccctntttcccaaagtggtatgatcctaacgcaacttgcgcgtaccatgggaaaaccccgggccactccatcgaataatgcctggcccttaaatacaatgtccaacatttgatagacaccggatggctaacatttcaagatgatcagaccaatgtgaaaactaacccgctcgccaatcatggatggtgtgcggttaatgccatcgagtc

SEQ ID NO: 88451 - DNA, 398 bp, Glycine max
atgggatgaagcggtagaaaagttcttgaagaagtacttccctgaatcgaagactgcagaaggcaaagctgccatctcttccttccaccagtttccagatgaatcgttgagtgaggcacttgaaagattcagaggtttattgtggaagacttccattcacgggttttcagaaccaatacagctcaacatattcatagatgggttgagaccacaatctaagcagcttttggatgattcggttggggataagatcaaaatgaagaccattgacgaagcaatggacttgtcataccctaatttcgtccggggaccattgtttcatggcatgtaacctttgtttgaccgcttcgaggtacttggcacccttttgtgcacaatacatgaagttccgggacatg

SEQ ID NO: 88452 - DNA, 247 bp, Glycine max
  unsure (1)..(247): unsure at all n locations
aatgggcactgtggctgctgtggaatattgtgccctgggtattctctacccttattctacacaagataggctgtatataggctctaatatcacgacgctgcgcttagcgccaccctcacgcttagcgtgagtaagtgatattgggcttatcgccagtctcgcgctatgcctggctgaatgcacctgctgcgcttatcgcgtngaagctacgcttatcggtggatatgcgcttagcccaactgctgag

SEQ ID NO: 88453 - DNA, 456 bp, Glycine max
  unsure (1)..(456): unsure at all n locations
agcttatgctgcanacatctacaatatacctttctaacctcaacatcaaaatcagccacaacagaacaattatgacctctccagcaacaggtacaatcccgggtggaggaatcatcccaaccttagatggttgaatccttcacaacaacagcaacaacaacaataaccttattttcaaaatgctgctggcccaagcagaccatacgttcctccaccaatctagcaacaacaacaacaacaacagccccaaaaatagcagacagttgaggctcctctgcaaccttcccttgaagaacttgtgaggcanatgactangcaaaacatgcagtttcaacaagagaccagagcctctattcagagcttaactaatcagatgggactattggctacacnagtaaatcaacaacagtcgcaaaaatctgacagataccttctcatctgtcagaatcccaaaat

SEQ ID NO: 88454 - DNA, 286 bp, Glycine max
  unsure (1)..(286): unsure at all n locations
gctctgcctactcaccgacttgaggttcattttatctatcttatacttataccaagtgtcagaatntctacacctataccactccttgaaacactactttnttactctaactttgctctgaacattntcattccaccaccacgattctttacccctatgtccaaaacctctagattcacccaacgtctctttagccactttaataatctcttgggacatcttgttccacatatcatntgcacattcttgtgattgtacacaccaacattcccatatcttttgttgg

SEQ ID NO: 88455 - DNA, 346 bp, Glycine max
  unsure (1)..(346): unsure at all n locations
agcttgagaggaggaagtgtagaatgttgaatcttcctgcttttattcgnnggccacagagtggtacctggagatatgtcgcggnggtcaggagaccttggggacgtcaggtggggtgctattgcccaaaaccaagcttgaccaatcccgacccaacccgggcatagtcggtcagtgagaacctgtgatgtacctaaacaggcgagctcctggcagtcaacagataaaaggaacatagaccacaaagcaaggaggcttgtgtggtggctggccaactgtgaatcttgtgtgatataagggttatggcctttggtaatcgattaccaanggtgggtaatcgattaca

SEQ ID NO: 88456 - DNA, 337 bp, Glycine max
  unsure (1)..(337): unsure at all n locations
agctnttggaaggatcaagaagtgccttatgattcctcccgtgcttatgccaccagtacctggaaggcctctcattntgtacatgacaatcttggacgagtcaatggggtgtatgctggggcaacatgacgaatccgggaaaaaagagcgcactgtttactacctaagtaagaagttcacgacctgtgagatgaattactccttgctcgaaagaacgtgttgtgctttagtatgggcatcccatcgcctaaggcagtacatgctgagccatactacctgtgtgatatccaagatggacctggttaagtacatctttgaaaagccagctctcacggga

SEQ ID NO: 88457 - DNA, 362 bp, Glycine max
gctgcaacttgcgattggtctcgctttttttgtctaaggggctataaagagacaaatctgatcatcatgctttgataaatgcacaaaaaatgggcaatgaagaggtgaaatgagggaaaaccctgttatactgcattcctatacgccaattcccaccaacccacaatgtattactcaaccataacaaccttctccttacccaccaccattatcacaaagcctcctaataacccaaaccctctccgcacttcatgacacaccccttagccaaccaaacccaccaaatagatttgtcgaatacctgtattacccatttcggtcttctactgccctattctgatattatgggcctacccaccagt

SEQ ID NO: 88458 - DNA, 292 bp, Glycine max
tctttttcttgttcttgtttgctcgaccttgaattaatcttgaagcaatgcttaacctttgaatatttgttgaagtaacttacgttgtcagctactcccttctcatagatgtcagcgactcttggccgagactacgataaagtctcatttgttatccgtaagactcatagcacgatagctagcagtgacttacgtcgtcacctgcacccttccctgatatgttagcgtcttgcgggcaagactacgataaagtctcatgtgctatccgtatgactcaaatcacgattgccat

SEQ ID NO: 88459 - DNA, 415 bp, Glycine max
  unsure (1)..(415): unsure at all n locations
agcttcattctacatctgattaagaagatgagatagttgcacanaagagaaagcttcctgatcatgaaggagctaacaaaaaatttcatgcaggtggaccttcttctaataattctgacttgcagcagcctcctatccctcttccatttccacctagagcaattccaaacaaaaagatggaagaagtggataaggagatcttggagaccttcaggaaagtagaggtgaacatacctctgctagatggcatcaagcaaattccaagatatgccaagtttctaaaggagttgtgcacccacaaaaggaagctcaaaggcaatggaaggattagcatgggcagaaatgtgtagcattgataggtaaattgctcctcacattcctaagaaatgaaggacccangtactttctatatacc

SEQ ID NO: 88460 - DNA, 332 bp, Glycine max
  unsure (1)..(332): unsure at all n locations
acacttgatactaagctcacattaacgtatgaataagcttctatatgtttatctcttattgtacaagtacttaacttaattatgataatgcgcccataacattatgtaattatgtttgtgtactatgtggggttcgacattgtgtgatgtgaatctaacaggaaatggggttttgaaaagcttgtgtatagagactcaattacacgaattcgtatagatcgaatatatgcagtgcatccaccgaatttgtatgctacangtgtgcacatgtcaatggatctatcatganaaacaactcgcataactgaacgtatgatcaaatacttgcacta

SEQ ID NO: 88461 - DNA, 193 bp, Glycine max
tgtgtcgcaatgtttgcacatatatcaaactgaaaataagccttggacgaattgtgtagagatttgtgtcttgaatgattggtctcacgttgctattgaaaaatgataatgtctactctcctgtgcgtatttcacgaggagaaagaattcgtatgctctgtctttttggttggcagacgaatacatataaaaa

SEQ ID NO: 88462 - DNA, 296 bp, Glycine max
tgcgactgagggcggtaatattggatacaggtcatgtctgctttgatagactactactagtgattcattcattatctaagctacttctctctcatgtatatgtggatacaagtgatgttgtgaggggcccgcacgatgctcctggtcattggttggtaactgctgctaagcttgtgactgatggaggcaagattggattacatgtcaagtttgcattgatagactaactaaagttattcattcattgtctaagttacttctctttcatgtatatgtgaagagaagagaataatatt

SEQ ID NO: 88463 - DNA, 392 bp, Glycine max
  unsure (1)..(392): unsure at all n locations
acttcaactttgcagatgggatttcattcgagaacgaaatcgtacatccaggacatgaatcggttggttgcataccagaaaagcttgaaaacatgggccaaacgggttgaagacaatgttgaccctaaccaaacaagggtattctttcaaggagtctctccagatcatctcangtatgtatatgtcccaataccactaaatggatcataatttatgagatgaagantaataaaattctctacaaatcattcttcatatacattgtaattgtgacacaagtgactctatatcttaaagagaaacatttntatattagtatgtaattatacatcattatgcgcatatatatagataaatttgctcattcctataataattattttaaagatgaa

SEQ ID NO: 88464 - DNA, 427 bp, Glycine max
  unsure (1)..(427): unsure at all n locations
ggtgggtgtgtgagagagggattacttttttttgtatttttgtcactaagctagagctatgtcgtttcattgatgatgggtggcagcactttggtgttgggactaaaggtggggctttatctgtattctgtggttgttgaacgagctggtgtatgtggggccaatgtgcctgagttttttttctaaccaaaaatgacaccttaccttctatgactttcttctgtttcgtactggtggcgtaatttggagtagccgctgcctcanaatgcgctagatcaataaaaaatggaatttgttgctgttctctcattcccagcttactctattaattgcctaccaatatcacttttcagctttttctgtgcgaatattaagaggtcgctttttgtcctactgacttaccattgatataaaataaacccgcctg

SEQ ID NO: 88465 - DNA, 277 bp, Glycine max
  unsure (1)..(277): unsure at all n locations
agcttgaacaagttnnttgaagaagatttggcttttacatgcccaactcccttaagtgacatttgtattggttgttatcttggctgttgcatcttaatacacttgatatttgtgttgcatcatgaatcatcatggttagggtgaacaaaaggttcttcgaaggaaataactctatgtgttaatcgattacagagtcgtcataatcgattacaacaacatggcttgatcttaagacatgaggctcagatcagtttaagtaattacagaccactcgtaa

SEQ ID NO: 88466 - DNA, 388 bp, Glycine max
agctgattgtgagtgtttagcctgcgtttcactttggttattaatctattcattcaaggaaactctcaaataaaaacgtccgattgattgttgtgactattctattattaattctttcaagatattttgattattgtattattatttatgcctttgttgatttatccgatgttacaacgtgaacaatcggttgaattttattttaatagtgattaaacgagattacaacacagatgatcgggttaaattcatcttatcaattattatgcgagataagaggctgtaataaacggtattaagctgattgaaagcggaagataagaataccgtatgtatgtgatatgaagatgaaagcaacactataagataagaattgatgtcttggatc

SEQ ID NO: 88467 - DNA, 335 bp, Glycine max
  unsure (1)..(335): unsure at all n locations
gatccagctggtaatatctacaactaattaagatcttataagaatatgtccaanaaaatcttataagaacatgagtttgaatatgttgtttaaatgaatacttgggtaatgaataattctattctagtactattatataagcatccttgtaagaatcgtttaaatcttgcaacctacttgtaagcaggtgcatgattggcttcattccagcatcaacaatggtactgaactaggtgacatcttagctgcttgtaacaataagctcagactcattacaaactcatctgggagattaattcacagataagtgaaccaaacgttcatgtgatctctca

SEQ ID NO: 88468 - DNA, 479 bp, Glycine max
  unsure (1)..(479): unsure at all n locations
agtcaagttcanaaatcccgtgaaaggttgagaggacatgtttacatggtgtagattatgccacttcttaacgttaggaatgttctgttttttcttttccaatgagcaacaagaacagcaagtagtagatagatatatactatcttgtactataaaaagtgatcataaagctcttggttcggcagtcccctaccctcaaagcataatctacataactcaatccccaagtctttcttttcccatttccaatgttttagctctgataactatggttttttatatgattcttttgattgcttgtgtcagattaaaaacattacttataccatttgttaaaagaagagacacaagtgcgctgtctcgtgtaaatactggttattgaagcattatacctaacccgtacacgtcttatttatacatgctcaagcagctgcagtatgcaacttctttctaactaattttcatatgcatgatgatgc

SEQ ID NO: 88469 - DNA, 386 bp, Glycine max
gtctcatccattaatatagaacctatatcctaatgtcacatcctatcaaagcgtggtgttcccgtgtcctctagcttgaggttcttcatagtcatccacctattcatctgctcccccgaacacaaagttcaagatcatcacaggatccaaacacaaacagcaaaccgggagtgagttatcacatttctaactactagagagaaacaacacaacatatagtagccgaatacaatttacttagcatatctcacattatttcatcactttgtcattcatcaatcacacttttcatccatcaatcacacctttcaatcatcaatcactatacacaagaatcacacacttcgatcaagacataataacacatcaatttcataataaacaat

SEQ ID NO: 88470 - DNA, 397 bp, Glycine max
  unsure (1)..(397): unsure at all n locations
agaggttaatgatacaacgagatgatgcgctccatgagaggttggatcaaatagagaatagagatcataatgaagaagaaaggaggagaagagggaatgatggtgttcctagacaaaaccgaattgatggtattaaactcaacattcctccatttaaaggaaagaatgatccggaggcctacttggagtgggagatgaaaatagagcatgttatctcatgcaacaactatgatgaagaccaaaatgtgaagcttgccgccacggagttttccgactatgctcttgtgtggtggaacaagctacaaaaggagagagcaagatatgaagagccaatggttgatacatggacggagatgaaaaagatcatgangaagcggtatgtgccggctagttactc

SEQ ID NO: 88471 - DNA, 442 bp, Glycine max
  unsure (1)..(442): unsure at all n locations
agcttgaatcccagtccaaaattcttctaatttctgatttcaagcttaaataggtggccttgttcgtgctcgtgcgcttagcgcacttatggaccgcttagcgcacattattgaattttggcttagtgcgtgcctttcttgcttagtagatgaactgaagcagtgcgcttagtgggatgaagctgtgcgcttagcatacctgtacaactcatcttcttccagagtcttcctcgtgcttagcccatgagtgttgcgcttagcggacactcactaagccaacagattggcttagcgagaaggtgaaaaacaacatttttcaaagctggcctaattaacctgaaatcgagagaaaatgantattaaatgcacaaaatgggngtactaagtatntattacctatacttaacagaaaatacttataacagtacanaataaccataaa

SEQ ID NO: 88472 - DNA, 431 bp, Glycine max
  unsure (1)..(431): unsure at all n locations
ttctttagatatcctcttaaggaagcttctcctgtttgtgccttanttatgagaagggtatgtgtagctaaactttatcttctcaaggaagttttctcaaagaagcttctcaaggaaggtttctcaagaaagcttctaaaggaagatacctaatgagagtcttgtgagacacaactcaaaggtcaacttctctctcttgttcttccttcaatttcgtgctccccactctctctttttctctctcattcttttccttcattgaagcatcctctccaagcttcttatccaaggctcatcttggtggtgaaactccttcttccatggcttattccctaatggatggcgcctnctctcacctcttttcctttgtcttccgctgcatctccatggtggagaatcatcattaaacgatctcattgaagctcaaagat

SEQ ID NO: 88473 - DNA, 372 bp, Glycine max
gcttcatgatgaatcaagattgatttaatgataaccaagatgatggccaaagctcaaaagtcaagaacacttcatgatagcaaagatgatgatctcaagaatcaaagaatgagttcaagattgaatcaagaacacttcaaggttcaaaaggaaatttgatttcaagaatcaagtttcaagattcaagttccaagaatcaagatcaagattcaagactcaagattcaagaatcaagagaaggctcaatcaagataagtattaaaaaaaaatttcaaaaactgagtagcacatgaatttttctcataaccttctaccaaagagtctttactctctagtaatcaattaccagaattatggtaatcgataccagta

SEQ ID NO: 88474 - DNA, 387 bp, Glycine max
atacatatatagaggcaaccagtcacaaaggtgtatcaacaaagtacttgcagcaataacaataacgttaaacaatagatattaaaaaccaaacaacaaacttcctaattgtaaaacttgtaacgttcacacgagaatttgaccaagtaaaagatagcttcctaacatatgaatggaagtagtgggatgcttttagtttttcacaaaaactaattctaaaagcattgtatctctaaaaaatataattgaacaagaaaatatattttaattctaaattataaaagaatatttttcaacaatctcccactaattgtaaaattatagaaatgaaataatataaaaaagatgtttaatggagcataaggacttaatcatatccattatata

SEQ ID NO: 88475 - DNA, 284 bp, Glycine max
  unsure (1)..(284): unsure at all n locations
gatcttaagcaccgcngctgcagctgaccatcccacccacctggcattttcttcagtgagaacctgtgatgtacctaagcaggcgagctcctggcagtcaacagataaaagggaacaagaccacanagcaaggaggcttgtgtggtggctggccagttgtgaatcttgtgtgatatatgggttatggtctctcgtaatcgattaccaagggtgggtaatcgattacaaggctttgaaatgaagacatgangctaagatagtctctggtatcgattaccaggtgt

SEQ ID NO: 88476 - DNA, 426 bp, Glycine max
  unsure (1)..(426): unsure at all n locations
ctttccgganagttntctggaaaagacttcttgccggaaaagatatttggaattccggaagtactcacaaacttcgtccagaagatcgtcatccggaaacttccggaagaaccttcttccggaactgaactttttttaaaaaaaaaattatttgataatataatttacttttaatggataaactaaattataaaataattaatattattatacataaataatgaaataattagtgaacgtatgtaacgaaataagaattttcattgtataataataagtaaaaataaaataatatttaatgcgtatgtaatgacgattatgcccttgtgtcattttctttaaaataacgcgtaaacgcttctttctactgcgctttcgctttcttcgcttctttatactgactttcgctttcttctgctttgtttc

SEQ ID NO: 88477 - DNA, 380 bp, Glycine max
  unsure (1)..(380): unsure at all n locations
agcntttcaatntggcatctgaagtctaagagtcttgggcagataagtctactaaagctggaagtggggctgaagtagaagatgcagggatgccaactattggtgcaaaggaagagggaacatcagctgctctgagcttggtcttccttacctctggaaaattaactatttggtcattcgtattccaacagttccttatgatataggctaagtcaatgatcggtcttatgttttcgtaggaggtaagagcatcagatccaactcccctcgatctacacaaggctgtgattaaagctgggaagcctaagtgagaagagttagatcgagccatcatggtcatttgtccagagataaaaccaccaatggtcatgtccatcctt

SEQ ID NO: 88478 - DNA, 408 bp, Glycine max
  unsure (1)..(408): unsure at all n locations
cattggagctngtaggcctatgatcttcttcatcaatggattcctttgcttcttggaagatgaatggtagtggaatggacaatgaagagagagaggagatgccacttctaggagaagatgagtctataagaagctcaccaccgtaagaggccatggattatagcctggaggaagaaggagatgaatgaatggagaggaagagaagagcactaaatcttgtgctctataagagctctgatatctcgaagttaattttcaaatgatcaaagttgaaaaatgcacacacatgacctctatttatatcctaagtgtcacacaaaattggagggaaatatgaatttctattcaaatttcacttgaatttganattgaattcgtggagccaaattttggatccaaaatttcact

SEQ ID NO: 88479 - DNA, 482 bp, Glycine max
  unsure (1)..(482): unsure at all n locations
actaccctacaatacaatttcaaagatatggaatattattttaacataacattgaacataatacaacgtctaaatgtaatgaaatggagaaactacgattaaaaaggagtgaggaatgagaaacaaactcaatgtttggaggcacagttagtagtgaatggattcacagagtttatgatcaatttagaggagataatattgagagaagtgaataaaaaaaagtgacaaggagagtgaatttaactaaaatattaaataagaataacactctctaattataattgagttgaccttccaccaaaacggattaattgatgttatttcatatgagttatagatcctttctttctaactagtgcgtggtgaccattactctcaacgaanatatttgtttataataatatctgagatgaatctttatttacaatatgtatgttagaactttatacactgatgatattaggaatgtattntatacacac

SEQ ID NO: 88480 - DNA, 454 bp, Glycine max
  unsure (1)..(454): unsure at all n locations
agcttctatataatctgaactattttatcaattaacacaagttgagttttattcagaanattagagtttatctcttttatcttagtgagagtgattctcctaaattcttgagtgattcaagaacaccctggctgtatcaaaggactttcacaaccttcgtgtgttgccctcgctggaaagagtgattctttccttcctatcatctccacccttgttctttcaaaccacaattccagaaaatccacctctgcccaaaattatctcgtgaccataactcccatttcacacactcaaattaagtgattcttgagcctaaattgaatttcanaacgagacctttcacctcgttttggaatcacctcattaggagccctgtagcttccgttattgccatttctatatntctggccagccaccacttaacctacgtttaccatcccatcatncatttatg

SEQ ID NO: 88481 - DNA, 405 bp, Glycine max
  unsure (1)..(405): unsure at all n locations
catttatcatgaatntaccctanaccaagataacagggtagaggcagaatactctacccaaaacacattcaaataccatagctttccttacccctataccccagtaacattctcttcgttccgattcgttaactgttggatcgacttgaaaattttactggaggttcctagtatataaatctacatttttaccgttgggatctgctagaaaatgtctagaactcaatatgtaccacctttctcataaccagcaatgcaccagcatttttctgcacacatcatatatctgttgcacaattcaacaacattnttctgcataatatggcagatttcgaaatccatcttgcccacatncaanttgtgctaaattggatcctacaagtcctnatcatgtataatcatatt

SEQ ID NO: 88482 - DNA, 319 bp, Glycine max
  unsure (1)..(319): unsure at all n locations
agcttctatgatcagtcaagattataaagtggttccctaaaagatactgcctncattttttaacagcagtggtgatcgcagcgagttcacgaacataagtttaagaagagagtaacctgtggcaaaactgcttgctaanaaaagctatcgggtgtcttccttgggacagcaccacacccatacccgaacccgaggcgtctgtctccaccgcgaaaggttttgtgtgctaagactagagaatgtgtcatagcatgcttcaatttgttgaaggcaacatcagcttccacggtccagtggaactcttccttggtcaacagac

SEQ ID NO: 88483 - DNA, 421 bp, Glycine max
  unsure (1)..(421): unsure at all n locations
atggaggtccaagtactatatgtattctttgactctaagttgataatcaaccaattgaatggagaataccaagtcaaaaaactgatcctgcaaaaatacgtcaacaaaattggggtaattaaagaatattcaaaaggctggaattcatctacattccaagagaggaaaatgaaagaaaaaattcactctcaaaattatccaacataaaggaacatgtaggaatggaaaacatagttcgccaaacaattcacacttcgaggtttgtcatgatgatagaaaatcaagaaatttggatgactccaattctagagtacatacaaatnggcgtcaacctagaagaataaaagataagatagatattgcaaagaagaatcaccaaattttgtataatagatggcaagctctacataagaagattcac

SEQ ID NO: 88484 - DNA, 462 bp, Glycine max
  unsure (1)..(462): unsure at all n locations
catgcaagcttgttgtcngaccctaatttgtccggtttataaattttaggagagttaagtattaagaaaacaaaacaanaaataaagaatgaagataacaatacaaaaaaaagaaatatagaaaagaaatgaaaaaaagtattaagaaatgaataataaggaaaaaaaagataattgatcctaaaaaaagaagaaaagaaaaaaaaatagttaaaaaagaaatgaaatataaaacaaaaaaggatcagtaaaaaaaaagggaaagaaaaagatgaaaaaagaagaaaaaacacacgggaaacattaaaagaaaaaaatgtacactatgtggcctattcggctatccttgagagcccattatgtcaagaggagagcacaatgtataaaagaggaaagtctatgcaattaatgcacagaggggcatggatcttgagatggaaaaacgaaccaattcaacaacat

SEQ ID NO: 88485 - DNA, 312 bp, Glycine max
agagaagttgaactttgagttgtgtctcacaagactctcattcatcaaagttacaacaagtgttacacatgcttctatttatagactatgtagcttccttgagaagctctcttaagaatacttacttgagaagctttcttataaaaacttccttgagaagctactttgagaaagcttccttgagaagctcgagtttatctacacacacccatctaataactaagctcacctccttgagaagcttccttgagaagctagagcttatcttcacaccctataatatctaatctcacctccatgacaaaaaacatg

SEQ ID NO: 88486 - DNA, 421 bp, Glycine max
  unsure (1)..(421): unsure at all n locations
atctctaagtcacctgaggcatgcaagctngcacctcttcactctcttccctattcataccctttatctntnggagccaagttatcccttgtgttctaggtttaaaccatttgtgatagccgcctatgacaccattgcttcttcccctaagttctttatcttttcttcctactttatcccatgccttacggatcctctgaagtatcttcgtattagcttcattgaaacttggcacgatggtctcctctgatggcgcacctttcatagggtatcctaactgtcttatggccaacacaggattataattaatacaacccctcgtccttatcaaagggacattnggaaatccttcacatgagcataacactcttgcccctncttctttacaccatgggaaccaactaatggacgcgtccatcat

SEQ ID NO: 88487 - DNA, 441 bp, Glycine max
  unsure (1)..(441): unsure at all n locations
tcctgttctgtttcaaagtccaaaaaagataattatttgattgaccaaaacattttagtttcatacaatccatatatcattttaaatcctattgtgtctatgtgtcaaaaagtaactcattttccattaaaaatatacaaaaatgtaaataaaataaagaagactaagatgtcagactgtccctacatgatgaccagtccacttatctctttattttagtccatataagtacttattctagaaaaaatcttttgtacacatcttattggattctttcgtgtttctcaaaattccaaccttgcaaaaatataatgtgtagaaccattgttatggttctagtactccacaagtccaatagcactnttatgtcaaaatcctgttcataaatttcaaaactaataaataataaataaatatggtcctcactgaaatttaacatgt

SEQ ID NO: 88488 - DNA, 395 bp, Glycine max
  unsure (1)..(395): unsure at all n locations
ctgcaagctggaatgcatatgggaaccctattagtttctcctatgtctgcccttttatataaaacagtcccaccatcctaattttacaaaatcatattcatatatcattggggcatttcaccgagcacttggtgggcgcacgtctagacataaattacaaaagaatgggggcaatgtggcatgcaccattgcttcagaatacaacataggcctaaggtcttctcacacaaatgcgtatctctacaaatcaagcattaaagccacctcaaaccttgccctcaaatgtgagcacgttctctcatatctgagcaccggaagatgtatattatacaccaatgggaagctgaaaactcaaggattgaatacntacttgtaggagtgagttgaaacaccaa

SEQ ID NO: 88489 - DNA, 404 bp, Glycine max
  unsure (1)..(404): unsure at all n locations
ctaagcttcataagtggtatcatagcacatgagaactacacgcnctcttcttcaaatgactacacgtcctcgccatcagatggctacatgccatcacctttagaggactgcatgtcctccgcatcataggactacatgtcctcactgtcaaagagttgcacgcactcaccttcatatggctacatgtcctaacctccagagggctacacaccctcaccttctcatgactacactgtttcgccatcttgaggctgcacctcctctccatctgatgacaagacgtcctcgccatcgaagctgcacgtcgtcgccatcatatgctgcacacacctttcatcagaagctacacgtgctcgccatctgaaggctacacgccctcgcctgtagaagactacacgtactct

SEQ ID NO: 88490 - DNA, 390 bp, Glycine max
  unsure (1)..(390): unsure at all n locations
caagcttagtagcattcagaatccctacatgtttttttttcttccaactaagcataagtgaatagttacaacaagaatatctaattngattctgttcattgcaaaagatgattccatcaggctattctaatgttcataagacattagatagtaacagaacatcaatttttatttttctatataagttggatagttaaatcttactcatacagtcacttgatttcaaaaacagggtttgntgctacctattggaagcacacagtttagcaacaccgcttggataatggaagcaggtagttatttcaaagcaacaaactaagttagtacctaaagtgcctcacattgggtaagagcagtgaaccaccatacttgtacaatagtctatggcat

SEQ ID NO: 88491 - DNA, 474 bp, Glycine max
  unsure (1)..(474): unsure at all n locations
aagcttttatccagggcaattctggtggtgaagctccttcttacttggcttattccctagtggatggtgcctcccctctgctcttctactttgccttccgctgcatctccatggtataaaatcaccattgaaggacctcattgaagctcaaagatccagcctccatagaagctccacaagcaagcttccatcaggggctgtagtaaaacttccctcgcgggcacccgcattcatagctagcacacactccggccttcatcaagagccactcccagaaaattccagtgctcctccaatgaccatgatgcacaacgatgttctccatcaacttcaatcaagaccacattgccgatatggaatgccaccatgaagaggaacttagaatattgaatgccaaccatgatgagtttgaggctcgtgtgagacgcccncaatgagacgaacactcttgccacacaatcaacaagcacacct

SEQ ID NO: 88492 - DNA, 376 bp, Glycine max
  unsure (1)..(376): unsure at all n locations
atgcacgtcaatgttcaggaggcatctttgagattatctntntttggcatacnagcgcaaaatctcttgaattaagaagatgttgtccatcatctgtctgttcttaatgaagacagattgagtttccccaataatagtctcaagcactggggctatgcggttggccacaattttagatacaatcttgtataacaaattacaacaagatatgagtctaaaatagttaacctgtgaggtctgatcttgcttaagaataaactcaataatagcatgattgagctgctttaaaatttttccagttgtacagaattcattaaccgctgcatagatatcatcaccaatgatattcctagccttcttgaagaataaaacattg

SEQ ID NO: 88493 - DNA, 285 bp, Glycine max
  unsure (1)..(285): unsure at all n locations
ttcatctattcttcatgaccttgtagancaaaatatgtgctttcgctcttgtttattgtttaccatatattgaaatcgatgaccagagatagactacataacagcntgtgtcacaaagaagtcttctcttgtaatttgaattgtaaatgatgcaatcaattaccacttgtcttgcatcgattaccaatgatgaaactgctgaagtatacttgataagtctcgacccttattaaatcaactgtgtgatcgattgacaccgaaagaatttctgatataatatgctga

SEQ ID NO: 88494 - DNA, 399 bp, Glycine max
  unsure (1)..(399): unsure at all n locations
tcgaaatgaatggccagcaccttgaacaggcatctattatccacaggaaaaatagtcataacccagacatattaaataatgacaaggacatgttgatagaacacatgaagctggcacaatgaaagtacatacattggtggcaaacccaggttgagatgatggaccaccaacagatggctggcgtgtgggattctctagagcaggggaagtaaatgtagatccaatattcccaatatgcttgtgggtgccttgttgatgtggtagatgattgccgattggagcaccagaattacctctctcagccccagaaactctacttcctggagatggaacatgatgaactgcaccaactggtccatgaacngtctctctagatggaatggctatggttgaattggg

SEQ ID NO: 88495 - DNA, 396 bp, Glycine max
ttgatcacaaaacaaatactacattaaaatctaattgatcttcttttgttacgagaggggcaagggggtcataaaaattacaagaatttaaaccacaaaagttatgattggctctacgcttactaatggtaggcaagtcctctgaattctcaagaaatatgaaacctccaaggctacagcttgtactcacctataattcatatagatgcacaaggctacaaatcacatcatcaaggataaattactataacaacgttaaagagatcaattacaagtacaaagtgagacataaagtgccaacatgttgttagagcaatatgtataaggtgaaaaaagttttcacttactattatcatttcacacattacatgataaatgactctctcaatgaaagta

SEQ ID NO: 88496 - DNA, 421 bp, Glycine max
  unsure (1)..(421): unsure at all n locations
agcttatcctgtaaccgccagagccttctggttatcggttatagcctattataatcgattagatgggccttgttctatggtaatcgattacagggagtagtaatcgattaccagatcctaaaatatggtatttcaagtgaaataatcacgaaaatcaattatttgtcacccgcaaaactacacatttagtataaataatcaaaatagacaatcgtgaacaatcatcataaacaatcaaaatagacaatcatcataaataatcatgaacaataattagcaaacacaagcacttcactcaacanaaaataatcaatcatgaaagataactatcaaacacaatcatttttcttaatcagagganacantcatcatanaccagcataattaacagccattaaagccaatttatataaacaatcaa

SEQ ID NO: 88497 - DNA, 454 bp, Glycine max
  unsure (1)..(454): unsure at all n locations
cactttaatactcatgcctttaagagagttgatatatggcagcacatatgatatactttctgtccctcatatnataggagctaccaaacagtcccttttattttaatatgcaaccaaatgtttcatatatgccaagtcttgtcaatcatgtgcatatgatttccattgttactccttatcaatatgggacattggagtccatatgttcatgacacctatttgtggagttcccttaagtggctaccataattatttataccatttgtctttattatgcctgagataaattccttgctctcagattaacttacatgtttgcttcatgctttcccttaccacctgtgtttctatattgctatgagacttttaatgaatatatccctctcattgctggcacaatgctcttgtttaatatttataaatatagttattcttgccataagtatggtcaaat

SEQ ID NO: 88498 - DNA, 487 bp, Glycine max
gatccttcagtgacctgggctgcagctgattttaataattaaatttattattaaatattgctaatattcctctaaacaatttactataatgcatataaaaaggaatttattatatcatctatttaaactcctttcgatattgaatatatgcaaagaaaaatattatttatacatattaagaaaattggttacaataatttaattatatcaatttcatttaataacataagccttttgtttcttctaaattatcctttaacttggtattagaataaaataatcatgaaaacaaaacctcaattaaatgaagcatttgtaagaatgatctcattgaataagataaaattattcaaattttcttatatttaagaatgaaagagtactattaataatatgatactcaatttaatccccatataacaacaaaaaatcaattcactcctattaaaaataattactcataaaagggttattctatcaaatgaat

SEQ ID NO: 88499 - DNA, 425 bp, Glycine max
ttctaacttgtatactacattgataaatgtttatagcttatatgttaattctaccaaacatgtctttgattttgtcttaattatttactccaaacaacaactttcttcaccttttaaataatgcaggaagggtaaaagttcggcctgtaagctatgattgacattatgtaatgtacatgatctctgatattcaattatgtatcatgtgtgcctccaaatttcttgacacaaaattgcattttgcataaattatcagtgcatttcttctacttaaccctctgctttctccaattcatataatatatatcttgtattcacaatatgttcttaacctgtgcagatcaatatttttatggtcaaattatatacattgcacgtcatcacttgtgttcgtttatacttatacatatattttaccataactt

SEQ ID NO: 88500 - DNA, 463 bp, Glycine max
  unsure (1)..(463): unsure at all n locations
agcttgcggatttggtcttcgccattgaatgtatctatgtgggtccgaatagaggcaaatttgatcatcctactaggacgactgagaaaactgtggcaaatgaagagggtgagaaagagggagaaacccatgctgtgactgccattcctatacggccaagtttcccaccaaacccaacaatgtcattactcagtcaataacaaacctcctccttacccaccacccagttatccacaaaggccatcccttaatcaaccacaaagcctgtctaccgcacttccaatgacgaagaccgcctttagcacaaaccaaaaaaacaccaacaaaaaggaaatttgcagcaaaaagcctgtagggttcgccccaaattccgttgtcatatgctaaactngatcccatatccactcaataattcaatggtagccataaccccaaccaaggggtcctcaacctcatttttctg

SEQ ID NO: 88501 - DNA, 397 bp, Glycine max
  unsure (1)..(397): unsure at all n locations
gtcgctggagttgacccatcaactgccctaactctttttttctgttgattcctangctcttgaccttaactcgatataacactcttttaatcaaatgtgcttgactctaccccatgttttactaaagtgaaacaaaacccagtgcaaatcaaaactccaacatctatcatgggtgggatgaatgcatgaagaaattcatatgacatagatgcaatttatgaatactggagcccgggaaattgtccccttcttagatacaatgtttgggcagcatggcgcccgacgtatgtatttataaatgcgacatggaccctgcgtcggttaacaaagtgggtgatcagacggaatccgtcatgatgcatatgctattggacaacacgatgatgtcatttttcac

SEQ ID NO: 88502 - DNA, 433 bp, Glycine max
  unsure (1)..(433): unsure at all n locations
agcttataataagttataccttctantttattgtactcagnccaaggaccataatattgggcccaggcacagtatacacaccctattccaccacataaaagggtccaaggaggaaggcctaagaaaattagaaggagatctgtacatgaggacaatgtcacatgacataggctaaagaggaaattggttgactttacatgtggaaggtgtggccaaaccaatcataacattaggagctgtaaaaatattggagttcctgttaggccaaagaaatatgttgcaccaccaacttcaaatgaggatgaccacctattatctcaagatgaacaagccttgaatgatgctgaagaagctgctgctcatgtncaacaagattcggtcgatattaatctatctcaccctcatttgtcacacgatagtgacatggagttga

SEQ ID NO: 88503 - DNA, 214 bp, Glycine max
ctacacagatagattgcattctcgatggcaatgacaaattaatcatgggagagaacatggacagcttggaatattgtagagaaagaatatgctgctctagtcattgacatgttatgaagcttaaaaatgtgccatgacagagtctgtatgatatatatcagttgaatcatgtgagaattgatgacacattagcttgcttcaatggtgtcaccgt

SEQ ID NO: 88504 - DNA, 396 bp, Glycine max
  unsure (1)..(396): unsure at all n locations
agcttcagttgagtctagtccttagcatattgtttgtctctcactatgcacagccaaagccaatttcttttgttcatcatcaatatcatgtcaagccaccttagntgctggtaaataaccttcgaactttgtcaaatagtgtaactccttctactctttgtagatccttttcctctcaaggtgtctgaggtctcctgataaatactcatgaattgcattgttgacatcaatagaactacaacctggttcctttatgattcctcccttctcatttttttataactttcgagatacctctatttcccataaacattaaaattttaccgttgttaaagaacaaaatctttctatatagttacctaaatgttgcaccttctccccccttatttttttggt

SEQ ID NO: 88505 - DNA, 385 bp, Glycine max
tctaatcttatcaacccatcgaatgcttacatgtttatctttctttctatcacaaacaagtattcctaactattagtagtgtacatgaaattaataagggctgggatgcctcccattaatcgctcgtgtaacttcattatcttgactcatctttcttaatgtgtcgtgaatatacatgagagtggtcatcactctcaatattaccctacatgatactgctttaatctcttacaattactatccatgttctgtccacaagtcttgattgaggatcaaataattccacagcccctttaggattgacatctttgatgattaaaggtacataccatttggacttcagcttgcctggaaataatttcatacttgtatcgaatatcaactc

SEQ ID NO: 88506 - DNA, 349 bp, Glycine max
  unsure (1)..(349): unsure at all n locations
ctctaaatntacattgatgttngtatttatgggatgaggttacatgccatttntgctttaagagtaatgccccactaaagctaactttccaaatgtttgccttcgcaggaatggcaccgaggaagcttgcctcaaagaggtccaggaaagacaaggcggccgaaggaactagttccgccccggagtacgacagtcaccgctttaggagcgttgtacaccagcagtgtttcgaagccatcaagggatggtcgtttctccgagagcgacgcgtccagctcagggaggacgagtatactgatttccaggaggaaatagggcgccggcggtgggcaccactggttactcccat

SEQ ID NO: 88507 - DNA, 432 bp, Glycine max
  unsure (1)..(432): unsure at all n locations
taagcttttagtctagatgatgcagctgagttggtagctacctcatgcactcctctaatgactacgacatcatttctggcgctaaacagctgagagttggaagccatcttctcaattaaatttctggcttcagcatgagtcatgtctccaagggctccaccactggcagcatctatcatacttctctccatattactgagtccttcataaaaatattggagaagaagctgctctgaaatctgatggtggnggcaactggcacatagtttcttaaatctctgccaatactcatacaggctctctccactgagttgtctaatacctgagatatccttcctgatggttgtggtcctggaagtanggaaatatttttctaataacactctcttaatgtcatcccagctcgtgatggaccttggagcatggtaatac

SEQ ID NO: 88508 - DNA, 472 bp, Glycine max
  unsure (1)..(472): unsure at all n locations
agcttatcgtgtggacgaaagtgggtgattttatttgtttatatacaagtatgaatattaatttacttctatgagattngcaagatcttacatctataggaattntgatcatttgtctattcaataggttcattaccattaagtactacaaaatcctccaaccctaggttgagagtccttngaacaccctcaacttatgtgtctacccatatgaaaccatgtaccaaacaattttgataccaaaagttccctctatgttataaattcaccatttttcttaaattgaaacgatttcgtcaatcatttatgatataaaataagttatgatactttgtaaatcggtgtaaataggtacattggaattattattggatgaagataaaaaaaaacattttttagtattnatataaatctcatgcatttanatcaaaccagtagtaaaaaaaattaaagaaatcgcaatattacaaac

SEQ ID NO: 88509 - DNA, 447 bp, Glycine max
  unsure (1)..(447): unsure at all n locations
ctcatagatcatcttcttctgtgtanggtgttcacagtacggattggtgcggcttttggagtaaaattagtccaaaacaaacaataaaatcatgtggggtgcatctgctntgatttacattatntatganattcanatcatactatacctatcttttactacttagttctgtttcgattattgcgatctgaaaattctgctcatgagtattaaaaaaatgacctaanaagaaaacactatgtgtgcatgtataagccacacatgctaatgtgggttccaaaagatatgtcaaaatgatagcactaagcttcaagcatgatcaaacatctgaaataacttcctcagtgtaatcaacttcctaagtaatgaaataattgtcctaataattacaatgacaattctaatggtgagatacaactcacaattgacttaaataataaatgaatc

SEQ ID NO: 88510 - DNA, 58 bp, Glycine max
ttcgtataaatataactgctccaatgtctacgtactcagtcatgtctaagaataatct

SEQ ID NO: 88511 - DNA, 425 bp, Glycine max
  unsure (1)..(425): unsure at all n locations
agcttatatgcgctagctaatttaatntacagtatttaatttgactaatatttaaaaaatataaatgtcaaatgatgaanaattatatatttattatttctaatatttaaattttatgtctaataaatttcatcttaaaaagtaggtaaaattttaatctctttttgttggggtttcaatgctatacaatggattatgcataattntgatatctttatcatcaactttgatttagaaaccaaatattttaaccataaatccaaataaacaatgcaataattcattaaaataaatagtttgacattaaataaattaataaaaaagtagaatttcaagttgcataattacaaactaaattagatacaagagttttntagatgacanaaaaaatataagaaggttcttaaatgaatacagtgaaaatg

SEQ ID NO: 88512 - DNA, 464 bp, Glycine max
  unsure (1)..(464): unsure at all n locations
gggcacggagcaattatgctacgtgttgnttccttgacattaccatgcatatttttgtaatgtcatgttggtgtgtgtctttcttgtacttgctatgtctttatgtcttttcggcattatttgattgcgttaccatgcttgtccgtctagcatgtttcttttcatgctatcaaccatgtgctctcacgcatgtatacccgaattgtgtcgtcactcatacattgcatttgtcccgtcatnttgtcatangatttcggaaggtccgcattaccttcttaagtgaatgcatatgggcactatggtaatgactgcaaatgaaccttgatgcccaaatgcttgtgagtgagaagagatgatcttcacggctctggtgtctgtaaaatgcatttgtgtcatgtatagcataaacattccctcatgcatctcatcatatttctncatgatagagtgtcgaagtattgatc

SEQ ID NO: 88513 - DNA, 171 bp, Glycine max
  unsure (1)..(171): unsure at all n locations
agctngcctgcctgaacttgttacaaacaaattgatagtctagtgagatttgtttcatccgcgagtgtagtacagggttggagcaacattatattgctccaccaccttttcacaggattctaagtgggtgccgcacgcgtatattcactattttagattagtttgtgcaac

SEQ ID NO: 88514 - DNA, 466 bp, Glycine max
  unsure (1)..(466): unsure at all n locations
agcttagaaatcaagtgattaagtgttatctattccaaacatagggggagtatgaaatgagtgaacgcaatatatcttgcatatacattgcttgtatcttgatttcaggaattaaattgtcatcatcaaaaaggggaagattgtacaagcaaagactttgccgttgatgttttgatgatgccatatgatcatgatgatttgatgccttatgaaaatgtgcttctcaagtttaattcaagacagaaattcaagaatacaagatacaacatcaagaagatctctagtgnttttaggaagggaattccaaattgaaactgcaaaaggtttggccaagaaatttaagcaaaaatgtttttcaagagattactctctggtatcgataccagagatgaatcgataccagtggcaaatgaatataacactataaaattgaatcaaatntacacatgtatcgatacacgtgatg

SEQ ID NO: 88515 - DNA, 443 bp, Glycine max
cttccttgagaagctagagcttagcttctctctcacctctgataactaagctcacctgcttgagaagcttccttaagaagattcctaaagaagctagagcttatctacacatacctttctaatagctaagctcacctccttgagatgagaagctagaacttagctacacaccccctattatagcttagctcacccccatgacaaaaaatatgaaaatacaaaaaaaaaatgtgcttcttacaaagactactcaaaatgccccgaaatacagggctaaaaccctatactactagaatggccaaaatacaaggcccaaacgaaggaagaacctattctaatatttacaaagataagcgggcttatacttagcccatgggctcgaaatctaccctaaggctcatgagaacactatggccttcccttggatctctatcccaatctac

SEQ ID NO: 88516 - DNA, 410 bp, Glycine max
  unsure (1)..(410): unsure at all n locations
agctttgcggattggttttcaccgtgtaaattatcaaagtgggtctaanaaagggcaaatctgatcatcatgatttcatgaaaaaaaactggggcaagtaaaaagggtgagaatgagggagaaacccacgccgtgactgccattgctatacaaccaagtttcccaccaacccaacaatgttgttactcaaccaataacaaaccttctccttccccaccacccagttatccacaaaggccatccctaaatcaatcacaaagcctgtctaccacacaaccaatgctaaacaccacctttagcacgaaccaaaacaccaaccaataaggaattttgcagcanaaagcctatatgattcaccccanattccggtgtcatatgctaaacttgctctcatatctactcgataattc

SEQ ID NO: 88517 - DNA, 427 bp, Glycine max
ctcagctttaagaataagaattaagggtcaatctcaagatgttgtctaaattcatgaggaaattggaaccttaataactacattagccaaatttgtcactaggacaaaatatcttgacaaactattatgatactgcaaaagtctataacgacccgtcttgtcgctacgatatcactaactataaaatgtgacatttcaatttaagtgaaaactccattgatttgattatgaaaatgatggtaaacttttcgcgatatacattcatcaaacaacacacaaacacgtgaattaatacacacacatgcacacacacacacacatatgtgtatatatatatatatatatatatatattagaccactatacatcattcaaatgtcagaacataattcagtttttacatatatctaaactcgggacttacatg

SEQ ID NO: 88518 - DNA, 387 bp, Glycine max
  unsure (1)..(387): unsure at all n locations
ggatcttaagcaccgcggctgcagcttgattttatctcanaaaataagagttttttatcacaacaggtgcaatnntttttgttaattatttgggtgttcctgatccttcttctaccttgatggcgctttctttgttttccctccccgtgttttgcgttttcttccattttgatttgttggggctgttttaaattattgcttaatactntatttcatgttctttgttctatgttttcttccatttctcctttgcatgttgattgttatgtccccttatccccttatttgatgtatacagggttcaattttttgatcaggaacatactaaagctttgatttttatctcanaaaaagcagagattttatcacaacaggtgccgatttttt

SEQ ID NO: 88519 - DNA, 441 bp, Glycine max
  unsure (1)..(441): unsure at all n locations
gataaaaagataagagactaaaaatataatatacctacaaattttacatataattatcaagttaaattagtatttcacataagtcatgttactaccaacttaaataccttatcatcatttaacactaattctatgtaaggactataaatgttaactaagaacatataaaaaataagacttaggttgagagattaaaaataaaatcttaaattaaagaactgaaatcattttttatctggaaaaaaattgtgtgggggaaaatctaattttgccggtcaaaataggcaaaaaccataatcccaccacattgttgtcccttatgtgtcttaaatatttntatggctccggagtcaaatgttcctggagcaagtatgaagaagatagcgagtgacgatggaaacgttataccatatatggtttggtggtctagctccttctata

SEQ ID NO: 88520 - DNA, 269 bp, Glycine max
  unsure (1)..(269): unsure at all n locations
tcgacgcatgcaagcttaaagatggaatacttacttgttggtgattaataaaagcgcataacggaatcgaagaatgcgaaaagtagagatcctaggggtgcaaactcgtaaattccgtgggtatggctcttgaaaggggggaaaagaagtttttgaatgcaaaaacgtccnccctttcgtcacttntatattttggtgcaggggttgctcgtccactcgagctaacctgcactttttttatttttggaggagaatatcaactcattccc

SEQ ID NO: 88521 - DNA, 457 bp, Glycine max
ctgcagactcagatgccaatgtacatagtgctgctcatctcttatatcaacttgttaaggtataatataataaatttctactgaactccaacaatcctttgagcagatttacatgtgtgcacaactgtacatatcaaatgttttttgaataggtattgatctaatagtgatttgaattactgttccttttgattaactaatgattaaatgttaatttattcaaacagaatattgtgactgaaagtgatcagttcaggtgccccttcttctttcttctatgctatatgtttctctgtatgactgtatcctgttgtgttttaaatttaaaagacttgtcaatacagagatctcagactgatttgtaatgcttcatgcctccattttactctcttgattgtcagtattgaagaatttataccattgttgatggaccgcatgaatgtattgaatccatatg

SEQ ID NO: 88522 - DNA, 389 bp, Glycine max
  unsure (1)..(389): unsure at all n locations
tcaatattattcatcatggaatgctctttgaatttattggctacatattctacatgttatgcatcttaagagagtacgcaagtgtgtctattctcattcctatttgaaaaccacaacaacaatagccttatctcgttagggaggttggctatatggattacaacaatagcctgagcgcatcacttgaccaaacaccacccctttttgatactactgaaccttagntgtcttcttcttcttatccttctctatctctcctaagaccatactctccttctctctttatatatcactttggaacttggaagctntttttggtttatacccacaggaacgtggaacttataactaaaagggttttgggtcaaggatggaagctctatattgag

SEQ ID NO: 88523 - DNA, 481 bp, Glycine max
  unsure (1)..(481): unsure at all n locations
tgcgcatatttccttacgaacgttcgcttgcacaagacattcttttaactaagaaaaatgcacccatatacaatcaaggcagcttcgttacctagattatttacatgtacttccaaggtgtatttgttacttacatcacacacatctccttggctaaatttacatacatgcatactcaaagcattgtggggtaccaaaaattgcacatgtgcacatcttggtatttctaatacctatacatacacaaacttcatgatgaatattgactatctacacaataaagtgctacatttcatgctctttntcaagtttttgctacctatagccgcacacaaattcaagtatattntcctttgctgactaanatngtattaaaagggatatatntcttttgcaatgattttctttacataacatgcaacatatgtatatatatgtnttngtgatacatttngactaccaaaaattatatgtacataca

SEQ ID NO: 88524 - DNA, 400 bp, Glycine max
  unsure (1)..(400): unsure at all n locations
agctngagatgatgaagtgtataagggtgaatctttctgcttttattcgttgaccacagagtggtacctggagatatgtcgcgggggtcaggagaccttggggacatcaggtggggtgctattgcccaaaaccaagcttgaccaatcccgacccaacctggacatagtcagtcagtgagaacctgttatgtacctaagcaagcgagctcctaacagtcaacagataaaaggaacaaagaccacaaagcaaggaggcttgtgtggtggctggccagttgtgaatcttgtgtgatatatgggttatggcctctggtaatcgattaccaagggtgggtaatcgattacaaggcttaanaatgaagacaggagactaagatggtctcttgtaatcgattaccac

SEQ ID NO: 88525 - DNA, 408 bp, Glycine max
  unsure (1)..(408): unsure at all n locations
acttgtgtaatcgattacactgattgggtaatctttttccaatgtatgtttctgaataaatcanaagatgtaactcttcaaatggttgtttgactttatcaaattggttctaagtttttctaatagttataactcttctaaatggtcctcttggacagacatgaagagtctataaaagcaaggctttgatttgctgttcaatatacttttcaatcaatcttatacaatcctttacaagccttgaatctctttgaacttcttcttcttctttgtgccacaagctatacaaagttntctggttctctaaaccttgaaaacttgtgctattcattcttttcatctcttctacctttgccaaatagaattcaccaaggactaaccgcctgaattctttttgtgtctctcttc

SEQ ID NO: 88526 - DNA, 323 bp, Glycine max
  unsure (1)..(323): unsure at all n locations
agctngtatcgctactggcattagcgggacgtttgcggtatcgccatgggcatcagagatacactggtatcgccattggtagcagcggaacaaaagctgagtcacgaagcatgtgtcgctattcaaactggcgagacatgctgactaagcatgtcgccattaggactggcgggacatgccaacgtgggcagtcccaccattggtgcctgcggaacacataagggtggcacgtttgcatgtataggtttgcatcgtttcagtctgaaaagatgggtaggcttgcagtangggttgcaatgcgcaggaatcactctgaaaaagat

SEQ ID NO: 88527 - DNA, 433 bp, Glycine max
ctcagcttttggagctggatcttgagctcaatgagtccttcatggtgattccaaccatgaattgcagtggaagataaggagaagatgtgagaagcggcgcaatcgactatggaataagccatggaaggaagagctgtaccaccaagagagtgtcttggataaaaagcttatagaggaagcttcaatggacgaagagaatgagagagtgagatggggggggggggcactaaattgacagataataagaaggataaacttgtacttgtagtgcgctaacaagttcacatcatcaaattatgacagtgttcacatgctctttttataccatgtactactaattgaagctccttggagcttaattagctacaccaccctctttattaactcacctcttgagaactgagctaattcacacccctctattctaactcac

SEQ ID NO: 88528 - DNA, 396 bp, Glycine max
  unsure (1)..(396): unsure at all n locations
atcctctgagtcacctgccgcatgcaagcttgnatagcttctggcctgagaatcaattttgcttaaagccaacttggagcaattggccagtctgaacaatggatcagatgtgctgctgatttcttgaactgtggaccattcaaagaaattgtctttggggtggtgaccaagaagagaagaacatagcttgggtgaagcggagtcaagtgtgtgctgctagagaaaggggaggattgggagttaaacaccttaaagctttcaataaagctctcctaatcaaatggaaatggatgatgtttcagcacccagatcaattgtggaataaaatgttaatctcaaagtacaggggatggagaggcctacatgaggggttcacaatgcaacattgctcatatt

SEQ ID NO: 88529 - DNA, 469 bp, Glycine max
  unsure (1)..(469): unsure at all n locations
gcttctctagagggtggatctttgagcttcaatgttgtccttcaatgatgattntccaacatagagatacaacttgaagataaaggagaagaggtgagagaatgcaccatctactatggaataagccatggaaggagaagcttcaccaccaagagagtatcttggataagaagcttatagaggaagattcaatggaggaagagaatgatggagagagagaaagtagcgtataaagttgaaggaagaaagagagagaagttgaactttgaagtgtgcctcacaagattctcattcatcatagttgtgacaagtgttacacatgtttctatttatagtctatgtcactaactaaatgaaattcattntcatttcatcttaatctaagaggaatatttctaggatatgccacacgcatcttacaatattctaataatatgtcagacgtatcttaaaatattctaagaatatg

SEQ ID NO: 88530 - DNA, 426 bp, Glycine max
  unsure (1)..(426): unsure at all n locations
atctcagagtcacctgcggcatgcaagcttgtcacgtaaacgtctgggcgttcctcctctagcttatttcctagncggaaaccgggaggacatggccataccaaatccgatctcctcggggagtcatcctcacatatcgcggcgacttggccttcacgtcttaaacccgcacttataaagcttctactgatgtggcagggtggggcctctttggcttgcttgctcaaccgcgggccttggccttngttcttcctttccgagatattnttccttatgtcagcttgcgtaggtttatagcctaacccaaacttcccgcggtttcctttggagcttaccangctggttctgccgccattgttcttgcccaaacccattccgggctcgtagccataccccaacatcacccgggccaccattattaccgaa

SEQ ID NO: 88531 - DNA, 432 bp, Glycine max
  unsure (1)..(432): unsure at all n locations
gctttactatgtaaagaatagccaagaaatataccttcatatgattttgtatcatacttgcaccaagtgtctttcccattatttatcacaaagcattgacatccaaaaatatgaagatgggaaatatttggctttctccctttgtatagttcatatggaattttctttaaaataggtctaattaatgctctattcattatataacatgcaggattaacagcctcagcccaaaaatatttaggaagaattgtatcattaaacatggttctggctaattcttctaatgatatgttttttctctcaactactacatcttgctgaggggttctaggtgcagacaaattatgttctataccatcttcatcacanaatatttgaagatcttgattatcatattccactgcatgatcacttctaatggatgcaatgttg

SEQ ID NO: 88532 - DNA, 487 bp, Glycine max
  unsure (1)..(487): unsure at all n locations
atcctcttagtcacctgcggcatgcaagcttgcccagagaaggagtccacggaggaaatgcttactccctcanaagactggaaagcggnttctaatgactcctctgcggcttccacataaggcatagaggatgggcagctcaccaagatgtcttcctcgcctgatacgatgaccagatgcccttccactacgaatntcaacttttggtggagtgttgagggaacaactcctactgagtggatccacgggcgccccaacagacagctgtagggggggttaatatccattatttggaagggaacttgacaggtgtgagggcctatctgtactgggagatcgatctctcccctaacctcttggcgggtgccgtcgaaggcacgaaccaccattgaacttggctnttagtgggaggcattggaaccattatcgatgagcactttggctacgaatatggtcatacacttgactgatacgtgcaaagccttat

SEQ ID NO: 88533 - DNA, 345 bp, Glycine max
ttaccctcggaagcaaaaatgaatagaatggaaatttccaatcatagataagaaaaggaaaatttccaatgaatgagaaaatagataagaaaggaaattcccaatcaaagagtgggagaaacacaaaagaatagaaagaatattcccaaccaaagaatgggagatagtaataaaggaaggatgctcctgttcaaagaaaccataagatatgtgcatagagtgtcttttaccatacaatatctgaacagttcataattgtcaccacatgatcaataaggaaggataggaaaccacgacctattattggtttcttcctttaattacaaccaatatcccgtgcgctat

SEQ ID NO: 88534 - DNA, 436 bp, Glycine max
  unsure (1)..(436): unsure at all n locations
atctctgagtcacctgcggcatgcaagcttctgataatgaccacactaggtgtgcatcatccttgttccctaccacatcactaaccatagaatagaatataataataataatagtatcattaatcgttaattttccaccatgcatcataacacacgaatgatcacaatcaattaaacccaccacactgggacgatgatgatgagaaatacgaaaccccatcagatgtagaagccgttccattcgaatcagacaacatttgctgctgaggaacaaagccaccaccataccctgaagaataattcaccatcacctcatcatgatgatcatgtccactatgttgtggcttatttctccgtttcttcttctcataagctatgcctctcgccttggcctgcgcgtccctcacttncctgaggtacagcctcactgcgcgtg

SEQ ID NO: 88535 - DNA, 488 bp, Glycine max
  unsure (1)..(488): unsure at all n locations
gccgcgtttctatccgtcttttgttcgacttcttctgtcaccaaacaacactcgcatgagttagctccattgttccgcttctttttcttctttttttattattatttttagttgagttcacactataactgttgtatagtattagttttggttcaccaactattatacatcagnattttttataaaaattaaataataataaaatcaataaaataaaatatgaaaccatccatcaccaagtaccaacaagcaactcatctaccacgtcacaatacttatactataacctttggcttttcctagttactcattcatgttcctatctgtgctttcactgtatatataagggtaattattaattcgatttccaaaatatattataatattcaattattgtaaaatgtataatatagtcatttctattgtaataagtcttctatttaattaagttgacaccattaaaataacaaattttagcgatgtctatt

SEQ ID NO: 88536 - DNA, 431 bp, Glycine max
  unsure (1)..(431): unsure at all n locations
atatgagtntatgctaaattatgtaagtgtnttcagaatcttaccatntattgtatgcacatgacagattgtgtggatattttgggttgttccttactttgctggatggatctattggctattgctaattgtgtgtatgctntggttttggctgcattatcttttcctggctcatactatgttctcatctcctttaaatcctcataattttctcttgcagtagaatcttatcttttagggaaaatattatgttggaaacctacaatgtaggctaaaatgtaaatcttatctctttatcatgagtttactcctctaattttaaattgagacattccgttcactttaaacaatctgcgattttattcacgtaccaatatctaaagtaactatgacattttgtgacacatgtcgacatttttgcattattagtc

SEQ ID NO: 88537 - DNA, 318 bp, Glycine max
  unsure (1)..(318): unsure at all n locations
tactgatgtacttgcactttgtggatctaaacatgttattaatgtggtctccttattactggaattattcgtgattggcataaacatagactttattcgaagagatctagtggaatgacgctgctacaaagtgggatgacatgtcgtatcacaatctcacggattacagagtccaatatagttttcatattgtttaaaatgatgtgtaatggaatgacactgcatgtttatagaataggggtctgttattcagactcgcccttagatattgatgacttggntgctaacagcttacaccagtttcacctattcatcaat

SEQ ID NO: 88538 - DNA, 364 bp, Glycine max
  unsure (1)..(364): unsure at all n locations
caaaacaagcgctgcccaacagtgagaaattaaactggttnttttaccattcttcttttttctttactctcttagtaatgtggctcaacaattgtcttgctcttgattaggagttacaattatactcaaaatatcatgtttttcattaaatagaggcatttaaaaataacagcatatgtgaaaaacaacataactaccccgcctggttgatagaaaaagaagataagagcatacgaatataaacttgaaacaaagagaatgttatataaaagagagctctaggcatggttgttntggatgatacaaaaactctgttatgatatatataatgttggatgcaagttgtctataaaagacattggat

SEQ ID NO: 88539 - DNA, 445 bp, Glycine max
ggcatgcataccctggtgaggatgtgccatatgcttttatgactggactgatgcatttgcttccaaagtttcatggccttgcatgtgaagacccgcacaaacatttgacagaattcacattgtctgctccagcatgaaacccccagatgtccaagaggatcacatatttctgaacgctcttcctcattcattatagggagaggacaatgactggctgtattaccttgctcctaggtccatcacgagcagggatgaccttatgagagtattcttataaaaaattatacctgcttccatgaccacaaccatcaggaatgatatctcatgtattatacaactcagtggagtgatgcctgtatgagtactgcgagagatctacacactatgtgcatttgccgccccatcgatgcatatcaattcttctcatattttatgaggactcata

SEQ ID NO: 88540 - DNA, 427 bp, Glycine max
  unsure (1)..(427): unsure at all n locations
caatattatcataacttgaggtgtttatgacaattttacaagatgatgtttcaaagtcagcttacaggatgataaaaagaaaagagagagaatgctatctgatttttggggtgctaaacgacattggtgtttttttttcaagagactccatcgttataaaggtccaaacttgngattaaatttgctgagacatctaatgtatacatttgctgtagatgagttctgttatgaatagttatcttctatattggtatgtataagaactaaatcgtttccatattattaagaaccgaatgaaaataaatgtatgaaggcagaagaaggtttaagtnttctttcctgtcagaaatctcaaaatttgtatgtatacctaattaaaaagaacctaatcaacacctaaacttaaagttgatcacacgtgtgtatt

SEQ ID NO: 88541 - DNA, 440 bp, Glycine max
  unsure (1)..(440): unsure at all n locations
ctgctgttaattacacgtaagactcacatatatganaattctccacttatgaatacganagtcactgcaatgacatcaaattgtttctcactgtatctgctgcataataatcacaggaagatcagctaagttgcagttatatttgtttattgaatgggtttcctcaaactttcccttgaacaggcctgcgacatttggagaaccttcaactttaacgttgatgcaatcatcatttaccaccagcttattccataactgacgcttgccatcatttttctcataataatcagatgttttggtttggctaccacgaagaatatattgaggaacctccatgtttagtgtccatgaccaagcccgagaatgccatgtgggattagaaattaactgtagatatgggaccttgcatacctgcaggtatcagaaacttaacaaaatgt

SEQ ID NO: 88542 - DNA, 274 bp, Glycine max
ccctttaatataattgcggctcgacaaaaatatgagactaatacatgacaataggatccacaatcattgtcggcgattcataggcacgttaccaatctttcttgtgctgaagatcgaacaactatacagcgtttctttattactttaattgctacatttgatcctatccattttccatgcgtcacattcccaatagtaccataacccagctttctgaactcatcaagaccttcttttttataatctgccatttgccgtattatatatgtataaa

SEQ ID NO: 88543 - DNA, 367 bp, Glycine max
agcttaaagtatgcccgagtcattcatccctattagatgttgttgaagtattggcaatcagaattgccattcccgggattatagggttgaaccaagctcatgcttttacaaaaaggttcatcaagtcaagttgaaatatggaagtaaccgtcttgcaaaattgtggcataagatgaatcgagtcacatcactgcttcgtctactgccaaacatatttaagattattgatgtccttgttacttccagtttcaccttgacaaagatgtcatggaccatgttgaaaatctaaattgattcaaccccatatcttgcgtaaaaattcgcaatacttcaactgtacatcatttgcatgcattccatgctttca

SEQ ID NO: 88544 - DNA, 367 bp, Glycine max
  unsure (1)..(367): unsure at all n locations
tcgattacacaagtcttgtgatcgatgtccagatgggtattttataatataatttccaagagtcacatctattcatatgttttatgaatggccatcataagtgacttggatacacgaatttatagagagttttcattgcccaaacagttgtatgctctcaaaagattaagagtttttctgaactgaaatgtcttatcctctcaataagattncttggtcaaccacttgcatattcaataagggaatttgattgatcttcattgtacaatctatctcttctaagagagattaattcttctcttcttcttatttctgaaaaaagatataatacaccgtgggtctcttgtcgtagagaattcttgaacac

SEQ ID NO: 88545 - DNA, 470 bp, Glycine max
  unsure (1)..(470): unsure at all n locations
agcctttatacatagaggaagttagttacatgtttaactaactaccaacaaccataaccaactaccaactactttctaaccatagttgactctttaatgattgtcttctaacatggctaatactttattttcatcggtcaaacattacaaaaactagtttatgtaatataattatgttgtaatgcattctaaaaactattttttgtaatgtattcaaacataactttattatgaaaaatatttttagtagtgttgaagcattgcccatgctttttataaatacaatatgaaatttttttttcaaaaaggctagaatgttcttctttctcataaatataaaaatgtttagaatttgtttctgtaaaatttttaatatcgttttcgtcctcaatcaaaataaatgtgtcacatttttgcttagacgtagattcggataactttanatttataatgaatagtggttactattg

SEQ ID NO: 88546 - DNA, 410 bp, Glycine max
gaacctttcaaggatgcaattctcggctaagatcaagacattaccctacaagatgtccatacctcaataagaaccaaggagatgcaaatacagcaagactcccaatctgatgataatggtgaaagcctgaatatttcatggggaaggagtgaaaagaagggaacaagatgaaagaagtccacatcaacgtcaagggattcaaagaatggccagataacaaagttcaaatgctttaatcgtcacaaaactggtcatttcaagaaagactgcctacacaagatcaacaaaggatctttggactcgctgacattgtgaagactttgaatgtatgagaatgcacgtgttttataacctgctataccataacacaacagaatggatatggattctgatgctctatacacaactca

SEQ ID NO: 88547 - DNA, 477 bp, Glycine max
  unsure (1)..(477): unsure at all n locations
agcttcaagaataatggcctcatcaaacttcttattcccagaaggaaattcaataaataggcctcctttntttaatggagagggttaccactactggaaaacccgaatgcaaattttcattcaggcaataggcttaaacatttgggaagccatagaagttggaccttatgtatccaccatggtggttggaaatacaacaatagagaaacctagagaagagtggtctgaagaagaaagaagattagtgcagtacaatttataggctaaaaatatcattgcttctgccctaggaatggatgaatattntagggtgtcaaattgtaagagtgctaaggatatgtgggacactctacaagttacacatgaaggaacaactgatgtcaaaagatctangataaatactctaactcatgagtatgaatttattangatgaaaaacaatgaaagtatacaagatatgcagaaaaaattacacat

SEQ ID NO: 88548 - DNA, 444 bp, Glycine max
  unsure (1)..(444): unsure at all n locations
tcttaagggaagtttctcaagaaagcttctcatggaagctacctagtctataaatagaagcatgtgtaacacttgttgtaactttgatgaatgaaagtcttatgagatacacttcaaagttccacttctgtccctcttttattccttcaatttcgtgctccccccttctctctttcttttcctccattaaagcatcctcttcaagcttcttatccaaggaaattcttggtggtgaagctccttcttccttggcttattccctagtggatggtgtctcccctctccacttctcctttaccttccgctgcatctccatggtgtaaaatcaccattgaaggacctcattgaagctcatagatccagcctccatagaagctccacaagcaagacttcatcattaaggtttcattattntttgggccttgtatttagggggtcatatat

SEQ ID NO: 88549 - DNA, 430 bp, Glycine max
  unsure (1)..(430): unsure at all n locations
agcttgtgcgaaattttttttaaatgggantatgtctccttgtatttggagctctcccaaagaanaaacaaagcanaaaggaggaanaaaaatgcttgcaaataattttcaagatagatttctcacataacaaagtttctccaaaaaatcccttctttcctcaaaatcatttttttggggaaaacaattaaaatggaggatcatttcagccatggttaatgtaaaggaaaatatcacaagaagggggattgatttgttattttttactaaatttaaaaccttcttcgaatacaacaaagttatcgtctaatgaagtaaaatatatgaaaccatatatatgatttttgcagaccaatagacgatactttcaatctttgtaaacaaacaagttttcaaagaaatatcaaattaaacctaggcattcaataca

SEQ ID NO: 88550 - DNA, 383 bp, Glycine max
  unsure (1)..(383): unsure at all n locations
tagatgaagatgaatcacgggccacctcatgtgactcctcgaaggacaataacatcatttcttacactgaattgttgggagttggaagccatcttctcaatcaaattcctagcctcagcaggagtcatatcaccaagggctccaccactggcagcatcaatcatactcctctccatgttgctaagtccctcataaaaatattgaaggaggagttgctcataaatctggtggtgagggcagcttgcacacaatttcttgaatctttcccaatactcgtacaagctctctccactaagttgcctgatgcctaanatgtcttttctgatggcagtggtcctagatgtanggaagaatttctccaagaacacccttctaaggtcatc

SEQ ID NO: 88551 - DNA, 223 bp, Glycine max
attcagccgatgttattttatatgctggaaaacatctcggtgcagctcttttagtaacttattgtttgtgcatacaggataatgcatataggacctcatccttttggagccttgatcaatcccttacgggcgctagatacatccaggtggccttctccagcataaaatgagtcccttgattacagaaatcagaagctctctgatctagttgtgaaatgcctta

SEQ ID NO: 88552 - DNA, 364 bp, Glycine max
  unsure (1)..(364): unsure at all n locations
agcttggatntccttttagtagggaatctattcttcctattatggagccaaacccagtcacccttattaagaactagctcttttcttcctctattgcctttagttgaatacacctttgtttggttctctctttggttcttaaccctctcatgcaacttctttacaaattctgacctagattccccttctttatgtataaaagaagtttccagtgggaggggaatgaggtctaacggtgttaggggattgaacctatagacaacctcaaaaggggactgcttggtggttggtagatttctgagcccatgggccaaggttgggtccaattatctntgtacatattagactaagatgtcattatatt

SEQ ID NO: 88553 - DNA, 390 bp, Glycine max
tattctcgaggaagctacctagtctataaatagaagcatgtgtaacacttggtgtaactttgatgaatgagagtcttgtgagacacacttcaaagttccacttctctccctcttttattccttcaatttcgtgctcccccctctctctttctctccctctttcttttcctccattgaagcatccttccaagcttcttatccaaagctcatcttggtggtgaagctccttcttccatggcttattccctagtggatggcacctgctctcacctcttctcctttgtcttccgctgcatctccatggtggaaaatcaccattaaaggacctcattgaagctcatagatccagcctccatagaagccccacaagcaagcttccatcatcttatg

SEQ ID NO: 88554 - DNA, 422 bp, Glycine max
  unsure (1)..(422): unsure at all n locations
gcggctgcagcttcttatntattatatataagagaatttatatttttattggagtcctgcgaagagaaagatcattgtccacaggggtagcatctgttgctggagaaatgataattaggactcaccacgttcactagagcagacttggctttaactttttcagacaagctcagattaattccatttttcattatcaaattgatatgaagcacatgatcaaatctttcacagtttttattatagtacagagattatctttacatgaatggatgtgctttttaatataaccaatgatttttattagatatatgtctcaaagtgttaattataaagatcaactcgtcattacttattagaagaatctgatgacanaattgtgagacacttatctgactttttgtcggttcttaacccacatcgac

SEQ ID NO: 88555 - DNA, 359 bp, Glycine max
  unsure (1)..(359): unsure at all n locations
ttctntatcttgagactcttgtgtattaagtactggatataccttacggttttctcattcctatcttctacaaattctcctacaaggctagaaatatttttgagcacatataccacattatgatgttgattcttttagcatgcaactctatattaatgctgctgcattgtaatgatcacatttgcaacttactaatatgcggcgcaccttatgcatctgaatgctgcttgaatcactgtatttggcgtatttggtttggccgttagccaattcaatgcgtggatatatatcgcacacctacaccggagatatatatcagttatggctttgtgttcaatatttctcaatcttcatcttct

SEQ ID NO: 88556 - DNA, 408 bp, Glycine max
  unsure (1)..(408): unsure at all n locations
cagagtcacctgcngcatgcaagcttcttaagtttagatgatgcagatgagtttgtggcttcttcatgcactcctctaatgaatatagcatcatttctggcgctaaactgttgggagttggaagccatcttctcgattaaatttctggcttcaacaggggtcatgtctccatgggctccaccactggcagcatctatcatacttctctccaagtcactgagtccttcataaaaatattggagaagacgctgctcagaaatctggtggtgggggaaactagcgcatagttntttaaatctctcccactattcatataggctctctccactgagttgtttaatgcctgaaatatcctttctgatggtcgtggtcctggaagcagaggaaatttnttctaagaatactcta

SEQ ID NO: 88557 - DNA, 494 bp, Glycine max
taagcttgcatgatttacatctcctctttctcaagcaaattcttcttgatatcatcaaaatcttcatgatttacattctccccctgttttgatgatgacaaccacctgtatgttatgagcaacaacaaagaaaatatctattcgcatatagtttactccccctcggttttacaatgattgcttatatgagacaatcgaagatttcatattgttcatatataaaaagtagtctcatacaacaatagataatttttcttactaatttatcttttatctttctctcaccctttgtcaacatcaaaaacaaatcatgaatagagaggagaaagatgttaccacttgttgcattgtatgagaatcaagtgataccaaaaggcattaatacaatcattcaatattaatcaagcaaaaacaagtacaataacacatcattcaaacacaatcaaatacaatcaatcatcagatatttcataatatattaattaaataacaat

SEQ ID NO: 88558 - DNA, 400 bp, Glycine max
  unsure (1)..(400): unsure at all n locations
acctgcaggcacgcaagctttatttaatanatcaagtgtgtctttattcaatgttctgccattatgtagattccatatgttgttgattcaaaattgtgctgcaagcatatttcatgatagctacagtcctcattttacgccatgctgganaacaggaaagatatattactaacatagggatgtgcttggaacccatactaaaaaaaatgtatttcttgatttctaaagaatagaacaaaggaaatagatctctccttcgaggtgttcccttatacaaagcgttcttttttataatcatcatacctaagattcttgactttctgatggaaaggatattgtttnttatagtctctacaactaggtcactgcaattatcaaatggtccaaacctcaccaacat

SEQ ID NO: 88559 - DNA, 322 bp, Glycine max
  unsure (1)..(322): unsure at all n locations
atacagcatcaacattgcgaggtatagncattgtcatgtcattcatgtccactgagactggctccacccgtgataaaatgaccccaaaaaattcaatattggataacatatgattgttcacccttgattgactaaggatataatagcatatatatagtaactaacatgaaaacgaatattagatgttgagatttgatacctgaaataccagatactgccctcatgggcgttatcttggttatgtcgtcatggatatccaactttagcacaattgtctgtcatacaataattatagaactgttaggatctatagttataatca

SEQ ID NO: 88560 - DNA, 475 bp, Glycine max
  unsure (1)..(475): unsure at all n locations
ggatcttaagtcacctgcggcatgcaagctctngatgctggccaaaatgctttctattctaagnctctnttaaataanaaaggtgtgagtttctacatctaaacctttggaacttttacacttggacttgcttggcccctctagaactatgagtttgagagttgactattatgctcttgtcattgttgatgattactcaagatttacgtggactttttttcttgctttaaaaagtggtgcttttaaagctttcaagaaacttgcaaaagttattcaaaatgaaaaagatttgaaaattaagaccttgagaagtgatcatagaggtgaattccaaaatgaagattttaaaactttctgtgaagaaaatgggatttcacgtgattttctgctactaaacttcacaacaatgtggtgccagaggaaatattgtgttgcagaactagcagaacttgttaatgaactacttaccattatt

SEQ ID NO: 88561 - DNA, 395 bp, Glycine max
  unsure (1)..(395): unsure at all n locations
aaattcctatgatcatgagcatctatgtgtgtcctactatgacttgaganacatagatgatcatataacaagcatagatttaaaaggtactatgttgcctcctagtagcgcttctttaacgtcttgagctggacgcgtgatgacttgtcggccacggacctagtactttgcttacctttggcttaggacttggtcgcctgctggtcgaccacaggtcgtatgcaacgctccatcctttgtagatgatctgatggactctggaggtggcggcgatgcgtctattgcccgctgccggccatccccaatctactgtggtgtctcgccttgcgcctgcctgtgggcgcagtacttcttgatgatagactcgctagtatggcgcctgatgaccttgatgt

SEQ ID NO: 88562 - DNA, 403 bp, Glycine max
  unsure (1)..(403): unsure at all n locations
agcttctagtatttataactcttcatcttcatgtgtctttngtctctaagctaatagtttccttcacttatgtggagatatttatttattttaagtaattttccgtgaatgtttcttttatagttaattggtgtgtagtgttatttattatatatatggcttctatgtgtgattgaattgtttgatctgacaattgattaaattaatgggctctaagttattttgataatttagtatttaggaatttttttcctgtaaataagtttttatagataaaattataatttatcaactagtatgtattttaattcttggtggttaagttttttacaaaatttaattgcgttctggaaaattacatagtgtaagttaaactctacaaaaatgaaacttgtccccactc

SEQ ID NO: 88563 - DNA, 393 bp, Glycine max
  unsure (1)..(393): unsure at all n locations
gcgtcacgtntaanaccgagctcgatggtggttctagcctttgatgatactcggcgggaagtgatggtggaaatcgacattcccattcagatagccccccacacttgcaatgtggtgtttcaagtaatggatataaatcctgcctatagctgcctcttgggaagaccttggattcatgccctgtgagtggtcccttcaacgcttcaccagaaattgaagttcgcggtgggtggactcttattgatagtgtcgggtgaagaggatatgttagtgagctgcccctcctccgcaccgtacgtataagcggcggatgaatcattgtaaacagcttntcaatcctttgaggtggtgagctgcgcctctgtggaaccaaatacgtcgccaccttctctc

SEQ ID NO: 88564 - DNA, 374 bp, Glycine max
  unsure (1)..(374): unsure at all n locations
agcttatggtagtgaactctctcactgtggcttctacatacaagcttttagaaggactacaacaatctgaacaagagggtcagcagagtgcaaacttgttttccaaattctggtgtgcaaaagttccaacgaaagtacttgttttctcttggaaattactccaagataggcttccaacagcacaagcgctctagaggaggggagttattattcaagactacaatttttcatgcaaactgtgtggncttgaggtggaaaccaacaatcatttgttcttactatgtccggtaattaacagattgtgggaaagagttatggcatgggtgggaatgtgattacaaattccaaatcatatcaaccagctgttcgggatg

SEQ ID NO: 88565 - DNA, 384 bp, Glycine max
  unsure (1)..(384): unsure at all n locations
atgcacattctatctatatacaattgcttgttgcttgcttgaatcttgatctcacgtattgtattgtcatcatcaaaaagggggagattgtagatgcaattgactctgatgttttgatgatgatcatgatgatgtgttgcaattgatgccaatgggctcttcaagattaaaattcaagacaatactttaagattacaaggcacaacatgaagatgatcactacaatattacgatgggaattcctaattgaattaaccaagggttggccaagtgaattataataaanagtgctcttcaaagactttactctctggtaatcgattacatttgaattcgaaattgtaaaagctgtaatcgactacacaattgtggttatcgattacc

SEQ ID NO: 88566 - DNA, 484 bp, Glycine max
  unsure (1)..(484): unsure at all n locations
atccttaagtcacctgcggcatgcaagctngaagaagagcttgatgaagttntntcttttacatgctcaactctcttaagtggcatctgtattgattggtgtattgtgtgctgcatcttagtctctatcttttcatatgtgcatcatgcatcatcatgtcggagtaaggagaaagtttgtaaagttagaaaatttcttcataaggcaaaactctctattttaattgattacaaccttacagtaatcaattacacaagttgttttaagcttgtagagaaatgtctcgtatcaatttaatcgattacaagtttatcgtaatcgattacatagttgtttttgagacgacgattgatttattcaggagtctttaatataattgagtaccatgtgatataatcgattacttctctttctataagcggttcagaggtgatcaagaattctatatgcacagtgaaatctaattcgagtttgatgcgttgaa

SEQ ID NO: 88567 - DNA, 381 bp, Glycine max
tcttggtctcttgttccatgctctggtggtagctacatctacatccctcagctcggcattctcatttcggatcctaagatccactgatttgaacctttctttgactgattgagcatgctcgagttctgtcctaagagcctacacctctgtctctctctgcgctgactcaaattgctgccttttagcggttctcaaacgtgggagccaatccaaaccttgcacgtgggctttcaaacactcacggtagccaccaatgggccccctacctctgagctcttagtctttctttggaccaccatccatgccttgcggaccttctgaagtgtctccatgttggtcatcttgaaacctcgagaaatgacaggtgcgagctcatcctct

SEQ ID NO: 88568 - DNA, 333 bp, Glycine max
  unsure (1)..(333): unsure at all n locations
gatacttaagtcacctgcngcatgcaagcttctaaggaggtgagcttagttatgagatgtgtgngtgtatctaagctctagcttctcaaggaagttttctcanagaagcttctcaaggaagttntctcaagaaagcttctcaaggaagctacctagtctataaatagaagcatgtgtaacacttgttgtaactttgatgaatgaaagtcttatgagacacacttcaaagttctacttctccccctcttttattccttcaatttcgtgctccccccctctctctttctctccctctttcttttcctccattgaagcatccttccaagcttctta

SEQ ID NO: 88569 - DNA, 354 bp, Glycine max
  unsure (1)..(354): unsure at all n locations
cctcattgtctctcacaatctttagatgtgggagctcttccaatccttgtgtccgtactctcagccacttatgatagccgccgatgatcccattactgcttcccctaagctctctgtcttttcttcacaccgcatcacatgccttgtgaactccttggagtaccctcgcattgtggtcactgaaaccccgtgcgatgaaaggcgtgatgctntcgtctgatggcactcctctcatgggacatccttcgcatgaagatagaatcctgattcttccttccttctagcgagggaaccaattaacagacgcccctccatgctagccaagagttggtcccaattcgcctctcctttttc

SEQ ID NO: 88570 - DNA, 469 bp, Glycine max
  unsure (1)..(469): unsure at all n locations
agctctttctttcttcttctctcttgcttnctcacttctactctnttctttcccttctttatnntttttcaactttntctttttctttactttctttttctttttctacctctatatctttttcttgagtggttatttctttctcctcgaccattattggtttttcactctcttgatttgtcacatctgttacctcctctttctttttcttagtgccatcctttagaacaatttgtttctccaaagccaccctatcctcatcctcaactaccaaacgcttcttgtttcttgtcatcacaacattgcattcttctttgggattctatnttgtgttcgccccanagctattagatgaactttcagctagttggcctacctagatctcanngttctcaatgctgactcattgcttttggatttgacattgccacctacatgaattgagttagagtctcctccatctctggtg

SEQ ID NO: 88571 - DNA, 384 bp, Glycine max
gtcacacactccaaacaaccaaatcacgtcgtttcatttaacaacaatcaatcttttccctctttctcttaattcccaatattcttcacattcacttctcttctgccatgtgaacaaacatcaaacatagcaagcacaatacataatcgcagttccatccatagcactgcctcaattcttcccccataaaaatgagccagtgtgttcccagttgggatgtcgaagacaacccaccaccctcaagagtctcacttcgctccaactctaattcaactgcccctgatgttcccatgttagctctcttttcttcttcttttgtctctgtatcatacgagaaattattttataattcgagactatagctagtgtgatcaatctttatgt

SEQ ID NO: 88572 - DNA, 444 bp, Glycine max
  unsure (1)..(444): unsure at all n locations
agcttcacctttctgtcctcctcatagnngntgtatgagaatacatgctctantttcatctcccactccaagtaggcctccagatcatctctttctttaaatggaggaatgttgagtttaataccatcaatttggttttgtctaggaacaccatcattcnctcttctcctcctttcttcttcattatgatctctattctccatttgatccaacctctcatggagcgcatcatctcgttgtttcattaacctctccaaatgttgcatcaaagcttgcatttggaattgcgaaagccccactccttcattaggataagtacctgacatctcanacaaacatatcacacgtaacaagacaattatagttgctgtttgatacctcacccctcaagcgatacacaatattgctttcttaatgaacactttgcctttacactctaatccc

SEQ ID NO: 88573 - DNA, 339 bp, Glycine max
catacctggcggtaatcttgcgatttgtgagcggaactttatgaatgctatcgtaggaagaatgcctagtacatgccctctcttgctgtttcggatccatggagagatctgaatcccttgaaaaaaccaccaatcctaacccatgtccagatccagacaaactttatatgcacggtgtgatgctgttccaatgacaagtggagtttgaaggagagggtgaggcgggctaaaggaaaatagtcggtgaagtgaaggaaggaaggcagaaatactacgccacgtaaaaaacatattagatttctatcggctctctcttgaacatgagtaccactaatagac

SEQ ID NO: 88574 - DNA, 473 bp, Glycine max
  unsure (1)..(473): unsure at all n locations
agcttatcatattcttggctaagcgcgactcgttgtcgctaagctcatttccttgcagccagaactgaggttcattgagctaagcgccactcatggcagctaagctcaattctttgtggcctagactgggtttatcaagctaagtgccactcatgccagccaagcccaaatccttgcaacaatgtcagcgctaagcaatcccttttccgttgagcgcatgctcctctatactcaagatgcatcattttagctaagcgagttcatcttttgaggatgaacactcatcctcttactgaaaatacatgtggctaagcgaggctgattcgctaagcccaggtaacttagtcaaaatttttgttataagccgtgcgctatgccaagcgtacctgagctaagcgcatttctttttcggcaaccgttggctaagcgagcctngctcgctaaaatgcatacttagtgtattttttaactga

SEQ ID NO: 88575 - DNA, 440 bp, Glycine max
atgctcatgcaatggagttgacaagaatatcttcagactgatcaacacatgcacagtggccaaagatgcatgggagatcctgaaaaccactcatgaaggaacctccaaagtgaagatgtccagattgcaactcttggctacaaaattcgaaaatctgaagatgaaggaggaagaatgtattcatgacttccacatgaacattcttgaaattgccaatgcttgcactgccttgtgagagagaatgacagatgataagctggtgagaaagatcctcatatccttgcctaagagatttgacatgatagtcactgctatagaggaggcccaagacatttgcaacatgagagtagatgaactcattggttcccttcaaacctttgagctatgactctccgatagggctgataagaaaacaagaacttggcgtcgtgtccatgatg

SEQ ID NO: 88576 - DNA, 400 bp, Glycine max
  unsure (1)..(400): unsure at all n locations
agctngcttctacagattaattgngtttgatgttttgtttttattgagttttgattgtctttgataattgttttttattgtgttntgntgatngcttttgattgtatatttgattgattatgtttgattgatgtgttattgtacttgtttttgcttgattaatattgaatgattgtttaaatgccttttggcattacttgattctcatacattgcaacgagtggtaacatttttctccgctctattcacgatttgattttgatgttgacaaagggggagagatagataaaagatatatgaaatctttatgagacagctntttatatatgaaatcttcaaatgtctcatataagccatcattgcanaacaaggggggagtaaaaactatatacaaatggat

SEQ ID NO: 88577 - DNA, 456 bp, Glycine max
actgcttccctcatatgtggctgatgattgttacaatttaatgatcctctgctaccctgtattgagacacacacatattcacaaacacacacattgagacaaacacacgcggactcttactctatctcatacactcactcacacacacatacataatgagactgactatacacacaaacacactgagccacagacacatacagagacccacacgcatagacacacacactgagtcacagacactcacatacacaaacacactcacacacttggacagacagacacacactcggaatcacatagatggacactcacactcacattatgagacagactaacacactaacacactgttgcacagactcacacagagacccacacacaatgacacacactctgagtgacagacacacacatacacatacacactctcactcttttaacacacacctcaca

SEQ ID NO: 88578 - DNA, 402 bp, Glycine max
  unsure (1)..(402): unsure at all n locations
gctttctgagctcgcgttgaccaagcttaagctgcaagcttttttgagctattngttcggggtgggactgggcttcaacaaaaccgtctaccaccgaccggctgcatgtcgatgtgttctggtctcgcgtgtttggtctcgcatcgtctgccagctcaactcgccgtgaatgaagncagggacaaacaccaatgaaagaacaaaatccctaaagcaaagtggagcagggcacaaaatgatgtcgtataggaaaaaaatttccactgactcgtgtgattcgctagactccagttacacgtgtcaccgcgagtcaccatctgttgatctgccaaaacattgctctgagtaactgcaggaccatcacttaactataattacagtgacttaattacacctggctgc

SEQ ID NO: 88579 - DNA, 439 bp, Glycine max
  unsure (1)..(439): unsure at all n locations
actgaagaacgatgtataactaatgattaacaccgaagaacggtcgaataccttcgcgatatcactctcggaaacgttacggaagtgcctcggcttggattttcttcacggaaacaatttttctaagcaaattcgaaagagagagaagtgcctaatgggctgaacccttttccacttcacttctccgcctatgtatagaaaattgggggagaaagctgccacccacctcgcccaggcgagcagggttgcttcctacagtagcaacagccttctggagggcccaagtgggcctggttgctatttgcacccacatattttattaagtacacccccctgccttnttttttgggattcttttttgtaacgtatggaaactacgaatttcgaacatactcgtttcttccgaatgtgcggacctcgggatacataatcatccctt

SEQ ID NO: 88580 - DNA, 438 bp, Glycine max
  unsure (1)..(438): unsure at all n locations
gcttgtagaccacgtcttttccggtttttcctacgtttttctcanataaacgttggtggtgactctgcgcgtattcctttcttggaacacacacccgcgagtcacgcgtcgcccaccctccgaagggtaggttgcgacaaggtccaacgccttaaatgacccccttccaagtaaaaagaatcacttgattcgccccttttcaaagaactacgtaggtctgatttccttatcacaattgaggaatacgtaggagcaagggaaacacccttgtccaccacaaaaagataaaaaatacaaaaagcgtaaaaagacataaaaagataagaaaagggaaaataaaacaaattgaagtcatatttgcacacttgattaaaggctgtcgtcccttgtgacagacgcgtggagtgctaataccttccccgtgcgtaanaacaactc

SEQ ID NO: 88581 - DNA, 453 bp, Glycine max
tcctcatccaacaactcctttacttgaggtatatcatgaagctcaagaggtatggcagtgctaacaagtgtccttttacaaaggagaagatgtggaggttgtctaagaacggaagattctgtaatgtttgtctttattacaaaatgaatttccttcttagcaaacctcttggaggagatactgttagttagtcaatacaactaacttttgtgtaaaaaactgctgtaaatcgtatacaactcctcccatgtataaatggtcttgcgagcactgtaattaattcttgataatctatgtaatagatactttagtatcccaattgtgtgtatttaatgatcattccagttcaatttcagattaaataggcatgattggtgaagtgcagatttcatgaactcactcatgcactcatcttctggctaagtgcatcatccgctatgcgccccatctgat

SEQ ID NO: 88582 - DNA, 145 bp, Glycine max
cgcagctcacttgcgagggcgacttttattttgaggagccacaaggcattaccccctggacaaatgaaatgtgaacgatatgtgaagagggcttcactctgccagagaacttacagttaggccagaaatgccaggtttaggctca

SEQ ID NO: 88583 - DNA, 342 bp, Glycine max
  unsure (1)..(342): unsure at all n locations
atatcccacaaaaattagtctctccgatcaaatataagttatttttcattcctcataaattcaattatacagagtaaataatttgatcttacaaatcttcacctaaacaaaacaaatagttcatattttaaaccaatattttgacagtttagaatagttagttttattttaattgataaaagataattattatttgtgactatgaaagtataattcttttaaaaatatatttagaattgatttgttttcagaaaacaaaatcatgagttggtaatattgaacnaaatgaatacttatatnttctaactcgaatctattcaaatcattttataataatattat

SEQ ID NO: 88584 - DNA, 458 bp, Glycine max
taacactcatataagatgtcatacacatgtgcttacaggtgctttataccttgtaaaatagaatcaagtggcagttacattacaacaggttcattcttaaagctcagtcttgacaccatcatccatgcttgaacacatgtatgataagacaacaattcctgtagtatactagtataatcacgtccaagcaaacttatactgattatagtcgttgatggaagaccagccaaaaacctcttcacatactctgcaagatctacagtggtatcatgcacaagcctgcatgatgaatgaacaaagacattgagcactgattcaggttgtatgtcaatcaattctttggttgctgtataatgcaaaaagaacaatatctacctgagtaagtcagatgtgcactctttgatgctataagatacagttacatatgaaccctgtaattgaactcattgtaataacat

SEQ ID NO: 88585 - DNA, 318 bp, Glycine max
ctgcagctatagtatgcctgagagttgtttttttttacccttctacaccagtactgggagtgataaagctgacactactactactaacgcaaggatgagatgcagcatcgaccaaagctctctgaataacaaatctgttaagggtaccacgtgaactacttgaacaacatgtgtagaggccccagagagggttgccatagcgtgcagtggcaattcttaaagcctggttatttgagcattctcatcatccgcgtgtgtgtctctatctatgtctcttattaataatttacttgctccgtgactctctttcctgctttc

SEQ ID NO: 88586 - DNA, 316 bp, Glycine max
atgtagaatttgcttacaatagagctgttcatatcaccactaattgttctccttttgaagttgtttatggttttaacccactaactcctcttgatcttgtgcctatgcctaatgtttctgtttttaagcataaaaaaggtcaagcaaaagcggactatgtgaagaagcttcatgagagagtcaaagatcaaattgagaggataaataaaagctatgcttaacaagccaacatagagagaaagaaggttgtcttcgaacccggagattgtgtttgggtgcacatgataaaaaacaaggttccagaacaaaggaaatc

SEQ ID NO: 88587 - DNA, 272 bp, Glycine max
  unsure (1)..(272): unsure at all n locations
tcacccgctgcatgcaagcttagccctagaggggatggactctttgattgtttcaaanaagatcaataacagcgcctataggtaagacctcccagaaaaacatcgaatcaacaccacttttaacattttttattaatttctttgatagtggagctattcttatgaggacgaactacagatttgggtctcgatggtggaggatgaataatggcgatcattcatggagctacgtataaattgatggtgaggatcactagcatcctctgcaatca

SEQ ID NO: 88588 - DNA, 391 bp, Glycine max
  unsure (1)..(391): unsure at all n locations
tgcaagcnttgagcaaattctatcttattaacctttttactcggaagtcggattgagtcccgttatatatccagacgctcgaaattgaatgttgaagctctgagcaaattcaaacgacattaacctgtttactcatatgtcggatggaggcccgtcatgtattgtgactctcagaatggaataccgaagctctgatcaatctgcaacgacgataactttgttcatggatgttcgagtgactcccgcaataatcgaaccgctcgaaattattgcatattctctgaccaaaagaaacaacaatcatttgtactcggatgtacgttagtttctcgattatattatacaccgattggattacaaactctgtcaattcaaacgacaactttattct

SEQ ID NO: 88589 - DNA, 319 bp, Glycine max
tctataaggagattaacttgatgtgctatgcttcttttatgtggctgtccatgatgaatctccttgggaaagacatctttaaattcctgcaataatggttgaacactacgagatacataaatggctaactgattagaataatcactctctctctctcgtgtataactatatctcttcatattcctttgtggagcctcactatatgcttactcttgtgctctcttatctctcatacagactcggatatcacaacaactttctaggggatagaactttaagagtaaaccatgaagatctggctatacgtttgtatggctca

SEQ ID NO: 88590 - DNA, 371 bp, Glycine max
gcttcaccaccaagagagtgccttggataagattcttatagaggaagcttctatggaggaagagaaagagagagagaggggggcatgggaattgaagggagataaggagagaagttgaactttgaagtgtgtcacacaagtttctcattcctcaaagttatgacaagagttacacatgtttctatttataacctagcacattggaagcttccttgagaaaaaaggaaggtagcttccttgggaagctagagggagaaagcttccttgagaagctagtgggtagaaagcttccttgagaagctagagggaggctattcacgcccctccaatagttaagctcacctccatgccaaaatacatgataatacaat

SEQ ID NO: 88591 - DNA, 399 bp, Glycine max
agcttttggacaaagaagaagaagaagttcatatagattcatggcttgtaaaggattgtaatgaaatgattggaaaagtattcaagatagaatgaatgaattgattgaaaaatgcaaaacaaagcctttcttttatagactcttcatgtctggttaagaagaccgtttagaagagttataacttttagaaaaacttataaccaatttgaaaaagtcaaaaaccttttgaagagttacatcttttgatttattagaaacagtcactggtaatcgattaccaaattagtgtaatcgattacacaaggcttttaagtgaaaggatgtgactcttcacatttgaatttgaatttcaacgttcaagggcactggtaatcgattaccaaaacattgtaatcgata

SEQ ID NO: 88592 - DNA, 439 bp, Glycine max
  unsure (1)..(439): unsure at all n locations
atatntaaaagtcattntcatatatcacataattgattataacattcaatggttcataataaaatgttgcatcacatgcacattttgaatggcaacacatgcctctcagttaaaatgtatcagactgagtaccacattcaacaatgtcaaaagacacgggaaaataataatgcaccatattgccaataccaaactggaagagataacctgtcaattttaagagtgaatgttattaataatggattttgctagcaaaataaaaactgaataccatgtatggctgctcaatcttgagtgtatcttaacttacaatatgtagtaagcatattaatgtgatcaaaggatantttttaatactattatcaattactccttccatccccctattataagaagacctcttctaatttctcatgcatcaagattaattatcagcacc

SEQ ID NO: 88593 - DNA, 460 bp, Glycine max
  unsure (1)..(460): unsure at all n locations
agcttcttagtttcagatgatgtagatgagtttgtggctatctatgcactcctctaatgactatagcatcatttctggcgctaaattgtttggagttggaagccatcttctcaattaaattcctggcttcagcaggggtcatgtctccagaggctccaccatggtagtatctatcatacttctctccatgtctccagaggctcaaaatcaggatgttcaaaatcaccaatcacaagatgcacagactcaccagtaacagaatgctcaggatgctcaaaaggtataaaatgatgcctaactaatatatgaaatgtcctatctatatcataatcaaagggttgtaatcagatggattacctctagtcatacactacanttagcatgcacaactagttgctttctcatgcaagtaatagtgtaggtttgaactgcaactaccattanatgatatncaaatgac

SEQ ID NO: 88594 - DNA, 394 bp, Glycine max
tggtcttcgctggcgaaaggatcgaagtgggtctgataaatgcaaattggtcatgtgctttgaaaaaattgggcaaatgaagacgatgagaatgagggagaaacccatgctgtggctgccattcctatatatccaagtttcccaccaacccaacaatgtcattactcagccaataacaacccatctccttacccaccacccagttatccacaaaggccatccctaaatcaaaccacataacccacctaccacacgaccaatgctaaacaccacctttagcacataccatatcaccaaccaagatatgagtttgcagtgaaaaataacctgtagaactcaccccaattccggtgtcctatgctgacttgctcccatatacactcgataatgcaat

SEQ ID NO: 88595 - DNA, 431 bp, Glycine max
  unsure (1)..(431): unsure at all n locations
agcttggactatatgatgcccttctttanaatataacaaaaacctgataaaaatgagcaacaatgaaaaaaattaacgtcaatcaccatttttaaaaataacaacaaattgcatccaacacatgggaaatatatagtagaatttagcaattaatggcattatttaaataaatccaagtcattggcgtgacatcacatagattcaataatgcaaaaaaaagggtatagtagtaaacgtaatgtgccctattgcttgacaacatgttctccttttccgtgtaactacgacaaagcttacctcttcttcctttaatttctcgaccttaggcacacacatatacttactatatagtattatcacatcactccctcactctcaccaattagtagcacactctctttattctatatggatcaagaaacaacaacaac

SEQ ID NO: 88596 - DNA, 401 bp, Glycine max
  unsure (1)..(401): unsure at all n locations
attagacaagataagagaatatgtttcgttctatcctaataggagaaggaaaagttcacaaattgattgaagtgatcatagcacataagaacaagcgaattaagttgaagctatcttgatagataaccataaagcacatgcctctttatgattgttcgaatgcgtgccattagcaggaacttttccattgggagcttgacaatttccatataggaaatttaagaaatgaatacccaatgtactaaatatcttttacatatttttgatcccacataactcgaatagataaagtgtatgcattatgggatcatgcattaacattcaaaccaaatatggaccgaangcaattaacaatagagatacaacaactaatgataaatcactctctattgaattttcaa

SEQ ID NO: 88597 - DNA, 286 bp, Glycine max
aatacaacctttgctaaatttataaacaatggtaaagttagaaacatgctgaccacaaaagtatcttttccaatatggcaatcacccaacaagctgatcttgaggttcaccaaatcggaatcggagtcatatccgccagtggtggttgtagcggaaaagaagacgtcgtcagcgtatgacggcggcgaagaagaggggtcccggacgggtagtttacggtactgagatggtcttccggcgacgggacaaaccaataagtctgttccaaatgaagcggaaaaagtgt

SEQ ID NO: 88598 - DNA, 266 bp, Glycine max
tcctctccttcttctagaccaatccactttcttattgtcatagcatatatctccatgatccacatcatacctcttccccttgattaccttcacttgcatgatacgaactgctgctggagatcacattctgtgtggctatagttatcactgcggaatagttacacggatagattatgagagactgttgcttattgcagatgattctcatgttggaacttatctacaatccgcaccatggaaggtgttactctgagaacggccactcc

SEQ ID NO: 88599 - DNA, 437 bp, Glycine max
  unsure (1)..(437): unsure at all n locations
agctggccatagggatagatngaacgaagctattaactaatgctctccaaaattgtatgtatggatagactaaagcagatagtgatcaatataaagaggctcanaggtcgtggtcatgttgtcaagtatcaaatgatgtgaaagaaatgctattcaatggacaacaatatatataggagatatgataaacatatgaaagggaaaaggaaaaggaaaagtaagaaagcaatagacatgttaagttatgtaatgaggtaagtaggaaaaggaataatgaaatggaattaaaacacaaattatagaanaatgactatattattttataagtaaaatttattaaaaaatagatataagtgaacttatttgatatatcanagattacaagtcgatacagaatgagatatatatgtttttcggttttaaacatattatgtttt

SEQ ID NO: 88600 - DNA, 452 bp, Glycine max
acatgcacaaagtgtgactatatgatgtggcaatggggtgtatcaagcaaatgctcacctccccctctaaaatttatttggattgggcttctcccaattcaattaaatttatttcccaacacacacatcaaatattcacttaatgcatgtgaaattacaaaactacccctaatacaaaaacttgtctatgtgccctaaaatacaagggctgaaaaatcctacatatctagggtaccctacgtacattatggagccctaaatacaatgccaaataataatgaaaccgtaatctaatatgtacaaagataagtgggctcatacttatcccattggcctgaaatctaccctatagttttgagaacactatggccttctcttgcatctctggcccaatgttcttggagtcttctattcaatgccctttgggagtatgattgcatcacacttttcct

SEQ ID NO: 88601 - DNA, 317 bp, Glycine max
agcttgttatttatattgaaaacagttataaccgcttgtaatcgattaaatctccaaataattgattaattcattgaagtaattgattaaattatctctttaatcgattaaagtgttcttcccaacatctggaaataactcaagaacaatgtaatcgattaggtactcaaactaattgattaaagtgttcttgttcacttctaaactactaaacaaaagagaagtgatcgattaaatcacttggtaatcgattaaaatagagactcctgaatagatcattcgttgtctcagacaacgagctaatctgatttgagact

SEQ ID NO: 88602 - DNA, 307 bp, Glycine max
  unsure (1)..(307): unsure at all n locations
agcttaagtgaatatatctattcgtttagagattatagacaactgatgaagaaagcttataaataccatgagctttaaagacatgatcatgaacctacgcattttcatgcaaattctttatgtaaaaagttttctgtatagttcaaaaaagctttcaaaaccccttgaacaccttgagagaaaagactaagtgttgagattgtatatccatatgtaagatgattaagagttagtcattgtacaaacaaacaacaaatcttttgattnttgtagagccaacagtggcttagtagaacaaagaatacta

SEQ ID NO: 88603 - DNA, 319 bp, Glycine max
agcttccctctaaatttaatatatgcaacaatctttgtcataaagatacaagttgatgattcatggctatggcatcgaagaattggccacttcaacacacatgccttggagttgttacatgagaagaacatgatgagagatctttcaagcataaaggagaacaatgaagtgtgtgaaggatgtctccttggtaagcaacaccgatttcctttctcaacaagcgaagcatggagagcgaaagatatattggagctgatacatatagacgtctggggaccaatgaggatgccatcacatgagaacaacagggtcttcatac

SEQ ID NO: 88604 - DNA, 188 bp, Glycine max
  unsure (1)..(188): unsure at all n locations
agctntacaaagtctattnatattatctatcatatgtagacaagccatggtataaaatgacgacctnctaatcaatctgtagatgtgtgatgaacgatgtatagtgtggcaaacctcattttccatcttgcgacacgatgatgcattgtatcggagttagaactcaaacatgccataaaaaaatgtga

SEQ ID NO: 88605 - DNA, 428 bp, Glycine max
  unsure (1)..(428): unsure at all n locations
agcttccaagttttagttcttctcaattgtctagctaagtccaagtctattacacttcgttgccatcggttctgggtgacagtggttgaaataacaatttattgccacttgtcacaatcctccaaaaatggcttaagaacttaaagtccctatcactaacaatgctccttggcaaaccatggagtctcacaatcttcttgaaaaacaaatcaaccacatgagaagcatcatcaacttttttacatggaataaaatgagccattntagaaaacctatcaacaaccacaaaaatggaatctctaccattgctttgttttggcagccccaaaacaaaatccatggataaatcaatccaatgatactcctggaatggcaatggagtatacaatcatgaggctttaccttatactttgccttgtacatacaat

SEQ ID NO: 88606 - DNA, 448 bp, Glycine max
  unsure (1)..(448): unsure at all n locations
cgtgttaaagctagggtaactactcatattttatcattaagtcgatcctcagcagatacatgagcactgttaatgctctcactctagctatcattaagaccaattgctcagctgaagcactacataatctaaaaggctagctagctcaagttatcttagtggcaatttttaccacgataaagcatggtccaatctcgcacgtgactaataccctaaactaaattcctaccattctcatttggttgaatcaatgacctacaaccagacaaagtttcggagggttttgtccaaatgaaaacaacatccgacacattgtgatgtcaggttctcgtgttccgtcaaaagaggtgaagcanataacttggatccaaactttgactaaatctacagtcagctcgttaatgtcatttttcttacatttgaatctagtaaacataatatgagtagt

SEQ ID NO: 88607 - DNA, 453 bp, Glycine max
  unsure (1)..(453): unsure at all n locations
agctnttcccatanngcatccaaatctcctttatattgnttgtttctatattatatgccctgcaaaagaaaaacaatcatccacaaataaaaggtttgtgaggattagtgatctcctacacacctttatctataaatcccctactctcatattttttattaaggatgaaaagcctctgtgcacagaataaagaggtaaggtgacaaggggtttccttgcctaaggaccctttctagagtaatttgtcctacaaaatcaccatttcctagaactgagtattgaatagtttgaatacaaaggcgaattcaagtaatccacttctcatgaaatctcatttttctcanaagactaagaaagtagtgtcagtcaaccctgtcaaaagatttactaatatccactnttagtgtcatcaattcagccacttttccttttctcttacttctgatgtgatga

SEQ ID NO: 88608 - DNA, 448 bp, Glycine max
  unsure (1)..(448): unsure at all n locations
tatgcgcatatntccctacaatcgttctcttgcccaagacattctattaacctgaaaaaaatgcacccatatacaatcaaggcagcttttgtacctagattatntacacgtacttccaaggtgtatttgttacttacatcacacacatctccttggctaaattcacacgcatgcatactccaagcattttggggtaccaaaaattgcacatgtgcacatcttggtatttctaatacctatacatacacaaacttcatgatgaatcttgactatctacacaataaggtgctacatttcatgcctttntttcaagtttttgctacctaaaggcgcatgcaaattcaagcatattttcctttgctgactaaaattgtattcaaaatatatatatatntttttggaataatgttttttcacataacattcacatatttatatatttttttgt

SEQ ID NO: 88609 - DNA, 426 bp, Glycine max
gcttatgtctctggaggagccacagaccagttcatactttatataagccacaatgccactatgatttctttgggaaggctatgttgccaggctaatatcactgagaacgtattggggccaaactaacaactctaatctacagtacatgattcagaccaaagaaggtagatctagtaaaatgatgacatggccgtggtagattgataatggtggcaagagactcaaacacgctattgagattaatggcaggttatattagaatggagagaaacatatgtgctagctaggacacactgtatatgtcacagcaatggtagattcggagatggacggaataaagtacacaactagggattatcaaaaggaggagacaataataagaaaactgtctgaaacacacactacagaaatacaagaatgactggt

SEQ ID NO: 88610 - DNA, 442 bp, Glycine max
  unsure (1)..(442): unsure at all n locations
tcttgaatctggtccanagtattggttgatcgtgacaccgtctccttcaacacaaacaccaccaaggtgctctggttgtgcaatggcaacaatcaatacatcctaacgtccatgggccataaagctttcctgtgaggcctgctctttcagggaatcttgcactcaaacaatgaaacaaatttggtttgtgagtcatcntttacttcacgtgtcggttaatgggagatggatgatcaacgactgtgtcagtgctcccagaatggattgcttcctccaatcgcttatttntttcttgtcctccatcaacttttcttctagaaaatcataacccccacatgacaacacgtgaggggcaacgcttttgttcttgatggtctgcgtattcttttgaacatcccatacaattacacaatatgctaagtaatacgcttgacaatatatg

SEQ ID NO: 88611 - DNA, 277 bp, Glycine max
  unsure (1)..(277): unsure at all n locations
tcgattaccagaaagtaaatttgttgaaaaagaacttttaacttaaatttattggccaaactttttgctacttcaattggaattcccttcctatttaatataccctttctaagactctagagactgtcttgatcatccatcttgaatatctttaatntctttgtcttgaataaagctntgagacacatgtgaaactttggcatcatcaaaacattcagcttgatcctttntctacaaagggtgtcctatcctgggtggttcatagaggatgtcttaa

SEQ ID NO: 88612 - DNA, 355 bp, Glycine max
  unsure (1)..(355): unsure at all n locations
gtgtcctgccgagttgagctgagtttgtgtagtgattgtgagggtntaaaagtggangagacatcctcaccacttgtatttttcatccttcatttttctcttctctttgttgnaaagggaagcttcccagatatggagagctaaatcctctattggctcttccctgtaggtacttgatgtaaatactcggatatctatttaatgatgttttatgagttctctgcgttatcacgatgtcatttcagtgtgcttntgcccttgtcacctagatgcatgccttgttangatcattcaacagtgaaaactggtttgattcttataacttgattggacacagcttgtttatcatattatc

SEQ ID NO: 88613 - DNA, 336 bp, Glycine max
  unsure (1)..(336): unsure at all n locations
tgagatgaggaagtgtagaaaggtgagacttcctgcttttattcgttgaccacagagtggtacctggagatatatcgcgggggtcaggagaccttggggacgtcatgtggggtgctattgccccaaaccaaacttgaccaatcctgacccaaccangcatagtcggtccatgagaacctgtgatgtacctaaacaagcgagctcctggcagtcaacagataaaagaacaaagacccaaacaggggggcttgtggtgctgccagctgtgaatttgtgtgatatatgggttgggcctctggtatcgataccaaggtgggaatcgatacaagcttaaaa

SEQ ID NO: 88614 - DNA, 376 bp, Glycine max
ataaaaaagcacaaatcctagacttattcaaatatttcttccgtacaattagcttattactggccttacttaatttgtctctgaccttattacaacaacacacattttctttgattgctctgttttttttaaaacacaacttatttgttgtgtgtgttgatgctttaccttttactttacatcccaatcaactcccccaaatttggggtaatttgccttgaactatctgctctcctagaatctaaacaaggtatctggagatattcattcaagtttatggttcaattttgaacatgtaattcagctcacaaaggtcgcaaggatacaattataattcaaggaagctttttggcaatggcttgatatcaatcatggc

SEQ ID NO: 88615 - DNA, 423 bp, Glycine max
  unsure (1)..(423): unsure at all n locations
tgtattcacataattgagtgatacttagtaaactatgcttttattcatcaacaagtaaacattntctatggagatagaaagattcgtacctattttttcaactccaagaatttacccttggtggtgtctccatangtcacatgtccattattcttatgagaaatatgagttaactgtgatgcatctctcgtcatgtgtgtagagcaaccgctatcaatgtaccaactctgcttcaaagaattcttcatccatataatcatatatttggtttaggtacccaaattttcttgggtccttgaatgttggttttgactaaagatccttttggaacccacaccatttttcccatgctactactatttttcctaaaataacattgtgatgcactatgttctttcctaccacagtaaaagcatgtcaaga

SEQ ID NO: 88616 - DNA, 432 bp, Glycine max
  unsure (1)..(432): unsure at all n locations
ngcttgctctaaatntacattgatgtttgtatttatgggaggagggtatatgccatctttgctttaagagtaatgtcccacaaaaactaactttccaaatgtttgccttctcaggaatggcaccnannaancccgcctcaccacacgtccacgaaagacaaggcggccgaaggaactatttccgccccggagtacgacagtcaccgctttatgagcgttgtacatcancagcgcttctaagccatcaatggatggtcgtttctccgggagcgacgcgttcagctcagggacgacgagtatactgatttccaggatgaaatatggcgccggcggtgggcaccactggttactcccatggccaagtttgatccagaaatagtccttgagttttacgccaatgcttggccaacagaagaatgcgtgcgtgacatg

SEQ ID NO: 88617 - DNA, 329 bp, Glycine max
  unsure (1)..(329): unsure at all n locations
tctcgacatatgatgcgctcgaatcggacatccgtgtgatatgttatgaccatttgaattacgtgagagnttgcgatgtttaatttcgagcgtatcgatatattatatgcctgaaccggacatccgagtganaagacatgaccaattgaattacatcagagcttctgttgtctatttcgagcctctcaaaaaattatgcgctccaatacggccattcgagtgaaaaggtatgaccatttgaaattctaccagagcttcgaaggtcaatttccaacggatcgatttattatagcctcgaacggacattcgtgtggaaggtatgaacattt

SEQ ID NO: 88618 - DNA, 306 bp, Glycine max
  unsure (1)..(306): unsure at all n locations
gtacatgacaatcttggacgagtcaatggggtgtatgctggggccccctgannnnccctggaaaaaaaaacgcactgtttactacctaaattagatgttcacgacctgtgagatgaattactccttgctccaaaaaacttgttgtgctttagtatgggcatcccatcgtctaaagcagtacatgctgagccatactacctcggtgatatcccacatggacctggattagtacatctttgaaaagccagctctcacgggacgaatcacccggtggcaagtactgctattcgagtctgatatagtcta

SEQ ID NO: 88619 - DNA, 299 bp, Glycine max
  unsure (1)..(299): unsure at all n locations
tccatctagtggtaatcagagcacaagagcttcaagtacgtgctccttanacctccattaatgttttgtgctttaccttctcatcattggttttttttcttcatttttctccatgtatctcctcacatgtcttggtctaaatgttgctcacatgattctttagagtttacaccgattaaacttgctatagaaattagatttgattttttatggagcaaatttcttggtcttgctctagaaccatgaattgggttgagtttaggttcctctgagttctggcttgctattttttgtggctg

SEQ ID NO: 88620 - DNA, 152 bp, Glycine max
atacgcttcgaattgaatgatgaatctcctaaccaatacaaacgacaaaaactttttaatccgatggctgattgagccccgtaacataaccagacgcaccaaaaagaaagttgaagctctgatccaattcaaacaacaataactatttactc

SEQ ID NO: 88621 - DNA, 436 bp, Glycine max
agcttcctttacagcaatgagaagagaagatgtatgatctaagaaatacaagtagtggggatgtctcccccacctctagaaacctcacaatctctcaaaatctcatcctaagctccacaagatgggcttctttcaagctcagctcttttcaatctctccatagccaaaaactctcaaaaaactcaacaaccccttcagaaatcatgatttcagcttaaataggcaatcctgtcggtggacgcgcgcttagcggaagatgagctcgcttagcgcacgtaagtgacttctggcttagcgctagtcacactcgctcagcctgaaggtgaagacagtgcgcttagcgagttggctttcgctcaacacctctatacagctcatccttctcccagaattgtccatgagcttagccatcaaatggggcgcttagcggatgatg

SEQ ID NO: 88622 - DNA, 413 bp, Glycine max
gtggatttcttcactagagagctctaagactcagtgtgtcttttccttctgcttcctactccttttataggcctaaggtagcttacttttcacgtttactttgcactttgcgcgggttttcgcgctaggcacgcttagtgtaggctaagcctgaagtgcatgtcgagcgagctgtccaattcttccaacttttcttcaaggctttttcttctagtttttgcatcaattttgctctaaagcactcgaaatcttcttcttttgactcctgcttatcacaaattgcaaagatgttaatttcttcattatttcattaaaaaatattaaagtggagaaattgcaatcattattagccaaaattgattgtcaaattaactcaaattccgtggttatcaatattacattatcacaattag

SEQ ID NO: 88623 - DNA, 438 bp, Glycine max
  unsure (1)..(438): unsure at all n locations
tgcagctggaatttaaaatgataactttctatgatagcggagaggcagcagaagggggagctntgttttatatatatatatatatatagtatatatatatagagatatatatgtagatatatanaanaatgacaaaaacataatagttgcgcttactaaaataattactcatgttttgccatatggagaaacattcgtggatacggaaatataatgcagaatgtttagacagaccatatatcgataagtctgataatgaaaggagatgaactggggagagcaacattagtgcagtgcatgtgagcacttgagaacaagccgatttctaaagatatggacatgagttgcaagttcctgctataaataattttctcatggacgtgggacgaaaaatgaaaacacatatcttttaaacaatttttagacatggatatatat

SEQ ID NO: 88624 - DNA, 366 bp, Glycine max
  unsure (1)..(366): unsure at all n locations
tagctcccnacatcctccatcttttagaatntccaaagcttattttctttgcgaaatgaatatacctttcttggaccgagaaacctccatgcccaaaaaatacttcaagtcacccacatctttaatccgaaattgattatgcaaaaactttttaagagcaattatggcattgggatcattaccagctatgaagatgtcatcaacatagatcaataatgcagtaaatgaattgcctttcttacatgtaaacaacgaataatatgtttttgattgaataaatctagcaccttgaacaactgtagagaacttagcaaaccattggcgagaggcttattttatccatataagatttattgaggaacacac

SEQ ID NO: 88625 - DNA, 356 bp, Glycine max
  unsure (1)..(356): unsure at all n locations
ttattcatttagtggtgatttctctaccttcacagnttantcagtttaagatctcttataactgttagaaggagaaatggtctcttaatgagctcatttcataccgtgtgcaaaaaaacgaacaggctgaaacaagaaaggactgaaagtgctcatgttgtgagtacctctaaagacaaaggcaaaagaaaaaggactgaggagcccaaaaatgaagttgttaagggtccaggacaaaagaaacaaaatcagggtgacaactttttctcttacagtaagcgtggacatgtagagaagaaatgtaacaaatatcatgcttggcgtgcaaagaaaggtatgtttcttactttagtcta

SEQ ID NO: 88626 - DNA, 441 bp, Glycine max
  unsure (1)..(441): unsure at all n locations
actcagcttccataagtggtatcagagcacaatagcttcaagaggtgctccttaaactctccattaattttntggcttaccttctcttccattggtggttcttcattttttctccatgtatctcctcacatgtcttgtgctaaatgttggtaacatgattctttagagtttccaccaattaaacttgctatagaagctagatttgattntctatggttcaaatttcttgttcttgttcttgaaccatgaattgtgttgagtttaagttcctttgagttttgtcttgttattttttgtggctgaaacctaaaccataaaactcttacaaaaatattaaagtagaagaaaacctcanaaatctagagtgactcgttcacctattgtagttttgtcatagaagtcatgtctagtcatgaaacttgtcacataagaattcttatg

SEQ ID NO: 88627 - DNA, 337 bp, Glycine max
aatggatgaatcattggtgagcacgatggaggtgagggaagatataatggtttcacctattggagacagcgaaccagctttgagaagcgcctattctcagaaacccatcgtcaaatcccttgatggaccagtctccaaagttcctttcatcttctatgactatgtcactgccacccgtgtttgaaccacaggactggccttaggtgacacatttcgactggtggcgccacacaaagacaaaatgggatgaatggagggatgcccttcaacacaagtataaatcagcgtggaagaaagttggcatctctgaagccatcatgagcaccaagtgatccat

SEQ ID NO: 88628 - DNA, 438 bp, Glycine max
  unsure (1)..(438): unsure at all n locations
agcttaccatcataggaagccatggataagatctcgaatgtatgagaagatgagtggagggagaaggagcacaaanatttgtgtctcacatgaagtctgaactttgaagtgtaattctcaaatgatcaaagttgaaaaaaccacacacaacgtttctatttatagcctaagtgtcacacaaaattggaggaaaatttgaatttctattcaaatttcacttgaatatgaatttgaattggtggagcagaatttggagccaaaatttcactaattataattagtaaattttagctatggttcagcccactaatccaagatcaagttcatctccactaagtgtccttatgtgtcatgagacacgtaaaacatgaaggacatacaagtgtgactatatgaagtgacaatagggtgtagcaagcaaatgctcacctccccctt

SEQ ID NO: 88629 - DNA, 445 bp, Glycine max
  unsure (1)..(445): unsure at all n locations
tgtaatcgantacacacatactgtaatcgattaccagaggatattttcagattatattctcagcagtcacatctttttatttggttcttgaatagccatcaaaggcttatatatatgtgacttgagacacgaatntgcatagagttttcagaacaaaaaggtcttatcctcttaacaagaaaaattggtttatcctcttacaaattctgtagatgcaattggctttgatgttttgatgatgatcatgatgatgtgttgcaattgatgcaaatgggcttttcaagattaaaattcaagacaatacttcaagattacaagtcacaacatcaagatgatcactataatattacgaagggaattcctaattgaattagcaaaggtttggccaagcgaattataataaaaagtggttctcataccgtttactctctcgtaatcgaatacc

SEQ ID NO: 88630 - DNA, 393 bp, Glycine max
  unsure (1)..(393): unsure at all n locations
tagtgatgaatggtgggaagccaaaattcaggtatgtgttattcaacgaaaaccattgcagccttcttttggtcttttgtttctgatgtcgtgattcttgattttgattttgaattttatgtgttattcaacgaaaaccattgcaccagtgtagtgacaagaaaactgaggtagaaccaacctcgcctattatttatttttatttttgttaaatagacatacatatcattgaagaatagttgctcaatatactagtgctggaacttacacttttgtcagtttgggaataaatagaaaggtatattcaattttctagctgtgatttctttgcctgaatatgtatgcaacgacaaaatanaagaagcacagtaaatcaaatatatttgactgatg

SEQ ID NO: 88631 - DNA, 355 bp, Glycine max
  unsure (1)..(355): unsure at all n locations
tctanactntatacaagaatgaagctctgataccacttggtagactagtggcctcagatatcttaagaagggggggttgaattaagatatcccaaattactttccccaattaaaaatttatttcactttcttttcaagttatagaattccttaacaatgaacttcttaaatattaattcanataaaacaatctggatatgaatgtaagcataataacaaggagataatgaaagagaaagtgcacactcagaattatactggttcgaccacacccttgtgcctacgtccagtccccaagcaacccgctggagagattcactatcttggtaattctttttacaagttctaaacacac

SEQ ID NO: 88632 - DNA, 393 bp, Glycine max
  unsure (1)..(393): unsure at all n locations
acaaagatgggggcaaggagtttctgaagaaagaaaaatgtaaaagaggctcttaaatcaccttgtgcaaagatttncnnnnaaaanctgtgtganaattnttcctctttttccttccccctggcctttgaagacaaggccttactatccttctttttattatgttcttgtaattattcttcctcatcctttttatctttcataggtagttgatctttggccacctgtgaaggtgtttgaggatgcaacacaaatttagtgccaagatgggtgagggtaatctcattagttaggccattataaatgatcttcctatcaaattgccacgaccttcctaaaataatatgtcctgcctccatgggaactatatcacaattaaactcatccttatat

SEQ ID NO: 88633 - DNA, 412 bp, Glycine max
  unsure (1)..(412): unsure at all n locations
gaagatgcactaagngcatgtcacacactgagcatgtgagtatcatcattctcgttaagcgtaacaatcgcgcttagcacggagggtgcgtgaaatccacctgaattacacctatgaaaagaggaataggagaagaagaaaagaaacaaaaaatattcaagagaataaaatttcttatagaaggtaaagattagaagcaggagaattaatcattaggaaccattcattcccttcattctctttcttggctattcctttcattatccattaccctcttacaattgtaaaatttttcatgacaatgagaagctaaaattccttttgttgggagcttaattagcagccaactatttttaatggaattacctcttctatctatntaatattatnttaatttcatggttcttttctc

SEQ ID NO: 88634 - DNA, 412 bp, Glycine max
  unsure (1)..(412): unsure at all n locations
ataattttttatttgctaatggataanaagcatgaganactntgctctccacaatctaattttatcattnggaatagtgcaaatatatatttaactttaacgtctaacaaaaaaggttagtctcactatataacaaactgagatctgaatcaccattaaataaaagtgtttaatttagtatctgacaatactttatacaaaattatctccaagagatgatacatgtacaatacatggttcaccaaaanaattgaaagttttcatctccctaccaaaaaataacaaatctagttatgctttaaaccctgtagtcatgtacccgcacataggcggtatttgcgatcatatgaatttgtcattaaaacaaaacagctaaaatgctatgcanacaaagtcatcatttgccaataaa

SEQ ID NO: 88635 - DNA, 232 bp, Glycine max
  unsure (1)..(232): unsure at all n locations
agagcgaagctgttgaataatcgtaaatttaaaagcggggaaaagagggagcccccaccccagaaaagaaggggggaaggaagaaaatgagggaaggcccccccccacnnnaaaaaaaaactaaataaacaaaaagggaaaaagacanaagagacagaagaagaagagggggaaaaagaagggcagaaaaagaaacaaaagggagggggaaagagagaggagaaggaaaaaa

SEQ ID NO: 88636 - DNA, 419 bp, Glycine max
  unsure (1)..(419): unsure at all n locations
tattaagtgaaccactccctcccactgccaaatattattattgttgataaatatatgtnctctgcatgaaaaccaaattcacttgaagtaaatatgtaagatcatggtgcctctgtctcttatataatangatgatgggactgatcgtgtgcatgtggttggagctcggggcgctgctgtgtttgcattacctgttggaagtgaggcatttgaagagtcgggtcgctcacttgtacgtggaactctggattatttgcaaggtctcaaggtgcgagtgttcgcatccatccaatccttctgctcccctctccctgcaagaataaaagaaaaatagaagcattaagctgcttattttgtaaactgacataattgagaccatgttntcagatgcttggagtcaagagaattgaacgggtact

SEQ ID NO: 88637 - DNA, 386 bp, Glycine max
  unsure (1)..(386): unsure at all n locations
agcttccctttctttggccaatgctggactcttntggcagtgattccttggaatttgagctcaaacataatatctatactccatcgtaggtctcccagaatttgtaatcacacccgggaaattaacacactttcctctgacaacaccttttgaactcatactttntctgttaaatgtcagaggaatgttgaaatgaattccctgactaagccttcatgcaatctcccaacttgctgacagtcttagcagtcagcagccttgagaggtcatgatctcttgaatccaagcatctcttccagttcttctaaccgcaagctggttgaacacatattccactnttcaacatgcaatggagggaagagatgtgtcaatggtgcataggacat

SEQ ID NO: 88638 - DNA, 359 bp, Glycine max
  unsure (1)..(359): unsure at all n locations
tctanactntatacaagaatgaagctctgataccacttgttatataagtggcctcagatatcttaagaaggggggggttgaattaagatattccaaactacttccccaattaaaatctatttcactttcttttcaagttataaattcccttaacaatgaacttcttaaatattaattcaaataaaacaatttgaatatgaatataaagcaattataaacaaaggagattaagggaagagaaagtgcaaactcagatttatactggttcggccacacccttgtgcctacgtccagtccccaagcaacccgcttgagagatccactatctttgaaaattccttttacaagttctaaacaca

SEQ ID NO: 88639 - DNA, 205 bp, Glycine max
tatcaggactaataagatctaatcacagccaatatttataaatgcgatattatacaatgaacttaacagattaccttgcattatacacaagcaatctatattaacagagctcactactacactgcttaaactagctgcaactcctaatataggctttgtatctctggctgtatgtgtatatatgttaagatacctaaaaatcaca

SEQ ID NO: 88640 - DNA, 348 bp, Glycine max
tctgaagcgcgtcgatgtgaccaaggaaagccacgtgtgttcatagtatcacacctgctcgaaggtcttgtgcattgttcatgtcgccgcttccattgaattggatcactgtgagtgagtacagcgccgacgcgtgagagttcatcgtcaccttcgccataagcgacacgctactccctctattttgtatacatataaaccgaatctgcagcaaaatgaatattcccagaggccaagactcaaagatttgttctaattaataataagggattttttttcaaataaaaataaaaaaactaaccatgccgagagtgtaacatgcttgaatgtttctgcgcgcgggacaat

SEQ ID NO: 88641 - DNA, 388 bp, Glycine max
  unsure (1)..(388): unsure at all n locations
agcttcccctgcaccaaatagctttntctatttatagtgatgtaagctccattggagcttgtaggcctatgatcttcttcatcaatggattcctttgcttcttgaaaaaaaananacggtgttgnnattncaaagagaagagatgccactttcaagagaaaatgaatctaaaaaaagctcaccaccgtaagaggccatggataagagcttggaggaagaaggagatgaatgaagggagaggaagagaagagcacaaaattttgtgctctaaaagagctctgaaatctgaaggttaattttcaaatgatcaaagttgaaaaaatgcacacacatgacctctatttatagcctaagtgtcacaccaaaatggagggaaatgtgaattcta

SEQ ID NO: 88642 - DNA, 427 bp, Glycine max
ctcagctgaacaccctcacaatcaatttcaagaaatggtaatgtataatacaactatacaaaatcatcgttaaatgtagtgaatggagaaactaccataaaaaaggagtgaggaaggagaaaccaacttcatgtttggaggcacagctagtagtgaatggattcacagagtttatgatcaatttaaaggagaaaataatgagagaagtgaataaaaaaaaatgacaaggagagtgaatttaactaaaatattaaataagaataacactttttaattaaaattgagttgaccttccaccaaaacgggttaattgatgttatttcatatgaagtattgatcctttcttcctaagtagtgcgtggggccattactctcaacgaaaatattttttataaataatattgagattatctttatttacaatatg

SEQ ID NO: 88643 - DNA, 314 bp, Glycine max
  unsure (1)..(314): unsure at all n locations
atccgacgaaaanccaggggatgcgcccttntgcaagcttgaaaagaacgaaaaanctacactccaacatggggacaacaantaaaaagatgaataatgcaaccattttatttgcttttacacttttacttgtgtgaatgaataaaatgtttaagcaaagttgtatagttctaatggacgcataacaagagatactcaatgttataacactagttcttaagggtagtggatatgatgttctttatcagcgcattggacaatggtttgataaattcactttaatcacaatttgccacttgtgagtggttgcttac

SEQ ID NO: 88644 - DNA, 454 bp, Glycine max
  unsure (1)..(454): unsure at all n locations
tctatggaggctggatctttgagcttcaatgatgtccttctatggtgattntccaccatggagatgcagcagaagataaaggagaacaggtgagaggaggcgtcatccactatggaataagccatggaagaaggaacttcaccaccaagagagtgccttggataagaagcttatagaggaagcttcaatggaggaaaagaaagagagagaggggaggagcatgaaattaaagagaggaagcttaaatggaggaaaagaaagagagagagagaggggggagcacgaaattgaaggaggaaaagagggagagaaattgagctctgaggtgtgtctcacaagactctctcattcatcanagttatgacaagtgttacacatgtttctatttataccgtaagtcactaacaaaatgtgaattcattntcatttcatgtgaatatacgaggaatatttc

SEQ ID NO: 88645 - DNA, 379 bp, Glycine max
  unsure (1)..(379): unsure at all n locations
gcaagctntaaaaagacacaattagatgttttcgtcttatatctcacactacacaaataaaaggaaataaagatgaaaggtgcggacaatgacatgcatgagattgtgaaaacaagctacaagccttattncccagctctgcgaagcataactcttttaactaaacactacctggttttgttgaatttataataataataatgttgtagtctgaagaacagtttccaattggatttggattgtttcctaagctcttccccttacatgagagaaaaatagacatatattgcataacacattttgggatactttgtgcctgtgtttttttcaaatgatgtaatcatttaaaacctgactagagaatcaatcctggccatct

SEQ ID NO: 88646 - DNA, 415 bp, Glycine max
  unsure (1)..(415): unsure at all n locations
tccttatcagaggaagcttcgcccanaaccctgccatttctgcgtcgaggagagccatgttgtagaacacctcaatcccatgcaaacgacaataatcaattttgttcttaatagcctttaacaagtaatgatccccaacgggattttcgcacggtttcggcgacgacccagttacgagaagcacgcggngcttgttgtgtcgaaggaaattcgagaaattgggattctcgcgaagccagcgagatctctgttcgtcccagatcgatattttggggccgagacgatacgcctcgtgtgggttaactntctcgcgggtctcgtcttctgtttcgtcgaccaagatggtgttgatgtcgaatgcgttgtaatnggtggtggaagtggaactttcaaacggcgtcgttgtggaatggac

SEQ ID NO: 88647 - DNA, 311 bp, Glycine max
gcctggtttctatttgcacccccatttttactaaatacaccccctgcctttttttgggtgattctttttttctaaagttaccgaaacttacgaatttcgtaacgatacttaatttctttccgtaatgttacggaaccttgcggattacataatcatcccctctttgacttacggaatgttacggaacctcactatttgtgcaacgatgcttccttttgatttccggtgtgtcatggaaccttacggattgtgcatcaatattttcttttgatttctggcacgtcacggaatttcacaaattgcctaatgat

SEQ ID NO: 88648 - DNA, 379 bp, Glycine max
  unsure (1)..(379): unsure at all n locations
gaatttgctttattgcatccagcagaggtatgtttacctctactcttctaaatgtttccaagatctccttctctgcctctntcatttntttgtggaaattgctcttggagggaatggaagaaggatatgctgctgctgtaagtcagaattaccagtaaaaagattcacctacatagaaatttttaggcaacttactctttaanattttgtcatcatctttttctaaaatagagtgaagttgggcaggttcatttgcggatgaggaagatgctactggttgaggtccttgatactgctttctcgacctcaatgtaatgacactcacatttttgggattctggatagaatgagaaggcagcttgtcaaagtttttgtgatg

SEQ ID NO: 88649 - DNA, 400 bp, Glycine max
  unsure (1)..(400): unsure at all n locations
aagcaccgcggctgcagctangaacccnacttgagctcaatgtatgaaacacgcttatggctaggaatccaaaatttggttttagaagtagaaaaacatgaaaattatgacttgcttgtgagagtttttgctcgaatttggngccgcccatgcttgatacctctgcatagaggtagcgtggaaaacaccttgcaatagtgtgtatacataggtaagtataaggggcatgaaattctttgcaaagggtgaaggaatattgaggtcgcttcctaaatgaatgtatgatagcaggggattcccttttgaatgcaagtgtgtgcataatgtaaatagcttgccataataaataaatgtgaatgagacaataaaaatttgtatgatatatatttcgaacatatgt

SEQ ID NO: 88650 - DNA, 390 bp, Glycine max
  unsure (1)..(390): unsure at all n locations
gatgagtctttgaatggctgtgagatcctacaggtgaaggagacatcctcaccacttgtattnttgcaatccttcatcttgntcttctctttcttgtaaaggaggcttcctggttatggaaagctaaaatcctatgttggatcttccctataggtactcgatgtaaatatctttttatctatttaatgatgttttgcgtgttctctatgctatctgcttctcattctagtatgcctttaccttgatcacataaatgcatgctttgttagggtcattcaacagaggaaactggtctgattcttatgacctcgataggacagggctaagttgttgtactatcacgaagaatacgggcgcaataatttacttgtagtatgcttgtcttaatgc

SEQ ID NO: 88651 - DNA, 346 bp, Glycine max
  unsure (1)..(346): unsure at all n locations
taagcacctgagctgcagctagaaccacactgagcgnantgcaggatcttgcttatggtagaatcaaattggtttagagtagaaacatgatattagattgcttggagagtttgtcgaattggctgcccacgctgatactttacataaaggtagcgtggaaaacaccttgcaatagtgtgtatacataggtaaatataaggagcatganattcctagcaaagtatgaataattggtttcttacatgaatgtatgatagtgtggaatgcccttcttaaatgcaaatatgtgcaggatgtaattagcttttcaatatgcatataaaaaagagaggggaacagtaaaatt

SEQ ID NO: 88652 - DNA, 150 bp, Glycine max
taccaacagttggaaagtcttttgctgatgttaggcaccacgctttaccagaatagagctcttaagtctcaagtgtactaactactagactaagtagggcctaagcccattatataaaatttatgataaacaatgctaagaaatgaatgg

SEQ ID NO: 88653 - DNA, 404 bp, Glycine max
  unsure (1)..(404): unsure at all n locations
ccatgcttgctaaagtgagacaaacactggtgcgaatcanaactccgatatctcatgggtggaatggatgaatgcatgaagggagtggctcatcacacatcatgcaatctatgaatgcgggggtccggggaattcgtcctcttcttagacacaacgtctaggggtagcaaagtgccccaacatactgttttaataatgcgacacggaccctccattggtttgtttatagaagggatcaagacagaacccatatgcgatgcctatgcaaaagacacaatgcgggaatgtacacacgttgacaatattcactgaacataagcaaaagggtatatgatacttatgcatggcagtgtgaaaaatggcacgcaatgtgtttgctcgtgcccctaattaagggacctata

SEQ ID NO: 88654 - DNA, 400 bp, Glycine max
  unsure (1)..(400): unsure at all n locations
aaaatcaaataataattatgcgatgtaaagaatattcaaaatttttcactatttataataaataaaggttcaaaatgtatttcaatgggactatctaccgtcctgtacccanacttgnatcaatgatttagttgtccaangtataaaataaaaaataaagtgaactactctctaatccaaactattttatttttttaatataaattcaattaatttttttcttacncatacagtatatattctcgacattttattatatgatacttttaaatatctgaattacttattataatataatgaacatacattattttaatttatttatcttctaatattttccgactaatggatattaatattttaaatatgtttaatatatttccatacaattttaaaatat

SEQ ID NO: 88655 - DNA, 437 bp, Glycine max
  unsure (1)..(437): unsure at all n locations
agcttataacatcaactaccataattctntgtttcatttaatacananaaatttattccaaggattacctaatgaagacccttatgcacatttggcaatgtttatcgtaatatgcaacactgttaagattgncgcgtgctagatgaagctataagactcggcctattctcattctcattggcaggagaggccaagaggtggcttcactctttcaagggtaacagtcttaagtcctgngaagaagttgttgaaaaatttctaaagaaatatttcctagagtccaagactgcagaagggaatgctgcaatctcttcatttcatcagttccctgatgaatctctgagtgaagcattggaaaggttcagaggattattgagaaagactcccacccatgggtgttgcgagccaattcaattgaatatgtcatagttgggctg

SEQ ID NO: 88656 - DNA, 111 bp, Glycine max
gatatatgggacacggcctctgggaaacgattaccatagatggggaatcgattacaaggcttaataatgaagacaggaggctaagatgggctctggtaatcgactaccaag

SEQ ID NO: 88657 - DNA, 324 bp, Glycine max
ggaacataaaactcagctgcaccattaaaaaatgaaattgatcaaatcattattttatgtcattgtttgcagattgattgtaagaattattgaccgtattccgatgagagtgtgatccttaaattttgagagaaacggctatcattagtactgagtttacatgaatatctgaagtatggactgaatgcatgaaattgaggatgatgaaggccatgtttgagctgaatgaattattgattgattgaaccctgagcctatacagtgttatctcctactaccttgacttacgttgtaggagagcatcatccacaggaagtgtggttc

SEQ ID NO: 88658 - DNA, 442 bp, Glycine max
  unsure (1)..(442): unsure at all n locations
agcttcttgtgcaatntatttaaaattgggtctttaacgagaagcatccatattgatattttcatccattaccatccatacttgttacagacaaaaagttcaatatctaataaagaaagaaaaaatangtgcaattaacaaattgtgtcacttgaattcatgggcaacactacattngttggtattatattgtagtgacaccaaattacactcgctaactgttggtgggtgaattcatgggcagcactatattgtaatggccaaattcaatattcagacatattgtgttaccataatattgcaaatattaagtgaaataaaccacattatagtgcactacattccagcacttgaattcatgcaaatcttgtattgtgatattgcagtaaaataaaccacattatattaagtgcataatattgtctttacatacgtaataatc

SEQ ID NO: 88659 - DNA, 425 bp, Glycine max
  unsure (1)..(425): unsure at all n locations
tcgaccggatccttagcaccgcgcgcagccagtgaacatcgacaattatgtttcttccagcaaccaatcttgtcatataaatatgtaagcactagtgtggtaaaaccgcgaattgtcaaatagtttaactcctctaactttntgtagattcttttcctctcagggtgtctgaggtctcctgaaaaaaactcatgaattgcattgttgacttcaatagaactaacaacctggtcctttatgattcctcccttctccatcttttctctaacttctgcagcatagctccatcttcccaaagaagcatagaaatttgacagcatgatgaaggaaccagaatctatcctataatgttcactcaaaagtgttgcaaccttttctcccatccctatgttcttatggaatttacaagcacttaataatgagca

SEQ ID NO: 88660 - DNA, 455 bp, Glycine max
  unsure (1)..(455): unsure at all n locations
taatcaaccccaatcaaaatgcanaacatgttgatcattctagctatcacaaacaagtaatcctaactataggtagtgaacatgaaattaaaaagggctgggttgcctcccagtaagcgctcgtttaacgtcattagcttgacgcatcttacttaatgtgtcttgaaaatacatgagagtggtcatcctctcaatattccctccatgatactgctntaatctctgaccatttactatccatgttctgtctagagtttttgattgaggatcanataattccacagccccgtaaggcttgacatctttgatgattaaaggtccagaccatntggatttcagcttgcctgaaaataatntcaatcttgaatngaatagcaacacttgctgtcctagctngaactcctttttgagcagcttcttatcatgataagccttcactttntctttgtacaatt

SEQ ID NO: 88661 - DNA, 350 bp, Glycine max
  unsure (1)..(350): unsure at all n locations
agctngctctanattacattgatggttgtatttatgggatgaggttacatgccatttttgctttaagaataatgccccactaaagctaactttccaaatgtttgccttcgcaggaatggcaccgaggaagcttgccttaaaaaggtccaagaaagacaaggcggccgaggaactagttccgcccggagtacgacgtcaccgctttatgagcgttgacaccagcagtgtttcgaagccatcaagggatggtcgtttctccgagagcgacgcgtccagctcagggaggacgagtatactgatttccacgaggaaatatggcgccggcggtgggcaccactggttactcccat

SEQ ID NO: 88662 - DNA, 433 bp, Glycine max
  unsure (1)..(433): unsure at all n locations
ctaagcttctagtctagatgatgcagctgagttgagctacctcatgcacttctctaatgactacgacatcatttctggcgcctaacagctgagaagtggaagccatcttctcaattaaatntctggcttcaacatgagtcatgtcttcaagggctccaccactggcagcatctatcatacttctctccatattactgagtccttcataaaaatattggagaagaaactgctctgaaatctgatggtgggggcaactggcacatagtttcttaaatctctgccaatactcatacaggctctctccactgagttgtctaatacctgagatatccttcctgatggttgtggtcctggaagtanggaaaattttttctaagaacactctcttaaggtcatcccagctcgtgatggaccttggagcaaggtaatacaa

SEQ ID NO: 88663 - DNA, 462 bp, Glycine max
  unsure (1)..(462): unsure at all n locations
gagtcacctgcggcatgcagcttattganaactgctaccaaatacctattgtaattttttaagtacaagattatttcaaagaaacctggacaatgacaaaatacaaggaaataagtgtgcactaattattcacctcttttctcctctcagctctttcaccacactctaaaaactgaatccataatgtggaaagtgtcccaccctttgaggtttggaatcgtctgtggtggtacttctatgtggataaaggttaaaacacaatatacacagcaccacacttaataataaatntaaacaatagagacccagtagttccagattttcactcatcactcactacgtgaaatacaaaaacccaaaaaaggatacaaggaagattctccttcttcttgaactctatcaatgggtgcttttctcaatgatattagttttgtcttctccctgtatcaaaacatcacagtc

SEQ ID NO: 88664 - DNA, 244 bp, Glycine max
  unsure (1)..(244): unsure at all n locations
aagagagcgccagttgcacgctcggattacatgcgttcatccagtgcctgatgttagagtatatgcttcacttgtctctttatagaaagagctcgacaaatngtataatgatgttctgtatcacaaggaggtcttgtggtctcacaaatcaacagacaggtgggcgaagcttgtcacaaagatgccaaatattttctcactctaattactatcatcaggaggaggaataaaacttatgggctca

SEQ ID NO: 88665 - DNA, 446 bp, Glycine max
  unsure (1)..(446): unsure at all n locations
gcttgacttgagaagtgattntagccctactttcactttatttattagtcaattcaattaaaaaagagaaatccaaaagtgaaacatccgattgattttttcgctttattttactaaaagatattttttaattataaatattttatctctttttaggttccaacgtggttactgtacgacggaacggtcggaattcattttagcataaattaatggatattacaaatcaaacgatcggtggaaatttattttattttttgattaggagagaaaatgacttatgtaaatgactgaagcacgtcaaaaggggtacgaatagtaaatgatacgagaataaaagtacaagatacaaatggagaccaccaccggtacatagaatgaattgaaaacttcgatntcgtgtacttacccggtgaagaccgagaanaatgaagaatgacgatgaa

SEQ ID NO: 88666 - DNA, 153 bp, Glycine max
  unsure (1)..(153): unsure at all n locations
tctacttatgtggcagggcgggccttcctcactntcttgtcttcaatgcgagctttggccactgctcttccttcccgcgatgctctcttttatatctggccgaaggggcttatagcccaaaccatactttccaccatttcctttggcatttat

SEQ ID NO: 88667 - DNA, 402 bp, Glycine max
  unsure (1)..(402): unsure at all n locations
gggacgtaatctaactttcatggactgtgacatgttttacaacgatatancatcatttgggatagaggtttggcgggctaagtaactataagtaaaccctaaaacaagggttgtccgggatctangaaaaaaanntgtgtctgtattctttgataaccataagaacaaaattatggggggactaataatggtcctttacaaattacgagatatntgccgaatctatgcacacaaaagaaatggccaccaacacgatggttgcgaatgttggcatggaaacggatcttggctaatggctgtgttgcaactttattacgtgtagatgaaaggggcaagacatgcacgcgggtgagcgtgtgagtgtgagcatgaccagtcgtcagaagcattatttagagatgg

SEQ ID NO: 88668 - DNA, 397 bp, Glycine max
  unsure (1)..(397): unsure at all n locations
tcctctctcaaactagatggaaaatagatattaggctgtctctgttgtgaatggaaaccaatagttntttggtntattttcagcctatatctattactgaccaagaagaatgtggagatgatactatttccacgtgttaatgatgcctgccgcgttctaaaagatggagttgttattccagcatcagaccttgacattgcatctgttctttgaatgagcttccaaattaccggttggatttccttttttcactctttaaatngacataactgagaaagggaccaaggagataaagctgaggtaaatcttcataaataatatgcgcagtgtgcaataaagaaataaaaaccaataaccaattaggaacagcaacaaaaatgaaacataatgagatgtg

SEQ ID NO: 88669 - DNA, 127 bp, Glycine max
catagcacaacatgacaatccagacttggatatcgtgccttgatcacagctttatataaggctagggtagatcagtcatattcgaggtccctagagagactgaggttgaccattaatttggcatata

SEQ ID NO: 88670 - DNA, 334 bp, Glycine max
  unsure (1)..(334): unsure at all n locations
atatttgcaccgatacccgtttcactggtgagcaggttactancaggttcaacacctgaacactgtatttatgaagacccaaaagaaggataaaagtcagagttgcatattggagaagaggtccattntctttgatcttccgtactggtgtgatcttgacgttaggcatcgtattgatgttatgcatgtggagaaaaatgtttgtgacagtgtgattgggacgctccttaacattcaaggcaagacgaaagatggcttgaatacccgtcaagatctatctgatatgggtataagatcacagctgcatccaaggtctgatgggaagaaaatttac

SEQ ID NO: 88671 - DNA, 453 bp, Glycine max
  unsure (1)..(453): unsure at all n locations
agctggacgacatattcaatgtttatctgtattataacactattgatagaggcccaatgcgtattaaagaactcgttaagctgcaactcaaacccaaactcgggcaatgtatgtagctcaacagggacctnatncgccatcgagcatagacgcataattgatgtnctacacaggaaaacagatctattttcttggcatccatttgacatgccgggtatccaccccaacattttatgccacaggctggcaatctgtccccaggccaaaccaatatcacagaagaagaagaagataagagaagaacgacgtaaagcagtcgaaggggaagtagacaagctcctcaaagccaactttattaaagaagtccagtactctacctggctcaccaaagtcatcatggtcaaaaaggccgatgacaaatggcgaatctgtactgactacactgatctcaac

SEQ ID NO: 88672 - DNA, 408 bp, Glycine max
  unsure (1)..(408): unsure at all n locations
gtagtgttagcctataatagctaaacatgtattctattctaagtaatntntattagaattactgataaaggggttgcattttaaataaaagggagctacatagtcaacaaaaaaaaaaacatagttaatcaatgcatttagatcacctcctaggccgacttatagctcttatgatgaaagttctctttccaattggaccattcttaggaaagatccaaccaaatttttatttcattcttacatgagatttcaacattctcaagatccttttaagttctaagtgactcatggctactttcttatattttggatgattaagctcataatagtaagttacaatttagctgtaatggttttttttttgaagagcaatatactcttaaactctttgttgtttaaatttctatg

SEQ ID NO: 88673 - DNA, 449 bp, Glycine max
  unsure (1)..(449): unsure at all n locations
agcttgttcgcgattatgcaaatgccaacaatgatgaattagtgacattgtcaatggcctttgatatgttgtctacgtatgaaataaaaatagagatatcaatgataaacggaaagaacaacagagaccaaaaacacaatggaaaagaaggagaaaaaaccctagtgaattntacgtgataagatttgaatgtttagaggtattgattgatgaaatttgatgatttgaattattattatgattattattggtatcatgattcatggtgatggccactggcttttcttgttgtatggctccttcaaatatttttcaagaccaatttttcccttcttctgagtttccttcaccggaagaaactgttggctttttgcattatgcttggagtggaagtcagttagcattaactatatgatatatgttctttggtgggttaatagtattaattg

SEQ ID NO: 88674 - DNA, 387 bp, Glycine max
  unsure (1)..(387): unsure at all n locations
tcctgactccactatnnttttatctttcattacctgccatataagtatttaatagtgaagggccaaaacacttgtaaagcaatttcatcagctaaagattagtgttcaatataatagcttacaaaaatgaggtttgcagcttccaagaatttcagttgataggtagcataaacaaccgttttatcacaaagttcaccacatagaggcaataaatcattttagggaggtatatatacttcaacacacatgtagtcataatcatttccattatggatgcctacatttcaatcctactcatcctcttatccatattctattttatattcaagtcactatcaacttattcattttagactaactagttcaagacaaaatttattccccttt

SEQ ID NO: 88675 - DNA, 438 bp, Glycine max
  unsure (1)..(438): unsure at all n locations
agcttgtggcttttcagccaaaatatatatttattgttctttntctctctttntttctttttctattaagttattatcatttgtgtcatacccttaatttgtccggggactattgnttgagggcatncnnncctttggctgacncgcttcgaggtacttggcacccttcgttgcacaatacgtgaaattccgtaacgtgccggaaatcaaaaggaagtattgttatgcaatccgtgagtttctgtaactttccaaaagctaaaaaaggagtaattacgtgttccgtaaggtttcctaaccttacggaaagaaaacaagtatcgttatgaaattcgtataagttcgtaacattacggaaaaagtatcaccaaaaaaaagcagagggggtgtatttagtaaataaggggtgcatatagaaaccaagcccacttgggcctt

SEQ ID NO: 88676 - DNA, 430 bp, Glycine max
  unsure (1)..(430): unsure at all n locations
cttgatctaccaccatcgccgccaccatcatcttagttttctattattntaatattattagtactttgatttccagccgtgtatttggctatattattatgatatttgaacaatttactatttctttatttgcatggtatgtttgaacaaatattaattatgtgggtnttatatatttgatctatttatgggtcttgcttcatggttcttgattcatgaaattggcttatatttttccatgaatgttgtatagatgcttagttgtatttgtatgcttcaaacttgttatgcactttggctttttgttgatgccaaagggggagagaaatagggattaaatcaagaactcacatgagtaatcaacttaattttaagagaagcataatattcaaaaccaacggggagaatggaaattatgtgagtgatcgac

SEQ ID NO: 88677 - DNA, 430 bp, Glycine max
  unsure (1)..(430): unsure at all n locations
agcttgctcgtctcgctgacatctatcatgttttcttttcttatgatgaccgaggaacaattagggatcaacttgaaacttatgtgcttcaagtgagaacaaatgcttctttttccacttgtgaagatgtncccgcctcggctctgaacatggttcaaactgagaaacatttggttttttcattggtttataaacttattgagcctactttgatattgccggggacgacagcatccgttgaaagaactttgtcagccatgaagattatcatgtcttaattgcgcaataatatcaacgatgtgtggttcaatgacttgatggtatgttacaccgaccgggagaggttcaagtcacttgatgatattgatattattcgaacattaccgcccagaaggctctgaaaggacacctgcctcttaatttaattaac

SEQ ID NO: 88678 - DNA, 391 bp, Glycine max
  unsure (1)..(391): unsure at all n locations
ntagccaattgagtactccattgaacatgggttttgtaatttaataatgacctgctctgcttgaaacattttctctattttcagttgcttgggtttggaaaatgacttaaggaaaatccaaaaaaattaaccaatagagttctgtgagctctattggagtaatggttgtaccctataatgtattgatgacgcctgaatgcctgatagtttgtgcattgcatttgacctctactaacaaccccttttctagaactcctatctactgtttgtttttgtttaagattgtggtgtaattgtcaagagaatatgagaaaacanacgagcttgtattattgccatttaaaaatacagtttgagatgctaaacagacagttgatatcagtttaagtgt

SEQ ID NO: 88679 - DNA, 431 bp, Glycine max
  unsure (1)..(431): unsure at all n locations
tgaggatgattntnnttcctttaagtgtgttcattcattttctaatccaagtcaacatcaacgattcagatctcaaccatcaacaaatcttaagtactnnnannnnnaaaccacttgttcnnnntttaacatgctctttctagaataacatataccatttcaaaagtgcatctctggaactataaaatattgttccacatatatgttttcataataggtatatttaattgtacaaatatatttgtggaaagtaaaagaagtgtacatatgtaagggaaaatggtataatgggtagttgggaggtaaaaaggagggtatagaggtgaatttaaaaaatggcagtgtaaatagcaaggtcgctctttatagaaattttnttttctattgaatatatatcgggcattagcccgaaattttaaggatattcttca

SEQ ID NO: 88680 - DNA, 367 bp, Glycine max
tctctagaagcacctttaggaaaagagaataagagaaagattctgatgagcttctctataagttaaaatgagctcccattagctgattgtagatgtcccctcatcctttataaaagtttcctgagaaagctttcaccaattaactaatggagagcacatttttacttatgaaaaagttcatttcattttttttcttgtcttctcttcaaagtgcttcaaagaagcttacccaaacaggcccaatatataaatccctttaaatattatatgatgagttcttccaagaattatgcaacttcatcttttccgtacgcaagtgggaaaagattaattcaaattatcaataccaaatagaaaacaaaaagtt

SEQ ID NO: 88681 - DNA, 443 bp, Glycine max
  unsure (1)..(443): unsure at all n locations
agnctggctntggtttagacatgattgatacatganttgggacttgtaggatttaatttgggcaagaatggatgaggggaagtgtggttttcgaaatctgcactctgtgcagatttttgctgtgaaattgcgcagcacaatttttcacaagtgcagaaaaatgcttgtgtgtgattggctatggaaattgtagtgcagaatgagttctggatgtttgctagtagatcccaacggtcacaatgtaggcttaagtactagagacttccagtaaaattttcgagtcgatccaacggttaacgaattggaacgaaggaaatgtttctggtgtatttgtatgtgaaaagctgtgattatggttggtgttttgggcagagatttctgcctttngccctgtttgcttagctgtgatagcttgtgctgtgtgaatggtgtattactttgat

SEQ ID NO: 88682 - DNA, 348 bp, Glycine max
  unsure (1)..(348): unsure at all n locations
tgagatgaggaagtgttgaagggtgaaacttcctgtctttattgttgaccacagagtggtacctggagatatgtcgcggnggtcaggagaccttggggacgtcaggtggggtgctattgcccaaaaccaagcttgaccaatcccgacccaacccgggcatagtcggtcagtgagaacctgtgatgtacctaagcaagcgagctcctggcagtcaacagattaaaggaaaacaagaccacaaagcaaggaggcttgtggtggctggccagctgtgaattttgtgtaatatgtggatggtggcctctggtaatcgattaccaagggtgggtaatcgattacaaggcttaa

SEQ ID NO: 88683 - DNA, 403 bp, Glycine max
  unsure (1)..(403): unsure at all n locations
agcttagctactttttagtgtngttgctctttattgnttatcgcagaaaaggtgtcaagttaatgaagtaagacatcaagttcaaacacaaagataggaaatgtnnccgccgattccatgatctttcaaggtggagaggaccttacaatatgtcaatagcaaccacaaggagtccaattaggacatccatagtttccttagtttcagaatatcattttttaagtttggtatatataaaattcactatcatagcttacccaaacagtgacaaagcagagacaaacactgactctgtcaattttttcccactttgttgggattaaaaatatgggatttttttcagatctactatttctttattggtttcttctctttatgttccttgtaatcaatttttgcatgt

SEQ ID NO: 88684 - DNA, 380 bp, Glycine max
  unsure (1)..(380): unsure at all n locations
ntagtggtccttaatttgaagcaatatttgacattcccatattcctataatgtattccctgacatttcctttaccttgatacttcatggaaatcaagttctgaaggagagtacttgtttccgtcttatcgctttttgcaaagcgcctttcaatttcagcaaggaattctttggcactagttatatcatctgaaatagtgcccctatagacctcatgaatggcacgcttaatgaacataagactcatgcgatttgagtgatcccacttctcatgaagtttcctctattcacataagaaaggggtttctntctcaatcctttactgcaggtctagatccatgcagccaagaacaatntgcatgttcttttcccgtcttaaaa

SEQ ID NO: 88685 - DNA, 360 bp, Glycine max
  unsure (1)..(360): unsure at all n locations
gctnaaaggatactanggtgtctcccagtatggcctccttaacatgtggagccggtcgcgggatgatgatctgctgatcacaggcctagtgcctgctcgtacccatccctgaccatcgcttgaaatgatcatgtccctgtcttttcgattcacaagataaaaaaaatgcatgtgaatgtgtatgcatgagcagtttcaaatgcaataattcttttgcaaaagcccgctgggtttagttttaattaagcgcttggggcatccccatggatcgagcgaaaaggcttgggtttttaaaagaataatcatcttttaaggcacaaagcaaggatcaaaacaatgaatcatcaatcccgcgttctt

SEQ ID NO: 88686 - DNA, 397 bp, Glycine max
  unsure (1)..(397): unsure at all n locations
tactaaccttatagccaaatggaactaccttgaattaattcctttgatagccccttgagcctatgttcccctttcnttgttttgaagctcattacaagccttaagtgaaaaaccatgatatcaccttacccttaaagaattttggagctttggaattgttttgggaataaatgtgtgtgtgtgtgggggggggggggatactaatttataatcactttcatcataatttaatatcatatatattatatataaatcttttatcatttcattttcttattcttaattttttttctaatttcctttatcttcttttaatttgcctgtatattctttacttttatttttattagtctctattttattacttttcattacattacaactatctattacgtta

SEQ ID NO: 88687 - DNA, 302 bp, Glycine max
  unsure (1)..(302): unsure at all n locations
gaaatttgagcattcattcaagacgagaccaacagatgacatgaagaaaaatatttatgatacttaatgcacatcaatgcnntnccagccgccgcacccacaacgctagatacattaaaaatattcagctcgtacatgatagagatacagtctagctatattttgcaaggacttgatattttagcactacaatgtatactcatgtcacataataggctcctcccataaaagattggtttatgaaacacgtaatgcagttttacttatgggatcaacaaactaagctgcagaataccatgcaa

SEQ ID NO: 88688 - DNA, 421 bp, Glycine max
  unsure (1)..(421): unsure at all n locations
ngctntagacaacttgtataatctatcttggatcatataatgcagtcattggttggactatctactgttaactattgggatgaaatgacagaatacaacactccctacanntnttnncacaatatctgttgaaatgatacaaaaaatggaaaactgcctttaatcaatntttaaaaaaaatcanaaacaccaccctaaatgtctaaaaatcatttttgatttttgctattttttttgtgacactactacaaaaggcacatacaacgatgattgtataagacattcaaagacgggtttaaatcgttattgtagccaacgtcgttgaaagtcaagactttcgacgacggttccaacaaaaaccgtcttagaaaagagtacctttttaagacgaattttagctaaaaaccgtcttagaatatta

SEQ ID NO: 88689 - DNA, 349 bp, Glycine max
ctcagctgaatcattcaccatctgtatcattaccgacgatatttccattacttctacagtcgcatttgtgtggggtctgaattctatcaaggcctatatatatgtgacttgagacacgaatttgacaagacgtttttagaacaaaaaggtcttatcctctttaaaaggtacaacgttctatcctcttaccaatggcttggcccaaacacttgtgattcaatacggaattatttgagtgctcaaatttttcaatcgatctctttccagagagaattcttcttttcttcttcttcattctgaagagggattaagagaccgagggtctctttgtgtgagagaattctaaaca

SEQ ID NO: 88690 - DNA, 423 bp, Glycine max
  unsure (1)..(423): unsure at all n locations
catcagctgctcctcggatgaatacagttttcttttttgattataacatgtcgcttgttcattacatcattttaaattactgtctgcatctcactatcacagtcttgnnaaaattnnaantttaaacaactcgggctaaatatgatcaattcagttgcattatatgaagtccaaaaaccttgatgttgcggacacaataacggtggcataccactttttaaaattttgttcaatctatgaactcacttgaaattatatgcttttgtaggagactataagtcaatggatgagtaattgttgatagtaatggtatattctctactactgatggtcttagtactctacagtattaaatgaaaaagggaatgaattaatattctgatatataaattgattcaattttttagggatttgtcgaagatt

SEQ ID NO: 88691 - DNA, 355 bp, Glycine max
cctactctcatccgatagacgcaagttctgttatattgtacatacttgggtctcacacaggacatattggcatatcgtattaagaaggtgtcgccaatatatttattgtcctaacccatacgacggaaagtactatctatgcttttacacattggttttacactaatgtaactaattataactcatttacatagactctgagagatttgtcatatatacttatgacttttgaaattcctaattaagaattacctacgcgaaaacttaagcctcttagctattttaaaataagccgatttcgaaataaataaaataagtgaacttattagcttcttcacaatttattacatttttt

SEQ ID NO: 88692 - DNA, 375 bp, Glycine max
  unsure (1)..(375): unsure at all n locations
aacacgagaccactgctacgttagcagacgaacaaattttctatatgcagacctgaaagtgggctaccacgccacacataaatcacgagagnttttnnntaacttgtcnantttncaagaacggtgatcgactctttacaccaaaaagcaaccatgtggatggatcggtttgctcttaccttgaacgagagtcaagaacttccccgattgttagccaaggccaaggcgatggctgacacctactccgccctcgaagagattcacgggcttctcggctattgtcagcatatgatagacttaatggcccacataattagaaatcgttaggaaacttgtatggtctctcagaccttgactaaatatgacttccctttt

SEQ ID NO: 88693 - DNA, 334 bp, Glycine max
  unsure (1)..(334): unsure at all n locations
tactcagctgcttggggctttatggggctggatcttgagctcttgtttccttaatgggatntcccctagggatcctggaagaatatgtataaatgggaaggaggcgcccatccatttgttatataccattgaggaaggagctttaccatctagaagaaccttggataataaacttggaaggatgcttccatggaggaataaaaaaatggagggaaagaaagaggtgggagcacgaaatttgaacgaataaaagagggagaaaaatggaactttgaattatatctcacaagactctctttcatcaaagttacacaagtgttacacatgcttctat

SEQ ID NO: 88694 - DNA, 431 bp, Glycine max
  unsure (1)..(431): unsure at all n locations
agctngtaggattatggaggacctatcacatgttgtactaaggggagggccggcgatggtgcacaacatatattccacatccacaaatcgtgcataaacccaccatcccctgttgcccacctacaattgagctacctcactcccacctaccccatatactcgtttttctcaacaccgggtccccatcaatccttccaagctttcccaacatccaagtaatttaacattcaaacaacacaaactatcacagccaagaaaatagggcaaaggcagaaaactctgcccataacaccaaccaaaatcacagcttttctcacttaaagaccccagtaacagttccttcgttccagttcggttaccgttggatcgactcgaataattcactggaaggctctagtacataatcctacatattgaccgttgggatctac

SEQ ID NO: 88695 - DNA, 430 bp, Glycine max
  unsure (1)..(430): unsure at all n locations
agctntgtgagtgcatgtaggaattaattgttttgtttttnggattctaataagtaaaggggcatagctacttactgtgcctctacttcttacacctttgatgcttgttagtcctgttatcatatattnntnttggcactacacgcttaaactggtattgtaagntgctgtaatgagggttattatttgcttattggcacagcatgttactctatctancttataaaggtgtaggatatggaatttatcgtgtgggtaggatttattgattgtaatgtggccatgtcattatgtagtgtttacagttacagcttcattacaaatggccctgtatgcttacgaaattcttagttgaattttgtaaagttaatgaaaccatagtcatagggtttatttttttaatgaaaacaacttgataactgattcatat

SEQ ID NO: 88696 - DNA, 463 bp, Glycine max
  unsure (1)..(463): unsure at all n locations
gacctaagtcacctgggctgcagcttactattcctgagaattcttcccatattcttctcattctctccatcctttcttcattgtcattactcatccttctcatttgatcaccacgattaatcatcttcaccatgagccttgcaggntttgnnccgcggtgcgagtgccatctccacttgtagaagccatacctacaataaaaggtagtgcacaagtaaaaaatagaataggacctcaccactccagttcactcgtgtatcactctttcaaggcttatttttcttttataatatgcactctttctttcaccactcttgcttctttacacttcgtatgcagaaccttcaagctcaaaatcaagaagtatacaatgtgaaatatgtcacatatcataactcaactcaagaagccaagaaaagaaatactctaagacaaatcatttaaagacaaacacaaataatga

SEQ ID NO: 88697 - DNA, 388 bp, Glycine max
  unsure (1)..(388): unsure at all n locations
ntctcggttntactttccactcctaatgaataaattatggttagctttcanaccttggaagagaaccaacanaatgcacaaacaacttgattntccttcggtaattgatcttcgttttacgactgagagaataaaaaaggacacaatcagataaaaaaacataaaatcctaatttgccaacagtgaaaagggacaaaatcatagagtgcattaacaaaagtgagaaaaggaaacttcatttagcaaaatgatccgcaagtattttgatttaaacatttaaaaaataaggttgacagggatgtaacataaaatgcacgaccctactgaatataaatcacatattgcaggcttcattttatacacaatattacccatacaaataaataat

SEQ ID NO: 88698 - DNA, 363 bp, Glycine max
  unsure (1)..(363): unsure at all n locations
agcttanaggatgcncgagtcattcatacatatgatatgatgttgaagtattggcaatgagaatagccattcctgggattatatggatgaaccaagctcatgcttttaaaaaaggttaatgangannnnnnaaccagatgtgaagaacacgtctatgaaaattgtggcaaaaaatgaatagagtcacataactgctttttctactgccaaacatatttaggattattgatgaccttgttacttccagattcaccttgacaaagatgatatggaccatagtgaaaatataaattgattatacctcatatcttgcgtaaaaattaacaatacgttaactgtacatcgattgaatgcatacatgct

SEQ ID NO: 88699 - DNA, 136 bp, Glycine max
ggaccttgaaactcagctgaatcgatcacaggttgtactcataccatagtgtatttacaaaaattcaaagaccctctttcaatgttatgaatggcatctatgtgacttggagcacgattttaggaaagcttcattg

SEQ ID NO: 88700 - DNA, 312 bp, Glycine max
  unsure (1)..(312): unsure at all n locations
agctcttggtcaatctaaggagtggtgtctttatgctgcanattgatggtttctgagtggaaaattctaatttggttaagcatgaaattctgcagcatttgcaaanccccccnnnctcgagcgttgcnntctttncgcacgtgtcagctctttacaaaaataaacactgcatcttatttaatgcacaaaatatgcagcatctgcaatatgtgggtgtgtttcaaagtgtgagagagtgattctgtgagagagagagagccagtgtgtgtatctctgtgagagcgagtgtgagtgtatatgaaaaagaataca

SEQ ID NO: 88701 - DNA, 448 bp, Glycine max
ggacctatgaatctcagcttacaagtgagagaaccacaccagtgggaaagaatagtcatgtttataattatccatgcaggcacatcgcttataaataacatgttcatggggcatgcaagcgtgcctcttgtgtcacaaccatctgataaagaaagccttcttgtggaatctaacgatgatgacgacgatgatgacacagaaaccgaggaccaagacgttgaaggaggaagaaccgttgcttataacaatgacaggggaaagggtccacctattattggtggagaaagttcaaaaacagatggtgatgaaggaccagatgtggataagaaggctgatgagttcattgctaagagaattgagtcaatcaagaggagtagaaggagtgcaagaaactcttcaaggtaataatattgaagatggatacatatcatatccttctatttactac

SEQ ID NO: 88702 - DNA, 439 bp, Glycine max
  unsure (1)..(439): unsure at all n locations
agcttnggaggagatggtggtgacggttatgtttttgctggaattattattattccatttggataacacaaagaggatgatgaagctaattacaactgggaggaagaacttggctcatactcacncnantcccatgtcgacactatanagcataagtttttaatatacgatgaatgattactctaaataaaactgttatattttctagagaaaaaaatacttttttttttgctgtatgaaaaaaaagacacttcattcctgtatatatctttnttaaaaaataatatttttaaagtatatccatattttatttttcaaaaaataatatttaattacaggtgaatcctctgtacttaatatattttaaataaaaaagaattaaatatacataagaaactgatctagtaaatatactttcatcgcaaattactaatgtgat

SEQ ID NO: 88703 - DNA, 451 bp, Glycine max
  unsure (1)..(451): unsure at all n locations
tgtacgaatataagaaacatcttcttcgaccttggtgatccttgactccatctcatcgaattgcatgtccactngtaactcatgaccatcaacctttcaccaacaaaggtttgaagaccatcgaacctatccaaaaccttntgaagaagagaggaatcttctccaccatgtaaatgtccttcttcatcaatgggttgagcaccctttntcacccaagagccatcatgctctntacgataaccaaaggatgcaatcatagtggcaccgattaagaaggatctcttgattggaacataaggttcagagtcaagagggatgttatattgtttaaggaagagagtgactangtgtggatatggcaatgtagcatttaatcgcaatgccttatgcatgcgatatcggactaagtgtgcccaatcaatttgtcggcctttatgaaagcccacatgac

SEQ ID NO: 88704 - DNA, 431 bp, Glycine max
  unsure (1)..(431): unsure at all n locations
agcttgtgatgaagaaaactctntcttgcttataatgcaagaaaaagtcttagcctcagatgatttctcttcattgttgttctcatctcttccttcattgntgnnanncctanaagaagaaganntnccgcagctcattggattgaaaaaatccaattccactttcgaccctcgaattgaataatccttggatagcttaacaaaatccaacaccatgtgggaattggaattggaagcctgatcttgttcagatttgacatccttctccttcatagttgtcacctcatcatgattcttctcttcttcagcactttggttatgggaaatgccttcggaggtggcagagatgctagagccttctgagggacaaccttccacaaagtgtgatgatgccattgtacanaggagaaatgtttcactatttttgatct

SEQ ID NO: 88705 - DNA, 449 bp, Glycine max
  unsure (1)..(449): unsure at all n locations
tttgattctcttagtaatcacatgacatcttcacattctaagtttctctgccgttgggatcgctngattgacttataagctaaagagactgaggttaattttcaaaatctttgttctagttttaccctcgatatttgttttcaatcaacttgtcagtttaaaagtctttgtttttcttttacttccctccctttactgtttcagcttttatagaaaggggtgttgcaatcacatagattaaacagtggtggcctttcttctattggtcttgatgcttcacaaggaatacctcatcagaaatctctcaatgatatataaattcgtttatcatttcatacaacaagattcttcttctagcctctctggagtntttgatgcgtcttctagtgccctcgtgaaaaatgatttagatttcacacttagaagttgagatcatgtggtatgaataa

SEQ ID NO: 88706 - DNA, 427 bp, Glycine max
  unsure (1)..(427): unsure at all n locations
tgcaagcttatacatgatgaactatgggaaacncatgtgcaacataactattgatctgcacaagagatgtagtatagcattaattacatgttattagataagggacctatccttgtttaatattggaaaataaagcctgaacatgtattctttgcatttgtntcttaccagnttatataccctctgttctgttgagtactactaaatgataaagaatgcaattattctgactctctggtgttgggttgaagttagataagctattagtattattatggttattctaaatctaattatctgaaaatgcgtgtctatatttgcttcaggggtgacatatatcaagtggacacttgtgttctggatcaaggaaaatggatgcgccgcgatggctttacgtgactgcaaaactgtgaaatttgacagagct

SEQ ID NO: 88707 - DNA, 317 bp, Glycine max
ctttaaattcacgtgtatagataaccaactaattaacaagttcacactgtgtaagatatgttcatgccaaaatatgaacacgttggtatgtgggaacaaacaaaagaaaagagggtctttggcttcttcctttgaaatattggtgggggcgagagagagagagagacagagaaagggtggtaatgtttgttctgacacacaagggggatcgagggacgatcgtcttccttttagaggtgagttcaataagaataaagcacggttaagagagagagagagaaaagaataagcatgggataaagcagagggaagtaact

SEQ ID NO: 88708 - DNA, 458 bp, Glycine max
  unsure (1)..(458): unsure at all n locations
agctnggagaggatgcttcaatggagggaaattatagagggagagaaagagagaggggggagcacgacaatgaatgaagaanaagggagagnaagtgaactttgagttatgtctcacaagactctcattcatcaaagttncaacccgtgttacacatgcttctatntatagactangtagcttccttgagaagctttcttgagaagcttctttgagataacttccttgggaagctagagcttagctacacacacccctctcataactaagctcacctccttgagaagattcctaaagaagctagagcttagctacacacacctttctaatagctaagctcaccttcttaagaagagaagctagagcttagctacacaccccctataatagctaagctcactcccatgacanaatacatttgtgataccctaatttcatccggggattattacttgatg

SEQ ID NO: 88709 - DNA, 432 bp, Glycine max
  unsure (1)..(432): unsure at all n locations
tggaactactctacatggatttgatggggcctatgcangttgaaagccttggaagaaagaggtatgcctatgttgttgnggatgatttctccagaattacctgggtccactttatcagagagaaatcagaaacctttgaagcattcaaagaattgagtcttatacttccaagagaaaaggactgtgtcatcaagagaatcatgagtgaccatggcagagaatttgaaacagcanggtcactgaattctgcacatctgaaggcatcactcatgagttctctacagccattacaccacaacagaatgacatagttgaaaggaaaaacagggacttgcaagaggctgctatgtcttacttcatgccacagaacttccctactatctctgggctgaagccatgaacacagcatgctacatccaccacagagtcaca

SEQ ID NO: 88710 - DNA, 411 bp, Glycine max
  unsure (1)..(411): unsure at all n locations
agcttcggaagaaagtgatgaggtacaagccttaaatgcatatctttgaaaaacccgggtagtcaaagagaagttcaagtccataaccatcatagtctgaagaaagttgangaacaagggcgtttaatggncannnttggcgtcttggaacgagaaaccaagaaggcccggaaggaagaacacgaccaaagcannagtttgaggggctttatagggcagcaatagtgagctcaagctccgaagaggtgaaaggaatcattacgggtcaaaggcatgaccttgaaggacgagctataggcttgccttatgtcgaaaagaaatttgtcccaacagttaagcgagactgaagggaatatgtgggccatcatcgataagtgcaaagagaagcttaatctagcatcgactcacgag

SEQ ID NO: 88711 - DNA, 430 bp, Glycine max
  unsure (1)..(430): unsure at all n locations
tactaagcttcaaaggcanggaccacgatcacttatatgcattaccagaatatcataaataacagttaatacaaattatacaataactatcagtaaagcccccatcacatgaaacctaanatcataagttgcaatcaaagcatatcatgaattcatccaacactctgtcactgaaaagacctattctactctggttatctaaactntcatgcaacccccaacaactagcacaaagagagaaagtctcacatttagtaaacaggatcgtcaggacactaatggcttttgccatatttaaagcaaataatttgataattgttatggattcttgcttaaaacaccctccagcaattcataaaataccataagcacttataaaaaaatattggagtaggagcagcttctactctaaaaaaaacaacacttacac

SEQ ID NO: 88712 - DNA, 333 bp, Glycine max
  unsure (1)..(333): unsure at all n locations
gcttctacttatgtggcgaggcgggctttcttcactttcttgcttccaacgcgagctctgacaactgttcttccttcccgcgatgcttcttttcatgtccgcctgagtgggcttatannctaaaccatacttncnannttcccttgggtttttatcagactagttatgccgccattgtcttttcctaaacccatcccgggttcataaccgttccccaacataactcgggccatcattaccgccgcatctgacagacaaggttgcccaaagagggagtccacggaggaaatgctgaccacctcaaaagactggaaagcggtttctaacgattct

SEQ ID NO: 88713 - DNA, 402 bp, Glycine max
  unsure (1)..(402): unsure at all n locations
ataaaagcttctcggcacatagtccctngaacgcccattctttttggcaagtttgattaaaggtgcagcaagtgaactaaagttttttcaaaatcttctataaaaacttgctaaaccatgaaaacttcctacctcactagcattcttaggtacatgccattccctattgcctttaccttttcttcatccacagttattccttttgagctaatgacaaaacccaataacacaacanattccagacaaaaagaacactttntaagattgacatacaatttattttgtctcaaaacattaaaaacaacatgtaaatgatcacatgttcctctaatgttttgctatcaatcaaaatgtcctcaaaatacaccacaacnaaattttcaatgaaagcacacaaaacat

SEQ ID NO: 88714 - DNA, 383 bp, Glycine max
  unsure (1)..(383): unsure at all n locations
attctttaaatttgaagctataaggatatgatttatatttatttgagactgcaggggggcaaggggttatcaaaagattatagagctgaaaaaggttttaagnataanccgnnnncttaaagtgtttnnnnnttncggcgccgctcaactttaacttatattaacacacgcaacgtataaacatgtacaatatatggatcgttaagcattttgggtgctttgtcaaggataaagaaaagcaatttgcttcttcaaatacaatttttttttttgcgtcttcagaatcttttaaaatttaagctgtgaagaaatgatatgttgacagacaagtttttttttttgcttgacaagcctgagggaaattaagagctccaatccattgt

SEQ ID NO: 88715 - DNA, 439 bp, Glycine max
  unsure (1)..(439): unsure at all n locations
gatcttaagtcacctgcngctgcagctattgtattaaacatattactatttatataatgatgacttatttatgcctatggaagggtacagaattcactaagtacaatcaatcttggatttttaaacgttgtttccaattgttacaatggagttcggaaattnttgccattctagaaatgctactgtactttgagctcaactttaattgtacagatgaaatattaaggatcttactaaaattaatgtattttggttttaaaagaaattaaaaagaaaaagtatcatatgaaggaacacgcacacgcttgtataattatgtgcaaattatctttgttttggcaagtaatcgatatttgaaaaagctatgggtagaggcaatggacatatggaatgatatccatatattgtaacaacatccaacangaattaatttgtcata

SEQ ID NO: 88716 - DNA, 457 bp, Glycine max
  unsure (1)..(457): unsure at all n locations
ctatccacaaaagcanagggaagaaacaactaggattatactctctgatataacattacaattgtnggaatataatgttgtgctgaaatcccacgttgaatagaaatagaaagattgagtataatataattaagtgaaaaaaaattcataaatttaaaccttaaagttttgaattaaaatgtgatattaaaattactttgatgatataatttaacatattttcattcatccttttctttttctaagcagaaaaaaatagtctcctacacaaggatagacactaaatatgtctctattaccaacattaatctttatttgataaaaaataattaatagtatagatatggtagttattttaatcgatcatagttntatataagtagttaattaattttttgataagctatttaacagatgaattctgatgtttaacattttttcataacacatacttaac

SEQ ID NO: 88717 - DNA, 435 bp, Glycine max
  unsure (1)..(435): unsure at all n locations
agcttctagtatntataactcttcatcttcatgtgtctttagactctaagctaatagtttccttcacttatgtggagatatttatttattttaagtaattttccgcgaatgtttcttttatagataattggngccccccgctacttattatatatatggnttctatgtgtgattgaattgtttgatctgacaattgattaaattaatgggctctaaattattttgataatttagtatttaggaatttttttcctgtaaataagtttttatagataaaattataatttatcaactagtatgcattctaatttctggtggttaagatttttacaaaatctaattgcgttttggaaaattacatagtgtaagttaaactctcacaaaaatgaaacttgtcccccactccaattttttctctcttacttncactcacca

SEQ ID NO: 88718 - DNA, 394 bp, Glycine max
  unsure (1)..(394): unsure at all n locations
ggacactataaaactaagcttctttagtgcgtacgttaaaaccgagctcgatggttgtgcgagcctntgatgatactcggcgggaagtgatggnggaaatcgacattcccattcagatagctccccacacttgcaatgtggtgtttcaagtaatggatataaatcctgcctatagctgcctcttgggaagaccttggattcatgccctgggagtggtcccttcaacgcttcaccagaaattgaagttcgcggtgggtggacttttactgatagtgtcgggtgaagaggatatgttagtgagctgcccctcctccgcaccgtacgtagaagcggcggaagaatcattggaaacagcatttcaatcctttgatgtgtggagctgcgcctctgtgga

SEQ ID NO: 88719 - DNA, 377 bp, Glycine max
ggctgaacagcctctgtcttttattaaattcatgagtctttttattagcttgaagaaatgcatggatcactatatataccacaaggtccgtgggagtaagattcggttccttggattatacgtcgatgattttctgcttgcgactaatgataatggcatgctatatgaggtgaaacaattcctctcaaagaactttgatatgaatgatatgggagaggcattttatgtcatatgcataaagatccatatataaagaactcgatgcttttaggtttgtctaagaaacctatttaacaaattttagagagattaattgaaaattgttcacctgtgttactccatttggaggggacaacttgctttgagtattgcccaaa

SEQ ID NO: 88720 - DNA, 401 bp, Glycine max
  unsure (1)..(401): unsure at all n locations
agcttgaataagaggctgatgaagaaagctatattattagctcaacacccctatatggactaagtattgatccgttgaatgagtgtcggatgataatatcgtattctaataaannaagcattatgcatnantnnaaccggatgtatggcagatagatngttatgtatatatatatatttatatagcaaggcgctctatttgaattgatgacgacactacagttatcaattacacgagatgttataatctaggtgagaaacgtcacgtataactttaagcgattacacactcatctgaaaccattacatatatgtttctgatacgacgattgatttatggaggagacctttatgttattcgctaccttgttatataatcgattacggatctttctataagtg

SEQ ID NO: 88721 - DNA, 125 bp, Glycine max
ttttcgtgagtgatttcgtgaagaggttcaaacgaacaacgacagagatctactgtccccctctgttattacttcaaaatcgagcgccccccctctctctatctctgcctctttcttttcctcca

SEQ ID NO: 88722 - DNA, 334 bp, Glycine max
aagattaacggcgatgatcccattactgctttccctaagctctctgtcttttcttcacaccgcatcacatgccttgtgaactccttggagtaccctcgcattgtggtcactgaaaccccgtgcgatgaaaggcgtgatgcattcgtctgatggcactcctcttatgggacatccttcgcatgaagatagaatcctgattcttccttccttctagcgagggaaccaattaacagacgcccctccatgctagccaagagttggtcccaattcgcctttcctttttcgacgcacgagccgtgaccttgtagcggatagacgggcctaccttcttgga

SEQ ID NO: 88723 - DNA, 440 bp, Glycine max
  unsure (1)..(440): unsure at all n locations
agctgnttctctcttcttctctcttgctttcttacttctactcttttctttcccttctttattttttttcaactctttctttttctttactttctttttctttttctacctctatttcttttcttggccgcctatttctttctcctcgaccattattggtttttcactctcttgatttgtcacatctgtcacctcctctttctgtatcttagtgccatcctttagaacaatttgtttctccaaagccaccctatcctcatcctcaactaccaaacgcttcttgtttcttgtcatcacaacattgcattcttctttgggattctcttatgtgttcgccccaaagctattggatgacttctcagctagttggcctacctggatctcaaggttcttcaatgctgactcaatgctcttgtgatttgacatggtcacctacatga

SEQ ID NO: 88724 - DNA, 423 bp, Glycine max
  unsure (1)..(423): unsure at all n locations
ggtttccnctcatttctctgatattagaaggggggtcacacacaccanacaaccaaatcacgtcgtttcatttaacaacaatcaatcttttccctctttctcttaattcccaatattcttcacattcacttctcttctgccatgtgaacaaacatcaaacatagcaagcacaaaacaaaatcgcagttccatccatagcactgcctcaattcttcccccaaaaaaatgagccagtgtgttcccagttgggatgtcgaagacaacccaccaccctcaagagtctcacttcgctccaactctaattcaactgcccctgatgttcccatgttagctctcttttcttcttctttggtctctgtatcatacgagaaattattttataattcgagactatagctagtgtgatcaaattntatgtaatta

SEQ ID NO: 88725 - DNA, 315 bp, Glycine max
  unsure (1)..(315): unsure at all n locations
ctcatggcagctaagcttaattctttgtggcctaactgggttatcaantaaatgccactcatgccaggcaagcccaaaatcttgcaacaatgtcagcgctaagcaatcccttttccgttgagcgcatgctcctctatactcaagatgcatcattttagctaagcgagttcatcttttgaggatgaacactcatcctcttactgaaaatacatgtggctaagcgaggctgattcgctaagcccaggtaacttagtcaaattttttgttataagccgtgcgctatgccaagcgtacctgagctaagcgcatttcttt

SEQ ID NO: 88726 - DNA, 473 bp, Glycine max
  unsure (1)..(473): unsure at all n locations
ntgaatgctctattcaatggagctgacaagaatatcttcatactgatcaacacatgcacagnggccaaagatgcatgggagatcctgaataccactcatgaaggaacctcctaagtgaagatgtccagattgcaactcttggctacaataattcgaaaatcttaaaatgaatgacgaagaatgtattcatgacttccacatgaacattctataaattgccaaatgctgcactgccttgggagagagaatgacatatgaaaagctggtgagatagatcctcagatccttgcctaagagatttgacatgaaagtcactgcaatagaggaggcccaagacatattcaacatgagaatagatgaacacattggttcctcttaaacctttgagctatgacntcttgatatggctgataataagagcaagaacttggcgttcgtgttccatgatgaatgataaagaatattagtttgac

SEQ ID NO: 88727 - DNA, 267 bp, Glycine max
  unsure (1)..(267): unsure at all n locations
tttttttaaaanaaaaattagaggagtcaagagaataatatatataatgttgaagacttaatatttacaaaaaacattaagttttatataaaagtgaacataaaaaattaaaatatacttctatctaatataaatataaatttggatacacaacttcgagatgaaactgtgattctctcaattaaacaatcttaatattatatcttttatcttctttagaggtggacatacgactcttagtgaaataagtaaaacacactaaaaggg

SEQ ID NO: 88728 - DNA, 414 bp, Glycine max
attcctcaagaaataagcactctacatatgattctcgatatcgccttataattgcataccacttgatgtgagatgatatttgcagatcaattgtaaatatttatgataagataccgcccgggatctatgattaattataaggtaaataatggatttacttttcacgtggtaatggatggatatgttaattcatgaagaaaaaaaatatattccaatatagtgtccaacaattgaaaaattatgataattctgtcatttaaatgtaatttttaagaattaatttaataataagttaaaatttttaggaataatttgatattaaattgtcaacaagaaatatttattatactttttacaagtttaaagactaaataatttcttcgtctattataattggtggttctgattggttta

SEQ ID NO: 88729 - DNA, 447 bp, Glycine max
  unsure (1)..(447): unsure at all n locations
agctctctcgagctcgtncgtgacacaagcagcaagctgccaagcttctcttgagctcaatgtgttcgtgggtgggactngcggcgttcaacaaaaccagtctaccaccgnacgnnntgncaaatataaaantnccgctcgcctcgtttggtctcgcatcgtctgaacagctccaactcgtcgtgaatgaaaaacaaggacaaacaccatatgaaagaagcaaaatccctaaagcaaagtggagcagggggcacaaaatgatgtcgtatagtggaaaaaaaatttccaactgaactcgtgtgattcgggctagactcgcgagtntacacgtgtctaccgcgagtccaccgagtctgctttgagtctgcacaaaaacgagttcgcttctgagttaacttgcagggaccaagtcaactcttaaactcataagaaactacgagttgactc

SEQ ID NO: 88730 - DNA, 435 bp, Glycine max
  unsure (1)..(435): unsure at all n locations
ctgcagcttctctggaccttanggcaatcctcaattcatccttcaagaacaaactgtctactcgtgattgggccttttcctctcttcggagcttaagctcgcccctcagaatgtgnccnnnnangtattatctaggtncctttggtttcttggttccaagccttggtggtgggctatattacgtctctcagttcagcgttctcctttcagatacctaatagtgttgatttgaacttttctttgactggttgggctttctcgaagtcttctctgagggcctgaacctcttttgccttcctctgagcttcaacttccacccccttaatggttctcaaaatcgagagccaatccataccttgcgtgtagggctgcaaccacctatggtagctgccgagggcccggtgtatatgctctgagttcatgtctacttttgac

SEQ ID NO: 88731 - DNA, 90 bp, Glycine max
gctcacttacctgttatacactgtacacttcagattcagagacgactatttgactgcgactatcacccatcctgtgagacaaaacatagt

SEQ ID NO: 88732 - DNA, 408 bp, Glycine max
  unsure (1)..(408): unsure at all n locations
agcttaagaaaaagatggcctcagcaaaccccttattaacagaagggaattctatcaatagacctccaatctttaatggagaagggtaccattactggaaaacccgaatgcanannngnnnttgcgcgagtgttcnntcntttcggcgacagcccatagaaataaggccttatatacccaccacagtggaaatagtttcaataaatggtagttcatcaagtgaaagcataactatagaaaaacctagagatagatagtctgaagaggatagaaaacgagtacaatactacttaaaagccaaaaatataataacatctgccctgggaatggatgaatatttcacggtttcaaatcgtaagagtgctaaagaaatgtgggacactcttcgattaatgcactaactcatga

SEQ ID NO: 88733 - DNA, 448 bp, Glycine max
  unsure (1)..(448): unsure at all n locations
agcttagacatttctatattagactttgtgtcattaaatcttacatgaatagctcataattgaggttctagagttataaacctttgtattccttggatgttttagagtacccaagtaatgttccattatccaaatcagacattaaactttcctaagttgtccttggtgttaagggtgaaacactggcatctaaaaggatggaaatatgaaatgttgggtttttgtcctttccatagttcataaggagtcctttttagaatgagtcttatataaactatgttctgcaaataacaaacaatgttcactgcttcaaccattagtgtttaaatgtaaagttgtcattaagcaaggtcttggccatttcttgcaatgatttattctttctctcaacaacaccacttttntaaggtgttctagtagtatagaagttatgaagaattccattttt

SEQ ID NO: 88734 - DNA, 461 bp, Glycine max
  unsure (1)..(461): unsure at all n locations
ctttatgtgaaaggatgtgactcttcacatttgaatttgaatttcaacgttcaaggcattggaatcgatacctaacattgtatcaattacagccttttgaaatcaattggaacattgtaaattcatttgaaaactttntcaaaaacattttgctactggtaatcgattacaacaatctggtaatcaattaccagagagtaaaaaactctttggtaaacatgttttgagaaaaaattcatgtgctactcagtttttgaaaaaaacttttcatacttatcttgattatgccttttcttgattcttgaatagccttttcttgattcttgaatcttgagtcttgaatcttgatctcttgaatcttgaagtgttcttgattctatcttgaacatcttgaactcattctttgattgacctttgagcttnttgtcatcaccctttgcatcantctttggtatcatctt

SEQ ID NO: 88735 - DNA, 449 bp, Glycine max
  unsure (1)..(449): unsure at all n locations
agcttctagccaaatggacttaccttgaatttattcctttgantagcccttttgagccatgggtccctttccttgttttgaagctcactacaagccttaagtgagaaaccatgatattaccatgatccttaggagtgctgcgagctttggaattgttttgggaataaatgtggggggtttttgtttcattggacaacattgtttgttggctatgcttcatgatgtattttgggccatacttgatgtacattgtatattggttaaatgttggacatgctgaatgaaatgttgtttctcatagcctacaaaaaaaaaaaaaaaaatcgaaaaaaaaaaaaatttcggaaagaaaagaaaaataaaaaaagaacagctctttagttgagtgaataagatcttaaatggcacaagaatgatgaaactcttggttctactcttcatggttaatt

SEQ ID NO: 88736 - DNA, 413 bp, Glycine max
  unsure (1)..(413): unsure at all n locations
ggacctatgatactcagctttatggagctggtcttaagcttaatgaggttcttctttggtganttttcacaatggagaagcagcggaagataaaggagatgaggtgagaggaggcgccaacctcattgagaagctttcttgagaagattcctaaagaagctaaagcttatctacacacacctctctaatagctaagctcacctccttgagatgagaagctagagcttagcttcacactccctataatagctaagctcacctccttgagatgagaagctagagcttagctacacaccccctataatagctaagctcacccccatgccaaaatacatgaatatataaaagaaaaaaaccctactacaaagactactcaaaatgccctggaatacaaggctataaccctatactac

SEQ ID NO: 88737 - DNA, 393 bp, Glycine max
  unsure (1)..(393): unsure at all n locations
agcttatagaagaactcanaactatcttacttaagatacaacaagatgagcttcaagcaaaagaagaggctgaacgtgtgattcataaaattgaagagaaggaganngaannnnaaagtactancntnncccaacgcacaacttgaggctgaaaaagccatgcttacagaancgctttcggagtttgaattcgttaaaagagaactggactcactgcgtaaagagtatgcttctatggcgagtggaagggatatagcaatcaataatgcagaagagactattgcagcatccaagcaaattgaaaaagcagcggaagatatgactgctgagttgattgcaacaaaagaaggcgtgaatgccatgcgaaccgcgcatttggaaagagaagaacaa

SEQ ID NO: 88738 - DNA, 346 bp, Glycine max
  unsure (1)..(346): unsure at all n locations
ntagaccaaagcaactcanaatctaggtatctaanacccctcatattaggggattttcaagggttgagaagtgaaatgagaaggngaaatttgagcaaactctcacctcacacaagtctataaccttaatctaaacttgctcaaactggttttatgcctaaaatccaccaaatcaaaatttgactcctcacacccaaattttaacctagaaatggctcttgccctcactttgggtcttttgttattctttctggcacagcccaagctttctcataagtcctaaatgacacttcaaactaagacttactcactttaccttcaattctactgaatcagaattaccttt

SEQ ID NO: 88739 - DNA, 300 bp, Glycine max
  unsure (1)..(300): unsure at all n locations
cagcccacactcttgtttctctttgttcacatgcatattattaaatnaggccgnaanccgttagtctnnnnttnacgcattcaatttaaaacaaggcatacatccatattacaaaataaataaactatttcactgccataccaacaaaagttaagttaaactgttacagatgcctctggatgagcaactacactactcatgcacaaaactaataaaaagtaaataatgtactaaaaccataattataataatagatcaaaaagcacaagaaatcaaaaggaagttaaatatcctgtgatt

SEQ ID NO: 88740 - DNA, 415 bp, Glycine max
  unsure (1)..(415): unsure at all n locations
agtcacctgcggcatgcaagcttgtaaatgggtagacagaacatgtatgacttggnttggttcaaggataaaagggatgccccacattatttccatgacacaaatgcaaaaatgatgatttggaaatattatgcaaaantnnnatgcatgcacctatgcggacactaaatgtcatattttatggtcatgtgatgctagggctacggattatttccttatttaaatcaacccaatgttccaaaaatgttcttttataatttgtgcattatccgagtcatttcgggcgtcgggaaatttatagcattcacccttaggtgtcacatttttccaaaatagtatgatagtgaattttttcaaaaaaggggaagcattctttataacatgtggttttagcatacaacttattttttttctc

SEQ ID NO: 88741 - DNA, 395 bp, Glycine max
  unsure (1)..(395): unsure at all n locations
ggacctatgaaactaagcttgttgaaggacanattcttattatgcaaagcttgcatgaactagctcagcaaaggccaattatgagtgtagagcaattcattgagaaggtggcctagcctggaacccgaccttcttttgtagggaataatgaaagttttacagcccaggcacctcaacagcatgagctagaactagaaaatgatcactcatctgaagccatcatccctggagctgctgatttttcaaaaagaaaattagagacgagatccaatgaggctgctcatcctggaccagtgcccataccagctaactcttccactcctatcttagaaatacttgagggccagaccatactagtcctggttctgggcacttcttctccaactactccagta

SEQ ID NO: 88742 - DNA, 282 bp, Glycine max
gatgagtctagaagaagctcaccaccatatgaggccatggataaaagcttggaggaagaaagagatgaatgaagggagagagagagaagagcacgaaattttgtgctcaaaaggagctctgaaatctgaagttaatattcaaatgatcaaagttcaaaaaaatgcacacacatgacctctattatagcctaagtgtcacacaaaattggagggaaattcaaattcacttgaattgaaatgaattgtggaccaaactttggagccaaattcactaatatgata

SEQ ID NO: 88743 - DNA, 447 bp, Glycine max
  unsure (1)..(447): unsure at all n locations
tattaagtgtatgtatataaatatatgatttaacattaatatactaacataanatattaatatatataacgatattaacgcaacataattaatatatacatattaacgtaaacgtacattaatataatatattaaaatattagcgtatagccgttccttttccaactataacacaatttggtgaactaatagtcttttgctataagtctgacaagaataaatgtttcttcgtgtccatgcagctgcctatgcagctgcctattaagtgtaccattcattgaaacttacaaatactnttactataatataactatattaaaatatcaacatacattaatatatattagatatattagcgtaacattaaaaatatactaacataactatattaaatatacatataaaagtatattagcctacacattattaatatatatatatcatata

SEQ ID NO: 88744 - DNA, 446 bp, Glycine max
  unsure (1)..(446): unsure at all n locations
agcttcgccctacgcctncgaattatgtcctctngaacgaaccccttanatgcaaagtcaaccatctctgtccccatccattcatttctgccgccgaacaggtgatctggatcttgacctccttcccctgcataaaaaggtacagtaaataaacaaggcaccattgtaacataaatatgaagccttgacaaatcacctgtgcagcttaatcttatatgatgatggaagtttgtctgaaaaacataaatcttaatcttgaaaaactctggcaacaaacctggaagaatcaaaagaagtatatggagaatgcctgcgctgagaatgctngctatgaagagaccgcaaaagttgtctaataatgaaaccaccgtactgacttggtgagtttaaagtatacaaaaagtcataaatacaactcaacctggtacagtgtcaacactccattg

SEQ ID NO: 88745 - DNA, 249 bp, Glycine max
tctttctccttattagaggacttgcaaagtataggattggctgaaactcttattttcaatgattaatcgaagttaccacacaaactattggatgacatttttctttcacattgaacatgtgatatttcgcggacaataaattggtggaaacatcacttctcttgatataaatgagattaccgctcaatttattggacaaaactctgttcacaatgaaataaaatttccgatggcagattaatgaatatg

SEQ ID NO: 88746 - DNA, 405 bp, Glycine max
  unsure (1)..(405): unsure at all n locations
acggaatggcaaaggtctgtgtggtggtcggcagatgagcataaaccatagactcttgcgacaggtacaaattnttgattcaaggctagctgggttaccangttaccacacgcatctagtttactttcaagcttcttggtttagctactgaagatgaatttgtggctacttcatgcactcctctaatgactatagcatcatttctggcactanactatatggagttggaagccatcttctcaattaaatatctggcttcagcaagggtcatgtcttcaagggctccaccactggcagcatctatcatacttctgtccatgttatngagtccttcataaaataatggagaaaagctactccgaaatctgatggtgagggcaactggcacataagtttttaaatctc

SEQ ID NO: 88747 - DNA, 440 bp, Glycine max
  unsure (1)..(440): unsure at all n locations
tgtagccaaaggttactcataaccagatggtatcgattatactattatnnttggtcctattggtcgnacagaggaaatacgcattttattgtcctttgttgcccatcacggtatgattgtgcattaaatggacgtaaaaaagtgtgtcctaaatagactaatcaaggaagaggtatatgtggaacaacccctaagttngaaaagtctatctacgcttatcatgttttcaaaattaacaaaggcttctatgtgttaaaacaagctcctcgagcttggtatgaaaagttaagttcatttttaactagaaatggctttataagaagaaatgcagatactcttttgtttcacaaagattatggtagtcaatttctaattttccaaatatatatggacaatatcatttngagtcttgagaaaaggaatatacgctgcttggtact

SEQ ID NO: 88748 - DNA, 402 bp, Glycine max
  unsure (1)..(402): unsure at all n locations
tgctctagtcaatggacgcgactttaatatcttcagactgatcaacacatgttcagtggcccaagatgcatgggagaacctgacaatcactcatgaaagaacctnnnannnaaaatttttacnnnntnnncccggctacaaaaatcgaaaatcttaatatgaaatgatgaagagtggattcatgactttcacatgaacattcttgaaatgccaatgcttgcactggcctgggagaaagaatgacagatgaaaagctggtgagaaagatcctcagatccttgcctaagagatttgacatgaaagtcactgctatacaggatgcccaagacatttgcaacatgagagtggatgaactcattggctccctncaaaccattgagctacgactcctcgatagggctg

SEQ ID NO: 88749 - DNA, 54 bp, Glycine max
  unsure (1)..(54): unsure at all n locations
ctcagctttatcatctatgacncgtggggtcacatggtttgcgcatttatccgg

SEQ ID NO: 88750 - DNA, 422 bp, Glycine max
  unsure (1)..(422): unsure at all n locations
tgagtttgtggctacctcatgcactcctctaatgactatagcatcatttctggcgctaaattgtttggagttggaaaccatcttnnaannaannccggtttancanttnaatgtctccaaaggcatcaacatgggagtatctatcatacttctctccatgtctccagaggctcaaaatcaggatgttcaaaatcaccaatcacaagatgcacagactcaccagttacagaatgctcatgatgctcagaaggtataaaatgatgcctaactaatatatgaaatgtcctatctatatcataatcaaagggttgtaatcagatggattacctctagtcatacactacatgtagcatgcacaactagttgctttcttatgcaaagaatagtgtaggtttgaactgcaactaccagtaaatgatatc

SEQ ID NO: 88751 - DNA, 345 bp, Glycine max
  unsure (1)..(345): unsure at all n locations
agcttctcccccaattttctataaatagggggagatgtgaagcanaaaagggttcgggcccttaagcactcttctctcttttaaataggcgaaagaaaattttnncnancatgcgaatgtttcggtcntatatcggccactacatgtcttccgtaacgttttcgtgagtgatttcgtgaaggttttcgaccgttcttcgacgttcttcattcgttcttcatcgttcttcagtcttcaacgggtaagtacctcaaacctagctntgcaattcattctatgtacccggggcggtccacaatnggnttcatggaatattaatctcgtgtcaataacaatttatacccc

SEQ ID NO: 88752 - DNA, 417 bp, Glycine max
  unsure (1)..(417): unsure at all n locations
agcttccacttgtatattgcaaccataataattagctctatgttttccctcctgtggatatagccttactcaaggtgaagcacgtcaatctggttgggttctttctctcttttcttctctttcaccttgctgccacactttgtgtgtatgacatanctttctgctgcatctgctgctgctgttcttgcttgttcttcatcacttccataacagctgccatgcataaattgccaagaaatagattcatacataccaattggaaagctctaacgacctatcaagacaaaatggactatctgcgggaatcaaggcttggaatcctttggccacatctttttggctaaaatcattcagactattgattacttgctggatcatatcacatcacgaccatgttattatttgagtctactccat

SEQ ID NO: 88753 - DNA, 426 bp, Glycine max
  unsure (1)..(426): unsure at all n locations
ngcttaatcacatnnttctttgtttcctctctacttttttgtcattgtgtctgattcatcagaaagtgtaaattctgaatccacacaaggtactgcaaaaagaatgattcttgctctttnttgctatggttcaaatattgctatcatatctaattctaatntttgtaggttcgggctctaattntttaactgcctatgaggattgtcaatctccaactaatcaacctgtaatcaacactgaaggtaataactataattatgatttataatttcatatatcagtgcacatgctcttaaattaatattcacaattgttatcatcatattgtactatggtattaaaccaattcangatattctgatcttggtgatcaactcatgcaatgtaaatattgtaatgcacaaatgtggtatgatgaaagaata

SEQ ID NO: 88754 - DNA, 441 bp, Glycine max
  unsure (1)..(441): unsure at all n locations
agctngaatagaatggtgggacaaacataactattaacattcaaggatatactactggccacacacaagcacctgcaacttcgaaatcttactatatacccttgaaatttcagaagatatgtttcatatnnancccattcaactacaatcattgtatgaaaataaagttggtacataaatttgggtcaagctgctggctacctgaaaccataccaaaatctaatgttgcataaagaggatgtcatcaaaaaattgagttaaccatctcattaaagagaagcccatgaaaactctcttcagttaacacctgcatgaggaaacccatttcctttggtagattccccttttccctgcccctcctgctttcattgcatgctcgtttataacactccttacactcttaanaataacacctttccttgaaccactaagaattttaat

SEQ ID NO: 88755 - DNA, 393 bp, Glycine max
tgacacatcccgacccaacccgtgcatagtcagtcagtgattacctgtgatgtacctaagcaggcgagctcctgtcagtcaacagataatatgaacaaggaccacaaaacaatgatgcttgtgtggtggctggccactgtgaatcttgtgtgatatatgggttatggccctctggtaatcgattaccaatggtggggtatcgattacgacgcctacaaatgaaaacaggatgcttagatggtctctggtaattgactaccaccgggtgttatcgattaccaggcttgataacgatgtcaggaagccatgagggcttctggtaatctattacccaaggtgtgtaatctataccaagcttaaaaatgaatgcagcacgttgtagaggccctttgt

SEQ ID NO: 88756 - DNA, 399 bp, Glycine max
  unsure (1)..(399): unsure at all n locations
gaccggacctacagcaccgcagcagcgctaagaaaaactactgtgggatgaacaagccaaacggaacaagaagcaaaaagataccctaggctgcaactcgaaataccnncccccnnaagaagtatggngnatnnaacccctttgaatggaaaaacgtnccccctctcgtcattcttatattttggtgcaggggtggctcgcccaagcgagctaacctgcatctttttttttggagaggaacattaaccatgtcccctccttccttatggtttagcgctttgcctaactcgaacttacttaagttagaattaggcgttgattacttatttntaaaacaaacaaatagtaagacaacggcgaatacaaaggatacggggctggcttgcagngacgttctct

SEQ ID NO: 88757 - DNA, 72 bp, Glycine max
  unsure (1)..(72): unsure at all n locations
ngtaacgtcgctggcaatggcgggagcgtggatgccgncattgcatgcacggaacagggatgccaacgtgcg

SEQ ID NO: 88758 - DNA, 404 bp, Glycine max
  unsure (1)..(404): unsure at all n locations
agcttgttatttatatagaagacagttataactcgcttgtaatcgattaaatctccaaataattgattaattcattgaagtaattgattaaattatctctttaatcgacgaaagggtgcattctaanannnttnactacactcaagaacaatgtaatcgattaggtactcaaactaattgattaaagtgttcttgttcacttctaaactactaaacaaaagagaagtgatcgattaaatcacttggtaatcgattaaaatagagactcctgaatagatcattcgttgtctcagacaacgagctaatcgattatgagactactgtaatcgattaaaccaatacgagactcaactctccaagcttcaaacaacatgttgtaatcaattacgacaaccctgtaatca

SEQ ID NO: 88759 - DNA, 310 bp, Glycine max
tctcaatgctacaggacataacctcgttatgactataattgcatacaagggaatactttggaactggcaaaagggaaaccagtgtaatgttccttttcaagcaaaactattgtttccacctcgagaagtttacaactgttacctgcttatctatttggcccaactaacacttcctttattaatgggcaaaaggtatggactcgtcatagtgaacgaatactccaaatggacatgggttaggttcctagcccacaacgatgaagtctctaagctatcttctttatattatgtaaaagagttcaaaatgaaa

SEQ ID NO: 88760 - DNA, 329 bp, Glycine max
  unsure (1)..(329): unsure at all n locations
agcttaagtggaaaaatctatccgtttagagacaatanacaattgttgaagaaagcttataaataccatgagcttaaagacatgatcatgaacctaccannncnnncacgggtggcgtcttnctgcatagctcaaaaaagctttcaaaaccccctgaacaccttgagaaaaaagactaagtgttgagactgtatatccatatgtaagatgattaagagttagtcattgtacaaacaaacaacaaatcttttgaattttgtagagccaacagtggcttagtagaacaaagaatactagggtggaataagctcggtgtagaacttgagttg

SEQ ID NO: 88761 - DNA, 380 bp, Glycine max
  unsure (1)..(380): unsure at all n locations
taatattcanatgatcaatatttgagaaaaattcactctcatgatcatttattatagcctaagtgtcacacacantgaattctatttcaaatttcacttgtaatttgaaaattgaagtttggggagccaaaattcactaatcatgattagtcaantttggctattggtcagcccactaatccaagatcaagtccaagaatcttcactaaaggtgcttaagtgtcattaggcatgtaaagcatgaaggacgtgcacccagggtgactatatgatgtggcaatggcgtgtagcaaacaaaatctcacctccccctctaaaatttaatcggattgggcttnctcccattcaattaaactttattcttaacacacacattcaat

SEQ ID NO: 88762 - DNA, 322 bp, Glycine max
  unsure (1)..(322): unsure at all n locations
agctttgactggagtcatctagagattataaatatgtgaccatggcatgaatttcaagaactatcaacaatctatctttcaataattagagatctatcannnagaggnnagaggattgttccanacttcccacgactgtcaacatatctttctgatttatatctcttcatcaatataaaagtatctgaacaacacggtctctttcaagaaaagatctatgttgaaaaacttgcgctataaaacaatatcattctctcctccctttgccagaagaacgaacgactaaccgcctgaatatctttgtgtctctcttctcccttac

SEQ ID NO: 88763 - DNA, 380 bp, Glycine max
taaaggaagtgaaagaattagtatgggctgacatgtcttctattgatgggtaatatgttccctaaatacctataaaatgtaaagatacatggacatctagcataccttgtattataaggaacagtaagtttgacaatgccattctagatttacgagcttatgttagtgcgatgcctctgtctatttttaaatctctatctcttggtcccttatagtcaactgatgtggtaattcatttagctaataaaagtgttgtctatcctgctggtttcatagaggatgtcttacttagagttggtgaactgattatccctgctgaattttatattttgaatatacaggagggatataactgttcatttaacattcttgatgctatg

SEQ ID NO: 88764 - DNA, 394 bp, Glycine max
  unsure (1)..(394): unsure at all n locations
agcttgatggcgatgctgcatttatctaattnttccgcgaaatatatcaagatgctgatgaggatacaagaagagcaatgaaaaagtcatttgtaagtcctggtcataatatattcaaatttttaattcctccctattgtggcatcttctaatatcttgttaatttatattgagaatgccagcaaattttgtcttcactgcatactgcaatgtatacattgcacctgatctcttttctattttcttgtataggttgagtctaatgggacagttctgtctacaaactggaaagaagtgggaacaaagaaggtagagggaagtcctcctgatggcatggagttgaagaaatgggaatattaagacattttctggatcagtgtgcatatattttatg

SEQ ID NO: 88765 - DNA, 113 bp, Glycine max
  unsure (1)..(113): unsure at all n locations
agtctgtatgccattacaatngaattcactggctggcgagactcctctggggcttcttcgctatcatcacaatcttggtcggcatcttcatctaccttattctctgaactaat

SEQ ID NO: 88766 - DNA, 367 bp, Glycine max
  unsure (1)..(367): unsure at all n locations
attcagtagtcatgttgtctatgatnttcgtgcctatgtgtcacataaatttttttattaacactaacagacaaaagttaacagatagatgaatttgtcgtataattttattttcggaaattaaaaataaaattttgatctttcaaagataaatttatcaatgctctatgtatttagaaacaaaaataattatttgacaaatggagagcanaagtctacactaggatgatcactcccaccactataggcagaggccaatagacatatataattgtgactgtaattgtcccacaagattttcttttttaactgtatacgtgtaataaaaaattacttccataaaaaataggtattatctttcataatt

SEQ ID NO: 88767 - DNA, 370 bp, Glycine max
  unsure (1)..(370): unsure at all n locations
tatattgaatggtgcatcttagntcatatcatatcttttgcgcatcatgcatcatcatgagtaagtgagaagaagaatttctctgttagaacactctcttcaaaaggagaaattctctgttttaatcgattatagtcttatcgtaatccaatacacaaattgtctaagcttgcaaattatgtctcatattggttaatcgatacactacatagtgttttgatcaatgactaattattcaaagctctgttaatcaataccatgtgatataatgatattctttttataagagtcaaagtcaaagaaacttatcgatatttagttctaccaatacatgtctgagttgtccagtgttgaaaaacttatcgataaa

SEQ ID NO: 88768 - DNA, 395 bp, Glycine max
tcaagcttccacattcaatttcatgttatgatgaggaaccttgttaatgcaacattgatcatgcacctcaggctccatttgttcaagaatgttaattatgtgctggatctgaggtttgttttcaggtgaaggagtataactagtagcagaagtcattgaaatttgaaacacaactttttcttccctgagagtaagagaaaaaaaaatacataaatcacttgcaataatacattgaaacagaactaatagctacactttcaaggttttaaattgtagtcacaattaaaaaaaaaattgcagataaatatgatcaatgcagctacaattgctattacttcgtggttgccaaaacctccaaaacctttaacttgtttttaaaaccttggctgagaaaa

SEQ ID NO: 88769 - DNA, 513 bp, Glycine max
  unsure (1)..(513): unsure at all n locations
cactcaagctccacgtattacactcaagccgagctcaagcctagtaacgctnggcttattttcacccctacttggagatatganaatgatggattaatagagaaaaaagatccaaaacatatcanacaggaagaatctgttatcacttatctntattataataaaaatatattgaaatatctgtaataatatttatttaacaattatntctggcttagatgataagaaatgatatctttattacttatgactngtagatatgaaaatgatagattaaaagagacaaagatcacaaaaatatcanaaagaaatttctttattattcatcacttatctttatttatattaatctttcattgttcttatcttatcttctttatctntatcatcttttaatttaaatcttttatatttatctttaaatctttctatttctatctaatatatanttctttatctattatgttaaaagagcagtttaaagtgaaatagacaaaatcaaatataatataa

SEQ ID NO: 88770 - DNA, 390 bp, Glycine max
ctgcaactcattggctgtaaaggtttaccatcggtctttttaaagccttgatatgaaatgaacctttagacaggttaatatgttaggccaaacctaaaaaatgttttgtaactatttaataggtcaggctttggccaaaatattataaagcaggttaggccaggcctaacttggtctggcctatttctaccacaatttctgtcacaaaagggaattgcattctatccttttcggatggtaatttctcataactcatatcagaactggtaatccattagtttgggttttgtgacattggattaactttcacaattcatgatttgtgctgatggagattaattttctttcctagcattataaaatagtcatgaatgcaattttaaaaaaaat

SEQ ID NO: 88771 - DNA, 490 bp, Glycine max
  unsure (1)..(490): unsure at all n locations
ttatcctgtcttcgggtacaaagtacaaataattcacacttgattcatattagtcacgtattgtcttgtcttgctgaagtctagctaggcctagagatgaaatcacatcacatgttaacgaatntattttcctattgagcacgacaaatttgtttacatactgctttgctcactctagtaatattctaatacttccctttacttctccctagcatgttaggacgatattatctctaacttgaaccctcttctgtcttggacagttacaaaatatgcctcataccattacagctaanattataaattttcaaacttatattaaatagtaggtgtaatggagaacatgaattatagaaccaagcatcctgctaagacaacccacgcttggatgaagaggtgccctgtacttatggagcccaagtgtttatgagtgatgattgatgagtcaaatccatagaattaggatcttgtcattgtctctctacataca

SEQ ID NO: 88772 - DNA, 383 bp, Glycine max
tgcacttacactcccgcaagtcgggtgaacagggaacccttaaggttactcacatgacaccctgatcgtgtctcattctactttctcagctacacaaaagaagcaccttattcacatgcagctaattaacactaacacaaacacttgcgatatctatgctcagtttgcggcgtttgggtggaagcatggatcataacagtaacggttctatattaatcatgcggcagctaactacagcagtagagtggatgctacacttgacaagaaacttgagcaaatcgagactactgaggctctagatctcaaaggaaaggtaatgtgaagcatttatgttatcaacggcaagccatcttgtttgagaagatgttacgaacagaggacac

SEQ ID NO: 88773 - DNA, 471 bp, Glycine max
  unsure (1)..(471): unsure at all n locations
aagtgcagatatctgagggtcttcaacttaaaacaatcactctatccatntatcttctgtttataatgctgtatntatctttttgtctgcgatgtgcaacacactgtcatcagataccattggactnttctgggtgagatagggaatacttttccatgagcttggctagctcctcattaaacccttccttcaaactgcaaccttttctcccagtgcctccgcgtcattgcatcaacattgtctttatgagcttgacggagtttctcctcttcagcaacaaagtntttcatttcttntatcttgaaactcaacaaatttagatattcgtccaccctatcatctcaagaaatngaaaattatcataggccaatgaaaaatttaaatagcacgagtgcacaaccaaaacaactggactacagtgtttctataaatgtatatacatctcttctanaatattaatttgtagactat

SEQ ID NO: 88774 - DNA, 315 bp, Glycine max
tcttcttatctatgtaaaatcatggggaattttttaacttttggctgttatttctcttatatatttactcgataaaatagcaatgacatctcgaagttattagtgtttgctagtttgcttgacatgttaaataagtcaattttcagcttattttactagctagcgtataagtttgtcagatcaacttccaatatttaataaataagtttatttcatagactggattacttattgcttatatataacctagctagaagttacttcagatgtgaggtagttaaaaaagagaaagaaacaaagctgattatccctcac

SEQ ID NO: 88775 - DNA, 336 bp, Glycine max
  unsure (1)..(336): unsure at all n locations
atgatcttatatatattagtagacgatagtcatatatctcattttgtctaaaacacttattgattgattattgtnatcaatattgattctatttatgcactatataataaaagagaacatgcgtgtttattaacacacacaattacacaaatcaattttataaagtatgtggaacattaaaaatgaaatcacactacatatttttgaaattcaaacattaatattctatttagaatgagatgatcaaacttgcggttagataaactagatataaacattgattgccaaccactactattgggcgatntagtcctctgaaaagctcaaactaaccga

SEQ ID NO: 88776 - DNA, 377 bp, Glycine max
  unsure (1)..(377): unsure at all n locations
agcttatagagagagctgngtccttgtagaaatggttcctctctgatgcacacgttctgatgataagagagcgcacgttcgataggtatataaagtttttattcaatacacatgagcttatttactgggctgtcactataatgaggttgtgaccataatacaacgacacacagaatggttgagtggtgtgtcttttttaaaacacacgttatttgtagtgtgtgacgatgctttaccttatactatacatttcatgcaactcccccagatacgggggaataagccttgaactatctggtctcctagaatctaagcactgtatctggagatattcataaaagtttatggtgcgagtttgaaaatagaagtcagctcac

SEQ ID NO: 88777 - DNA, 371 bp, Glycine max
agctttatatcctgcaagtgtttttggtctgtgtttgttctgtgcctaccactatcttgactgagcttagcacaattatgtagttctttttggtttcttttagagttgatagatatttaattgctgagttctgttatttttttttcttgtttctcacaacatgtatacatttataaatggttcttgttgaatttggagggagttagaaaggaatagcttgatggatattgcttgtgggtgtagtgctttttcagagcatctatatatatagattcttaatagactaagtgaggattgttttcttgataaagagtaaatggatgctacattctaaatactaactcctatcatgaactgcatgtgattctaat

SEQ ID NO: 88778 - DNA, 391 bp, Glycine max
  unsure (1)..(391): unsure at all n locations
ngagatgaggaagtgttgaagggtgaaacttcctggctctattgttgaccacagagtggtacctggagatatgtcgcgtgggtcaggagaccttgtggacgtcaggtggggtgctattgcccaaaaccaagcttgaccaatcccgacccaacccgggcatagtcggtcagtgagaacctgtgatgtacctaaacaggcgagctcctggcagtcaacagataaaaggaaaacaagaccacaaagcaaggaggcttgtggtggctggccagcttgtgaatttgtgtaatatgtggatggtggcctctggtaatcgattaccaagggtgggtaatcgattacaacgcttaaaattgaggacaggaggctaagatggtctctggtaatcgattac

SEQ ID NO: 88779 - DNA, 372 bp, Glycine max
  unsure (1)..(372): unsure at all n locations
atcttgtttgttanataatccctttatatgtacctactattgtcattttatttaccttgcattgtatagttttcagcatcaagtttagttaaattttgtgttgaaattatcacttatacatgttctctcaacaatgtttcgattctgaacttaattaaggcttacattactttcctatgttcaatactcaaattcatccgatttaattttaaatacttgacgacccggtgcccttttcggtaaaccccgattgaaatttccttgagacataaatgcatgaaagtaacttctatggggggtgatcaaagtatttatggctccgttgccggcgatctaaactattagtagagtttagtttaacttgctaacata

SEQ ID NO: 88780 - DNA, 462 bp, Glycine max
  unsure (1)..(462): unsure at all n locations
tcctcggtgccattcctgcgaatgctaacattcggaaagttagttttagtgggacattactcttaaagcanaaatggcatgtaacctcctcccatacaaacatcaatgtaatattagaacaagcttatgcgcatattttcttacaaacagtctcttgcacaagacatttaaccgagaaaatgcacccatatacaatcaaggcagcttccgcatctagattatttacacgtacctccaaagtgttttggtacttatatcacacacatctccttgctaaatcacatacatgcatactcaaacattntggggaccaaaaattgacatgtgccctcttgcattttaaacctatcatacgccactttatatgaatctgatatcccacaatacggctcattcatgctcttttaagtttgctcctaagcgatgcaatcagcatatttcttgtgactaatgatcaataaa

SEQ ID NO: 88781 - DNA, 465 bp, Glycine max
  unsure (1)..(465): unsure at all n locations
nggagaggatgcttcaatggatgtaaagataaagggagagaatgagaggngggagcacgatattgaaggaagaanaagggagagaagttgaactntgagttgtgtctcacaagactttcattcatcanagttacaacaagtgttacacatgcttctatttatagactaggtagcttccttgagaagctttcttgagaaaacttccttgagaagcttctttgagaaaacttccttgagaagctagagcttagatacacacacccctctcataactaagctcacctncttgagaagcttccttaagaagattcctaaagaagattaagcttagctacacatacatctctaatagctaagctcacctccttgagatgagaagctagagcttagctacacaccctctataatagctaagctcacccncatgancaagaacatgannnatacaaaaaaaagccttactac

SEQ ID NO: 88782 - DNA, 356 bp, Glycine max
agcttatatgtggtatcaagaattaacacagaaacacattcacaccacaatccccaaattttatctttgttgtggtgatggcaaagttcaactccctcttttgaaagaaccacctcctattgctcaagatcttctatatgataacaatgctaatgataccaaaaattttcaacaacatattaggacctataatatgatgtttgcatttacatcactaggggctaagcttgatatatttattaacaatggtgaaggaccaccacccttatggattaaggccactcatgtcaccaatatgagagttgtacctctttctggccaccccaaaattggccacctttcttttttaaacaaaa

SEQ ID NO: 88783 - DNA, 301 bp, Glycine max
gatccttaagtcaccgcggctgcagcttaagttgcttggacaactacatattttgggccaacaaggcatcttgtgatggaagctccaataaactcttattggtaggaatataaactctatcatgcaaaattatgtggtcactggcactcatattttcaattaagtccatggctttttcaagtgtcttcaacttaacttttcctcctacagaagcgccgagtaattgctttgactgcggccataacccatcaatgaaaatgttcaactgtataggctctaaaaaaccatgaatgaatttttc

SEQ ID NO: 88784 - DNA, 397 bp, Glycine max
  unsure (1)..(397): unsure at all n locations
cgtggattatggggtacccatcacatgtggtactatgtggcggtcgggcgatggtgcacaacaagtttttccacatccacaaatcgcgcataaacccaccatcccctgttgcccacctccaactgagctcacgtagcccatatcctcgtttctctcaacaccgagtccccatcaatccttccaagcttccccaacatccaagtaattcaacattcaaacagcacaaactatcacagccaagaaaacagggcaaaggcagaaaactctgcctaaaacaccaaccaaaatcacagcttttcccacttaaaggccccagtaacatttccttcattccaattcgttaaccgttggatcgactcanaagttntactggaagtctctagtacataagcctaca

SEQ ID NO: 88785 - DNA, 336 bp, Glycine max
aaaatctgtacctgtagcaaggggctgtggtttgagctcctctgctgaccaccatactgacccttgcccttccatgcaacaacttggagcaatagagcagcccgaatctaatgctgctaatattgacaatagacctcctcaacctcatcatgagaatccaccacagcagaataagtatgacctctccagcaacagatacaaccctggatggaggaatcaccctaatatcagatggacaagccctcagcaacaacaacagcagcctgcaacttcattccaagatgctgctggcccacgcagaccatacatttctccaccaatccaacatcagcatca

SEQ ID NO: 88786 - DNA, 345 bp, Glycine max
  unsure (1)..(345): unsure at all n locations
taaaataaatcagcaaataccatgacaaggtattaattgcactcatgagttaaaccttcgaatgtgagaaatataagaaaatggagaaagaataactcttaactttctttaaaaaaatggattggaagcaaccaaccctttcagaagcattagttaatttccttgttatattaattcaggagatttcaacctatttcgttcaaaggtcgacacatcatacatatcattatacataattaacaaacaaaatgtaggagaaagaaatcaaatcaaacccaatccaatgttngcacattagaaaaaaagagattaacgtatgatcaaggaggagcatacctcctccta

SEQ ID NO: 88787 - DNA, 325 bp, Glycine max
atcgaatgatacgagctgataggaccattttattaggactagtgagagaggtcttatacattataccacaatgataaaacactaataacaggaaataacaagttatgatataaaaagaatagtattttcagtaaccatccggagatctcgtttatgctaattgaaattctgatggcagattgaaatcaacgctctcttccaaggtcctttgaaccttcatcccaaatttataacctttataatatatatcttgttgttgtgatgaatatgggatgtcttgtaattaagttattatagctcgacttatactacagtgggaaccatt

SEQ ID NO: 88788 - DNA, 391 bp, Glycine max
agcttaacctcactcgcctcaccttttccttgctccaacgttgtaaacttcccctcggtatccttactctcatcgaacaacaacagcgacacgtccccttcctggtactgaatcgccaacttctcgttcggattcctcgctctcaacgaaacctcatactgcgccgccgccccctgcgagttcttgttgttcctattcaccgccacatgggagacagtaaacttgggacccgcggggctgaaaataaagtacaacgtggccaacgtgatgccaaccacggcaacgattgtggcaaccacgagagcgaaggctatcaagacacgacggttgcaacagcaacaacaaccgccgcgtctttttttcgcggtggccgggttgcggtactgttcca

SEQ ID NO: 88789 - DNA, 177 bp, Glycine max
  unsure (1)..(177): unsure at all n locations
tatataacaaatntctattttgtgtatggctcgctgaatgtttaagttcggtgataaatatgattcttaccatcttgatcaagggaatcgtttcctggactaacatgcactaatctacgtggtatccttcaattcatgagggctgaattttcatttgcgtaatggataaataatggt

SEQ ID NO: 88790 - DNA, 391 bp, Glycine max
agctcatgatacttgttaatgttttcttactaattgaggttatttgattgttgtattaatttcttttataataaactcatccctcgcaatttttgtaccgtgtggttggtacctgtgatgatcgcgaactcttgttcatgggagcagaatgacagcagtagagtatgataagtgagattcttttgtggagccaccgagccgacatgatgacgttgagattattttaggagagagttgtgttttgttaatcaactcctccatagctagttccataattcttttgttgaatcgaggatgtaaatcacaattttaattatatgtatgaacaaatttattttccattatgtgaatgatgtgtactgagttactatacctatatatatatatatat

SEQ ID NO: 88791 - DNA, 441 bp, Glycine max
  unsure (1)..(441): unsure at all n locations
cactcagctcacctattctncaattcactttcnacctaganacccattgattgagggggtgtggacacctatattctgtgttgctgtgctgtaaagcttggatttgggttagacatgattgataccatgattgggacttgtaggaattgatttgggcaagaatggatgagaggatgtgtgattttcgaaatctgcacttatgcnagaatttgctgtcaaaataggtgcagcaggatnntggctttgtgcanaanaatgctngtgtgtggttggctgtggaaagtctagtgcagaatgagttctggatgtttgctagtagatcccaacggtcacaatgtaggcttatgtactatagacttccagtaaaattttggagtcgatccaacggttaacgaatnggatcgaaggaattgttactggggtctntaagtgagaaaagct

SEQ ID NO: 88792 - DNA, 355 bp, Glycine max
agcttcacacaagtgacacagcttcattcctcatagggcacaattcatagccatactcgtactatctgtaatgatcttttagaccctatttgaaagtctacatcaaccactgatcttccacaaaccggtaaatggtatctctctctctccgactcatttccgagaagcctcagactcacagatctgtgttatatctggcttcgttcgatcagcattttccatccgctaaacgttttctggatctgagaatgattgcatggtcgactttggtattgaattctcgcgtgcgtagcgttcgaacgaacatgtcatgtgcgaatagtcaattgatggcgagcgaatagggtatcgcatt

SEQ ID NO: 88793 - DNA, 470 bp, Glycine max
  unsure (1)..(470): unsure at all n locations
atgtgatacaacactctataatgcctgcattacctttcacttacccttgtctcnaatttggtgtggtattgaccatcactcanaatgactntttattcatcctccaattcgcaggatgacaagatgtgaatgcatgcatgcttatgatttggatgtttaagtgcaacaattaagcaggtgttatcgtgttcaattatactaacacgcttacggcacccagttgatcgggccaaatggcttcgaattcagtaggcaagatcgagagtgtatgtttttaagaagtaaaagacacaagataggaggttaagatgcaaatcattaatccacctttattaattgttgcgaccatgtgttacanagggatttaagactntggagatcccaatgagtccttggagaacaatcatgtattgaaccttctaactgccctangtgtatgcataatatcgttngacgatatcaaaattcat

SEQ ID NO: 88794 - DNA, 336 bp, Glycine max
  unsure (1)..(336): unsure at all n locations
acctgcagcatgcatttatttactcatatgagacttcttggtgngttatactttttggtgggaataatcaatatgaaaatatataaaaggtatgttttattgcgttacttttcttaattcttcaaatagtgatcaaggggttcccatgggctaagtatgagcccacttatctttgtaaatattagaataggtttttccttcgtctgggccttgtattttggccattctattgagtagtctttgtagtaaggactttttttttgaatttacatgtttttttggcatggggcgagctttgctattatagggggtgtgtagctaagctctagcttctca

SEQ ID NO: 88795 - DNA, 424 bp, Glycine max
  unsure (1)..(424): unsure at all n locations
tactcagctntgtatgctaatatgaggaagactatcataagtagagatgtcgttttcacagagaatgagaatgggattggggaccacacgatggaaactaaaccttctttgcgtgttccaaagaagatggcatagagcaatcaaggataaaccaagcaagataggagcctactaccctaccaatctcaccaatttcaaattctcaagaagaaaaaagctcaagtgaaagagttccacacttcaagagcttacaagatatntataaggtaactggaaaatcaaaataatctatgttcttttgtctaattgttgattgggagcctatgagcttccatcaagccattgagaacaagaattgaaaaaatgctaaggatgaagaaataagtcaatcaagaagaatgaccgtgggagctagatcacttcc

SEQ ID NO: 88796 - DNA, 381 bp, Glycine max
catgcattctttctagtttggatcatttgccggcgaaccactgtattcctcaccaccagaaaatgaaaatggagcagctgtatgttccattgaggaacgcacatggatatttaagacagtaacagccacaacaccaacggcaataaaagcagctgctccaatagcaataagagcagagatacttagtatgatcttatgccgatggttctgcaaggaaatgctggagttggaaccagaagagttggggtttagaacaataggtttgggatgaacagaaggacaggagtggttgacaacggaaccacacaacaatgggttaccggagacggatgagaaggagatggtgttgaagaagcctcccacaggtagttcaccttcaag

SEQ ID NO: 88797 - DNA, 385 bp, Glycine max
  unsure (1)..(385): unsure at all n locations
gatctggaggacatgtttagagcttcatctgaagttcttgggaagggaagttgtggaacaacatacaaagccatcttggaggatggaacaacagtggttgtgaagagttaatagaagtggcaatgggganaaaagagtttgaacagcaaatggagattgtccagagacttgatcatcatcaaaatgtgattccccttcgtgctactactattccaaagatganaaactaatggtttatgactactcaacnagccggcagtttttcaagctatttgatggtaattactctttgagctcttccctgattactcacagttcaaggctgacaatgtcatatagctttcttttcttattatagatatcagaacaacatagactactactc

SEQ ID NO: 88798 - DNA, 402 bp, Glycine max
gggatcctctgagtctgcctgtggcatgcgatttttttgtgatgaatcatattgtttcgagaggtttgatgatgacatagatgatgacatacatcccaatgaatgatctcaagaggtagttcccgagcatgattaatttcctgtttcatctggaagattcaagattcaagattaatcatgatcaagattcaagactcgaggattcaagaatcacgagaagacttaatcaagattagtattaaaaaaagtttcgaaacattgagtagcacatgaagtttttcacacaatcattaccagagagatttactctgtggaaaacgattaccaaattatgtatgtcgattaccagtggttttaaaacggtaagatttttataatctgagaatgaaaatctcatttgtg

SEQ ID NO: 88799 - DNA, 359 bp, Glycine max
tcataatctgaatggcaagtcttattggactccattgttggtcatgactaactgaaagaccttatgctgatatgacaaacaatgggaaacaagaaacatcttgctactctaaagtgccaatgccaatagtgtcaaccatcaataatatacaatgctggaatgcatttgttcttcattaagaaagtgatactgaaatgcacatctaatgaacttcttgacgggacagtatattcatggccaaatataggatgaaacatggtttggaatatttggtgcatcctgagcagtaagttagtcatgatgtatttggtgtttgatagacatacctcaaacaacagtacgacttcactcttatttgt

SEQ ID NO: 88800 - DNA, 368 bp, Glycine max
agctttagccatttagagcaattatgaaattaagtatttgtccgagatataatgttgtcacatgagctatacttatgggatgagttatataagtatactactaattactcatactacatcttaattaataaaaagattgcagtgcttattaaataattattagaaagatatatgaagagattaaataataagatgtattaggatttattgatggaagtatataaataagaaaatacaacgaaattcattcagcatcgctattttttttttcaaatttagaagtatgaaacgaaattaatcttttttgcgatctacagtaaaaatctttaaaagattgaagtgttcttttatttaagacgcttcatttt

SEQ ID NO: 88801 - DNA, 453 bp, Glycine max
  unsure (1)..(453): unsure at all n locations
gagaactaaggatatgatgaggagatgtgaccttaatccatctaaagaattatgtattggaaaatggatgtngaatttagtattctgatgtgagttcattgttacgtgtctggggatacatgaggaatgatattttatgaagtccaacctcgacaacatttgccattgattnttaatcatttcatctcataccatgtgtttgataaaaaatcctaaatagtttatttcaacctttgttcttgaatatttagttttactaaattctctctagttaatgttacttttcaactgcattttatacttgcccttaaacctttgttagcaaaatgtgtcanatgcacttaatattatgcaagtccctatggatacaatctctaaatattcatcggtacttgtatgatttggttcccttccanatattatgaacaagttctcggcatcattgtcgtggac

SEQ ID NO: 88802 - DNA, 505 bp, Glycine max
  unsure (1)..(505): unsure at all n locations
tactcaagctaacatgtagagatggaacacatcatcgaaagtatcccanaatgtatgtgttcggntctgtaagttaaggagggtgaagtataacttctcaatggttcttttgaaaaattgcatttgcaggtgcaagaaagaaaaggactacctatataagcatgaagtttagccgcttcaagaagctgggactnggctntgatatgcttatgaaggatagggacacaggctagtaaactagtgtcgagcaagagtaatgttataaactattgtgcagattatcttcatgtattcattatgaatagaaagggttcaatccttagtgacaccctgatattcgaatatttgaaacgtgtaatttgctaagatgaaattcaatcgtcacgatatttcatctatgcagtagtttggtgtatgttatgactntggtgatttgatcggtaattacactanaatggnggaggttnngttggacatttaatgtaattgatctctttattatgtt

SEQ ID NO: 88803 - DNA, 298 bp, Glycine max
  unsure (1)..(298): unsure at all n locations
agctttagcttctatangaatcttgtaagagaagctcttcaaggacgcgagcttacctatgaaaggggtatcaccaccttatctacaacttactaacgaatgtctttccaagaagcttctaaggaagtattcttacgaaatcttatcaaggaagcaaccatacttataatattaacatgatgacacctaaccgtgcctattacaaaatcaacccttttgagacacaccgaatgatacagcacctcactctttgtgtaacaaagatttcgtgcgaccccctgtgtgttatgtaacctta

SEQ ID NO: 88804 - DNA, 373 bp, Glycine max
ttaatcatcttgcttggatgaatgagataaactggtgccaatgaagagggtgaggatgagcgagaaacccatgctatggctgccattcctatactgccaagtttcccaccaacccaacaatgtcattactcatccaataacaaaccttcttcttacccaccacccagttattcacaaaggccatacctagatcaaccacaaaacccaccttccacaccaccaatgctaaacaccacctttagcatgaaccaaaacaccaaccaaggaaggaattttgcagctaaaagcctgtagaatcacccccaatctggtggcctatgctaacttgcttcattatctacttgatactgcaatggtagccataaccccttct

SEQ ID NO: 88805 - DNA, 255 bp, Glycine max
  unsure (1)..(255): unsure at all n locations
agcttatcttatacagtagtaatagcggattanaattccatatatgaaacccaaatgactagttatattctcaagtaattaattttgcaaaaactaagcaatttgctagtatttaatcaaaatgagagttgtttgttgttcaattgttcttttacgaaaataagaatcaaagccaaaagattggtctgaaaataataattatgaagtagtctaagaatgtgacttgcatgtatcatttcctcaatttccaattcc

SEQ ID NO: 88806 - DNA, 381 bp, Glycine max
  unsure (1)..(381): unsure at all n locations
cgagaagaaacacatgtttgtcatcatcaaatttggggagaatgtgaatgatgtatacattgatttgatgatgtcaaaaaagaatctaacaaggctgcttcaaatgaatagcatttgcttcaagaataattcaagattggcttcacaaacaaagcccttgttcaagattcactanagaccaagcttgccttaaaacaaagtgctttcaagacatgcaaggctctggtaatcgattacccggaagtgtaatcgataccagaaacagggttgaaaatactgtgaaaagtttgaattaatttcacatgtatcgttaccatatgtctgtatcgataccacacaaacttggaatcaatcaaggctaccttcaatatactggtatca

SEQ ID NO: 88807 - DNA, 396 bp, Glycine max
agctcgccacccagctcgcccagtcgagcaagggtgcttcctccagaagcaacagccttctggaggaatcttctggagggcccaagtgggcctggtttctatttgcacccccatttttactaaatacaccccctgcctttttttggtgattcttttttcgtaaagttacggaaacttacgaatttcgtaacgatacttattttctttccgtaatgttacggaaccttgcggattacataatcatcccctttttgacttacggaatgttacggaacctcactatttgtgcaacgatgcttccttttgatttccggtgtgtcatggaaccttacggattgtgcatcaatattttcttttgatttctggcacgtcacggaatttcacaaattgcctaat

SEQ ID NO: 88808 - DNA, 431 bp, Glycine max
  unsure (1)..(431): unsure at all n locations
tagcatatcttgtgaattgctntattgcatccagcagaggtatgtttacctctactcttctaaatgtttccaagatctccttctcttgcctcttccatttttgttggaaattgctcttggagggaatggaagagggatatgctgctgctgtaagtcagaattaccagtaaaagattcacctacatagaaatttttaggcaacttactctttaaattttgtcatcatcttttctaaagagagtgaattggcaggttcatttcggataggaagatctactggtgaggccttgatctgttctcacctcatgtatgacactacattttgggatctggataaatgaaagcacttgcaaagttggatgagctggtcactgggggcatctgccatctgattgtaactctgattgggcttatctctactaactgatgtc

SEQ ID NO: 88809 - DNA, 389 bp, Glycine max
atagtattacaaatctctttatatgttgccaagtgtgagtatggatcttcatttggtaaaccacgacaaattgctctatattagttgtatcagtgaaggtgggtaagttaagttttgtgcctgaacctttggccgcacaacacttgtgaaatattacggcaccaaagtacttgagtaatcttccaaagttactcgtcgaggtttctcttcagccattacttcggcttcaaattctgctgtttgagaagatgatgactcaaaaaagagagcctctttaaggattaatgctactgttatatcatgcaaaagctttctttttcgctctacgttgtttcttctaaaggtggcttcaatttctaaatccaatggaaccaattcacttgcagaag

SEQ ID NO: 88810 - DNA, 439 bp, Glycine max
  unsure (1)..(439): unsure at all n locations
accttctcttccattgttgtttcttcattttttctccatgtatctcctcacatgtcttgtgataaatgtttttaacatgattctttagagtttccaccgattaaacttgctatagaagctagatttgattttctatggttcaaatttcttgttcttgttcgtgaaccatgaattttgtggagttaggggtccttgagtattgtctttgtattttttgtggctganacctaaaacataaaattcttacaaaaatattaaagtagaagaaaacctcanaaatctagagtgacttgttcacctattngtagtttgtcatagaagtcatgtctagtcatgaaacttgtcacataagatttcttatgttgngctaannatttatttcttgcttctttgctaactcatttgtcatgagtgtatgaaaaatctttagcctattatt

SEQ ID NO: 88811 - DNA, 320 bp, Glycine max
gtgtaaaacaatcgctgttaccgcgaatgcattaacagatagtgaaaactttcaggtaagaaacgtaataaacttttttagtcgctattcaatgttaccgataacgcatatgaactcacttacgtggagcctgttatagaatcacgaaagctgaatcttgaagcctgaacataacactagactcttgagttattcctgacacaaattaagaaatggatgtcaagggactcatatatatcatacttgctgatagtgaaacaccatgaataacccacaacttattaaaatgaatcaatcttaaaccacaaccatgatccaat

SEQ ID NO: 88812 - DNA, 393 bp, Glycine max
agctcgctggcaattcctttaagttataaagtgacatggttctgcttattgtttaagagaggaggaggggagggagaggtctgtgtacacgtgagttctaatccttctcactaacaaaagctaacaaattaacaactaacattgtcctttaaagaaaagtttaacatgagaagggattattacatggataacaacaaattaggaggatagtggataaaaatgatataaatataactaacaaaactgttgtggacttatggttcaggtaggtgcacataagcatataattacactacatctcccagattatccaacaaaaataaatgcagaaacaattgagcaagagttctgaaggcaatacagtagttttaggttggtcatggcagtgacact

SEQ ID NO: 88813 - DNA, 391 bp, Glycine max
  unsure (1)..(391): unsure at all n locations
tgtctggctcataaggcttgcanatggaagataataatgtatattgngacgaactattggccaatggcttataaagaaggaatgcccagatcacttccatgaatcacatgctatgacaattagaaattcatgcaaaatcaattgtagaacatatccatgcagacactcaatataaaatttgtggtcacgcaatcactaaggcttanggtctgtttccacattcagattanatcagtgtttcaacatctgttcttttattaggtccatgcaaaacatctgagtccatntggcattcaggagagcctttcattatcgttatcctcaagatacacattttttccttttcttttttttcttttaaanaaccatttgttgtgttctaacctacaaa

SEQ ID NO: 88814 - DNA, 289 bp, Glycine max
atctctcacctatggcttggttttttgtgaagaataatgctctggactgggaaactccaatacggtgtggcctttgaccgaaactcattgatgacactactggttatgtggactactctatcgatttggattgatactgattcagaagactaaaaaattgtggcttccactatattcttctgcatattacttttctggatacaaatgaccttatttcctttggatcagctcacgaatgtagctataaacactttttatatcccatgctggaactgagagttgttcttct

SEQ ID NO: 88815 - DNA, 364 bp, Glycine max
aagtcctgatagaactggccaatagcatattgtactcgtcgccgtgctctcttgacatactctctaataatctgcaagaaaccctgcacgacctctacactgtcataaagtctcagcctcggcttttcttaagcacctccaacgacagtctagacactgacatattggccatagccgcagctcacgcagcatgactaagaaaccacaggaatggctcactatcaagtgttaaaatagacacttcaaccttgcagagtgcaaagacaatgctctgaatagccaaggaagcgtcgaacgaaagatgttggacaccagctgtgtatatcgcaatactagccttgagtactctaagccttgcctattg

SEQ ID NO: 88816 - DNA, 377 bp, Glycine max
agcatgcatttttacttgtgacttcctgttgagaaacctaccatcacgtaagggacgtaattacgttataaatgcagcctggacatgaaaatatgcccttaagataactggcagaagaggggttagtcttgactcaagctgtcactagaaaatcttgcagaacattaaaagagacagacatcctctaaaatggaaatgtgatttgatagaattttcttggcaggaactttttctgaccagttatagatctatctatcacctatttatggccaaatgacttacatgacctcgtataacatgaagtatttgatggaccctgacgcacatgaaatgttatattcacacatggataaaacaaaatggagcatcttgtgcta

SEQ ID NO: 88817 - DNA, 378 bp, Glycine max
  unsure (1)..(378): unsure at all n locations
atctttataccacattatataactttntacacagggactctaaatataaaattaataaacaagactctttntaccgtataaattcaatttaagagaatttgcattcctcatgcgttcgcagcctgttctgttccaatcaatagctatattttgtttcataactttagatatgcaattgaaaattaatagaataaggtctattgcatttaaatgaaataaaataagtctcaattgaaatantagaattttactgggtctcaagagttttgcatttgcctttcgtaaaaattgatcaattttgcagaactaaaatgttgacagattttggtaatattcttgcaacctttttaattcatctacttaagggaattgggacct

SEQ ID NO: 88818 - DNA, 257 bp, Glycine max
  unsure (1)..(257): unsure at all n locations
tatataccanaatacatngaatgactaatgcattaatagacttcttaattgaccatgctaaccatgttcctatattcaaaaaaactgattgtcatttaatcttccctcacaaaaaatgttaaaatggtgtagtttctatatatacttttaatcttgcctcttaaattatatataaatcaaattaagaggtattctgtccatttattcaaatcctcatatttctaaaactgtactataatagctaaatatgataagca

SEQ ID NO: 88819 - DNA, 373 bp, Glycine max
agttttttgaaaacaatctttgttactggtgatcgattaccagagaaggaaaactctttggtaaaagctcttatgaaatcttcatgtgctactcaatgctttgaaaaacgtttttgtacttatcttgattgagccttttcttgattcttgaaacttgagtcttgaatcttgaacttgattcttgattcttgagttattcttgactcaatcttgaaatcattctcatgggctttttatcatcatctttgttatcatcaaaacaccttgaatcaatcttgattcatcatcatgaatcaatcttgattcatcaacatgaagcaataaagcttgcttctacagaaggttcccaacgaaacactcactatcctaaggg

SEQ ID NO: 88820 - DNA, 476 bp, Glycine max
  unsure (1)..(476): unsure at all n locations
tccacaacatccaagaaattaaacatccaaatatcatgaactatctctaaacaagataacagggcagaggtagaaaactctgtccaaaacacaaccaataccacaacttttcttactcaaatacctcagtaacattatcttcgttccaatttattcaccgttggatcgactcgaaacttttactggaggtccctagtacataaatctacattttgaccgttgggatctgctagaaaacgttcagaaccgaatatgtacaaccctntccacaaccagccatgcataagcattntctgcacaaacacaatagcanaattctgcataatagtgcagatnttcgaaatcactctagccttcatcccaatttgcccaaattggatccctacagtcctaaatcaagtataaatcatacctaaaccaaagacaagcttcagaccaaagcaattcanaatctatgtatctaaaacccctcaatt

SEQ ID NO: 88821 - DNA, 369 bp, Glycine max
atcttgaggaatcacaagaaatttcttgagatgttgctatcaccgatggatacacatgggagcccacctataggtattttgtgagtttatcgcaattggggctagaataaacatgtgtagggatccttataggattaaattgggatttatttatgggatgtttatcgaattatacatctttcctttatgattataaatacaatattgatcttctgatgcacattgctggataaaactgagtgttattggtgtttccactatttatacctatactctgcattaattgattttgatataattgtgttaaattattcgaggggttatactgcctaaattcggaataaccttttgaagcaatcgtatattgac

SEQ ID NO: 88822 - DNA, 448 bp, Glycine max
  unsure (1)..(448): unsure at all n locations
atgtgcaccatanatngcattaggaanagtaaatgagtcattaagaatcatccttctatttaatccatataaactaacatgatatagccacctcacaataaatatatcagccaatgttaaatntctacaaaccttaaattggtaactntgaaagatagcaactattgtagtcatgtatattgaaaataaaggtctaccatagtaaaaaatgtataaatattcacaaaaaatataaatgaaatccacaggagttaaggtaaaacagaacacacatccatagagttcttaatgaanatgatgaggtttttgtcttggtgttagaggctccgaagtgtccgaccagaaggagacaaaataaccaatcaattgaatgtgcanaacatgaaagaatngaaccgaagtcatattcctcanacaaaaaactaaatataagaaaagtatacccacc

SEQ ID NO: 88823 - DNA, 508 bp, Glycine max
  unsure (1)..(508): unsure at all n locations
ctatacagacgtagttaaccttcttggtntgtgctntattcatgctcttcaccaaaagaacacnaggcttgaatttattaattaaaaacttaattgctaaatctaaacttttctttttcttttttaaattcatttgtgcacaattctttcaagaatcacaatgacacantttttagacttcaatttatttatattatatatatttgtgctataataaagggaaagtaattagttataatattactctatctaaaatactattatttctattttttatccataggaatataactataagaattacaataactcagatcctattcaacaaccagaattagactggttgtaaatatattattatgttaagcaaatatatctntaaaataaataaaaattaaaattattgtaacaatggtttatatattggcttaacctttactatatntatttaatttattgaacctttgtaatatgattacgcttcatttttacttatatttataattta

SEQ ID NO: 88824 - DNA, 244 bp, Glycine max
agcttcttagtttcagatgatgcatatgggcttgtagctacctcatgcactcctctaatgactatggcatcatttctggcgctaaactgttgggagttggaagccatcttctcaattaaatttctggcttcagcaagagtcatgtcttcaagggctccaccactggcagcatctatcatacttctctccatattgttgagtccttcataaagatattaaagaagaagctgctcccaaatctgat

SEQ ID NO: 88825 - DNA, 337 bp, Glycine max
cccacccggacctaatcacccggctcaacttcttcatacctttagcggttttgacaaccagtccatatgttttttctccacgtgttataaaaaactatatttaagacggcactcttgaaacgcggggtgtgtcgataaccaccagacgattgaacgaattgatacctaccgcaggcgtttaatgaaaacatcaatgttaaaagttcccagttgaaaacacggtctgtaaaaaaaacactgtattaatctaaactctagggatggctgaccttaaaataattttgatggggattagtaatttaaagcaacctgtctcgcctaatgtaaaccattttct

SEQ ID NO: 88826 - DNA, 393 bp, Glycine max
  unsure (1)..(393): unsure at all n locations
tgtgcctgctgcaatttaatggagatgagaaatgatgcttatgatgggcaaaaatgacttcaacattctaagattatctgccttgggcttgatgtangatatgccatagatagtgaactgccttggtttcatgggcttgatgtttgcctatttagaaatggataatcttgcaaaccaattggagatagtcaagactcttactcaagatcttgaagaatggcttgagtttctatttaggcgtgtgataatgattggacttgcctttctaatcccttaaacactaacaagtaccctaaataactcactgccctcaataccacatatactactctgttcacttcaaaattaataaaaaaaaataatctctacaagacatatgcacatttgatatta

SEQ ID NO: 88827 - DNA, 378 bp, Glycine max
acctcgccctgcaccctctttttgtggcactgcatctttttgtagtgatgtttttgaagacaataaactcttgggcttatatcataaaccttcaactagaaagcaactatgcttttgtataatttttaatattaaaagaaacgatgctagaatctcttgaaaattttctgttacatgcattcttgtgatgcataccatcctaaatattatatatgtaacatttaatctacgcataatcataatcattcaattctagattatgtaatctaccaagatacaatcgcctaaagagaggaatgagagattactgaatttaccaaagaattctgcttaatgagaggaaagagctatcagttcttttaactctcactttcttat

SEQ ID NO: 88828 - DNA, 387 bp, Glycine max
  unsure (1)..(387): unsure at all n locations
aacagcttagtatanaatattcgatagatgaacttataatatataacccatttatcattcattttctctcttctttttgaaaaattaaagtatcaatccatggcagcagacaaatagcttatgtgaccttaacctcccctactagaggaaaacttgaaacagtgaaaaagcactcatgttagcgagatatctacaaagaaaaaatcaatccaatactcatgcacatttaataagataaaaaataagtccactaaaagccatgttgcagtttaccaccttattgtttgttaatatcttcttacaaataacatagcaaccattggaaacaagttaaacctgctggatctgatttatatggttattcatgccacttactttcatatatac

SEQ ID NO: 88829 - DNA, 300 bp, Glycine max
catcaactttgatagtcaaccttctttttctagtggatagtcaaattcttctaaatgtaacctttgaaggaatatttgaatgaggaggggaccttgggggagttgccatgtatctttgcaaataaaacaagttgagttacgacatattgagttatatcaacaacgtataaacatttagtgttaaatatccaaatacattaatgcattacaactatgggatttgtcatattatcattaacttttgtactttatcacagctcactctattgacatatttctctccatatatactctcattca

SEQ ID NO: 88830 - DNA, 407 bp, Glycine max
  unsure (1)..(407): unsure at all n locations
gcccctttatagtgtatattgtnngcttattagtagatgaaagttgagcacgtgaaatctatgaactcaatgtttcgtcgtcacatccctgaggtgtctctgcacatagggattgctatgtaaaagatgaagtaatattcgagtgattaaaagatagcattggtgctgcttgaaaatgcgataatgcccacaactattatccttatattgaatgataaaaatttcacttacttgctcatattgcggaggaccatcggaatcatagagaggataatggaccttgcttgatgcccacatcatatatacaggaacatctcgtagacaacataatcaaatgagcttatctatattatttatgtttggcatcgagtgttggatatccacaaccccgcatatatatacctcat

SEQ ID NO: 88831 - DNA, 392 bp, Glycine max
tgggcctgtaagcttctgaatgatgttggcaatttgtgccacgatgatatgactaaggatattttgacattgcctacgctccgggcccataaaattcacatcttgagcaggagtgagaaggtatggttagatagtgatttgcatgactacccttttggacccgaagtgactgaatcatgagatttcacacaggcgatacatttgtaatctcttataaaaatacagatgtcttaagttacggttgatttatcaatctctaacaattacactgtgttatgttaaactttaatgatgttttaatttacaacacacttgttaacataagattaattcaatgcctgactaaacacgtgagagttaactccttagcgtatagcctgcacgcgaaataa

SEQ ID NO: 88832 - DNA, 399 bp, Glycine max
  unsure (1)..(399): unsure at all n locations
ttgtattgattatttgttgtgtgacattgaanagattattgataaataatgagtaatcatcgatagttttgtgacatataagaaaaacatatttgtgtatatattattttgaaataagacgttatgtgttttgatatattattcatgtaatttaacatattaaaacatccataaaaaaatattttgtattaagattattgggtatagttgtagatgagttttacttgcgtgtgatcgatcctcgtttaatttagtcgggtctccacacttgattttacgtcggcataatcttaacacttatattatgactatgaaattaattattaatataatccaatatacatattatgtattttaattaatattattaatgcatcatcatcatatcttctaaaaaac

SEQ ID NO: 88833 - DNA, 371 bp, Glycine max
actgtaggcatgcatctttaacagacccagacacttatctgagttgggactttcctaagcacctcctataaccacgtcacttgaagaatggcgacttaacggataggtattatacacaatcagtcattggttatcaatgtccattaaagtgtaatccattacacgtcaatagatgtgactctacatttcgaacttggaaacgtataatgtgtagcatcactggtaatctattacatgcattgtgtcatcgattacacaagttggaaatggttacacacaagttgaaactcttgcaattagacatcttagcattgtacaacactggtgatcgataactacctcttggaaccgattaccatagagttaaactc

SEQ ID NO: 88834 - DNA, 437 bp, Glycine max
  unsure (1)..(437): unsure at all n locations
aaactatcttggacttatagggggattgtcgacccttaagggcaatactttggtgctggtcgtcgtggacaggttctctaaaggaatccatntgggttcgctcccttcacatcacacaacattcaatgttgctcatctntntatggagatcgtgggaaaacttcatgggatcccccacagtttagtctccggtcgagacccattattcatcagccgcttctggcaagagttgttccgattgagtggctcgaaacttcatatgagttcggcctatcacccgcaatccgacgggcagatngaggtgatgaacagggtgtgtgagcaatatcttcgagcatttgtgcactcccgaccggcgacgtggggaaggtatctcatgtgggccgaatggtcttataatatgtccattcattcacgaacacagatgactccagatg

SEQ ID NO: 88835 - DNA, 379 bp, Glycine max
agcttcgcaggtcactaggagtgtgttcagagtttgatataaactaattgcatatagcatttagtttaagggaggatttgttagtcagcttatggttccatatttgtaggagcagttgtgtttttgaataagtctatcacattattaagaaatagtgggtcatatatgcgtaatatacaagagcagttttcttttgttttcagttttacgattctgatgtaaggctatatattagccaggtttgttttcaataatagagagtgaatttcttcttttacgttttatcttttacctaagttctgtgagactccaacagcaagagtcactttgtagcccactcaaataaatgtgaacattaataggtggatttggacaatac

SEQ ID NO: 88836 - DNA, 493 bp, Glycine max
  unsure (1)..(493): unsure at all n locations
tcgccttttaacccanatagtgaaatatgacaatgattaataaataatactttattattaaanattagaattgattacatgatgactnggatcgtgngcatacaaatntatttcccaacaatctccacttgcctaaagccaatcattcatgaacttcattcctaattcccatttgtgcttgtcaaactctnttatgccaagcgcctangtgaanggatctactgcattcttctttccatctaccttntcaatcttaacgtcaccatgttctattatctctctaatcaagtgataccttcgcanaatatgnttggacttctggtgtgatcttggttcctttgcttgagcaatagccccattattgtcgcacaataatgggaaccgtctctttattgaaggaaccacaccaagttcanatatgaactntntcttccaaatagcttctttagcggcttcactngccgctatatattcttgcttcagtagtgaatct

SEQ ID NO: 88837 - DNA, 272 bp, Glycine max
cacctctgctattgttcaatgtacccagagctatgaactttcagtctaagcccctatatcattttggggagattgtgttaccattgcaacacttcccataaacagaactccttcacaactactgaaacaaaactcaccctccaatattttgttaagaagaaacccagattatcatgcctcgaggagattaggttgttaggtcttgcttccactttaccatcattaagaacaagttctcacctagagtagtaccttgcatatttgtggctatc

SEQ ID NO: 88838 - DNA, 346 bp, Glycine max
  unsure (1)..(346): unsure at all n locations
ttctctttgctgggataattaaaccgaatacatactatcttatagttgtgatcttgtggtagtgcttcttcttatgcaatggacaatcataaagataaacttattattaacatcttcctaatctaatgtctgaagaaatatcaacatgtcacaatgtctggtctttttttataacaagaaacaagttcttttctctaaaagaaaacagcaataaaggtgcggtctgcactataactttgtttttataaaanaacaacactctcagtagtatttgcttatattcttaaaacagcttaacaatcagctatatatattctgttttctaattttaacctgtgataaatat

SEQ ID NO: 88839 - DNA, 399 bp, Glycine max
  unsure (1)..(399): unsure at all n locations
catgcaatattttatgtatcattacanaccgtttatagtacgtaccattactatttattaatgcgtaataatatggntgattacctcactactattatcatggtttgatactttttctacctcaacaaatttttgtgtgaattaactatatgttgtgaatttggaagacaccatctctctaaatatacaatatctcaaagttcttctaatacaatcaactaaaaccataattgaaaaacagcataactaaccccttctttgttatatgtccccatacaagagatataagcattgcgcctggcacattatataacaattggatctgagagttccactaccctcgatccatatggcatttgcaatgcaagtcaaattcctttctctaatgaatatttttct

SEQ ID NO: 88840 - DNA, 371 bp, Glycine max
atcttcttagtctcagatgatgcagctgagtttgtagctacctcatgcactcctctaatgactatagcatcatttatggcgctaaactgctgggagttagaagccatcttctcaattaaattcctggcttcagcaggagtcatgtctccaagggctccaccactggcagcatctatcatacttctctccatattactgagtccttcataaaaatattggagaagaagctgctccgaaatctgatggtgagggcaactggcacatagttttttaaatcgctcccagtactcatacaggctctctccactgagttgtctaatacctgaaatatctttcctgatggctatggtcctggaagcaaggaaattttt

SEQ ID NO: 88841 - DNA, 483 bp, Glycine max
  unsure (1)..(483): unsure at all n locations
ctacagaggctggatctttgagcttctatgtggtcctttaatggtgagtttccaccatggagattcagtataagacaaaggaccagacgtgagaggaggcgcaatccatttaggaataagccatggaagaaggagcttcaccaccaagatgagcctcggataagaagctcggagaggatgcttcaatggaggaatacaatgagagagagaaagagagaggcgggagcactacatcgaatgaagatatagagagagaagttgaactntgagttgtgtctcacaagactctcattcatcagagttacaacaattggtacacatgtntctatntatatactangtagctttcttgagaaagtttcttgagagaacttacttgagaagcttctttgagaaaacttccttgagaagctagagcttagctacacacactccactaataactaagctcacctccttgagaaagcttcttgaagatattcc

SEQ ID NO: 88842 - DNA, 375 bp, Glycine max
accttcacggacattttgatgtgcatatgcaagctcatgctaatcaattacacaatacatctccagaaggtaaaactatgtcagaatttttggttcgtctaaaagccttggcaatttttctctcctccattggagatccagtcactcgtcacgaacatctagatgctcttcatggcctaccttgtgattgagtctgttgtaaccctaatcagtagcaaataggttcctcttcaaattcctaaataagttcgctccttctagctcataaagccaggttgaagcattacaacaaacaggttgtggttgactctgcctcaatcaaacatctacatccaacacatcgactaattgattattattgtgcatccatttgaa

SEQ ID NO: 88843 - DNA, 375 bp, Glycine max
  unsure (1)..(375): unsure at all n locations
tcttatccaaggctcatcttggtggtgaagctccttcttccatggcttattccctagtggatggcgcctnctctcacctcttcttctttgtcttccgttgcatctccatggtggaaaatcaccattataggacctcattgaagctcaaagatccaacatccatagaagcccacaagcaagcttccatcaggtttggcttccagcccatttgagacataatcaacagcaaggagaatatatacaaaaccaaaagagacagggaaaggccccataaaatctataccccataatgcttagcatcactcttaattntatcattttgagctttagatgctaagggaggaaaaacagaagcaaccaaataattcacaatat

SEQ ID NO: 88844 - DNA, 379 bp, Glycine max
agctttcttaagaagattcctatagaagctagagcttagctacacatacctctctaatagctaagctcacctccttgagatgagaagctagagcttagctacacaccccctataatagctaagctcacccccatgacaaaaaacatgaaaataaaaaaaagtccttattacaaagacaactcaaaatgccccgaaatacaaggctaaaaccctatactactagaatggccaaaatacaaggcctagatgaaggaaaaacctattctaatatttacaaagataagtgggctcatacttagcccatgggctcgaaatctaccctaaggctcatgagaaccctagggcctttccttggatctctagcccaatctacttggag

SEQ ID NO: 88845 - DNA, 510 bp, Glycine max
  unsure (1)..(510): unsure at all n locations
tctacttatgtggcagggtggacttccttcactntcttgtctcaactgcgagctntgaccactgctcttccttcccgcgatgctcctcttcatatccgcctgagtgggtttatagcctanaccatacttccctcgatttcccttggcatttatcaggctagttatgtcgccgctgtctttgcccaaacccattccgggttcgtaaccgttccccaacataactcgggccatcattactgctgcatcggacaggcaaggctgcccagagaaggagtccacggaggaaatgctcaccacctcanaagactgnaaagcggtttctaatgactcctctgtggcctccacataaggcatataggacgggcagctcactatgatgtcttcctcgccggacacgatgaccaaatgcccctncactacgaatnntcagctttggtggagtgtagaggggaacaactccactgagtggatccacgggcgccccaacagacagctgtatggggggtaata

SEQ ID NO: 88846 - DNA, 280 bp, Glycine max
  unsure (1)..(280): unsure at all n locations
agctttatgatcaaactatnttctcttttttttcgcaattgccttcactctcttccttttgcacgatcgtattgcttcctctactataaaactcgaggctattccattggggaggacctgaaaggctaacacttaaactatcctaggaaccgctcccatcatcgctggaatagagatcatggctaaccataccattatttcagagggcacactttattgctaatactatacccagcnttctggatttggagtgggcttaggcacgagagcgaaagagttt

SEQ ID NO: 88847 - DNA, 477 bp, Glycine max
  unsure (1)..(477): unsure at all n locations
tactctcagtatctcttctaacatatatctntcttcctacacccatactgaccactcctttcacaaccaattaacacanaatgaagtccttcctctactactagtctgtgtcagacctcataatgactgcaacagatccattttcatgagcaactgatcaagcccactgcaaaacatcatctcgggtaccanaaacctacaactcaacccaaaaaaatttagtcttctacaacacattcattntatcaaaacactaacaataatgaacattattacctgagaagttttgaacgcatccgagcaatcaacatgtngttcattcacaccacattcttgttcattttgatcatccatatcaacttcttcatacattatatngtcatacacccattgatcttcgtccatcttaacaacanatcanaaatgtccacatcatatannaatctacatattctnttagtgcacaccattntatac

SEQ ID NO: 88848 - DNA, 241 bp, Glycine max
tcctataacccacctgcggcatgcaagcttggactctggagatcttatgaaactcgcacttaaaaaggtgtgacttttgacataccctactcacacaagtcacttgaagaattgggacttttggaaattgacttttcgaaatcgagcacttcataggcgatcaccctttaggagtaagtcaatacatatcaacagatgggacgcttatttgaaatcttgaacattgaaatggctaaagccc

SEQ ID NO: 88849 - DNA, 396 bp, Glycine max
agcttctcctttcatggcttatcctctagtagatggcgcctcatctcacctcttatcctttatctttcgctgcaactccatggccgaaaatcaccattgaaggaccttattgaagctcaaagacccaaactccatagaagcttcacaagaaagcttccatcaatattatacttagactatcctaaaaaatgatagctttttcaattggaaacccaagattgctaaccagacctttaagtcagatcccatcctttattgcttctattagagcatgcattctacctttgtagtggataaaaccacaatgggctaaagagtttccttcaaactatcaagagagttgccaatgatgaatgcgtaccttgtcatagttctccttgcatccaaatctacagc

SEQ ID NO: 88850 - DNA, 432 bp, Glycine max
  unsure (1)..(432): unsure at all n locations
tctatttgatggtatcagcgagactagcaagattgtgtgtttgtaattcttgtctttccaaagcagccaatggggacatcattatacatttagtacattacccacttgtttttttaaattgagtccagatgtggataagaacaaactaacttagtcatctaatgtattgctcttatttaatgcatctaattattagttatcgaattgagaaaacatattttgtttactaacaaatttaagcggattgcatagactgcgtcttaaagtnttacattgtcaatgtcaattataatatcttcgcatgactctcaggagtatattttacaacaactctctattatattagtattggatggagaccttaaactattcctacgggaacatttatttcttagattcccgaaaaaaaaaaacttttttattataaaaatg

SEQ ID NO: 88851 - DNA, 349 bp, Glycine max
ctgttcaaaggtatattcagcacctgtaggatatatgccccaactcctaagatcatctggatcagaccatagaagatcacacatgggtccctcaagaggaactgcttgtacgcgaacagtataacgtatgttatccaaggtttcaatggatggcgacaacccgccatgaagacaaaatatttcaaatgcaacctatgaaagttaacatatcacactttagcaatactcaaatattgaaaatctgaaataccaatgaaatgcattggactgagcagcgtatctcgacgcttaattaaaaagaagagacacatttacactacacacagcttaaaaagaagcatattgaatt

SEQ ID NO: 88852 - DNA, 126 bp, Glycine max
gcattttctccgaaatcctaatgcttctcaaatctaacttaaaaacccagcttcgtttcctctggactctagcattatttagtaccctcttagcaatgagagcactaccaataatttttctactag

SEQ ID NO: 88853 - DNA, 388 bp, Glycine max
agctttaaggaaatatgtgttagtgttttttgatgatatattgttatatagttccacatggcatgaacacttatgccatctataggctgtattgaaagtgttgaaagaaaatgttttgtttgctaagttgtctaaatgctcttttggtgtattggagatagagtacttgggacatatagtttcaagtgaaggagttgctatggatgctactaaggtgcatgaagttctagagtggcctacaccactcaatatcaagcagttgagaggtttgttaggcctcactggttactattgaaggtttatcaaaggatatgcaaagcttgctgtcccattgacaaatttacttaaaaaagaagcattcaagtggacaccataggcagagacaaca

SEQ ID NO: 88854 - DNA, 475 bp, Glycine max
  unsure (1)..(475): unsure at all n locations
ctgatcgctgtctacataatctgctcatgtggacccaaggtagcctatctagtcgtgcctagaatcatatttgtcccagcaactggaagaagatacactggtatagttagtttgtgcccttgtatcagcactggtaactcagtaatgaccccttcagctgtcagatactggccattgcccactaaaactttaaaaccctgtgctggttgtactagtaacttcanggaatnttgcaattctatgttgaatgaagttattagaacttcttccatcaactnaaacctggcacagaaattttccaatttgaccttgaaacctcaatgtttcaacactagtagaaccattcagcgctattaatgacaagtgatgctcagcgtgctcaccttccactgatgcttcacccttgtctggtggactacaccactttcactgtcctcagagatctctgtatcatcaaatagtaacatcatgatct

SEQ ID NO: 88855 - DNA, 395 bp, Glycine max
agcttgaaggcaaactggatgcattggttaacttggtaacccatctggccttgaaccagaaatctgtacctgttgcaagggtctgtggtttgtgctcctctgctgaccaccatacagacctttgcccttccatgcaacaacttggagcaattgagcagcccgaagcttatgctgctaatatttacaatagacctcctcaacctcagcagcaaaatcaaccacagcagaaaaattatgacctctccagcaacagatacaaccctggatggaggaatcaccctaatctcagatggtcaagccctcagcaacaacaacagcagcctgctccttcattccaaaatgctgctggcccaaacaaaccatacattccttcaccaatccaacaacagcaacag

SEQ ID NO: 88856 - DNA, 441 bp, Glycine max
  unsure (1)..(441): unsure at all n locations
ctctcacctgtcttaatcatgatactaagtatatgtttgtcgtgcatcttttttgaaggtttccctcaagaattagaagaataagaatggtgttgactctatcttggttggatcaatacttttcgagcttcaaaaatggaacatagtgactcccatggctcagtttgttgacaaggttgaacgttatttcaataaggtgattcacgatcctcaatattataatcccctcaacgatgctaattgtttttttagtgtgtgcacattcatttctaactcacaagaccaacatacagattaaagctgaattagatggtatggagcgaaccaaagatgaagaatccaagaaattcanaggccacaacattgatattgacttccacatncttatataaattaaagaagcaatggtggatgttcctccaattgcatggagctagcact

SEQ ID NO: 88857 - DNA, 341 bp, Glycine max
ttctttagcagacaccccgctcttgacaccctccactcgttagctaccactgcgacaggcgggcctgaataccaccatagaatgacctatatgtagctcaactacccaaacaggagggaggcatgtctggagagctctcgtcgcacttctacttaaactctcttatgcagggatatcggccgattagaattcctacaacgcacatccagacctatggcttatacccgattctttgaccattgtagaccacgtgcattatacgtgtgtagtggatataacctcactgagctattgatggtgcttcaaactatcaacacagttgcccatgatgaatgcgcacc

SEQ ID NO: 88858 - DNA, 233 bp, Glycine max
  unsure (1)..(233): unsure at all n locations
actatcttcatatgtattcatagcgactagtcgtcatatctcaactcatctaaagatgatcatctcatcattgaacgaattggttcctcctctatgatcattattaacatcacatcatcatagcttacgtgtgtgtacccacgatatanttatgatgaagagctctctatctctcgctcgctatatatatatatatgattcacactggaataaatgggtcatgatatgtgcga

SEQ ID NO: 88859 - DNA, 377 bp, Glycine max
agcttcaggttgctcattgactctagattgctacaaagattgtacccagattgtatggtgatctgcagaagaacatagaccacagactcttgcaacaagcgtagatttcttattcatggcaagctgggttactaggttgaccaaggcattaagttttccttcaagctttttattttcagtagatgaacatgaatctgtggccacctcatggactcctttaagaacaatagcatcatttcttgcactgaattgttgggagttggaagccatcttctcaatcaaattcctagcctcagtaggggtcatatcaccaagagctccaccactggcagcatcaatcatactcctatccatgttgctaagtccctcatagaaat

SEQ ID NO: 88860 - DNA, 419 bp, Glycine max
  unsure (1)..(419): unsure at all n locations
tatgacactcagccatttcgaggtgatattgaactntgtaatataatggctatctatactagtgacccataagaaatttcactagttatacaaactacacatcagacanagaagcataagaaaaaaagagaagaaaagtacctcctctaaagtaatgataatctattgttcatttgaaaaaacaggcatgaaagttacacatacatatcattcattntatgtttcttattatatcattcattatatataaaggtaatnatccatgccaaatcaacaaccaatgaaaaatcaaatggcagcttaagcttgatattatgtcgtatattctataaaaaaagttaatgtaaatgataaaaaaattaatttaaaccagattgaaaatataatatatcaaaccagcaaaggacaaattattaaac

SEQ ID NO: 88861 - DNA, 376 bp, Glycine max
ttcttgttgtctcaatggggattttggatcttgttgcaaagatgcaccacacgaatagatcataaggagaacctccactatcataccccacccacgaccttataaacttaaatggttcaaccaggaaggggaaatgatagttaaccaacattggaaggtacctttcttcattgggacatataaagatgaagttaaatgtgacatatgtcccatggaggctggacatattcctttatgaagaccatggcaatctggaaaaacgataatttatattggtctaactaatgaaattaccctcacccatcttggctctaaatgtgtgttgcattcataaacactttcacaggtggcccaagatcaactaactatgaaattt

SEQ ID NO: 88862 - DNA, 476 bp, Glycine max
  unsure (1)..(476): unsure at all n locations
tcaaatatgcatgtgttttangacgcatcaacaagaatcaagccaacgctattgtgcaagcaatcaatggggcaaaacacaccanatgattataatgatggatggctcannatcttacanaggtaaaatcatcactttcaaattgagcctttcaaactatcatgacatgtagagaagaatcaaggatttcaagtcacacaatgtcaaaaacttttatttcaaaacaattacccatttcttgaacatatcctataattcaaagagaaacatgcaaagtcgtacgtgcacacgantatgacccanaatattaaactgaaaatccgacggaactaacaacattaacaaattaacataactaacaaattaacataaccaacanaactagcaaaaccagagaacacttccgccccccatacttaaacaacacattgtcctcaatgtagcacaattaacagaattaaaacaattaaatcatc

SEQ ID NO: 88863 - DNA, 377 bp, Glycine max
agcttgtaggattatggggtacccatcacatgtggtactatgtggcggccgggcgatggtgcacaacaaggattcaacatccacaaatcgcgcataaacccaccatcccctgttgcccacctccaactgagctcacgtactcccacgtagcccatattctcgtttctctcaacaccgggtccccatcaatcctctgaagcttccccaacatctcaagtgattcaaaattcatacagcacaaactatcacaaccaagaaaacagggcaaacgcagataactctgcccaaaacaccgaccaaaatcacagcttgtctcacttaaagaccccagtaacatttccttcgttccaattcgttaaccggtggatcgactcgaa

SEQ ID NO: 88864 - DNA, 402 bp, Glycine max
  unsure (1)..(402): unsure at all n locations
gcttgtatatcccggtagtcaaagagaagttcaagtccatagccatcaaagtctgaagagagtatgatgaactaagggacgtcaatatggccaccgatgaagccttggaatgagaaaccaagaaagcccgaaaggaaaaacacgaccaacacaagttttgaggggctttatagggcagcaatagtgagctcaagctccgaagaggtgaaaggaatcatcacgggtcaaaggcatgatcttgaaggacgagctaaaggcttgccttatgtcgaanagaaatntgtcccaacagttaagagagactgaagggaatatgtgggccatcatcgatgagtgcanagagaagctatatctagcggcgactcacgagcaaaggctagaggatgagtacgccaagatatc

SEQ ID NO: 88865 - DNA, 321 bp, Glycine max
  unsure (1)..(321): unsure at all n locations
agcttactccatctggtgctcttcatttatctcaagctaaatacattagagatatacttcacagagcaggcatggaagactgcaaagggatttccactcctttacctgcaaatcttaagttgtccaaaactggtgctgacccctttgacaaccccactctgtacagaagcattgtaagagtcctgcagtatgctacaattatcagacctgaacttggatactcagtcaacaaggggtgncagattttcgctcagccactggtctatcattggagtgcagtcaaaaggatcttaagatacttaaagggctccattgatcatg

SEQ ID NO: 88866 - DNA, 394 bp, Glycine max
  unsure (1)..(394): unsure at all n locations
tatatcttagtggcatggggtgctttgtctgggttcttgctggtgactntgccaaacagctcctacaggttctctctcaccatcatgctaataaattagtattccatgcanttttgtattgttntactgccatcacatatatatcttcagntagttaattatactagttcatatttatattttcaaataataatgtgtatgaatatctcaacaatacagtgcatgtgtggtactttttcagtggtaaacgtacttttgaagaagaatactatgtgtgtcttttagtttgaaagtatttttcgaagtgaagtagtggagatcttaacatgctaataggctatcattgggttttggtttgtagtattccaaatttcagtccaaggatacttaattt

SEQ ID NO: 88867 - DNA, 284 bp, Glycine max
agctttattcaagacaaagaatttatagatattcaggatggatgatcaatacagtctttagagtcttataaagggtgtattaaataggaagggaattcccattgaagcccaaaaagtttggccaaaaattttaaagtaaaaagtctttttcaacaaaattactctctaggcattgattaccagaggatgtattctattaccagtggccaaaactgatttacaacagctattaaaatggaattcaatgttgcactgtgaaatcattacacatatatggaattgat

SEQ ID NO: 88868 - DNA, 380 bp, Glycine max
  unsure (1)..(380): unsure at all n locations
tgcctaantaacctgagattgagagaacattattatctaacacacatcactgaaaatactaagtatgtattacctatacttaatagacaatacttatngcactactaaattaccataaattgaaggagggtgagacaatctacacaagatntatacacaaaagttagtcgttttcaccgactaacactgttgcaccataaagcccctcagaacttgttccggcccgtgttcttccttccaagccctcttggtttcctagtacaaggcttcgacggtgggcatgttgatgtacttcagttcatcatactcctttcggactatgatggctgatgattcgaacttttccttgactgcttaggctatctcaagctcgcgcttta

SEQ ID NO: 88869 - DNA, 393 bp, Glycine max
  unsure (1)..(393): unsure at all n locations
gctcttcaattcattctatgtacctcgggtggtccacattttgtttcatgtatttttattcttgttttcatttactttttatacccccttttgatgtgcttaagccatttatttaagtcatttctcgcttaatctaaaaataaaataaatttccaccgatcgtttaaattgtatcatccgttaatttcggttaaaatgaattccgaccgttcggtcgtgccgtaaccacgttgtaaatcaaaaaagaggtaaaataataatataataatcaaaaaaatgccttttagtaaaataaagcgaaaaatcaatcggacgttttctctttgggatttctcacctagtcaaactcgtccacaaaaatagggttntgaaagattatcatttcagtttctt

SEQ ID NO: 88870 - DNA, 409 bp, Glycine max
  unsure (1)..(409): unsure at all n locations
gtgtggaagggtgagacttcctacttntattggttgaccacagagtggtacctgtagatatgtcgcggnggtcaggagaccttgtggacgtcaggtggggtgctattgcccagaaccaagcttgaccaatcccgacccaacctggccatagtcagtcagtgagaacctatgatgtacctacacaggcgagctcctggcagtcaaccgataaaaggaacaaagaccacaaagcanggatgctngtgtggtggctggccaactgtgaactttgagtgttatatgggatatggcctctggtaatcggttaccaagggagggtaatcgattacaaggcttataagtgaagacaggaagctaaaatggcctctggtaatcgacaccaaggggtgaatcgataccaggcttaaaa

SEQ ID NO: 88871 - DNA, 394 bp, Glycine max
agcttcgaggcactgggtcacatttctctactctactttccttcttttcctcttcttctgtgttctttcttcttttccttattctctctaacttttttcttttctttctttcttttctctttctctctctaactctcctttctcttttttattaaattagtggtatatgtggcttattgggccttggttccttatttgggtcatattatcatattctcattaattcctaatataaggtgactattattaataatatctaagagtatcttttaattcattaaatataatagttatttcataaaatatgtctcttaattatttatttctaaggttcataaatttggaatgttagaaaaaaatatccttagttaaagtcaacaatagaagaacacgg

SEQ ID NO: 88872 - DNA, 336 bp, Glycine max
  unsure (1)..(336): unsure at all n locations
ttaaatataatatgatagntattaaaatgtattatattatgatcgaccaccacacgagttcttagggatgatgttggtaacatttctcacaagacttttaactcgttattcatttaattcaaatgttaaattacttaaaccctaattaaatcaaatcatattcgaacccaaaaaatgaccagttcatgctatcggttaagttgattagtaaacattctttaaaggatgttagtaaaaacataatcctaccaacataaatgttaacactaagctgtcataatatgatacctacaactctttaacacgaagagagaaacagcactacattactattga

SEQ ID NO: 88873 - DNA, 393 bp, Glycine max
agctcgtaggagtatggggcactcttcacatgtggcactaggtggcggtcgagcaaaggtgcaagacaattctgtcacatccacaaattacgtataaacccaccatcccctgtagcccaccttcaagtgagctcacggactcccacgtagcccttatactcattcctctgaacgccgggtccccatcaatcctctcaagcttccacatcaaccaagaaaggcatcattccatgatgacaaactaacaaaaccaagcaaaacagggcaaaggcagaatactctgcccagaacacaaaccaaaagacacagctgttcacatacaaatactccagtaacattgtcgttcgtccaattgcttcaccgctggatcgactcgaacatgttctggaagtc

SEQ ID NO: 88874 - DNA, 438 bp, Glycine max
  unsure (1)..(438): unsure at all n locations
ctgacgctcgttttaatgcctggaatcgattactcctcgtggtatatctataccagagaccatcttagcctgctgtcttcatttttaagccttgtaatcgattacctacccttggtgatcgattaccatatgccataacccatatatcacacaagattcacaactgggcagccaccacacaagcctccttggcttgtgggctttgttccttatatttgttgactgtaggagctccgttgcttatgacataacaggttcttactgactgactatgtccaggtcgggtcgggatttggcaacttgggtatggcaatagcaccccacctgatgtcctcaatgtctcttgaccctgcacatattctcatgtaccactctgtggtcatcgataatacatgaaagttcacccttttcacttcctcatctcaagcttgangatat

SEQ ID NO: 88875 - DNA, 379 bp, Glycine max
agcttttgagcccagtctacctactatatataaaagccatttttctcagcttcagaaagcattgagagacaacttctcactccgcaacttattttctctctgagatttctctattttcaccgtcgaaaaagaaaactgttgaagaggatcttccagaaaatggaatcaacatcatccatcatcatctctgattctttcatatgctatttcaccatgtttagctaaacccgttgtgtatatgtgctagaactgagttgattgccttgtattagcattatcgtaagaataggacctcttgatgcatgacttaattatcgtatatttccccttgcttgttgactcctttcctttcacactctcttttttataattattcaat

SEQ ID NO: 88876 - DNA, 395 bp, Glycine max
  unsure (1)..(395): unsure at all n locations
tgtgcatcgggtgggatttggggntgatttanggatggnctttatggatgatngnngcattttggctggtagggtggtggataatgagatagactgatattgtccgagtattgatattgttgggctaatgggaaatttggccatgtaggaacagcaaccacaacataagtttctcccttcttcttattctctccatgtggcccaagctntcgatcatcaaagcaggataatcaaatgtaccttttctcatacccacttcgatcctttcgccggcgaaaactaaattggcaatgtttgaacgcatgtaacccaccatcttctcatagtagaacactaataatgtgtctagtatcattggtatcatctccctctccatcattaggggggctacttga

SEQ ID NO: 88877 - DNA, 395 bp, Glycine max
  unsure (1)..(395): unsure at all n locations
agcttgctctatcttttaaatgatatttattttatctatcaatttgtagaagatgttgttcaaggaacttcatctgagatgtttgatttgaaaacctttttggatgtttcttatatactcaatcttatttttgtaaggctaacaggaggatgtacacttaaagcgcacaaaaacatttggatgaaaaaaaatcatgtttagtctttaatgctttgttatacatcaaaattntgggatattattcgtcttgactctaatatagcctatatagcagaactttgggttgtgcttgaaggcttaatgttaggtttggggctagtaaggaaaatattataataaaagtgataactaatactatatatatatatatattcactaccccaatgatcgaatga

SEQ ID NO: 88878 - DNA, 373 bp, Glycine max
  unsure (1)..(373): unsure at all n locations
tattctacgaatttcgnaactatgtttgttgtctttccgtaatgggacgaaaccttactgatcatgtaatcatcccttttttttccttccggaacgttacggaactctacggattgcgcactaacactttcttttaatttccggcatgtcacggaacttcacggattgtgctacaacgcttttctttcggctttcggcatgtgtcgaaacttcacaaattgcctaacgatgggtgccaaatacctcgaagtggtcaaacaagggtcgcatcccaacaacggatggtcctcggacgacattagggtatgacaacgtctacacatcagagcaaaaccatatcatgatttcgcttgataggataccctcgctaaaa

SEQ ID NO: 88879 - DNA, 450 bp, Glycine max
  unsure (1)..(450): unsure at all n locations
catgtgaagtgggtggtatttctagagcacatcctttatgttatctaacataanaaggtgaaaggtggtattgtagccgatgctctttctccgcatcatgcattactttctatgctngaaacacaattgattggtcttgaatgtttgaacagcatgtgtgaaagtgatgaaacttttggtgaaagttttaaaaattgtgaaaaactttcaaaaaatgggttctttagacatggatgctgtcttttaaagataacaattgagtgtgcctaaatgtctacagacacttgcttgttgtgatcacatgaagaggttaatggggcatttgggccatagactctgagacatacaaaacatnttattggctatataaaaggattgcagaatttggaacatgattgttgtaaaggaactcaaggtaacctatgatgatctcatgccatcggagatctg

SEQ ID NO: 88880 - DNA, 374 bp, Glycine max
atcttcaggttgctcattgactccagattgctacaaagaaggacccagatttgtatggtgatctgcagaagaacatagaccacagactcttgcaacaagcgtagatttcttattcatggcaagctgggttactaggttgaccaaggcattaagttttccttcaagctttttattttcagtagatgaacatgaatctgtggccacctcatggactcctttaagaacaatagcatcatttcttgcactgaattgttgggagttggaagccatcttctcaatcaaattcctagcctcagtaggggtcatatcaccaagagctccaccactggcagcatcaatcatactcctatccatgttgctaagtccctcataga

SEQ ID NO: 88881 - DNA, 416 bp, Glycine max
  unsure (1)..(416): unsure at all n locations
gaatttgtactttgaattataattgcattctatactagtgacccataagaatattctactagtatacaaactacacatctgaccaagaaaccanatataaaaagaagaaaaaaagacctcctctaaagtaatgataattatattgtcatttgaaacaacaggcatgagagttacacatacatatcattcatgttatttttcttattatatcattcattatatataaaggtaatattccatgccaaatcaacaaccaattgaaaatcaaatggcagcttaagcttgatattatgtctgatactctataaaaaaagttaatgtagatgataaagaaattaattaaaaccagattgaaatataatatatcgaccagcaaggacaattataaacttacagaaaggattgatgaatcctcc

SEQ ID NO: 88882 - DNA, 371 bp, Glycine max
  unsure (1)..(371): unsure at all n locations
atctttgtttgnaatcctgtatagtgcattngactaatatagcatcccttcctgctttccgagttaggttagatgactctctttatattctctactctccaggtttgcgagtgctccgccagagaattcttcttgtaaatatatttaattgatctactggtttgatatatgtatcgcaggactcctatgtgatttgaagggtgtaccaaaaggagggtcctggtcctaagaatggtgcacaatatggtaaaccatatgaggagaaagagtgggaaacagatgaggaaattgattctgtacaatctgcccctgatgctgctgtttgtgcacctgttcctatacaacctagtgaaagccattattttagttgc

SEQ ID NO: 88883 - DNA, 243 bp, Glycine max
gggtcggtctgtgtaacgtttttaattaatgtcatgctagaggactctgtggttaaaaaagatatcgtgacaatgcacctccatctgattctcctcctctgttgaacctgacggtaggtgaaaacagcaaatctgaattactcgctacttcactataggaaacggaacaatatttatcctgcctttgataaacctagagaagtggcagctatgcgccttccctcctaccgaacttaaaagctt

SEQ ID NO: 88884 - DNA, 329 bp, Glycine max
agctttataagtgcagcgatcggtattactaaggtcaagcgttcgcgatatgcgaagatgatattccgagtactttggatttggtgcgaccatgctctcctgatttccaactgggaaattggcgagtggaggaacgccccggcaattacgccacaagcataatgtaaacctttacggtcttaaaagctctatagttgggcctaggctttagagttttcattatgttaacgctttgtgacttttgtgtctgaatttataatacaaggatctttcttcatctgttcctggtctctacccattctcattcattcgcatgcttactttctttt

SEQ ID NO: 88885 - DNA, 404 bp, Glycine max
  unsure (1)..(404): unsure at all n locations
gtcttcacanattatcatcacacagcagaaacctatcaagactacccatcatatctccccaaaccccatacccacganaatcaaaggtgaaagaagtccacccaaacctgaaatttcgaagtcccactcgtagccacgcacttcacgaccccgaaaatgctctcctttcacgaattgnggcagaaatgagcaccanaggttgaagctttgttggggtttcaatggagaatggaggagaaggaaaagcaacgtgaggaagagggagagagagagctgttctgaaaaaaaaaagtgtggtggctgagtgaagagagagaaaagctnttggtcttaaataaaagggttttctcttcttctattattntattcaagctctgccacatgtncctatttgagtggagcaa

SEQ ID NO: 88886 - DNA, 375 bp, Glycine max
  unsure (1)..(375): unsure at all n locations
agtttgtgattagactagctatctttgtaccgnacccttgttttattgcatggtttaaggcttaattaattaatttgtagctgttgcttagaactggttttggctaagagcttgatcttcaagagatttctttgattcttctttctagtgtaaagtcatgtcctattagctaggtacaaaatgatgaaaagaatgggccaccaacgacgacaaagtcgcgaaggtgaatggatcttgtatgcaaagctttatgttcatgcatcttttcaattaagagaaaattattatgatttgttacttataaagtagcaaatgaccgttctaaaagaatttcttgtgcatgatatttgtgagaaaaaattactccctttatct

SEQ ID NO: 88887 - DNA, 384 bp, Glycine max
  unsure (1)..(384): unsure at all n locations
ctcagctgggtaagcttggtgaatcttaatggactgattattctttgtacgtatttaagattatggaacttaatgggtaactcaaaaatggacgtacncttagtgggtgagacacacctactataaatctatgtgtcttactacgttcatctctcttatattttcaactgaccaatggctttgatttgattttaattacaaactctgtttgaatgcaatatctgttttctcttctgaaatatttttatgaaatctttatgcttacaagtttatctttaatatgaaatttgatgagtcagaaaattcttgtaaaggggaaagtaacatgcactttgtgagtcaataaatcctgttgtatatcaaaagggaaagtgaatgttgttc

SEQ ID NO: 88888 - DNA, 226 bp, Glycine max
  unsure (1)..(226): unsure at all n locations
agcttgactaggcgagttgattttagccttagtttcaccttagttattagtcaattcgattaagaatgagaaatcccaaagagaaaacgtccgattgatttttcgctttactaaaaaatattnttttgattattatattattattttacctctttttttgatttccaacgtggttacggcacgaccgaacggtcggaattcattttaaacgaaattaacggatgat

SEQ ID NO: 88889 - DNA, 132 bp, Glycine max
gcttttgtggcagaacgttcatctcgagcattatgcgcctgatcggacattcgagtgatgaagtatgatcctctgaatatgtcggaagctttctcggtcaatttggggcattttcagttattaattccccgc

SEQ ID NO: 88890 - DNA, 486 bp, Glycine max
  unsure (1)..(486): unsure at all n locations
tcaacctagaggagacggaccatatcaagtgtgggagaagatcatctactatgcctacaagaatgacttgcctagtgagtataatgtaagtgccactatcaatgtgtctgatctatctctttttgatgcagatggaggagccttggatctgaggacaaatccttttcaagaaggagggagtgatgatgacataaccaangaccatgaatcacttgaaggtcccatgaccagaggcagacttaaacaagcccaacacgtcttatggacaatgctggtcatttgtatagctgccattgatgatgattgaaggcccaagtggagaaagatgaatgcccagaggcagaggcactaccaagactactaattgttgctgaatgcccaaactaacttgaaggcccaagataaataacgtttagttataattaattttattgaattctggccaaactgttagaagccatgctattttatcatatgttagaacac

SEQ ID NO: 88891 - DNA, 422 bp, Glycine max
  unsure (1)..(422): unsure at all n locations
cttatcattctcttcatgtggatttagtctcaacaattccatttcgtattcctgtaactttccaaatagtgtagcaagagacatgttagataaatctcgtgattcagtaatggttgttaccttaggttgtcattctctgcttanacatctcaatactntatttataagatcttcattttggaaagttttccctagagatgcaagatgaattactatgtgtgtgaacctttttgcatgtcttgatgctctcattngattcatctaaatagtatattcatgagtaatggttatccagatctttaacatttgtgtgctcatggtacttgaagtatcacatatcttgccttacagtgaacctaagatcatcttctaggaagtatatgtttgctttagtgatgacagctcttttctactcacttcta

SEQ ID NO: 88892 - DNA, 293 bp, Glycine max
agagctccggatatataacggaaatgaggcggacaaaagtgggcaaataactttgatgattaggcttcgccaatgcggaaggtagtctgcgcatccatatccatgtacacacaatatagcagcttggggttacaggagcaatgaactactaccaacaatatgaatggtgattaatcgtatgagcactttggaaccgctaactccgcacattggtggccaatagggaatagaaacggttatacatcctactgaagacgcatggactattatccactgaccaactacaattcagg

SEQ ID NO: 88893 - DNA, 455 bp, Glycine max
  unsure (1)..(455): unsure at all n locations
gttcacctactgttcttattcacgaagcagcttgtgccggtatcaatgtattaactctntagagcttatgctcatatttaactacattgtggttatgctgaagattctgcgagatgaaactctgactctcttctaacatccatttggtttgggtatatagatagttctgcaccgtggtatataccacctctcggaagacataggcaatttgataatatagagggcccctgggacttttgaaacccatgttgctggcaagcagaagtgctaatatctttgaaatcaacggagcaagtccatgggcctgatgtaagatagcggttgtcggtatctatggtctgtgacaaacacaaccctgagcttctacgagtgggaagttgtgttgatgacttgtcatcgctaactggagatacagatgggtctgtgaataggactgatgggagataatataatgg

SEQ ID NO: 88894 - DNA, 377 bp, Glycine max
tatatggtttatttattcttaatcatacggatactatttattgatgaatatttattttataaatcttctgactgtacatataaaactcattatctcattcatcacataatatgtacgattttcttctcgtcatatttgcacctttatgcgatttttataggtgcatgatatattgtatgcccttaatgaccacattaaaaataaaatggcccaaaggcctacaatcacttgactaaaacaggtaacccaagtccgaaaagtcctcacttggcgttaaattgataatgtacaatcgcaggatattaattgtaattttttacgggttgcgccactctaattttattttaaaaatgagtttgacgtatgcctaatataaa

SEQ ID NO: 88895 - DNA, 494 bp, Glycine max
  unsure (1)..(494): unsure at all n locations
tctctcctccaaatccctatgctnttatccgctgatccactgcacaataactctcttcttaaacacatacacaacacagctatctcatgtgccttggtctcagaaaccagcttccaacaactctcaaaccctccacacccctcccaccccatcacaaacccatcagaccctcctccataaacccatttcccatcatcagatacaacaacagcattataagaaaccatcttatgaccctccaaaatccccttcatagcatgcccncccttcccatcttttctcccacaagccttaatctttccatcagcagaagcagaatacacaacccctntacacgccaccaacccattgatagcatcatcatgagcctctatagactccanacacttcatatccgagagctttcacaccttaagagtcttgtcccacgacccagaatatatcaaaccgctataaaccgtcaagcatgaaatgctatccgcatgctcaatcca

SEQ ID NO: 88896 - DNA, 396 bp, Glycine max
agctttaggacatctacttcaatttttgaacactaaatggcttctcgtttcagattctcaataacttccgcaatctatgttttaacacacaagaagaacctatcaaaatcatgaacaatgcctaatgttaaaactaaacaaatcaacactacaaggaagtaattctcacaattttcagttaacaaacaaacaacaacaaagcctttgtttgtgccatggttgtcacgtcaaactcttttttagatgcatcaataaattattggataaagtgaaagcatcttatagattgaaaagggaacaaaattaaattcaaatttaaaaaacctggggggaaaaacaaatatgatttaactaatccatttgagttagcaaaatattcattgaggttggaaatga

SEQ ID NO: 88897 - DNA, 443 bp, Glycine max
  unsure (1)..(443): unsure at all n locations
ataagtatccttctgaagtanagttatctctntgagacttcattgtagcatttccaagtggctttaagatatctctgaacatgtcttttcataccatatccattaagtgggagtggtctctaagttgggagttctgacaatttactgaagatctgtgttactgtgttgatccagaatngccttcaagcangggagaggaacctgcagacccaagagccttgccttgaacgtctatggactaatagggaannaattgggattctggaaccctttcttcaattcttagttagcgagttatgtctaacttcaatgcttatagcaagcctcgtctaactttcacaatatgagtgctaaattgttatattataagtactacatgtaantggcctttacttattgtaagtcatggcatgtctacttttgtaaataggttctttctttta

SEQ ID NO: 88898 - DNA, 375 bp, Glycine max
  unsure (1)..(375): unsure at all n locations
ttctttgcatgcctntgaggaattttaaagggtgatgacaacttctccggttttggctctaccggattttactcaaccttttgagattgagtgtgatacttcgggaagaggagttggggctgttttggttcagaagaaaagaccgattgcttatttcagcaaggccttatctgaaggaaatttagcgaagtcagcatatgagaaagagttgatggccttagtgttatcggtgcagcattggagaccgtatctgctgggaaggaagtttgttgtttattcagatcaaaagagccttaaatatttgttgcaacagagaattactacagctgatcaacaaaattggctagccaagttggtaggctaccaatttgagga

SEQ ID NO: 88899 - DNA, 479 bp, Glycine max
  unsure (1)..(479): unsure at all n locations
aatcgattatattatcatttcaatcaattaaagtgttcttcccgaagactatgaaaactttaagaacaatgtaatcgactagatcctcaatgtaagtgattaatgtgttcttgataactcttgaaacactctttaagggagaagtaatctattatatcacatggtaatcgattaaagcagagattcatgaataaatcaatcattgtctcataaaaaaaataagtaatcaaatttctacaagcttgtaatcgattaaacttatacgagacacttttctaccagcttaaaccaacttgtgtaatcgattatagtaaggctgtaatagattaaaatagaaagttttaacattagaagaaattntctaacttcagaaactgtcttcttactcctacatgatcatgcatgatacatatatgaaatgacaaagactangatgcaacacataatacaacaatcaatacaaatttcactcaagttag

SEQ ID NO: 88900 - DNA, 370 bp, Glycine max
  unsure (1)..(370): unsure at all n locations
agcttgaaccaaaaccggtcagtgtgtgaccttaaattgtgagcgaacgactagctatgagtaataatctttgcatgaatctctgaattntagaatgaaatgtattaacgagaacatgatgaaggccatgattgtacatacacaagccttttgaccaaaaagcttaccttgaatgataattatatcctttgcaccctttttgagctgaatgattttgtcaaaaatttgaaccctgaacttaaataagtatctccagataccttgtttagattctaagagagcatatagttcaaggcaaatttatcccaaatttgggggagtggaattaattggaatgcaaagaaagagagaaagcatcagcacacacaac

SEQ ID NO: 88901 - DNA, 427 bp, Glycine max
  unsure (1)..(427): unsure at all n locations
actcagctattattcaaacacaaagctnttgtgcttcctcatgcatttccttaaaggctnccaaaacttccttagattcataatttacctaaagttcatcaatggttgaggagtcatctgttgaatcagccattaagcgcacattttcaatttcttcttcactataggagtcagaggatgttgacgccattgcttcctaagctatgtaagcgcttttcagatttccatccctctttcctttctttttaacaagatgtttttgagtagacaagacaattgacttgatgggcctgcttctttactttctttctcaaatcttcatttcatccattattatgaaccattaccattaactcttagtggatgaaggtctttacatacattcatcgtaggccatgataaataagatttgtctctttgcaaacca

SEQ ID NO: 88902 - DNA, 186 bp, Glycine max
tactatctaatgatgaccatttattatggaagatcatctgactgctcatcttcaactcattacttataaaactcctagaatgctcgctatccacctctccaatctcgcacacaatcacgatccttatgtgtacacataatgttgaaatatgaccctgcccaaacacttaatgcatttgctggaacg

SEQ ID NO: 88903 - DNA, 365 bp, Glycine max
  unsure (1)..(365): unsure at all n locations
catgccttaagacattctcatcggctatcatttgttcctttgaagccaattggagtgaccattcctcatatctttctagaagaacaaagagattatcatgtatgaatccaagaaaagcacatcatatatgccaatgctttcaaagtctacaagcaccttatgcaaggcagtgtggaagctataaatgttttcacgtatgctgcgttttttcctccaaagactaacattggctctatagacgttagagtttactgtctctcataatatgaatattatatacagatggcttctaataattatcgtcatagatgacataatcacatatataaaactganaccatgtttatgaattgatactttctcat

SEQ ID NO: 88904 - DNA, 374 bp, Glycine max
  unsure (1)..(374): unsure at all n locations
ttcttgaaaacgaggtcaggatgctaggagggcttctggtaatcgattaccaagggggtgttatcgattaccaggcttaaaatgggactggaagattgtggaggcctctggtaatcgattaccatcctgtgtaatcgattacacagaggaacaggccactggtaatcgattaccaggtatgtgtaatcgattacacaatgcctttttcaggtttacacgtcctgaagctgtataattcgagnttgccctctggtaatcgattaccaaggctgtgtaatcgattaccagagatgaaaagcctaaagataccccttttacttgcatgtagtggttatgagacacattgtgttgcggcgtagttagattttcgtgaa

SEQ ID NO: 88905 - DNA, 494 bp, Glycine max
  unsure (1)..(494): unsure at all n locations
tctagccanatggacttaccttgaattaattcctttgatagccttttttagccttgnttccctttccttgttgtgaagctcactacaagccttaagtngaaaaccatgatattaccatatccttaaggaattttggagctttggaattggtttgggaataagtgcggggggtttttgtttcattggacaacttgttttgttggctatgcttcatgatgtattttgggccatacttgatgtacattgtatattggttaaatgttggacatgctgaatgaaantgtgtttctcataggctaaagagtaaaaaaaaanaaaatcgaaaaanaaaatcgaataaagaaaaagaaaagcaataaagttgagtgaataagatcttanatggcacaagaatgatgaaactctnggntctactcttcatggtnaattttaaatcttacttcttnttaatttcttaatttttcttaatatgcacttaattccctttgctcctc

SEQ ID NO: 88906 - DNA, 61 bp, Glycine max
  unsure (1)..(61): unsure at all n locations
agcttgtggtccatagcttaatgcttatagagatnatggctatgttgagctgggggagctt

SEQ ID NO: 88907 - DNA, 442 bp, Glycine max
  unsure (1)..(442): unsure at all n locations
cttgatgttgttgttaatttttaaagcatccatgcataagtattttattatcaatntacgtgactcctgtccgactatcctccgtttctatttgcaattccaactcctttatgcctnccatgtgactctcctgcagcacacaaaattcaatattngtgcaaattaacacactggactgtgtgaaaccaccttggacaatgagcccaaaagtctgattggatgagctgcatacttgaccagcatgagttgtcaagcatgattggcaaacaagcattgacaacatgcaatttattgacagtgtaatatntcagtgtccaatcaattcggtcaccggttactagtttaacctgcaacggtggatgctttcattcgagggagccaactgacacatgtcagttggtaaccattgacaccatcagccatatatatctacggattcaaa

SEQ ID NO: 88908 - DNA, 332 bp, Glycine max
agcttgtataatggctagacatgatacatgtcaggacttgtgttggttcatggataaaagggatgccccacattatttccatgacacaaatgcaaaaatgatgatttggaaattttatgcaaaactggttatgcatgcacctatgcggacactcaaatgtcaaatttttatggtcatgtgatgctaaggctcaggaatcatttcctctatttaaatcaacccaatgtttcaaaatatgttctttataaattgtcattcatcgagtcatttccggcgtccgggaaattcatacattacccttaagtgacacatttttcaaaactagtttgatc

SEQ ID NO: 88909 - DNA, 462 bp, Glycine max
  unsure (1)..(462): unsure at all n locations
gacaattctatttgcaagcttgcggaactttcttagcaaaggccaattatgagtgtagagcaattcattgagaaggtggcctaacctggaacccgacctttctttgtagggaataatgaaagttttacagcccaggcacctcaacagcatgagctataactagaaaatgatcactcatctgaagccatcatccctggagctgttgatttttcaaaaagaanattatagacgagatccaatgaggctgctcaatctggaccagtgccctataccagctaactcttcactcctattctataaatacttgaaggccagaccatactagtcctggntctgggcacttctcctcaactactccatatttgaccaaacagataatgacgatgtcatgcatacgacatctangactagtatcaggaatttgattctgatgatactatnntgctttaattaataatatta

SEQ ID NO: 88910 - DNA, 315 bp, Glycine max
  unsure (1)..(315): unsure at all n locations
agcttcttttgtctactacatgttattcccaaattgatggacaaactgaggtactggatataagtttgtcctttatacttagaggtgngattaaaaataatacaaagacttgggaaaaaggttaccacatgttgagtttgcttatgataaggttgtccataacactacaaaaaacttcccattagaaattgtgattgaattcaacactttaccccttttgatatgttgccattgcctaacaattttgttttaaatataaagatggtagggcatatgctaaatatggaaaaaagtgcttgaatagatgagggctca

SEQ ID NO: 88911 - DNA, 406 bp, Glycine max
  unsure (1)..(406): unsure at all n locations
ctacaacatggtacacaagaacatgattaattagagaaatatcctcatatgcatcnaacttgttgttagaaagacccaacgcttttacctattgctgtcaacttttacttactcgcatttactgtttttaccatagaattaagttatttctatttttaaacatcaattatcaatgtttgttccaacaatgccttacttctgaataaaactctatctaataagcaagttccctgagttcgatactcggatcacaccgttttaatttaaatacttgacgacccggtgcgctngccgatatttcatttcccttgatatatttgttaaaattggnaanaatgaccatatggaaaataacaaantcctttgatcaatctagattgtacgtttaaggtgcatgaagcacgtt

SEQ ID NO: 88912 - DNA, 381 bp, Glycine max
tgcaagctcctggctggtattgatgatttacgagtggccttacatatcttaagaaggcggggggggccgaatgaggacctatcaaactatttccgtcggcgaacaagcgatctgactcttgatctactttatcagctttcatggcattgagcttcttaactatggactctggtaacacaaataggactccagtctaatgcacttgtgcatcttagggttaaatgaagaagaaagtgcgacctaatatcaatactgttactgccgcacccctgtgcctacgaacctgccccaatcaacccacttgtaaggtgcacgccctcgctgataacgcttgctatgaggaaacacacaaagactgttcttcctgagtgcaccgaactg

SEQ ID NO: 88913 - DNA, 138 bp, Glycine max
ctgatctctataattcggagatgtacacaagtatcgctacaaacaatgccatgacagtacttgttaacgttgatgataaaagagatacttggccaatgtcagaactattctaatttccaagagtaactaaggatatta

SEQ ID NO: 88914 - DNA, 373 bp, Glycine max
agccctaggcactttacttagttgttcatcaagtgaaatgttttttccattcttcaccacatcctagaggtcaatatgaatagactaaaaacgatatatcatgtgttcctcccaatagtcatacttttcttctctaaatagcgaagggttgttggtggaaaactcttcttccatatctttcgtttatcaagaccttcctctgtatttgttagaatactcaacccaataggtcgagctctcatgccaactaaaataaaataaataacactagaagaggaatttaataatgtgttagatgaacttagaaatcttttcacaatggaagtgtatttacaatcaaaatgtgttctcaaagaactgccatgtactgaca

SEQ ID NO: 88915 - DNA, 390 bp, Glycine max
  unsure (1)..(390): unsure at all n locations
acatgccatttttgctttaagagtaatgtcccactaaaactaactttccaaatgtttgccttcgcaggaatggcaccgaggaagcttgcctcanagaggtccaggaaggacaaggcggccgaaggaactagttccgccccggagtacgacagtcaccgctttatgagcgttgtacaccagcagcgcttctaagccatcagaggatggtcgtttcttcgggagcgacgcgtccagctcatggacgacgagtatactgacttccatgaggaaataaggcgccggcggtgggcaccactggttactcccatggcgaagtttgatccacaaatagtccttgagtttacgccaatgctnggccaacagaggaaggcgtgcgtgacatgagatcct

SEQ ID NO: 88916 - DNA, 394 bp, Glycine max
agctttgaccgcattatataattttgttgccttcaagctctctgtacagatctactcatgtacggcggcctctcaggcttggtataccctcgttacatctctggaacgagccttgaaagtgactatgtggagcaatcatctattggttacgccattcatacttctcgaatatgaaagcggaaaagtggacttatgatatgaacaagaacctacctgaaaaagcctgtgcacgttctgactggcgagaagcactgacacacgatcagctgcagacacatagccatctatccttgtctagcatgattgacatgaatgtcactgattataggacgcctacgacactcgaacacgagagtataagacctccttgacatccttcatcccttagaactcc

SEQ ID NO: 88917 - DNA, 389 bp, Glycine max
agctctgcaacttttcgtccctattacaattgtcaggattcatactattcctgcactggacgagtcgaaccaaccaattccaaacaaggtcatattccattgacttttttggtcattgaaggcatgcattgatgcgtttgcattttgtaaacccattgtgcaaatcgatggaacatggttatatggaagatacaaagggatgctattaattgcatttacataagatgaggctaaaaacatatttccattggtatttgccattgtcgagggtgagacagcagatggttgacacttctttttttttttttgcaaaacttgagaacacatgtgacaccacaacatggtatatgcttaatctctgacaggtatgagtcaatcaaaagtgcata

SEQ ID NO: 88918 - DNA, 478 bp, Glycine max
  unsure (1)..(478): unsure at all n locations
gacctttanatactagaaactttgaagatatgaagtacgaattggagcactcattattcaaaattctttttgtattaaaatttatgtgtaaattcttgtaaagttataaatgctctcaaaatactttgtttatcttgagagaaaaaactaagtgttgaaactatttatccgtatgtaagatgataaaatgttagtcattgtgcaatcaaaccaataaatcttcttatttgtgttaaagccagtcgtggcttgataggataaataatattggttgtaacaagcttgatgtagagtttgagataaagagtcagaagtgatagtaataaatacttgtaacttgttaaagtttgtggaacatggtaatntgtcaagagctggacgtagcttcagtggttgagacgagccagtataaagatcataaactatcatttgatttgtcttggtgaaaattgatattggtttcttaagtcttatttca

SEQ ID NO: 88919 - DNA, 355 bp, Glycine max
agcttgtcattatgagaagaccttcccatcacctatatatattattcaaattgtcattataaaattatgtctctcactcgcatgtaatatggctagagttattatcaatttaaccagaacagcatttccttggtaaaagattgggaatggggagaaaaaaaatccatttatcaaatatttacagctaatgcatataaattaaaaaaaatcacaatatccaccaaaaaaaagaaaaaatcacaacgaaagaaacatacagttattttcttggcaatatcttctcttttcttttcagatagttcacggaatttctttccttcaattatatttggctcaacagcatcttcaattgaag

SEQ ID NO: 88920 - DNA, 261 bp, Glycine max
  unsure (1)..(261): unsure at all n locations
nggcagnatatacacctttagnttcatcttcaccctcaccataaatccaatcttccacttcctgaagtttaacagataaatcatctctctctgaagcagtgacgaactcttggtatttgtcattaagctgagatgattacaggatataaaatcaacaattattatatgacaggcatttgtatgtgatgttagaccctgtgtaagagaacaagaaagatagcgcccacctttgttctcatgtcataaacataagcctcaact

SEQ ID NO: 88921 - DNA, 374 bp, Glycine max
  unsure (1)..(374): unsure at all n locations
agcttgtgaaatnaatagaagttatgattctatntgacacaagtcgtgcaattctattcttaaaaatgtgacctaagcgtatgtgccataatgctcctgagtttgtattatcaattctatgcttagtaccatgcaattctgcattaaaggcttcaccataagaagctacaatatcaagtaaatatagattatcattaaccaagagtgaaccagttccaaccatatctaaattaaaagacaacctgaacaaattgtttccaaatgaacacaaataacccaatttgtctaaataagaaactgaaaccaaattccgtctaaatgacggtacaacaaaagtgtctttcaaatccaaataaaaatcaatacataataat

SEQ ID NO: 88922 - DNA, 353 bp, Glycine max
  unsure (1)..(353): unsure at all n locations
gcatcacttttatatgagctagtgaagaagaatgtgggagtgacctggggtgaaaaacaagagcaagcctttgctttgctaaaaaaagcttactaaggcacctggtttagctnttgctgacttttctaaaacattttaactagaatgtgatgcctctggagtgggagttgagctgtttgtacaggtgggcaccctattgcttattttagagaataacttcatgttgccacccttaactaccctacctatgataaagaagcttatgccttaataagagcactccgaacttgggaacaataccattgttcctaggaatttgtcattcatagtgatcatcaatcacttaagttcat

SEQ ID NO: 88923 - DNA, 373 bp, Glycine max
agcttgaacttctggctgtgcaatactagtgaaaaattgtggcacattaaaacttgaataatcctccagggttactcttcttgggtcttcagccatgattgggtcttcaacagtatgagaatgccctgcaataggaaaactagaagatgcctctgaagatcaaggttcttcttctggagttgctgcttgatgtaagctccattggagcttgtagccctaggatcttcttcatcaatgaattcctttgcttcttggaagatgaatggcatcggaatggagaaggaagagagagaggagacaccacttcaaggagaagatgagtctataagaagctcaccaccatacgaggtcatggataagagcttggaggaag

SEQ ID NO: 88924 - DNA, 430 bp, Glycine max
  unsure (1)..(430): unsure at all n locations
accttgaattaattcctttgatagcccttttgagccttgtttccctttcccttgtttgaagctcactacaagccttaaatgaanaaccatgatatcaccatatccttaanggaatttggagctttggaattgttttgggaataagtgtggggggtttttggttcattggataacttgttttgttggctatgcttcatgatgtattttgggccatacttgatgtacattgtatattggctaaatgttggacatgctgaatgaaaatgttgttctcaaaggctatagaanaaaaatcgaaaaacaagaaacaaaaagccataagttgagtgataagatctaaatggacaagaatgataaactcttggtctacctttatgttaaatntatctctactctttatttcctaatttttataaatgcactattccca

SEQ ID NO: 88925 - DNA, 394 bp, Glycine max
ttacagtcgcctgttgcatgcttttttgctgaaacattttattgaccctgtaatcgagaaaccaccacagtagaataattatgagctttaagcaatagatacaatccaggatgtgaggaatcatcctagattcagatgggctaggtctacacaacagcaatatccatgccttatttccaaaatggtgctggcccaagcaagctatatgttgcttctacaatacaggagcagtcacaacaaagacaacaagcaactgacgcttgtcctgaaccatccttaaaatagttagtgatgcatatgaccatccagaatatgcaatatcagcatgagacaagagacttcattcagagtctgacaaatgagatggtgcagatggctactcagttgaaccaag

SEQ ID NO: 88926 - DNA, 280 bp, Glycine max
  unsure (1)..(280): unsure at all n locations
ataatntgacaacatttcatagagatgaatgactcgagcatacttaagctatgcatggcatatgtaattatgaaattgagatgcccgaagaaacatctttgtttaattaaccactcattacgtattatgtncaatcatttttgctttaagtgaaacgggtattgatcccaacatggctggctcctggtaccgatcatatgcaactaataatgcgacgagaattttaatggatccttcttttgcttttgtcttgctgaggataatgctaggatcatgcttg

SEQ ID NO: 88927 - DNA, 373 bp, Glycine max
tagcttgtaaacatgatggtcattttattcctgctctgtacgagtcgaaccaaccaattccaaacaaggtcatattccattgacttttttggtcattgaaggcatgcattgatgcgtttgcattttgtaaacccattgtgcaatttgatggaacatggttatatggaagatacaaagggatgctattaattgcatttacataagatgaggctaaaaacatatttccattggtatttgccattgtcgagggtgatacagcatatggatgacacttctttttttttttttgcaaaacttgataacacatgtgacaccacaacatggtatatgcttaatctctgacaggtatgagtcaatcaaaagtgcatacaga

SEQ ID NO: 88928 - DNA, 375 bp, Glycine max
  unsure (1)..(375): unsure at all n locations
ccttccttctctagccattccttccttatnntctttattcattcaatcccctcttctatccatattaaccactggagtgtaaagtctctcatgggtatgagaggaanaacccctattgttgggagcctggcacgccaactcttgtaatggaactctttctattatntatttaatgcaattctggttctactactcttctgtatgattctatgtttttatgggctgatcatccatatagtgtttaggggataatgcattgaaaaatggttattttctaaagaattggagaagggtatcanaatgaaatcattgctagaaatagattgatattcgtttagcctatttcatacatctatgatcttaacgcaatttatt

SEQ ID NO: 88929 - DNA, 339 bp, Glycine max
  unsure (1)..(339): unsure at all n locations
agcttctatgccaaaggacttaccttgaattaattcctttgaagcccttttgagccttgattccctttccttgttttgaagctcactacaagccttaagtgaaaaaccatgatattaccatatccttaaggaattttggagctttggaattgtattgggaataagtgtggggggtttttggttcattggacaacttgttttgttggctatgcttcatgatgtattttgggccatacttgatgtacattgtatattggttaaatgtgggacatgctgaatgaaatgatgtntctcaaaggctatagagtaaaaaaaaaaattcgaagaaaaaactttgaa

SEQ ID NO: 88930 - DNA, 499 bp, Glycine max
  unsure (1)..(499): unsure at all n locations
ngcccagagattgagtccacggaagacatgcttaccacctcatatgatnggacagcggnttctaaagactcctctacggcttgcacantaggcatagaggatgggcagctcaccaagatgtcttcctcgcctgatacgatgaccagatgctcttccactacgaatgtcaactcttggtggagtgtagagggaacaactaccactgagtggatccactggcgccccaacagacagctgtagggggggttaatatccattatctggaaagtaactagacaggtgtgagggcctatctgtactgagagatcgatctctgccctaacctgtccgcgggtgccgtcgaaggcactaaccaccattgaactcggctctaagcgggaggcattgaatggtaatttctccacagtgctcttacgcatcacgtntaaactggaaccatcatcgatgagcacatttgctacgatgtggtccatacacttgactgatacgtgcaaagctt

SEQ ID NO: 88931 - DNA, 221 bp, Glycine max
  unsure (1)..(221): unsure at all n locations
agcttgtggcgcaaagggcttttgctgactcacatcctttgtgatgcgctcacgggccgcgtttccgtctcgtaagcctggaggccacttgcagccttgagtggaacaacacgaactcnccatagtcgtaaagaacgttgaacctttggaatggttgtgagaataagagtggggggctgtcgttcaatcggacaacatcgactagttgactattgctcaac

SEQ ID NO: 88932 - DNA, 449 bp, Glycine max
caccactcctcttcaaaccactctatgtgctcgcgactgattccctctcttaccttctcagcttgagtacattgttgcctacccacagagctccgcgagagttatttcggacatactctttcttgcgagccctcttggtctcttgttcaagggctcttgccgtagtggcattctcttctcgtaacccggcacactccttcctaatgtgtgttgccgccaactatgactttctacttggccagtttcgcctttcctaactcgcttttgagagcttggacttcttcagcctcttacggtgcttcaaaactttcttcgctgacgactcttaacttggtgagccaatctaaacctcgtatatgaacttctatccatagctggtacccaccaatgatgcatttcgaatgcccctaattcctgatcttcttaacagcgttcccatgcctttggat

SEQ ID NO: 88933 - DNA, 178 bp, Glycine max
agctataacatcataaatgctggttgaatcagtcatcccttgcatatgtctttagcctttgtcacccacaatgtgctaaatggagccgatgaaagaaagtcactggtattgtatggtttgccattcgtttttttaaaccataaagggaaaaaaaaataatttgacggtacttttaaaa

SEQ ID NO: 88934 - DNA, 237 bp, Glycine max
tgccaaaacaactgacaatctgacccacccggcatatcgtcaggagaactgtatgactaacagcgactctgcagtcacagataaatgacaagaccacaacaggagctgggggtgacactgtaatttgtggatatatgggtgggctctggaatcgataccaaggtgggtatcgatacaggcttaaaatgaaacaggaggtaagatggctctagaatcgatacacagggtgaatcgata

SEQ ID NO: 88935 - DNA, 415 bp, Glycine max
  unsure (1)..(415): unsure at all n locations
caccaaagaggtttataccaagagcaacattctcaaagcatgtccaagtccaagtttgagtgattgaaacacaactatattttcaagaggaatctaaataattaatcaaacacatcatagatacttttcatcagcttcaatttcaatcaatggaaattaagttacaacgaagtaattgaacatagcactaaataacgtagatcanatgctgngttgcttatgcgtntccgaacattctcaacattaccaggaaggtcataacagataagattatagcaggctatagtaggtattagaaagaagcactgctggaaatggtatganatggcatcatcaattaaatctaacctcaccatcaacatatgacgtaaatntataacacggatacattgacaagatcgaatggaacatgcta

SEQ ID NO: 88936 - DNA, 266 bp, Glycine max
gtgggaaaataattccccatggttatttgaatgagtaaattataggattgtgtgttttattatggtaataattaggtggattcctcattaatgtgggtgattctttgggagttaattaaaaaggggtttttttttgtcacgttctaaattatctttttcctatcatgcactctgggttaggtcccaatatgttccttttgctcagtaaagttcgaaatgcaccctttttcttagttttattgattgttgatgtgacaatgcttttt

SEQ ID NO: 88937 - DNA, 384 bp, Glycine max
  unsure (1)..(384): unsure at all n locations
ataggaggtctgatcaccntgaggtgattgggtattcanactcagactttgttggatctgtagatacgagaaaatccactcttaactatgtantttatttaactggaggagtagtatcatggaagagtgaaaagaaatcaggtgttgttgcatctaccatgaaagttgaatttgtagcatgttttgaggctacaattcangctaattggttgcagattggaattgtcaacagtattgctaggcccgtgaaaatgtattatgataactctacaacaatattnttctctaagaacgataagtaatctaagggtgctaagcatatggaattgaagtactttgtcgtgaaggaaaaagttcaaaaataaagagtgtcaatagaacata

SEQ ID NO: 88938 - DNA, 168 bp, Glycine max
aggaaaccctgatttccattcctaggatttggacttgaattgttggaaaaggggggtttggtaatgccactggtggggctagctagagatttggccactgagacatgatatggtaaagtgacagcgaagaagtgtctcaagaaaaaaaaaaaaaaaaaattgaaaaaa

SEQ ID NO: 88939 - DNA, 285 bp, Glycine max
gcttggttgctatttgaccccctgatacgaaaacacccgcttgcctatagttgttgattctttcttccgaaagctacggaactttatgaattatgtaacgatacttgttttctttccgaaatggcacgaaaccttatggattacgcaatcattccttctctgtcttctgagatgtacggaactctatggattgacataatactgtcttttgctttcggcatgaacgatactaacggatagtgtacaatgtctcttttacttccgaatgcacagaaattataattg

SEQ ID NO: 88940 - DNA, 275 bp, Glycine max
acgctggatcacatagaatggacatgatgatggccctccattcatactgtacttacacaatgatactgatagactttacatatggtacactcctaaaacaaactcctatagcactgctatatattccttgacaggattaaatgccatcatcgcaatctataaaatacagttactctgaaatattctttcaagtagttcaaggtttcttccatgcaaaatacttgaggatagagggtcaatgacctctagagactgcaaatacgttaggttttatc

SEQ ID NO: 88941 - DNA, 397 bp, Glycine max
  unsure (1)..(397): unsure at all n locations
ttttctctaacgaaggaggctatattaatctgatatttacttttttacatgagagaccaggtagtttcctctgattattcaatatgctattatcatgacttctggatataaagaagggcttaaatgggagatactgacaccttgctttcctatttatttccatctgcaatagataaaataatttgatatgcctctcaaacaaaggggaggtttacttccttcttgttacaagataacatgggaaaaagatgtgatccattcatcttggttcatcacctggtatggaggatggnnttatgtgaattcttctgtctctgccttcctgtgccacatgattganataaaatagatcatatcatactctccttcttctttgctaatgtatctcatgattact

SEQ ID NO: 88942 - DNA, 429 bp, Glycine max
  unsure (1)..(429): unsure at all n locations
gtgatccacatgaagcctatggatcaaagtgatccgcgtggagcctgcanatcaagttgatccgtgtgaagcctgtggatcaagttgatccgcgtgaagactgcagatcaacttgatccgcaggcttgttttataatttaaaaaaaaatgaattatgttntaattaatggaaaatggtttttaataagagtttannggttaatttgaagcttctagcctagagtatgatgttttataatgggtttttaagattttgtggttggtgtgcattcatatnttgaagggttcaatgggtttttactttatttatatcttggtatggactgaatatgcaattggaactatatatatcctgttctgaaatttggnttgtgactntttggttgtagcttactctgacacaactattatatctattatatctactat

SEQ ID NO: 88943 - DNA, 497 bp, Glycine max
  unsure (1)..(497): unsure at all n locations
agctntgatggtgtcaagaagaaatcacatgtttgtcatcatcaaaaagagggagaatgtgaatgtatgtatacatgatnttgatgatgtaaaaagaagaatcaaacaatgctcatttgcttcaagattaatacaagattgtttcaacaaacaaagccttgattcaagatttcttcaagatctagccttgcctcaaaacgaaaggtttcaagtcatccaaggcatacataatcgattaccaatacatgtaattgattaccaaggcacatgcaattgattaccaatacatgtaatcgattaccaatggtttgaaagtgtgtaattgattacacatcatatgtaatcgattaccagagactctgaacattgngaattcanattntaaataaagagtcacaactgttcaagaaaaataactgtgtaattgattacactagtgtngtattcgattaccagagaagatttcaaggaatatcgctaacagtcacatcatatca

SEQ ID NO: 88944 - DNA, 382 bp, Glycine max
  unsure (1)..(382): unsure at all n locations
tcatctaactttactttattgtncttgttgctcanactagagcanttacatcttaatacattatagtatgatacacttggttttctacctatccataattcatatgaagacatgttcagaagctctcagatagacataatgattagaatgtaacaagtcatgtngatagctcttgtcaaaaattatattgtatgccaaactctaataagagttctacacatctcttgtaaggttctatctttcctttccacaacaacattatgttgaggtgttcttgagcattaaagatttaaattgaaatggaaagacctttttacaccattgaattaaatacttgaacaaagatatattcagattcattgtgaaattgagtgtaggaaac

SEQ ID NO: 88945 - DNA, 402 bp, Glycine max
  unsure (1)..(402): unsure at all n locations
gcttcantgccactcaatcctagaagagatgtgtgtatgagggttgaaaccaccaaanacaaccttttctccatatttattntggttttccttacaaggaagtttagagatgaatttactcaaagcagaagagaagctataaacacggccagagtggacaagaagaagcagacagtgactttaggctgtgaatttccctgtggtgatttggttccggcattcgggctggaagctggggctattntagcaacaggaggcaaaggtggctctgccacttcagattctgtcaagggtggaaatggagcctcggctggaggcaagaattctttggtaatgagtccaacaagactacctgggtgaacaggttccatgtaagtaggtttgttgtcacccanacctaag

SEQ ID NO: 88946 - DNA, 187 bp, Glycine max
  unsure (1)..(187): unsure at all n locations
tctactcgcgaaagcacaccataatcacttatcttcttttaatctaagggtagtgngacaaattgaacttgatcactatctgcacataaatcagtgttcaataaccacccctaaaggtcaaagctttcaccccactcaacacatcaaagacagtttaagaaacaatcaagtgtgttatgatatgtac

SEQ ID NO: 88947 - DNA, 316 bp, Glycine max
  unsure (1)..(316): unsure at all n locations
gcttcttttagtgcgtcacatntatagtctatcttcatggtggtgcgagccttngatggtactcggcgggaagtaatgggggaaatcgacattcccattcagataggcccccacacttgcaatgtggtgtttcaagtaatggatataaatcccgcctatagctgcctcttgggaaggccgtggattcatgctctgggagtggtcccttcaacgcttcaccagaaaatgaagttcgcagtgggtggactcttattaatagtgtcgggtgaagaggacatgttagtgagctgcccttcctccgcaccgtatgtagaag

SEQ ID NO: 88948 - DNA, 385 bp, Glycine max
  unsure (1)..(385): unsure at all n locations
tttttcctagtcgatcactcacataaatttcattctcccccattgttttgaaattatgcttctcttaaaataaagtgttactcatgtgagttcttgatttaatccctatttctctccccctttggcatcaacaaaaagccaacgtgtgtaacannnattgaagcatacaaatacaactaagcatccatacaatattcatgggataatttanaccanattatgaagcaagaatcatgaagcaagaacaatgaatagatcanatataaaatccacatagagaaaagcatatagaaatcaagcaagataataaattatcctcacattataatagaagcatatgtgcataaataacanataagtcataagtcatcacaacataaatcat

SEQ ID NO: 88949 - DNA, 360 bp, Glycine max
  unsure (1)..(360): unsure at all n locations
cgtttgattnttctaagagcttctcttttcaattacgagcgtctcgatatattacgggacacaatcggacacccgagttaaaagttatggtcgtttgaatttgctcagagcatctagtttcaattacgagcgtctcgatatattacgggactcaatcggacatccgagtaaaaaagtattgtcgttngaattttctcagagcttctgttttcaattacgagcgtcctgatatattacgggactcaatcggacatccgagataaaagttattgtcgcttgaaattgctcagagcttctatattcaattacgaacgtctcgatatattactggactcaatcgcacatccgactaaaaagtta

SEQ ID NO: 88950 - DNA, 459 bp, Glycine max
  unsure (1)..(459): unsure at all n locations
atttatagttgatcttttctggaaggaatttacaaatntgcaaatttgtctttcttgattctggtagtagctctctgaatgatgtaaaatgtctttctacaactgatcattntgatatactgtttttgntttttctagatggatgcactagaaaaaaatttccagagccaaatcctagacattcaacaagccatagctgcaaaggaagataagtttgtgaaattacagcaggcaatgcaagaaatagtaaaagagtcctgcggagaatcttctgagaaagaggacaagtacatctaatattccctaattgtgcattattccaatttccaagcgtgttcatattatcattctttactacatatatcttaactctctttttccatntagataatactcaactaagtgattagtgtcataccctaatntcgtccggggattattacttgatgacatgcaata

SEQ ID NO: 88951 - DNA, 404 bp, Glycine max
  unsure (1)..(404): unsure at all n locations
actctctgtagtgcaatactagtttccgcttttgtttgagaaaaacagcgcctccttacataaagtaactgtactttatcttgaccatcaactacgcgaatttggtgtctaaagactctatgattatcaaagagaggaggtagttgtgaattaagtatttactttacttaataatgagagtaacanagaaaagttaattattgaaatgtgcgagccatacatgacttgatgactgatgctgcgatgcttgggctttcattctggatgtttcttatatgtaccactgcatcattctacaatntttctgagctggtgaagtgactgtcatgactgctcgtcattttactctctaagtaactgtctgcatgttttaagcacttctctatatttatgatttttttgct

SEQ ID NO: 88952 - DNA, 207 bp, Glycine max
  unsure (1)..(207): unsure at all n locations
tctgacttgactagganatgggcacttgcagtcacaaggactgtgtggatgacattgtctgtgaaaaatacgacattatcaacgagacatgggcccagttttgttagacccgcagagacccctcgtgggaggcatgtactttgtcattatacttagttctcacagaaacaacacttcttataatggactgtagtaatcatttgcatt

SEQ ID NO: 88953 - DNA, 251 bp, Glycine max
tatgaagaactatatcgatgaaactttggaaaattgttggcgctaccaaacctgtgaagcataagtgcagtgacatggtgtgctaacgctgggagcatggtctaaatgtgaacggtgcttcaatatgtggtaaaatattgagaaaagacatcaatgggccttaatgcggcactttcttttgtgatagtgatgacgttaaatagcaactgtgaataacacttatagcttcacatctaaacatgacgaatttt

SEQ ID NO: 88954 - DNA, 342 bp, Glycine max
  unsure (1)..(342): unsure at all n locations
gtattagtaaattaattcaacgaaactttcatagaaaaacgtccgactgcattttcttgattattctattatttttttttcagatattttgatgattatattattcttctgctctttttggtttaatcgaggtgacagcgtgaaagatcagttagantttgctttaacagtgattaaacgacattactacacagatgatcggttgagattcattttatcatttattaggcgagataacggcttanataaatggttaaagcacgttaaaaacagaagataagataatcgaatgtgaacacgatgaagatgacagctaacacaacacgacatgaattataagtc

SEQ ID NO: 88955 - DNA, 78 bp, Glycine max
cccctttatactactactctggagaaatgactactccacccttatgtactaccctgcgaacagcaatcaaagcctctc

SEQ ID NO: 88956 - DNA, 354 bp, Glycine max
caccattattattattagtatataattatcttggagttttgtccattcattcgaactcgaagtatattatattatgatctatttttttctccgaagcagtatttctaacataaatgttcccttatgcttgtatttaccagtgcaattagtactatgtctgagaggaatttctgctcatgaatacattggtgacatgtgctcaatgctactgagtggacatagatatattattttagaacaaaatggaaaatctgtacagatacttgacataagtgtgtagaaaaaaggccataaacatactgtgagtcttgagagacttaatatatgcgtctacagtgaccacttctccctgtt

SEQ ID NO: 88957 - DNA, 309 bp, Glycine max
ctgggcatatgctattgcctaagatagctctctgtcactgtctgcaactaagtcgagactaccaaattggtgggaagcgttgtacttaagcgattaaaacatctacaaatatgattataaaaggatttggaccttctgcacgcggatcttacgaccggcctcttcgaggaaccctccacctcttcatagtcggaaattgtcttaagctacctttaacgtgaggacattatttcataattaactcctagtacaaatgtgcgaataactgttttttttacctcattttacttccttgtgagatatctcctt

SEQ ID NO: 88958 - DNA, 348 bp, Glycine max
  unsure (1)..(348): unsure at all n locations
gaccacagagtggtacctggagatatgtcgcgggggtcacgagaccttggggacgtcaggtggggtgctattgcccaaaaccaagcttgaccaatcccgacccaacccgggcatagtcggtcagtgagaacctgtgatgtacctaaacaggcgagctcctggcagtcaacagataaaaggaacaaagaccacaaagcaaggaggcttgtggtggctggccagctgtgaaacttgattgatatgtgagatatggtctctggtaatcgattaccaagggtgggtaatcgattacaaggcttaaaatngaagacaggaaggctagatggtctctggtaatcgattaccatg

SEQ ID NO: 88959 - DNA, 463 bp, Glycine max
  unsure (1)..(463): unsure at all n locations
ttgcttacatctactcctgagggcttgtattgtgttatggagtgctcttagacaatatatttttgctctgctctctgagtaggaaaaaagttctagtagaaagttttcagaggaaactcttatttatcgatacattctatcgaattgatacacaagtgtctgaagcggcagagtatgtctcgatctattaatcgatacaccttatcgaatcgatacacaatgtttcanggcatgactattatcangtgctctgcttaatcgataacatgtgaatatcaatattctcttcttaagtaatcagatgtggacaaaacacttatcgatacttccgaattatcaatacatngtcttgagttgttcagaatttggaagaatactaatcgataaaagataattatcaatactcattgaatatcgatacctgtgattatcgatgaggggtatacagtgtttataatactac

SEQ ID NO: 88960 - DNA, 446 bp, Glycine max
  unsure (1)..(446): unsure at all n locations
tgcagctatgatattatagggtatcatctctaagtatttgtcgtctctaaacgagtagcagtagtaggagtagcaacaacaatagtagtagtagtagaagaagacacttactggaagctntacataaacaggaacgtatggtgtcctagtaaagtcattttcatgcacccttgaacgaatatcttgcataagctgcatcaataaatgacactatcaactggtcttggatcacattctcatataaggttccatagtccatataatggatattgatgcataagttaatagcacttaatacaaagaatgatttagtttcaatcccaaaactatcttctagcttagcagaaacgaacacaaagacattgatgaagtgagatttgcataattagcatcagttaaagaacatttacttatctctcacattagttttaacatatggatataaa

SEQ ID NO: 88961 - DNA, 427 bp, Glycine max
  unsure (1)..(427): unsure at all n locations
agcttacanatctgntttaagtccaagcctctatattatataaaatctggacaagataagataagattggttgaaataaaatctacatgaaataaaatctggataagataagattagattggatgaaataaaatctagatgaaataaaatctggataagataagacttgataaaataaaattgtctgttctcttcaagtccaagcccaattccggattcaagaccaattgcttataattctcttgaaattaaattaaaaacacaaaattagtcaagtatgcccaaatgataaaactgcatatattaattgacaattaaggctaatcagtaattaaaatggtgacaaanagggttaaaaaataagagaacataatgacatatcaatccccccacacttagccttttgcactcctgtgcaaaatcaaaa

SEQ ID NO: 88962 - DNA, 474 bp, Glycine max
  unsure (1)..(474): unsure at all n locations
attctataggctctntcattggtagccaccaccgaaaacctccaacactatgttaagagccttcttagcacccccgacttacgtgcatacatatatgtaatgttattcatcaatgcatgcatgttatgataattcanatcaatatcatatgtcatcacaaattcattcaccaatcttagcaccataagatgttataatatcataaattcaccatgcatatacttatcatgctcatgaaccctcctatagttcaataagcataacaagacatcccaacaccttgattgtntgcatacaactcacccaaaacttatataaatgtgaatcttatgatcgcagcatatagtcaactctaattcataaacaacnatcattcaaccacatctcatatcaccatcaagaaancaaccaacacaactcaagacattcatcaatacataatacctcatcatcatataatatcttcacaacatg

SEQ ID NO: 88963 - DNA, 463 bp, Glycine max
  unsure (1)..(463): unsure at all n locations
gagtctgatgagaatgagcttctccatttgtgagtgaaaccttcccaggaacagcaatctgaattgttggcattccatgcagaaactctgagctcttgtatgatagcaagtagtatagtttgttcctgggactcagaacccacaagcagagattgacagataccaagttaacagaaaatgcaacaagcatagaattctcatcactgaatacaccatcctccaaaaagttcttggaaatgtgaaaatttatggaacgaagaaagctactatttgcaacacaccctcagatgaagatcnagtttacttattgcttcattancagaaaagaggttaattcacacattntatccttattttcttagcaatcagctatgttagagtaaacattgtactgtgaattcctctcattttaaataagcttctaattccaaatagagcttcttaatctgtattggaatatgta

SEQ ID NO: 88964 - DNA, 149 bp, Glycine max
aatatgccaccaacatacatcggtagagtacagaagtccaaaagtcagtttgccagagataatcattgatcagcatctctccatttctagagagtttagctactaacacacatttttttatgtatcacgttttttttttttcaaaaagt

SEQ ID NO: 88965 - DNA, 377 bp, Glycine max
  unsure (1)..(377): unsure at all n locations
accatacagacctttgtgtagatgcaactggctttgatggtttgatgatgatcatgatgatgtgttgcaattgatgcaaatgggcttttcaagattaaaattcaagacaatacttcaagattacaaggcacaacatcaagatgatcactagaatattaggaagggaattcctaattaaattagcaaaggtttggccaagtgatttaaaataaaaagtgtgtttcacaggttntactctctggtaatcgattaccagaggatgtaatcgattaccagtggccaaatacgtnttataacagctatannaatttgaattcaaaatttagactgtgtaatcattacacaattttggtatcgataccagcagtagtaaacgt

SEQ ID NO: 88966 - DNA, 301 bp, Glycine max
tatgacggaatcatgaaatttaaacattgtccgtacgtcacatggatcatcaaaggaactctgaacagtgaaaactggcctcattgaaaactttatctattgatagctcctgactgactggctgactgctgactgactgactgactgattgcttactttctgactgatcttgattattgacctgatgctgatatgatgctgtgactgcctgatgctgacactggcttgccctgcaattgacacatgaacaacctttactactgttcaagagcctagggtcttattgtgaatattgtgtaac

SEQ ID NO: 88967 - DNA, 212 bp, Glycine max
gagagaactctacggtagaatctacgactatactccaatcatacggtggagtaccgatagagagcacacatcatcaattgtatagtcgttatttagagctcacattattgtcatcatcaaatagggggagattgtcgaagcatatatgatatccaatcttgacgacatcagatgatatcgtgatataagtccaccatgcatatacttatcat

SEQ ID NO: 88968 - DNA, 339 bp, Glycine max
tatatgagaagacctcagacattgctcgaccttgggtgactcattcttttgctatcataacttctcgactttggccttctgcaaatttaagatcttttgctctcttttcttactcccttgcagattattatatttttatgtaccactctgcaggtggtgcatgtttctccggtacgggtcccccaggtccattgttgtggtctttttttaaaacaatcttcctaagggacaaggaacatgtggagtaacaggctggtatcaactgctgatcttcagtgattggaacactttacctctgatggtttgtgtttttatataccatttgcagcgcttcggtta

SEQ ID NO: 88969 - DNA, 465 bp, Glycine max
  unsure (1)..(465): unsure at all n locations
atctctgagtcacctgcggcatgcaagctnttgtgaaaacttcatgtgctactcaatgttttgataactntttgtacttatctngattgagccttttcttgattcttgaatcttgagtcttgaatcttgatcttgattattcttgattcttgaacacttaaatcttgaaacttgattcttgaatcttgaaatcaaatttcctcttgattcttgaagtgttcttgattcaatcttgaactcattgtcttgggcctttgtcatcatctttgttatcatcaaaactccttgaatcaatcttgattcaacatcatgaagcttgcttctacaccttcgctaacattntgattcttgctagccgagttgagctgcttaacgccagttgccgcgcaatctgtaagggtttttgacatttcggaaaagaatgcanaaaatactcanaagggagggcaatgaggacattttgca

SEQ ID NO: 88970 - DNA, 400 bp, Glycine max
  unsure (1)..(400): unsure at all n locations
tgccatatccagaggatgcgaattgtccagattatctagacaatagccttatattagctgaactgaactacaacaatgaagaacttagatcagaagttgaacatctattttctcacatgacaggtacattaacaacagagcaatttacccctctgaaaattattatgtgcatntccttcttcgcttttctcatctataaattagaatattaactctcattcattttctttaaatctaacaccacatatcaatgattccagacgaacaagctttaatttacaaccagattgttgaagctgttaataaagatgaaggtggtatgtcttttctctatggatatggaggtacaagaaaaacatacatttggaaaacactttgcagttcactgagagctgacaat

SEQ ID NO: 88971 - DNA, 193 bp, Glycine max
gcgtctcgatatgttactggactcaatcagacatccgagcataaagttatggtcgtttgtattggctgagagcttcaacattcaattcaagcgtctcgatatgtaccggactaatcagacatccgagagaaaagtatggtctgatgaattggctcagagcttcaacttacatcttcaagccgctcgatatgtt

SEQ ID NO: 88972 - DNA, 369 bp, Glycine max
  unsure (1)..(369): unsure at all n locations
cttaagtcacctgaggctgcagctttagatggtgaccacgccacagctgtttttctaagctgtcttgaaagaatgcattaacagctnttcgtccgtagaatatgccctcatcctttggcaatacatccgaagctgactttntggacacgtcgtccctttgaatttatcaaaatctggtactttaaacttgggggaatcatgatgtcaggtaccaaacacagatctgctaaatccgagaacggatagttgccgaggccttctaccgctctcagcctctcttcaagagatcaatctttcccttgtcttttgcaaagggaacaagttccttaacgtgtgcggatggagacgggtcgtggcagactatgtttg

SEQ ID NO: 88973 - DNA, 157 bp, Glycine max
  unsure (1)..(157): unsure at all n locations
cataacctcaacntagagcctaccatgatgttaaatacttggcgcggtaaattatataactgaacttattgtagcccaaacctttatctgttaaagattgatataaaacatggtcgtgatgaataataacattgagtgtctcttgcattttgaaagg

SEQ ID NO: 88974 - DNA, 378 bp, Glycine max
  unsure (1)..(378): unsure at all n locations
tatatggatgttagttcaaggtggtggattnttgggctgtgactaanatccatatggaagtttattctgttattttttctggtttatcctctgcttatgtaaggcaaggatgccctatattttggataggcttctacttgtatattgcattagtaataaaagctttctattttccctcccatggatgtagccttactcaagggtgaaccacgtaaaatctatgtatgttctttctctctttttctccctttcattntgctgcaacattggtgtatgacattnttgttctgttgcatctccctgctattttcttggttggtcttcatctccttaatattttttctagactctagcttaaaaactaaagagtaaccatgc

SEQ ID NO: 88975 - DNA, 115 bp, Glycine max
tggcttgtttgatatatcagacttttatcgtctgcttaccattatcatgcagtactcttttgaacgagaccatacagccccgagctaactggacttatgctcacagaagataacg

SEQ ID NO: 88976 - DNA, 461 bp, Glycine max
  unsure (1)..(461): unsure at all n locations
gggaaagcaaccttcgtggcatattccgtgaagttcacaatgtttagaagcaaacaagcaccattgcgtattccatanagtttcgcaacgtttcggaaagaaatcagccccanaacatgaaaatggggtgtatttagtaaactagagggtgttaatagcaatntggccaactcgggcccttcctatatgttccggagaaaggngattgcttcangtggaagcaacatagctcgcctgtgagagctaggcggcaaccacctccccctttttctcctataaatagagaaaggggggctgagaacttcgttcangatcccttngcactgganatcacttaanattagtgagagaagagtgagaatgaaaaaaatccaagccgatgcgcttcttgtacatattcgagaacgttcataagcattccatggaagtcttcgccgtcttcgtcatcttatcgtcttcgc

SEQ ID NO: 88977 - DNA, 222 bp, Glycine max
  unsure (1)..(222): unsure at all n locations
atcaaatatttattgaataatatatatttgagacataaatcttgacatcatagtattaactataactgatatcaggtgaagttgatactctctcacatcaattgtaagtgatatactaangtcagactatcatatgatctattcttaactctctattttattgcctctgtaccatttaataaaaatctctttgaatctattaaaatattactatgattaaac

SEQ ID NO: 88978 - DNA, 341 bp, Glycine max
  unsure (1)..(341): unsure at all n locations
tgaacccattcctgagatatattctgatggtgatgctgactcggatgcacaatgagttatcttatttgcaaatagatgtagtttaaaattatgtatcctttgcactagctaggtgtggtatagaggctcaatcacttcaagctgcaaattntgttttatgataaatgttgtaatttagtgtttcttagttcattcatgcattgatggcataaagtctgattttatagattgtgtttcacaaaccaattatactctgagggtgtcagaaaaaaatttgtatttctctctgagacgaanaaaatanatcttactcagttgagcattgatagcagatacctctc

SEQ ID NO: 88979 - DNA, 394 bp, Glycine max
  unsure (1)..(394): unsure at all n locations
gactgggtcctttcttcccttcgcaactngagttcactattgctaccccatagagctccgcgaaacttgttccggccatactcttccttgcgagcacctctggtctctcgttcaaaggctcttgcggtaattgcattctcttcccgtaacccggcacactcctttcgaacgtgtgtagcagccaacttgaacttctccttggcgagttttgcctttcctaactcgcttttgagagcttggacttcctcgtcctcttccggtgcttcaaaattctcttcgctgacgactnttaacttggcgagccaatctaaacctcgtatgcgaactntcagccattcgtggtacccaccaatgatgccattacgaatgcctctaagctcttgatcttttctta

SEQ ID NO: 88980 - DNA, 304 bp, Glycine max
  unsure (1)..(304): unsure at all n locations
tcttccatggcttattccctagtggatggagcctnctctcacctcttctcctttgtcttccgctgcatctncatggtggaaaatcaccattaaaggacctcattgaagctcacagatccagcctccatagaagccccacaagcaagcttccatcaagtggtaatcagagcacaatagcttcaagtaggtgctccttaaacctccattaattntttgctttaccttctcttccattggtgtttctntaattttctccatgtatctnctcacatgtcttgtgctaaatggttttaacatgattctt

SEQ ID NO: 88981 - DNA, 201 bp, Glycine max
  unsure (1)..(201): unsure at all n locations
atttcgcagacatcttaatggtcttgagcagtatcccttgactgcaagtccgctctgactggaagacatgttggatagacacttttagtacaagctatttactcttatggctgacttcttaatatcacttccatctgctacatgagtntctgctgatgcaaggagtggggatctagctcaaggttatggatcacactgtgc

SEQ ID NO: 88982 - DNA, 408 bp, Glycine max
  unsure (1)..(408): unsure at all n locations
tttgaagagtatcctgggaaccttcacccgacgaagacactgacaaaaacttatcttctccttcttggacaaagtatggcaggctggnggccaagtaaatttcttcccatcagaccttggatgcaactgtgatcgtatacccatatcggctagatcttgacgggtatttaagccatccttcgtcttgccttgaatgttaaggagcgtcccaatcacactgtcacatacatttntctccacntgcataacatcaatacaatgtctaacgtcaagatcacaccagtacggaagatcanagaaaatggacctcttcttccatatgcaactctgacttttattcttaatttggggtcttccaaatacagtattcatgtgttcaacccgtgatatacctgctcaccagtcaac

SEQ ID NO: 88983 - DNA, 440 bp, Glycine max
  unsure (1)..(440): unsure at all n locations
gcttggagcttcaatggagaatgaagattattataatggcaacgtgagggagagagagagctgtctgaaaagtgtggnggctgagtgaagagagagaaaagctntttggttntaaataaaagagttttctctctttctattattntatttaagcaatgccacatgtctccattngagtggagcaaaaagggtccactttcccttntgactgtgacccatactcagccacaaaagtgggaaaaatctgaccttagaaacgctaaaatcctgccttcggtttgcgtgtcgtttctctggttccagatcctcgcgtttctctgcgtccgtcggggcaagtttttgaaagcaagcaatatatatatcataacgctcagaatagaaccccgagcatgggtcagagggtggtttcgttaaattttaagtcgcacgcanaacgatga

SEQ ID NO: 88984 - DNA, 471 bp, Glycine max
  unsure (1)..(471): unsure at all n locations
atgaactataaatctaatcattaatgtaaagaacatggnntgttaacgcaattntattaaaattttagaatgtccacatgagaatatattatntanganngagatgttgttcacggaattatttagattctaaaaaatgtggaaataaaaatatatttcttttaaaattattttatctcactactagaanaaatgggatnnttaagtccgtctttatggccatgtcacgacggttntcaaccgtcgttaatgccaacgtcgtanaatgtataagctattttacgatggtttnagaaaccgtcttgtagtttgaatctacacggcaaacataccgtctatatgtctaatatacaacgtcttcataccatctaagctcgataattgtgattaaaccgtacataccgcttataggcatcgtacacgtatgaaaccgctatgatatctatacattagacgttatacgcttgtgtt

SEQ ID NO: 88985 - DNA, 464 bp, Glycine max
  unsure (1)..(464): unsure at all n locations
agctaccacccaactntnggtgttatgccttgtctcattctacatatntgattaactgcatccccactctcgttttacataacatctcaccttatgaaaaactccatggacatccatgcgatatatccaatcttcngcgttttggttgtctgtgttatgctaacacccttaaagcaaaccgccaaaagctcgatcccagagcacatncatgcatcttcattggttttaaatcgcatactaagggttatctagtttacgaccttcattcacatagcattatcacttcacgaaacatcatantttatgaagatcanttttctgcattttctgaaactcaacaatcgagcctaggtcccactgtaccatctncgggatccttttnncgggcaccaactcgactcacccatagagaccacaccaacacaaccccatatgccagaatcttcaaatgtgacctccactga

SEQ ID NO: 88986 - DNA, 366 bp, Glycine max
aataatattctaatcaagcaatagtctcagattatcttaaatcgctatgtaaaacggaattattgacattattctcttattgatgcaaactttgcatgcatatggatcatgcttcgctttgtattcattacctatcaccaggctcatgtgtatacttacttctctccagagaaattgttcctcatgtctgcaaatttgagattaaataggaagaagaaagagactcatattatctccgcttttcaggatttgtataaatgctagtgtcatgtgaacagatatttttaaatttggagagtgaaaaatttaatacttcatttgttatgaaacctccctattatacattatctgatgacatgtgtcatg

SEQ ID NO: 88987 - DNA, 471 bp, Glycine max
  unsure (1)..(471): unsure at all n locations
ccggatccttagcacgagctgcaagcttctcagtggatcaaccttactttgtagtgctcctaacctccataatntttttcttaccttctcttcgcattgttgttctgtcattttctccatgtatctcctcacatgtcttgttctaaatgttgttaacatgattctntagagtttccaccgattaaacttgctatagaagttagatttgattntctatggttcanatttcttgttcttagttcttgaaccatgaattgtgttgagtatatgttccctttgagtttgcttgtatttttgtggctgaatctaaaccaaatattctacaaaattttaagtggagacacctcaaaatctgaggacttgtcacctttgtagttgtcatatagtatgttagtctgaacttgccatagattctatgttggctgattattcttgtcttgctactattgtctgatgttaatttttactata

SEQ ID NO: 88988 - DNA, 313 bp, Glycine max
agctgagtatgttctatcggccatgctctactcttatatagtgtcatccatagtagacagtgtagttctgttattacgaacatatgtgtatccttggatacatcgagttgctgatgatatcataagaaatgcgcgttatatatatggactagatgcgctctaccacaacttgcagtgagtgtgctctgttactagatctatgttagcatgtgctgtgcctgtttacctgtgaaagtggtgatatatatatggtgtatataacaccaaactactgttgttttacatgaattatcatatacttatgatagtatat

SEQ ID NO: 88989 - DNA, 435 bp, Glycine max
  unsure (1)..(435): unsure at all n locations
acaatgatggcgcttgtagtaacgagtcatgatgagactaagcagctgggaccttgcacggagtggatgtaacagttgaggaaaggacagttatgatngctcncaacaagtttggtggatgatcaagacactatganaagttgaaaaagtctgcatacttaatttcaacatagtttgaagtttgaagtacaagaccaaatgaatttgtctttcactatcatttcttgccttggtgactngttggtcatgggttcgaatccagaaacagcctctttgcatatgcaagggtaaggctgtgtacaacatcccttccccataccttcgcatagcgaagagcctctgggcaatggggtacgaagtttttatcatttcttgctgtggactgtagtgattgaacanataaaagtgacctgtcctgngatactgacaggtgac

SEQ ID NO: 88990 - DNA, 347 bp, Glycine max
  unsure (1)..(347): unsure at all n locations
ttcttatttccacatctctacatacacaacgatgattttcgtgctgtccctgcttattaatactaatgctagagtgtttagtgggatgtgatatctatctctgtctgtaagccttnatttctcggtttcaggcagtttcacaacacaataaagcatactcccgctgatttatagatacactgatagtgatatactatagttcatcctgcttgattgattgtgatatctacatatagtctgataattatgcatttcaaccatatgtatcatcacttctttacatctaagatagctgaatcaaacaatgttctttttatctacttgcatgacaactatgtgtaatatac

SEQ ID NO: 88991 - DNA, 308 bp, Glycine max
  unsure (1)..(308): unsure at all n locations
actgagctcacgtactcncacgtagcccatatnctcatttctctcaataccgggtccccatcaatcctcccaagcttccacaacatccaagctgaacaacattcaaacagcacaagctatcacagccaagcaaaacagagcatatgcagataactctgctcaacacatcaaccaacatcacagcttttctcacttaaagaccacagtaacaattccttcgatccaattcgttaaccgttggatcgactccaaaaatttactggaagtctctagtgcatacgcctacattntgacccgtgggatctact

SEQ ID NO: 88992 - DNA, 304 bp, Glycine max
ctccgatagaagcctgtgtgttcgacgaaactcctgatacccttagcatttactagtggtggtgacttctcaatgacgtctatatcggttttgtccacctcaatcccttggttgagaccgtatggcctaatattatctcttcctggaccatgaattgacacttcttccagtacaacaccaattatgctttaacacatattctcaacatgagctttagattggtcgagcatcaatcaaaggaatgcctaaaaactgagaaatcatacgtgaagacctctatgcactcttctatcatgtcaacaag

SEQ ID NO: 88993 - DNA, 362 bp, Glycine max
  unsure (1)..(362): unsure at all n locations
tccgatggatatgaagtatcaggagaatcatgcttgctctaatgattgcatactgtacaaacatgaatttgaataaatgcacaaatgccctaggtgttgggtttcacggtacacagtgaaggatgatgatgattgtagtagtgacgaaaactcaaagaaggcccccccagcgaaggtgttgtggtatcntttgatccttccaaggtttaagtgtctatttgctaatggagacgatgcaaaagacattacatgccatgcaaatgggagaaactacgatggaatgctctgtcatcccgctgattcctcacagaggaagaagattgatcgtttgtatctggatttcgacagagaggcaataaatc

SEQ ID NO: 88994 - DNA, 150 bp, Glycine max
gagcgattatataccttctagactgctctataatactattctcttcagacatacaccttgacaatgcatcttttaccacgactgcgtagctcttgaaggaacacctaacagacaattgtttatccgacgtctgcagaacgtctcttagag

SEQ ID NO: 88995 - DNA, 333 bp, Glycine max
atcaatacatcatacctctgtaatcatcaaaatctaatgtaaggatcctgtcgacgaatgatcatgggatcttctatacctaataaccataacattctccactgtcaaaatgtggctcgggagtgtgtagttccaacacagagcctctatatacatgcaaactctgacttctgaattctccaagacatctatacgatggtgttacaatcactagatgacccttgtgcttcaaccaaggttctccacaaacacatattctaactaccatctcgcatctgtcttagtactgttttggaaaacaatatgctctgccaagaatatgatgggtgatta

SEQ ID NO: 88996 - DNA, 311 bp, Glycine max
  unsure (1)..(311): unsure at all n locations
agcataacaagactttctgtgatnggtntaaagatacaatctttgcagatgaaaatgcttcaaaaatattaagaaagctagcagatgggcctaaaagaaatgttataacttggcaaggatacgacataaacaagtattcattntacacaaaagcacaagatgacaaaagtacaatgcaaaacagcggggtcaccctaagggctgaatttcaacacttcgcaagtgtgcatgacgccaatccctgtgtagcttccatcccttactttgggttcattggtgaaatttgggagcttaactatgtganacttact

SEQ ID NO: 88997 - DNA, 437 bp, Glycine max
  unsure (1)..(437): unsure at all n locations
agcttcagatatgagtttatgtaataaatctgtttttatcatctgntattgatatgttctattctatcatacctgtatcttatgtntttagaaaactgacatattctggttaatggataattgtatcagaatttatgtaacttagtaacaaaaacacaattacaagacaagcctgtggagaatatggtggaataagaaggacaaaacttcatcagaaataataaatataaatgcatatgtaagctgacaaacagacctttctatcagctctggcatatccaaaatatggaatgacagcagtaatatttttggctgaagccctcctgcaggcatcaatcattatgagaagctccataagaatctcatttgcangaggacatgtgggctgcacaagaaacacatcacacnccctgacactctcttgcagctgacatata

SEQ ID NO: 88998 - DNA, 479 bp, Glycine max
  unsure (1)..(479): unsure at all n locations
caagctttacaagatagtggaactctcaagcggtttgtttgtggactggacgtangcacaagggtgtgaccgaaccagtataaatatgagtttgcaatctctcttcccttaaactcctttatttattattgttttatattcatattcaaattgctctatttgaatcaatatttaagaagttcatttttaagggaatttataacttgaatagaaagtgaaataaaattttaataagggaaatagtntgtgatatcttaattcaacccccccttcttaagatatctgagaccacttgtccaacaagtggtatcagagcttcattcttgtataatagttagaagcttcaagaattatggcctcatcaaactacttggttcccgagggaaattctataaatagacctcccatctttaatggagtgggtaccactactggaaacccgcatgctaattttatagaggcaatagatntaaatattt

SEQ ID NO: 88999 - DNA, 343 bp, Glycine max
tctacatgctttgaagaaatattaatttctagacagaaatttcctaaggaagatttctttgactcataattctgaatattgaagagaaaacccactatctggaccaccatgttgtgtaatggcgttgacaaaacggtcatgaagatcagatgttcgcctacaacgctgcttgacacttctcccaacaagtgcagtagctatttttacagaatatcctcccaaaactcctacatgtgctagctgtccacaccaccttgagattcatgccgcaccatgcctacacggcgaaaactgtttgcctgaacttatttatacttactacggaatacatgaaaatagaatc

SEQ ID NO: 89000 - DNA, 349 bp, Glycine max
  unsure (1)..(349): unsure at all n locations
ttattgtactcgtattatttattattcctcaaatgatatatatgacaaaagattattcaatgttatattttgctctataatatttttcttctctctgtctaatatcataattttaacatgtatcggaattattatgttttttttcttaatttttttttgctacattccttaatatatttttcanggtgtctgataattaattatctaatttagtaactttgncctcaccattagcatggcctggcccacttctgtattttctaatacatgtagtatttcctaggtgacattaatcacaattgcgtgattggacatgaaacaacaatntgtgatcattagctgtaacagt

SEQ ID NO: 89001 - DNA, 351 bp, Glycine max
  unsure (1)..(351): unsure at all n locations
atagccatcaaagtctgaagagagtatgatgaactaagggacgtcaatatggccaccgatgaagccttggaatgagatacgcataaggctcgaaaggaagaacaccaccaacacacagtttgaggggctttatagggcagcaatagtgagctcaagctccgaagaggtgaaaggaatcatcacgagtcacaggcatgatctggaaggacgagctaaaggcttgccttangtcgaaaagaaatttgtcccaatagttaaagcgagactgaagggtatatgtgggccatcatctataagtgcacagagaagctatatctagcggttactcacgagcaaatgctagatgatgag

SEQ ID NO: 89002 - DNA, 455 bp, Glycine max
  unsure (1)..(455): unsure at all n locations
agcttntggagtagaacatggactctctcatttatttcaaaaggaagtcgtatctagtcaaggtcttagagaccatacaagtttcctaacgatttctaattatgtgggccattaagtctatcatatgctgacaatagccgagaagcccatgaatctcttcgggggcggagtaggtgtctgccatcgccttggccttggctaacaatcggggaagttcttgactcccgttcaaggtaagagcaaaccgatccatccacatggttgcctcttggtgtaagagtcgtcacccttctctagcctcttttccgcgatacttggcatactcatcgcgatctatgctcgtgggccgggtagactaactttttggacttggcatatactaacatgtggctcgctccataacctgaacagcttctttgacctgacagcactaactctttaaaccatcttgtctc

SEQ ID NO: 89003 - DNA, 294 bp, Glycine max
tctatatggactgaaacagactccaagggcctagcatataagaataaactcttttctacatggttaagactttaagaagtgtactgtagagcatggtatctatgtgaaggcaactaaggatggtggagtcctgctaatatgcctctatgtggatgaattgctgattacagggagtaatgcaattgagatagaaaagttgaaggacaatctcacaattgaattcgagatgtcagaattaggcttatcatacatccttggtattgagtttgatgaaactaagcatggaatagtgat

SEQ ID NO: 89004 - DNA, 230 bp, Glycine max
aatcccctgaaacatactggctttgtctcagctctcatcactcatagactatatgctgcggatgggttttatgaactgctgctctataatagacagaatcactgctaactattgtataactacttacttgactactcaacagaatgttgagcataagaagggggtggttggataacttaagactatgcttagggtgctcctgatattcaatttggagtttattcaattta

SEQ ID NO: 89005 - DNA, 393 bp, Glycine max
  unsure (1)..(393): unsure at all n locations
ataaatagtttttcgaaaagagtttatacctatcaatcaataanatgttcaccaatgattctattaataaataaatgtttaagtgtgagacatataatccatattcaattgtgagttccttttgtcaaacagacaattattagtttcatcttaagagaaatttcacagtatcaatgagaatagtaataatattttcaattgtgatgtccattataatagtttttgtataaatggggtttgtagtgatntagataacaacaattttgacaattataattttcataataatgattcaatgacaattctaatattgtattcgataataactctaatagtaattttgatagtaataagacagtaagattggatatgaagtaagttagagagaaatga

SEQ ID NO: 89006 - DNA, 377 bp, Glycine max
  unsure (1)..(377): unsure at all n locations
gcgtttagccctcctggtaattcagaatcacttanaattagtgaanaaaattggttctgtgaagaanatccaagccgaggcgcttccgtaacgtttccgtgggagatttcacgaaggttttcgaccgttcttcgacgttcttcattcgttcttcatcgttcttcggtcttcaaccggtaagttccctagattgaacttttcaattcattctatgcacccttagtggtcctcattgttnttacgtgctttcatttacatttcatttcatttactttccgtacccncttttgacgtgcttaagccattttattaagtcatttctcgcttaaatcttaaaatanaatanatttccacccgatcgttgaattgatcatccg

SEQ ID NO: 89007 - DNA, 320 bp, Glycine max
  unsure (1)..(320): unsure at all n locations
tatgctctcttccatgctgtctgctgtcatttacaatttgaacacccaaatttattcncagatctaaattactagaacatcatctaaataattcaatacagaaagtaactgaataaaatatatctgcaataaactgattctatgactcaggaagacggataagtcaaatgcaaagaaacagaaaaaaaataaaatatttttgtattaattatggaagctacgagctaactattacaaaatatttacgatattatttatggaactgtagcccactactattttaaaagtagttattatacgatggtattgtatccggcaca

SEQ ID NO: 89008 - DNA, 431 bp, Glycine max
  unsure (1)..(431): unsure at all n locations
agtctatattatcgtatatacgtangtagaccttgtgttatggcttctttgttaaaagaanataggaagatgaagaataagaaacaaagaanatgtgagatnttttnttctaaaaaaagtatttgaaagtttgataggaaaaataagggaatagattatgtgccatgaaacanagcgagataaaaaatgaaaaaaaaataagagaaagtgagtataagataagagaaaaatgtgttttatgtttatgtattnttattaaacttggttttggttnttatactttatagttgatatattaaacctctaactctatttagcatgtgaatntagttntctctaactttgtgacagtctttcatcatcactaaatgtcaagttnttttaagtctaatgttnagttaaacacacaaaaaaatatgtatttaaaaaat

SEQ ID NO: 89009 - DNA, 318 bp, Glycine max
ccctcttctttctcctttattctcctgacatctctcactcatcagtactggggactctttcaggtatcctaggggcccctttcttttcttgctccctgattcatgtgaaataccataggacttttaactaaaatcacctctaaacccacagcacttctcacggttaagccttactcaagagtctctaactcataatctttgctaccttctcatgtgtctcatttctcagattccacagctggcaagtgtactatctttattcacatgattctaaactattattcttgtcattcttttgttgaccatatgttattagtc

SEQ ID NO: 89010 - DNA, 392 bp, Glycine max
  unsure (1)..(392): unsure at all n locations
aagttcctatataacttcttcnacatattttattcaaaagcatattaacatctaattggagaagacactattttctaacagtcacaacacagagcaaaactctcacagtggtaaacttggccattggagaaaatgtatcataagaaactgattccagcttattgagtatactctttggtcaccaatcgagctgtggatctatccacagagccatccatcttatatttaaccttatacacccatctacaacccatacaatgcttatcatgtggtaatggaacaagtgtctagggggaatcttcctcatgatctttgattttctcattcattacctgacgccatttaggatntgtggaaactcaatgatgaaattgacgttatacacagctaaa

SEQ ID NO: 89011 - DNA, 398 bp, Glycine max
  unsure (1)..(398): unsure at all n locations
cttgtaggttgcacaaatgcatgtataatattattatcaataaggcanattattctagaagtcccatctataaaccaaatgcaaagatcataactactcatgttactccaagaatcaattaacaagtgatcgtccagacctaacaactattttggaggcttcattggttaatttggtgactcaattgatttatgtttaaaataattnttagatgggattttctaatacaattgagatgttaaaatttgatgacaatgggagtttctaatacaattgagatgtttaaaattaaatntaaaaattatcattctctctattagaanaaaatgtaataacaaataataaatgcanacacacaagtacaacaaagtcatgtcatttcaccttttctttcttct

SEQ ID NO: 89012 - DNA, 282 bp, Glycine max
  unsure (1)..(282): unsure at all n locations
acgtcgatgatttcgcttatttactaaaggctnttgatataatatatttaccttttgattcaagggtacgacacgacgcgaatatttacgaataggtgatcataacatcggcattattttttaataacaaagatataaattacctaagggttaagatgacaataatctgacatggcccccgtctaatgataactgtggctccctgatgaacaacacaattaacgaattctatctcgactgacctgtgttttgaatctaatcaaaaaatcaagtacttttctt

SEQ ID NO: 89013 - DNA, 395 bp, Glycine max
  unsure (1)..(395): unsure at all n locations
cacattttgtgttatgtactaccagttggaattaaatgggtaaagaataacactttctaataatgtggacaacattttcatgcacatgaataatataacaaatntgcaaggtaaacttcaacttttatttattattgtcaatcttttaagggaatatattttctttatntactattttttttaatttaatgtaatgcatgagaaacaacacaacaacatattttagaagattgtgttgtgttgattaatctagcaagtttgtataattgtctactattagaaagatgaanaacattccaaanttgacatgtgttgcttaatgaatatgccattgaagatgttgttcataagctaaaataaacacttctaagttnttggcatggatgaatgcacat

SEQ ID NO: 89014 - DNA, 213 bp, Glycine max
  unsure (1)..(213): unsure at all n locations
gacacgctgtatcaactaccaaagaattaatatgtatgtatatagtgcgtacttttacatagttcttggttgagttataaaaaatatattaaacacaagcaacatctctaacccaaaagtgagtgtgtttgcgtgtgttntaacacaccatatattatattttcggaagtaaacagtaatggagagattcaaatactttggggaacataagac

SEQ ID NO: 89015 - DNA, 218 bp, Glycine max
ttcagattgaagactagtatcctaaacctagtgtggccttttcgcatgacatcatgtattgaagtgagaatgtgctccatcgagcactaatatggaacacagctacagagagagatagtttattttcgtaacctgcatgtgaagagatgatatccaagtgaatgatccacagtagaccaaatatacacactttatattcataagaatcagagaggatc

SEQ ID NO: 89016 - DNA, 311 bp, Glycine max
ccaaaactgggttatcaagctatgtgccaatcatgccagcccaacgcagatccttgcaacaatgacagcgctaagcaatcactttccgctgagcgcacgctcctctatactcaagatgcatcatgttagctcagcgagttcatctattgaggatgaacactcattctcttactgaaaatacatgtggctaagcgaggctgattcgcttagcccaagtaacttagtcaaactttttttataagccgcgcgctatgccaagcgtacctgagctaagcgcatatcttttcggcaaccgttgagctaagcgagcc

SEQ ID NO: 89017 - DNA, 218 bp, Glycine max
tcaaatcaattgagataggagagatgttcttgctcactgacatctgaatgcatgctgactgctggagaaaatgcgatgaactgtgaaagactcaactgctaagatgactaagactgataagagccaaacttgactggaggagatatgtccttaacttgcagcttcgtggtgaagaagaactgggtctgcatgtaggaaaataatactgatctgtgagc

SEQ ID NO: 89018 - DNA, 250 bp, Glycine max
  unsure (1)..(250): unsure at all n locations
tgtagaactgctcttgatcccctngaaccacacccttctttcacagaaggcgtcagaagagatagcctattcctaacactctctttcttctcttctatggatgcagcccccagccccactgttgtcaccggcacagatgatgatgaagaagagtacctagagaaaggcataaatgcccttcttccctcatttctattactacaagtctgaaaaggatcctcagccacagactggccttcttcacttttct

SEQ ID NO: 89019 - DNA, 154 bp, Glycine max
ctctgtgaccattggtggtaggaaatttttgcaccccctcctcttaaacttattaccaggagacacaccagcacttcatgccgcctatactctccgagaatccccaacttgttcttgtctggtcttacttatcagactcacatctatgatagcg

SEQ ID NO: 89020 - DNA, 211 bp, Glycine max
  unsure (1)..(211): unsure at all n locations
actctctaatggtctcttgccaactgagagctattaacagacttgtttgcatnaaaaagaatctttctatcaatccaatcaatctattacaatcctttacaagccttgaatctctntgaacttcttcttcttctttgtgccaaaagctctccaaagttttctggttttctataccttgaagacttgtgctattcattcttttcatctcttc

SEQ ID NO: 89021 - DNA, 363 bp, Glycine max
  unsure (1)..(363): unsure at all n locations
tggactactccagctcgtccctaatattcagtgtcagctcctccttaagatattgtttgattcaatcctgctctcttatgctaatcgatgtagatgtccaggagtttgctgaagttggtcttaagtattgtctgattgtcacaccgactccagtagcatggacatggccagtgtgctctggtcgcccaacgaaagtagtcagtacatcctgatgtccatgggctacanagctacccagtgtaaactactcttcttatgaatcctgtaattaacacaatatgaaattggtatcgactattgntgtattatatataatgaacattgaaactaaaattaattttcaatcctatcatctgacccgat

SEQ ID NO: 89022 - DNA, 399 bp, Glycine max
  unsure (1)..(399): unsure at all n locations
atgtgttcagaattctgaaatgtgtgatgatattcttccaaaataattcttggacatcctagattgtgatgtttgctaatggctcggcctcaactcattttttgaaataatcgactaccactaacaggaatntcctttgctttggagctgtggngaagggtccgagaatatccattccccaaacaatgaacgaccaaggtgagaccataggatgcagttctttggccagctgatgtattaaattcccatccctttggcattggagtcatttcttcacanagcttgagcaatcagtccttaaagttggccaatagtacctgatcgttaacactcttgtggccattgttctctccctggaatgcatacctcagacgcnctcatgtagctctgggagcacat

SEQ ID NO: 89023 - DNA, 375 bp, Glycine max
  unsure (1)..(375): unsure at all n locations
ctaacataattcacaatcatttaccaatcattgtgtaacttcacttgtcctaaggatttaatcacaaaatcatattctataccttcacattaatcacatgctcataacaaaacatctcaagtacaacacaacatctctcacacacaattcattacccaccatcacgtagcaagtcacaatgatcatcacacagacgttatgcaacatatatactaagactcaatcctatattgaatgtggtatcttgtcagtgaaaaataacactanggcaaatctctccaccaaagggaggctntcttcacaacatctgaatttcccaatccccttcangcccccatacttgatttaaaaacattgcaccaaagaatcccgtca

SEQ ID NO: 89024 - DNA, 134 bp, Glycine max
  unsure (1)..(134): unsure at all n locations
ataaaancatgaacgtgacattgtgttagactgatacttgatactggtactcgcgagtgcttacaatacagctcagcatatgcatgaataaatcggacagacacttcacattatatcaaatgctcctcaaatga

SEQ ID NO: 89025 - DNA, 311 bp, Glycine max
atatggtcaaaatagtcctctcaaagatatggtcaaaatatctgcaagctgatcattggagctgacaaattcagtactaatctcctaggacaagcacttctccctaacagagtggcagtcaaactctatatgttgggctctttaatgaaacattggattggaagcactgcgacgagttgcctggttgcacaatacaacttcatttgggtaagctcacaaagctttaactcttgaacaaggtgtgtgatccatactaactcacaagtggttgcggcatagcccacattttgcttcgcactaaacccagcaac

SEQ ID NO: 89026 - DNA, 321 bp, Glycine max
ctcgagagctctcgttgttcaatgtcgagaatctcgacatattatgcgctcgaattgaacatccgtgtgaaaagttatgaccggttgagtttctcgagagctcccgtcgttcaattccgagcatctcgacatattatgtgcccgaatctgaccttcgtgtgaatagttatgaccatttgaatttttcgagagcttccgatgtttaactctcagcgtcttaatatattgtaagcctgaatcggagctcagtgtgaaaagttatgaccagtttgcattactagaaagcttccttggttcaattccgagcatctttaatattat

SEQ ID NO: 89027 - DNA, 434 bp, Glycine max
  unsure (1)..(434): unsure at all n locations
gaactttgaattcttctacgctacttattaacaccataaatatttacagaagagatatagttaatgaaatgtgaggaatttatgctcgtagcagagtatggaaacaaagccagagagtcactaatctttgtgngtagaatattatactttcacatccattgatntgaagataagaattcctactggaacaatttgcccctaataggcctatatgtgcgaattgtacagttcttattattatgtgcaactaactttcattaggctgaaattaactttgcacggtgacatttgctttgttagcacttagtagtaaaccacatgctccaaatacaaggtagaaacgcgatatggtggtttcttacgaacctcactttcatcaatggacaggtatatatggcccacattatacaaacttatttcattctatacaaact

SEQ ID NO: 89028 - DNA, 390 bp, Glycine max
  unsure (1)..(390): unsure at all n locations
gtaacatgactcttanagttccaccgattaaacttgctatagaagctagatttgattgtctatggttcanatttcttgttcttgttcttgaaccatgaattgtgttgagcttaggttcctntgagtttgtctttttattgttgtggtgaacctaaccactaaatgctacaaatcttaagtgaagaaacctcaaatctgagtgcttgtcactattgagtgtgtctaaagcatgtctagcatacacttgcacataaattctatttgtctgaattatttctgttcttgctactcttgtctgaggataattttaccttattgatggcaacttatgtatgcctactgactcaatctaaagttgtggacttttactagtctaatggtatgatcggt

SEQ ID NO: 89029 - DNA, 326 bp, Glycine max
  unsure (1)..(326): unsure at all n locations
tcatggaagaagggcaggcccacgcttttggacgacgtaaagacccctaataaggtttatctacaaggcctngcgaaaggtgggtatgattccctgcggtgtgcacagagaagactcttgcttgatgcatctaagtgtactccatgacatggaaacatgttcggaagtaagagatctattacaactgatgatagaccaaggtcggcttgatatcgacagtgagagggaggaggaacaacatgtatacatgctataggtagatgaagaatggcctagaaagcctacacccgttggtatacacttcactatgaacaaggttcccacag

SEQ ID NO: 89030 - DNA, 414 bp, Glycine max
  unsure (1)..(414): unsure at all n locations
tgacccccgcgacataactncaggtaccactctgtggtcaacgaataaaagcaggaaagttcacccttctacacttnctcatctcaagcttgtangattatggngtacccatcacatgtggtactatgtggaggtcgggcgatggtgcacaacanatnttccacatccacaaatcgtgcataaacccaccatcctctgttgcccaccttcaattgagctcacgtactcccacgtagcccatatcctcgtttctctcaacaccgggtccccatcaatcctcccaagcttccccaacatccaagtaattcaacattcaaacaacacaaactatcacagccaagaaaatatggcagaggcagaatactctgcccaaaacaccaaccaaaatcacagcttttctcacttaaagacccc

SEQ ID NO: 89031 - DNA, 325 bp, Glycine max
  unsure (1)..(325): unsure at all n locations
acgcgtaactttctcacttttaaagagctacgtangtctgagctcctcatcgcacttaaggatacgtangagcaaaagccacgctcttattgaccccanaaggtaaaaatcatanaaaaggggaaaataaataaatattgaagtcatgattntgcatactttaggagcaagtttcttaagtgtttcattgacagatatgttgtgcccatggtgcccctacaaaattgaaatttctgaanattaatgcatgaagttgatgtcagtaagtacaaaagtaatgcattgacattggtgcaatntagtaccattgatgcctatttctacg

SEQ ID NO: 89032 - DNA, 191 bp, Glycine max
aaaaggaagaaaggaggggagcacaattatgagaaaggaagagtgacttatggttacaattttctaagtcacggtcctcttattacagactctgactctgaactctgactttaactctgactactatccccctttatactcctgactctaaatcaactacatctccttattactccctgaaactatatccc

SEQ ID NO: 89033 - DNA, 363 bp, Glycine max
  unsure (1)..(363): unsure at all n locations
ctcggaagtccgattcaggcgcatcacatatagagacgctcgatattgaacaccggaagctctcgagaaattcaaatggtcataactngtcactctgagggtccgattcacgcgcataatatatcgagacgcttgtaattgagcaacagaagctctcgagaaattcaaatggacatcgctcttcactcggaagtccgattcaggcgcatcacatatagagacactcgatattgaacagtggaagctctcgagatattcaaatgtgcataactnttaactcggaggtccgattcatgcacacaatatatcgagacgcccgaaattgaacaacggaagctctcgagaaattcatacggtcattac

SEQ ID NO: 89034 - DNA, 281 bp, Glycine max
  unsure (1)..(281): unsure at all n locations
aaagctctatatttnggcctacgctttagagantttccttctgttaaggctttgtgtcttttgtgtttgaatttataatacaaggatctttcttcatctgttcctacgtctctacccattctcattcatttgcatgtttacttctttttctgaaacggcagatccgatgacgagtccctcgaatgtactaatacctgagacccgcctatcgacttcgagctagaaatgagtcagacagaatatgaacaaacaatgatgtgggactttcccagaatataaag

SEQ ID NO: 89035 - DNA, 386 bp, Glycine max
  unsure (1)..(386): unsure at all n locations
tcagcagatatatcctcccaaacgtcaaattctacgcctatatattcaacctttccatcactggcacgtggagtgaatcttcctccatggtgcaatactaaagttatattgtcattcattctacacaatcagaaaccgcaaacatggtcatatattatgaaataaaaaaacctacctcaaaaaacgcaaagacattgacattgtcaaaaagtgcgaagacacaatcagataccaaaaacattgtcatctataaaaacagagcatcataaacgaaaacaataaaggatcataaacctccctacgaagcgcgaagacaatgcanatgacacccctcgaacatataanacctcaaatcaaaccaccaaaacaatgcatacgaaatgaat

SEQ ID NO: 89036 - DNA, 269 bp, Glycine max
aatatgaagcacactatcacctcacacaggttcgatacatcaatttaaacgttgccaaactggatttacacctaaaatatcaccgaatcaaaatttgactcctcaacacccatatttaccccagaaatggctctctgttcactatggacattagtatttctctctagctcagcctaagctatctcataaatcctaaatgacatttcaaactaggattaactcattttaacctccatttaccacagaatccagatttaaccttgcaactc

SEQ ID NO: 89037 - DNA, 421 bp, Glycine max
  unsure (1)..(421): unsure at all n locations
attgactccttgagttgtcatctttatatgtgnttgccaaatgacataactagagattttctttgagtcttngttttaaattcgtcaatctaatctagtgccattctaggacttcctttgtgttccaccttggcttgtggtgttgtccttttgctntatnnttttttcttgaatctcattgaattaatgtcacattaaatttaactttggtttagttctcatttcatattttggtttcttggctttggttntgtgtttaagtgttgcctacaataaggattggaagaggaaatcggtgcgttgcttgaaagaatatttttgagtcttggaggtaaaccatcctatgagcaccattggaattgaaacaaccaaagcctcaacataatttgagtgagacacttgagaaaacaaactagcattg

SEQ ID NO: 89038 - DNA, 468 bp, Glycine max
  unsure (1)..(468): unsure at all n locations
aaaagaatgtaatgattgctctgcatgaatngaatgaatcgataaaatgcaaatcaaggtcttgcttttatagactctgcatgtctggtcaagaagaccattagaagagttatgacctttagaaaaacttgaagaccattggaagagttaccaaatcattgtaatcgattacacaaagcatttttgtgaaaggatgtgactcttcacatttaaatttgaatttcaacgttcaatcacactggtaattgattaccaaatcattgtaatcgattacanccaattgaaatcaattggaacgttgtaaattcagttgaaagctntttgaaaacaatattggctactggtaatcgactacaataaactggtaatcgattaccagagagtaaaaactctttggtaaaaggttntgtgaacaattcatgtgctactcaatgttntgaaaaacttttagtacttatcttgattctt

SEQ ID NO: 89039 - DNA, 275 bp, Glycine max
tgcactgtacactgctgattatttgtctgccaggtgtggtggtcttgtgacactcaacttgccttctgcgcactgacatgacgctgacttgtgaaattcatactctactccgaataccggacattacttcgacgatcactgtgagatcctactaatgtagctacacacagacgtctctcaagcgtgcagcactctctcactcaacgaaccaacgccgtggccccactctgaatgggaagttcactgcttcaacactctcatactcagcatgtcat

SEQ ID NO: 89040 - DNA, 387 bp, Glycine max
  unsure (1)..(387): unsure at all n locations
agcttctccctattttgctataaataggtggagaagtgaagaagaaaagggttcagccccttaggcccttctctctctttcgaatntgctgaggaagattattttcgtgaagaaaatccaagcctaggcgcttctgtaacgttttcgtaacgtttccgtgagtaattacgcgaagattctcgaccgttcttcaaagattcatcgttcgttcttcngtttcttcagtcttcaacgggtaagtacctcacaccaagcttntcaattcactctatgtacccgtggtggtccacattntgtttcatgtatttttattctcgttttcatttacttttttataccccttttgacgtgcttaagtcatttatttaagtcatttctcgcttaatc

SEQ ID NO: 89041 - DNA, 421 bp, Glycine max
  unsure (1)..(421): unsure at all n locations
acacatatgtacacatattaaaaccaaagttatccgcagatcctcttgtagactaagttcgatcctactcattaagttctaaggcaataatacantttccaatgctnaagtcacctaactatgcacacaaatggatgatcagaccaaaagcatacaaacattaagcattgaaggaagcattggacacagaaaacataatcaattagatattaagtatttacatcagttgttcattagaaatccccaactagggtgtttagccagtcattatagaagaaaccctaacaataataataagcttacaaaacctaggtatctttgcaaaaactgctcctcttgtngcctccggagctttntttcccaaaataggcattgtggtatgctctggaatatgtgcanatcatctgcttaccctaattct

SEQ ID NO: 89042 - DNA, 223 bp, Glycine max
ctactcaaaggaagaaatcgtaagctactgagaactaagtgctagcaaaaatgtcacatacaatgagattgggctatatatcaaaaactaatacatgactcaacaagctagtatccaattacaaagaaggatgtatgccaagccaggtgcctgttattacgacaactccatgacagcaaatgcgcctctcgccagaaccgcttattgacttaaatatgcttat

SEQ ID NO: 89043 - DNA, 367 bp, Glycine max
  unsure (1)..(367): unsure at all n locations
agctatcacggaaatgtaatatgaaattatatgctccgaaaacaccatttcctagntaaccatgcattangtaccatgttcaattatttttgttttgtgntgngngnnnannnnnttttttttttntnttnntnnntttttttttagaaatgggtttatgatcccaacatggttggcttatgatgcctaacacatgcaactaagaatgtagtgtgaagtttcacgcttccccttttttgtttttgtagaggaaaacaccttgttgagcaaacctgaaaacaaatggtattcaattttgcagatcaaaaagttttgtgaacgcatatgcatgatgatgccatgactcatgcaaaatgtgaggctggaa

SEQ ID NO: 89044 - DNA, 179 bp, Glycine max
gttgttcggattagagcactctgttcatattctatgtcatcaaatggggtgtatgcctcttttctgtataatattctagctatagatcatccgttatcataattactggacagacaatacactcctaactcctgttacgtacatacagatacaaatgtacatcgcactactcttggtca

SEQ ID NO: 89045 - DNA, 329 bp, Glycine max
agcttttgagacactgttttgtcattattttctcctatttcttaaccctttttgtcaccattttaattactgattagccttaattgtcaaattaactatgcagttttatcatttgggccttgtcgcaacctacccttcggcgggagggcgacgcgagggtttgcgggtgcgtcttccatgggaggaaaatgcgcgtagtcgccaccaacatttatttgaggaaaacatcggaaaaatcggaaaaggcgtggtccacgaactttaagtaaaaggttcgggagttgtatttacacatgggaaaggtattagcaccccacgcgtccgtcaca

SEQ ID NO: 89046 - DNA, 324 bp, Glycine max
agcttggatgatccactttaatttttgatgtcatatgccaacttgctcccatataatgcaatggtatccataacccctgccaaagttcctcaacccccatttttttgaggatatggctcgaacgcaacatgtgcatatcatggaggagttctgggacattccattgagcactgtgtgaccttgaagcgtaaggtgcaaagtctaactgatgcgggctggctgaaattttatgagaatcgcttgcgaattctaacattgacttgcaactccacacatggggcgattgtgaaagctgttcttagatgtctttaatgactcatctgg

SEQ ID NO: 89047 - DNA, 224 bp, Glycine max
agctcgagagacggattttttataatatatcaaagccacgaaagaatggaacaacggaaagtcgcaaacacagcactaagaaacaaacagggaacgaaagatcacattcttgcccaagggaagactgagcaccgtgaggcgcaagggcactcagacacagacattgacggagctgcagacaccagaaaacacacgaaggacgaagtatccacaggaacgggagg

SEQ ID NO: 89048 - DNA, 329 bp, Glycine max
agcttcaaaaaactatttatgataatgccacggcggccgcttccaatacagctagggaagcagaaccggtgctacagctcgtaataaacttgggccgagacaaaaatgcgacaggtttcaatcggaggtatagtcctcaagcttacccttatggtttgcctccggacttcactcctcgtaccgctccagacgatttgagccaagcccctaccttcgaggggcagctccctcctcatgccgactatcctctgcaagaagatgatgaaggagatgcccatttaggccctctacttcccctcaaggatccgaccccccatgagttaccccaa

SEQ ID NO: 89049 - DNA, 331 bp, Glycine max
agctttcataagtgaattcatgtgcagtcatctccctaagagtcctctcacgaggtggaggttgagccatgttctcagtatgaaaattagtagtggaatgctcaaaatcagaatattcagaatcaccctcaacagagtgctcagaatgctcaaaatgcatagaatgaccaggatgcacaccatgcctaactaatctatgaaaggttctatctatttcaggatcaaagggttgtaaatcacctggattgcccctagtaaagcactatatgcagcaaataatgtgtttctcaacaagcacctaacaagggggtaaaactatagctatactcaa

SEQ ID NO: 89050 - DNA, 325 bp, Glycine max
agctgagcttaatttatttttctgctctctcgccctaggacaacgttggaaactttcatcctaactaaggatatggcaacaagttgatgtctgactcaaaaggcttgcaaatggcaggacataatgtatgtggggatatatgtgtgaccagacggctcataaagacggggatgcccaaatgattatcaccaaacacacatcatgatgattataaattcatgcaaaatttaattatagcacacattcatgcagacactcaaatataaagctttgtggcgatgcaaacactaaggcttaaggttcattttcccattcaagcctaact

SEQ ID NO: 89051 - DNA, 326 bp, Glycine max
agctttgccttctgcagtcttagactcaaggaaatatttctttagaaatttctccacaacttcatcccatgtcttaagactattacctttgaatgaatgaagccacctcttggcttctctcgataaagaaaatgaaaacaagctcagtcgaattgcatcttcaggcactccagccaacctaatagtattgcatatttctatgtaagtggctaagtgtgcatatgggtcttcatttagtaatccatgaaacaaattattctgaatcaactgaatcaatgatggtggataagtaatggtttgtacttgaacttctggttgtgcaatgc

SEQ ID NO: 89052 - DNA, 328 bp, Glycine max
tagcttagaggattatgtttgtttccatcacatgtggaactaagtggaggtcgggcgaaggtgcacaacaagtttttcacatccacaatgcgcgcataaacccaccatcctctgttgcccaccactaactgaggtcacgtactccctcgtagcccatatcctcgtttctatcaacaccgggtctcccatcaatcctgccaagcttccacaacatccatgccaaaaaacatttaaacagcgcatctatctcagccaagcaaaacatagcaaaggccgaaaactgtgcctaaacgccaaccaaagcacagcttttctcacttaaagaccc

SEQ ID NO: 89053 - DNA, 325 bp, Glycine max
agcttttgtcgttctatttatcacctctcttcccctatttttctcttcctctacacaatggactttgcatctttgtgtatagctaacttatggcaatgaatgtctgggtcaatttcgggcatgtttgtcgcggaccatgcggataagtcaacgtgttccccgatagttttttttatacgactttggttgtcattgaaaagttggctccccaactaagtgacctgcctttccttaagaccaagttggaaggttgatgtttcttccactactacaaaataatgaatcaacatcgtttaatctacatcagttatttaaaaaccgatgg

SEQ ID NO: 89054 - DNA, 329 bp, Glycine max
tatcttctagtttttttttcttatgaccgctgccccagccaagttatattgtgaagaaatgcatcatcttcttcttgtgacctagagtacacacccatcttgcgacaatacattttgaaatgattcttaagacaagtggtacatttggtcctatgaaaatcatgaatattgaactcccgagggatgactactctctgaactgatctaaggattgtcatgtcaccggaacggataatcgcctaaaccttcaacaactatgaattttttgtaaataatatcgagttttccctctacttctactgacaggggtggccctattggctgtgttg

SEQ ID NO: 89055 - DNA, 276 bp, Glycine max
  unsure (1)..(276): unsure at all n locations
ggatactntaaagtctagctgtgtgcgttctagcctttttattttgcgtctcatagatagccgacctcaatggtggtgcgagcccttgatggaactctgcgagaagtattgggggaaatcgacattcccattcccataggcccccacacttgcaatgtggtagtttcaagtaatggatattaatcccgcctatagctgcctctcgggaaggccgtggattcatgctctgggagtggtccctttaacgcttcacccaaaattgaaattcgaaggggg

SEQ ID NO: 89056 - DNA, 330 bp, Glycine max
  unsure (1)..(330): unsure at all n locations
agctttgatattntcattttttttattctttttagtaactactctcaccgctaatgttataaacattgagaatatttacaatatatgtttgggattgagacagtagcttgaccaactccaagtataaagaccaagatttgtttgtattactgtgtattgtttgtcgtattcaacagtaaccattgttgcaacctaactcacgacgggacgatgaaggaaaatagaagaggtgtcttctaaaaaagaaaacgagtgggagtctccaccaaaatttattaaaggaaaacattagaaaaaccaaaaagaggtctgtgaaatttgaaaataagg

SEQ ID NO: 89057 - DNA, 330 bp, Glycine max
agcttgttggccatggatgagatcaactttgttgggggaggaagcaattcttataatcaataacctaggcaaaatcagaggcttagaaaagaagagagaaaaccaactcttcaagagaccatgcttcaatatatggcctagaatgaccaaagaatgaagttgttgtcccaattgaccaacatacaatccctcttatcacaaagaaagtcaagcaaccttcacaacctaaaccaaatcctaagaaggaggatgtcaatgctgtgatgactagaagcaagatgattcaaaaggactccgaggagaatgaaggttctttcccaaaaactgtag

SEQ ID NO: 89058 - DNA, 328 bp, Glycine max
  unsure (1)..(328): unsure at all n locations
agcttcttcgatttcaatactttaaaccttgttgngaatcgtgcaatgtaagtttggatttttcaataatactttagttttgttgggtttttttttttgtgcttctggtccattttttagaattaaggattttgactaccgtcttttctttgccaccctttccagtatttcttccaaatgattggtagcccagatagaatccaatacccaccaggacgtagcactcaatccacttggtttaaaaaaatccaatctatttcaacaattaagtgcaaacaatattcagtacaagttatcttgtttgatttgtttttcctaaaaacatgta

SEQ ID NO: 89059 - DNA, 325 bp, Glycine max
agcttctaaactttgttttttttgaagctctgataccacttgttagacaagtggcctcacatatcttaagaagggggggttgaattaagatattccaaacttttctcctaattaaaaatctatcttactttttacttaagttatgaattcccttaatgacaatcttcttaaatattaattcaaatgaagcaacttgaattatgaatataaagcaataataaataaaggagattaagggaagagaaaatgcaaactcagttttatactggttcggccacacccttgtgcctacgtccagtccccaagcaacccgcttgagagttcc

SEQ ID NO: 89060 - DNA, 339 bp, Glycine max
  unsure (1)..(339): unsure at all n locations
ctgccagtctcgntacaacaattattttttatctaaagtggaaaaaacatcaggggtcaatttattttattttttattctttacattctgttatttttaaaaattattttacgagaataatatctatttttataagaaaaacataataattattataaatatttacttaagtagcgggggatataattgcccccataaatcagaacgtcgatccatctttgagtgatataaatctttaaaaagtttttaatgtaataatatatttagaatttaaagtcaaaattattaattaaactaacataatcttacataagttagtaagatgaactggtgtcagac

SEQ ID NO: 89061 - DNA, 258 bp, Glycine max
taacgttctacccttctggaatcttaagaacacttgaaagtaatggaaaaaatcgtcttgcgcgaaaaacaatgcatacccgaccgccgatttcggtaacgcctaacgaaacgtttcctggggtgattcccagaaaacattgctgcatccttccttacgactggaccatgaatgagacttcaacaggtgtgttcccgaaaagaaaccttgtgggacatttcacgtacaggtggtccccgcttgctttcgaacatccaa

SEQ ID NO: 89062 - DNA, 344 bp, Glycine max
ccgacctgaaggcatgctagcttcactcggtgcatttaacgtgagagagggacgattcgccacttataacaaataacctaaccaataaatctctttccttattatatcaaagtaatccaactctccaagataccatgcgaatatatatggcccagatataccaaacacatgataaaagatacacgctacagatcataatacaagtcatgttcatacaaataaagtggccaatgatggcgaacgagtggcgacttactgaactcgaatccatcgaggaggaacatctagggaaccaatcacagcaagatcacatttcaacagaaagcgtgaccatcgatttgaca

SEQ ID NO: 89063 - DNA, 325 bp, Glycine max
agcttgaagtgttgatttggggaagggtgagacctcctacttttattcgttgaccacagagtggtacctggagatatgtcgcgggggtcaggagaccttggggacgtcaggtggggtgctattgcccaaaaccaagcttgaccaatcccgacccaacccgggcatagtcagtcagtgagaacctgtgacgtacctaaacaggcgagctcctggcagtcaaccgataaaagaacaaagaccacaaagcaaggaggcttgtgtggtggttggccaccaatggatcttgagtaatatatggaatatggcccctggtaatcgattacaa

SEQ ID NO: 89064 - DNA, 323 bp, Glycine max
  unsure (1)..(323): unsure at all n locations
ggctgcagcttaagaattttttctatcaactacctgnttgccgagggaaattctataaatagacctcccatctttaatggagtgggttaccactactggaaaacccgcatgcaaatctttatagaggcaatatatttaaatattagggaagccatagaacaaggaccttatgatccctctataatagccggaagtgctacaatagaaaaacctatagcagattggactgaggaagaaagaagattaggtcaatataatttaaaggccaaaaatattattacatctgccttaggaatagatgaatactttacggtttcaaattg

SEQ ID NO: 89065 - DNA, 328 bp, Glycine max
agcttagctattttccatgggcagagactagaggatgagcatgtgaaggtatcaactctgcaagtggaaagggaagcaagggagagggtgatagaatcatttcacgaggaagctgtgaaatggatggatagattcgctctcactctaaatgggagtcaagagattccaaggctgttagctagagccaatgcaatggcggacgtatactcagctcccgaggaagttcataagctctttgattattgtcaacacatggttgagttgatgtcccacataattagtgattgaggctgtacccgaatcaaataaacatgaaaatgcagtaact

SEQ ID NO: 89066 - DNA, 322 bp, Glycine max
agctttttacattagtcttcacaaataatcatcatgaagcagaaaactaacaaaactacccatcatatctgccaaaaccccatacccacgaaatttaagagagaaagaagtccacccaaacctgaattttcgaagtcccactcgtagccacgcacttcacgaccccgaaaatgctctcctttcacgatttggggcagaaatgagcaccaaaggttgaagctttgtgtggagcttcaatggtgaatgagggaggaagaaaagcaacgtgagggagagggagagagagcttctgaaaatgtggggctgagtgaggagagagagg

SEQ ID NO: 89067 - DNA, 322 bp, Glycine max
  unsure (1)..(322): unsure at all n locations
agcttataagaacaaaattgcctcaatcatttccaaatatgcatgtgaattatgacgcatcaacaagaatcaagccaaggctattgtgcaagaaatcaatggggcaaaacacaccaaatgattatgatgatggatggctcaaattctcacaaaggtaaaatcatnnttttcaaattgagctttcaaaactatcatgacatgtagagaagaatcaaggatttcaagtcacaaaatgtcncgaccttttattttcaaaataattacccatttcttgaacatttcctataattcaaagaaaaacatgcaaagtcctacctgcaca

SEQ ID NO: 89068 - DNA, 330 bp, Glycine max
agcttataagaacaaaattgcctaaatcatttccaaatatgcatgtgaattaggaagcatcaacaagaatcaagccaaggctattgtgcaagcaatcaatggggcaaaacacaccaaaagattatgatgatggatggctcaaattctcacaaaggtaaacttatcactttcaaattgagctttcaaaactatcatgacatgtagaggaaaaacaaggatttcaaatcacaaaatgtcaagagacttttattttcagaacaattacccatttcttgaacatatcctataattcaaagaaaaatatgcaaagttgtacatgcaaatagaatt

SEQ ID NO: 89069 - DNA, 329 bp, Glycine max
agcttgttggccatggttgatatcaactttggggggggaggaagcaattcttataatcaataacctaggcaaaatcagaggcttagaaaagaagagagaaaaccaactcttcgagagaccatgcttcaatatatggcctagaatgaccaaagaatgaagttgttgtcccaattgaccaacatacaatccctcttatcacagagaaagtcaagcaaccttcacaacctaaaccaaatcctaagaaggaggatgtcaatgctgtgatgactagaagcaagatgattcaaaaggactccgaggagaatgaaggttctttcccaaaaactgta

SEQ ID NO: 89070 - DNA, 327 bp, Glycine max
agcttagttaatctatttccttcatggccttcaattgtaaacttactaaaatagactcaaatctcttcacaaatcccactttatacaagtccctagtgggtgctttacaatacttgaccatcactagacctgagatcagttactctatgaataaggtttgccaatttatggccaatcctttaaagtcacactgaactacaatgaaaacaatcttaaggtacatgaaaggtacaattttgcatggtcttcatcttcaagttgttgttttaggtcaaccttactctattcaagccctttgtgatgcaaactgggcatcaaatgttgatc

SEQ ID NO: 89071 - DNA, 327 bp, Glycine max
agcttaattattcgatttattttcttttaatatcgagtaaccaacatatggacagtcgagcaattccctctgaaataccttgaaaatatcggtgtgatcagggtccttcattaatgaatttaatttgactgataaaaaaaaatcatcatagaaatatagaatggaccaaccaagtcaatatagacaagagaattataccatgagattgatttttccaaagaaccaaggagcgggtatcatatataccctaataagaatataccgaaaaacaatgtgtgaaaatgacccttttgtcaatatcaactgattaacacatacatgacatat

SEQ ID NO: 89072 - DNA, 325 bp, Glycine max
tagcttacggatttaatttttacttgtgggcgatgaacaaaagcgcctaacggtatctaacatagccaaaagtgaagaccctaagactgcaaactcgtaaatcccgtgggtaaggcttttgaaaagggggaaaacaagtatttgaatgaaaaaaaacgtccccccttttggcacttttatattttggtgcaaaggcggctagcccaggccagctcatctcgcccaagcgagctaacctgaactttgttttttttttttttcgaggggaacattaaacatgtcccctccattctcaaggaaaagaattttgcctaacttgaactta

SEQ ID NO: 89073 - DNA, 320 bp, Glycine max
agcttcgcgaattttgttttcgccagcgaaaggatcgaagtgggtctgaaaagaggcaaatttgagcatcctactttgatgaatgagaaaactggggcaaatgaagaggatgagaatgaggaaggaacccatgttgtggctgccattcctacatggccaaacttcccaccagctcaacaatgtcatcgctcagccaatatccaatgccaagcgcaaaccaaaacaccaaccaagaaatgaattttgcatcaaaaaagcttgtaaatttcaccccaattccggtgtcctatgctgacttgctcccatatctactcgataat

SEQ ID NO: 89074 - DNA, 322 bp, Glycine max
agcttgcctcattgatgtccaggaaggacaaggcagctgaaggaactagttccgctccggagtatgacagtcaccgctttaggagcgctgtacaccagcagcgcttcgaggccatcaagggatggtcgtttctccgggagcgacgcgtccagctcagggacgacgagtatactgatttccaggaggaaatagggcgtcggcggtgggcatcactggttactcccatggccaagtttgatccagaaatagtccttgagttttatgccaatgcttggccaacagaggagggcgtgcgtgacatgagatcctgggtaaggggtca

SEQ ID NO: 89075 - DNA, 325 bp, Glycine max
agcttgcttgtttgcttttattgaagctggatctttgagcttcaatgaagtccattaatggtgaatttccaccatggaaatgcaccggaagacaaaggaaaagaggtgagaggaggcgccatccactatggaataagccatgatagaaggagcttcaccaccaagaagagccttggataagaagcttggaaggatgcttcaatggaggaaaagaaagacggagaaaaagagagaggggggagcccgaaattgaatgaataaaagacggagaaaagtggaactttgaagtatgtctcacaagactctcacctatcaaagctacaac

SEQ ID NO: 89076 - DNA, 337 bp, Glycine max
  unsure (1)..(337): unsure at all n locations
ctgcaagcatgctatgctcgacatttttttttttaattcccaagattgttggaatcaaatcttaaaaaaattcgcacttcttttttgacccgagtaagatccttcgttcacttcatncgtctatagagatctcattaatagaattagatctttatcgtcaattcacaaaggagtgaaaaaagcgagaatttgagttatccccccgggatcaaatgaactctcgatctttgagcttaaattgattactaataacggctcaatttcttaattttctccaatgattttccctcttaaaaataactctccctcagagattgacttctcctcaaacttcctg

SEQ ID NO: 89077 - DNA, 320 bp, Glycine max
agcttttttgttctttttttttacaggcaacataacagaaatgcagttctgctaaacccaatttatattatcttggccacaatattctatggttcgggggtggcagccgataaagccaaagtggccggctgacaaccatgaacacctggatatctcactaatgaacccaagagtgtgagggggtttctaagactgacaggctactatagaacatttggtcaaggctatggtcacaaagcatagcctttaattggatctctgaaaaaaaatacatttggatggacaccaaaacctactttaccttttgaacctttaaaatc

SEQ ID NO: 89078 - DNA, 204 bp, Glycine max
ccccacggacacacttccgtaatgggtgctaacatgtacttgaccatcaccatgacctgagatcatttcctctatgaatagagcttgccacatgtatggccacctctctaaagacactctgaacgacgatgaaaacaatgtaaaggtacatggaaagtacaatagtggggtggagcttcatcttcaacggcgtggaattagggc

SEQ ID NO: 89079 - DNA, 327 bp, Glycine max
agctttattgcttatcattttattcctgttttccatgagatgaccgagaccaaacacattgaaatagattgacactttattgttgcaaatatcctatttggggacatcgataccaattttgtgtaatatttttttaaagaatcttcaacacgaggaaatcacacaattgacacttgtttgtgggttatgggcttaacttaactccaaaagctaactcatagggtgaggttgttgctcctcacttatatactctatcttggcctttagtcgatgtgacactttgattttttccaatactcctttcacgtataacacttttgggcttgg

SEQ ID NO: 89080 - DNA, 326 bp, Glycine max
agcttatgctgcaaacttttataattaccccctcagcagcaaaaccaacaacaacagaataattatgacctttcaagcaacagatataatccaggttggaggaatcatccaaatctgagatggacaagtcctccacaacaacaacagtctatccctcctttccagaatgttgctggtccaagcaagccatatgttcctcctccaatacagcagcagcaacaacaacagtcacaacaaagacaatcagcaactaaggctcctcctcaaccttccttagaagagttagtgaggcaaatgaccatccagaatatgcaatttcaacaaga

SEQ ID NO: 89081 - DNA, 328 bp, Glycine max
agcttagttaatctatctcctccaatggccttcaattgtaaacttactaaaatagactcaaatctcttcacaaatcccactttatacaagtccctagtgggtgctttacaatacttgaccatcactagacctgagatcagttactctatgaataaggtttgccaatttatggccaatcctttaaagtcacactgaactacaatgaaaacaatcttaaggtacatgaaaggtacaattttgcatggtcttcatcttcaagttgttgttttaggtcaaccttactctattcaagccctttgtgatgcaaactgggcatcaaatgttgatc

SEQ ID NO: 89082 - DNA, 330 bp, Glycine max
agcttagggatggaatacttacttgttggtgatgaacaaaagcgcaaaacggaatcaaaaaatgcgaaaagtgatgaccctaggactgcaaactcgtaaatcccgtgggtatggcttttgaaaagggggaaaagaagtttttgaatgaaaaaaaacgtcccccctttcgtcacttttatattttggtgcagaggtggctcgcccaggcgagctcagctcgcccaggcgagctaacctgcacttttttttttttttttttcgaggggaacattaaccatgtcccctccctccttagggattagcattttgcctaacttgaacttacttagg

SEQ ID NO: 89083 - DNA, 332 bp, Glycine max
agcttcaacatcagacttcttccagggtgctggaactacttcacatggacttgatggggcctatgcaagttgaaagccttggaggaaagaggtatgcctatgtggttgtggatgatttctccagatttacctgggtcaactttatcagagagaaatcagacacctttgaagtatttaaggagttgagtctaagacttcaaagggaaaaagactgtgtgatcaagagaatcaggagtgaccatggcagagagtttgaaaacagcaagtttactgaatactgcacatctgaaggcatcactcatgagttctctgcagccattacaccacagcat

SEQ ID NO: 89084 - DNA, 361 bp, Glycine max
  unsure (1)..(361): unsure at all n locations
cccgggangcgatacagtcgagctgaccgcgcggcatgctatcctgcgcacttttattattcacccccccagccgtaaatccaacgctatacaaccaaatgaccctacgagcaacagagacaatggcggtctaaagactgacataattgtcttgctgcccaacgccttgaccttactcaatagcctcgtctctttgcaacaatgttcttctcatcaagcaagacatacgttcttacatccttgaagggatcgaacaggctcaagttacggtctttcacataaaaacctgccgatccgactgactttgaatagcctatttcatgatagctccacgagcttccttatcatacaaaatcaactt

SEQ ID NO: 89085 - DNA, 321 bp, Glycine max
agcttaagctccttcatttgcacaaggctcttaatatttgaagagtatccttgtggaaccttcacccgacgaagacactgacaaaaacttatcttctccttcttggacaaagtatggcaggctgggggcaagtaaattttcttcccatcagaccttggatgcaactgtgatcgtatacccatatcggctagatcttgacgggtatttaagccatccttcgtcttgccttgaatgttaaggagcgtcccaatcacactgtcacaaacatttttctccacatgcataacatcaatacaatgtctaacgtcaagatcacaccag

SEQ ID NO: 89086 - DNA, 326 bp, Glycine max
agctactaaactttattctataatgaagctctgataccacttgttagacaagtggtatcacatatcttaagaatgggggttgaattaacatattacacactatttccccaattaaaattatatttcactttctattcaagttacaaattcccttaacaatgaactcttaaataataattcaaatagaacaatctgaatataaatataaaacaataataaataaaagagtttaagggaagagaaagtgcaaactcacatttatactggttcggtcacacccttgtgcctacgtctagtccccaaacaacccgcttgagagttccact

SEQ ID NO: 89087 - DNA, 322 bp, Glycine max
agcttgagctgggtaatatgattcatggatatctcaagaagaagatagattgtgacatgtttgtagggtctgaattgattgagttgtattcaaagtgtggacaaatgaatgatgctgtgaaagtgtttacagagtattcaaaaccagacgtggttttatggacttcaataattactgggtatgagcagaatggaaggcctgaacttgcacttgcgtttttctcccgaatggttgtgttggagcaagtaagtcctgatccagtaacacttgttagtgctgcttctgcttgtgcccagttatctgattttaaccttggaagaag

SEQ ID NO: 89088 - DNA, 326 bp, Glycine max
agcttctctattgttatttttgcaagtagcgttaggttgacaaaattatgtcgtggccaaaatcaccatgcttagcaggcctgggcaaaaaatccaatatccaaatctgatccaccaactgatgtggtccaatccattttaattatttttaatggatcaaatcttttaccacatccataatttatacccacttataaatctggaatccattttctttttaaatagttttacagttgaaaatccaaagtccatttcgaacatcttctacactaccagtaggcccatacaacatcgctttctttagcaagacaacaaccatcttcaga

SEQ ID NO: 89089 - DNA, 318 bp, Glycine max
agcttgatatgaggaagtgttgaagggtgaaacttcctgcttttattgttgaccacagagtggtacctggagatatgtcgcgggggtcaggagaccttggggacgtcaggtggggtgctattgcccaaaaccaagcttgaccaatcccgacccaacccgggcatagtcggtcagtgagaacctgtgatgtacctaagcaggcgagctcctggcagtcaacagataaaaggaacaaagaccacaaagcaaggaggcttgtggtggctggccagctgtgaattttgtgtgatatgtggattgtggcctctggtaatcgat

SEQ ID NO: 89090 - DNA, 329 bp, Glycine max
agcttgctagtagggttttgttctatgcttcaactccaaaccaactccttggaaatttgaggaaagggacctagtatagagagcatgtggagaagcttgaaaggtctcatcaaacgaaaaattggcggccaactaggaaagacctttcaaagtttgacatattttaaagaacaaagcttacaagttagaagaactatccgggaagatcatttcgaggagttaaaactctacacatttgaaattctactacagttaggtgcttttttgtaacgagagtcatactctttttcctaccttgatttttcatccctataaaaatgtgaaagggt

SEQ ID NO: 89091 - DNA, 325 bp, Glycine max
agcttattacgtgttatttattatatcatgcacacacacacaaatatatgtatatgaattgttaaaataaattaggaattaatagttcaaataataaaattaaattgaaggaaattaatatattaagattcaatgataaatacttttaatgcatttttagtttaatcatttattaactctttttaatggaaaataatatagttcaatttaatatatgcatgttttgtgccatgtaaatattaatattgtgtgatgtgtatatgattcatgaggtgtgataacatgttgctttgggattataacattgtgattgaaattgaatgca

SEQ ID NO: 89092 - DNA, 325 bp, Glycine max
agcttcccatgagactttttattatcatatgacccccctcttctggaggaagaaaaccatcatcctccacttcactagaggaactatgagaacttttagatgactcactatccacctctctattctccaacaaaaccatagcccttttgataggacattgggatgcaatacgaccctttcccaaacacttaaagcatttaatggaactagctttattgggagggggttgagtaggagaagtacgattacctcttgaagacttcctttcaagatggtgtgaacaagaaccctccttctttgaagagcctttatccttccaagatga

SEQ ID NO: 89093 - DNA, 329 bp, Glycine max
agcttggagaggatgcttttattgttgaaaagaaagagggagagaaagagagaggggggagcacgaaatttgaaggaagaaaaagggagagaagtttaactttgagttgtgtatcacaagactctcattcatcaaagttaccacaagtgttacacaagcttctatttatagactaggtagcttccttgagaagctttcttgagaaaacttccttgagaagcttctttgagaaaacttccttgagaagctagagcttagctacatacacccctctcataactaagctcacctccttgagaagctttcttaagaagattcctaaagaacct

SEQ ID NO: 89094 - DNA, 329 bp, Glycine max
agcttggactgtgctttttatttttacaaatgaccaaagtgaacaaagagccatttctagggcaaatttgggtgttgaagagtcaaattgtgattcggcggaattttaggcgtaaatccagtttgagcaagtttagattgatgttatggactggtgtgatgtgagagtttgcttcaaatttacctcattctaaattttacttttcaaacctagaaaacccattgaatggaggggtgttggacacctaaattctgtgttgctgtgctttaaagcttgactttggtttagacatgattgatacatgatttgggacttgtacgaattgattc

SEQ ID NO: 89095 - DNA, 341 bp, Glycine max
  unsure (1)..(341): unsure at all n locations
agagcgaacacaaaccgaccgcagcagcagancaacctttggtctacctgaacaaacccacgaaggacattgagactagggaaccctaccttagaaagaatctcactacaagccaaaagtgaaaaaccacgataaaaccatagccaaaaagaaaagaggagccatggaaaagcataggaaataagagaggggggcaattgagaaaaaggaaaacgggagatgatgaccatgcttcaagacgtaacacgggccatacacgatgaacagatggtacagcgtaaatagaggacaagcacaacgaaacgacgtagctcaaacgtccaaaaagacacgagagaggg

SEQ ID NO: 89096 - DNA, 327 bp, Glycine max
agctcgtgtaaatgcttatcttttcatcatcgctcacacaaaaaagccatatggttctgatcacttggaatttcaaaatatacaatacatagaaaaagtttatgtcgtatgatattgataaaatcaaataccttgttagtatctattgacgctatgttggcccaacggccatgaaactatatttaaagaagcttgaggcttatccaattaaaataaacatgttttgaaccaggccaaacaacctgatgtatgtattaaacaatgtcaaaccaggcagagagctaggctatataactattagccgcacagctaaactacctggaaaga

SEQ ID NO: 89097 - DNA, 322 bp, Glycine max
agctttgagccttttctttcttcaataactttatactcggatgtctgattgagtcccgtcatatatcgagacgctctaaagtgaatgttgaaactttgagccaattcaggcgacaatttctttttactcggatgtctcattgagtcctctaatataacgagacgctcaaaattgaatgttgaacctctgagccaattcaaacgacaataatttttttctcggatgtttgatcgagtccctgcatatatcgagacacttgaaattgaatgttgaagctctgagcctatttaaacaacaataaccttttactcggatgtgtgaa

SEQ ID NO: 89098 - DNA, 331 bp, Glycine max
ccatccaggctaggatggtttcttgtatggaagaaaagaaggagagacagagagaagggggagcaccacatagaaggaagaataaaggagagaaatataactttcatttgagtgtcgacaaaactcacactcatccatcaaaccaccaacgagacacacgcatatatctatagactaagtagctaccttgcgaaacaagcttgagagaacaaacttgagaagcaaccttgataaaactaacttgagaaacaagagcatacctacctacacccccctcataactaaccacactcacctgcgaaacaagcttactaagatacctaccgaacct

SEQ ID NO: 89099 - DNA, 326 bp, Glycine max
agcttgtctcagtgtttttgcgagacggagaccaacatgctagctatcatcgccaagtaccaagaagagttaggtctagccgcggcccacgagcataggattgcggacgaatatgcccaagtatacgcggaaaaagaggctagaggaagggtgatcgactctttacaccaagaggcaaccatgtggatggatcggtttgctcttaccttgaacgggagtcaagaacttccccgattgttagccaaggccaaggcgatggcagacacctactccgcccccgaagagattcatgggcttctcggctattgtcagcatatgatagactt

SEQ ID NO: 89100 - DNA, 317 bp, Glycine max
agcatgttttttctgtttttttcgactatggccatgtgtggtggaacacgctacctcaggagtgtgcatgtaatgaatagtcaatgggtgatacatgtacatagatttataagatcatgttgatacggtctgagccatgtttttactcaaggtacttgaattttaagctatacaaactaacgctttgcatcaaaggggttgaggaatatttcaaggaaatggatgtgctcatgattcttgcatctattgaagaagatgatgaggtaactatggctcgattctttaatggctagactaatgatatgcgtgatattgtt

SEQ ID NO: 89101 - DNA, 280 bp, Glycine max
agcttttctttttaaattttaccttcactgatgggctcaaccttgctgcccccacgatccagagacaatgccgcatgaaaaagaggaaaacgagaagaaagctctttgaaaatgagattaaaagactgctccggaaaaaaaattggcattttaaggaaaaaagctgaatagggcaatattggcattatatatatttgctgggtgcaccaacaaaaaaactgtgagcacctagcaacacaccacattgtaatggcaagctatcgaagacaagttacctgag

SEQ ID NO: 89102 - DNA, 329 bp, Glycine max
agcttgcttctacaaatttaaggtccctaaattgttctaggagattcagctctctaaccatcaacgcaaatatatgtagggatttcctactcaaggcgttagccactacattggcttttccaagatgatagctaagctcaaaatcatagtccttaagtaactctaaccatcttctttgatgcatgttgagttttttctgactaaacaaatacttaaggcttttatgatcgctaaacacttcaaacttggagccaaacaagtaatgcctccacatcttaagagcaaaaactacaacaactaactccagatcatgggtaggataattcatg

SEQ ID NO: 89103 - DNA, 327 bp, Glycine max
  unsure (1)..(327): unsure at all n locations
agctttgatgttgntattcgttatttggatgtcgagagtgtcatcttgttggattctgagaagaagatcaataaaatcttggtcctctaattcagctccatcttcttttgcaattttgttcttttcttgatgctctctgatgatgttttccaggaccttgtcaacctgcttgtgcaacttcttcaatctggtcatctttccagttaggaaatataagaatggaattgaaggaaagacatcagcaaggtcgaatcctcccccggattctacgatttttcggatcaaagacacaacaaactcatcttgctccttgtatatgccaccgaa

SEQ ID NO: 89104 - DNA, 331 bp, Glycine max
agctttttcttaagcttttgctacaacctttttctccccctttggcaacatcaaaaagccaaagaactcggaaatcaacacagttataacaatggagtagcaagatataagtatcagagtattaaatccaataagccaaactcataatcaagaaaataatcaaaccagaattcaaataacataaaatgtcaacaaccacaaaatatccaagactgaaacacaagaaaaataagcaaagtacttagcataataatgtaaattctaagaaactaaaagccaaaatacacggcttataaaagataaataagcagaatctaaaatctaagaagac

SEQ ID NO: 89105 - DNA, 330 bp, Glycine max
  unsure (1)..(330): unsure at all n locations
agctttgaaattgntattttcttttaccttgcttaagttttaggagagcacattggtttaagacaactttgccccaaatttgggggagtttgtttgatggataatttaaaaggtaagaaacaacaacacacacagcaaattaataagatgttttattagttaaaaaaaaagagagagaaattcaaataagtgtgtgttgttaaaacaaagtcaagtgaaaggctattgaatggactaagtggattgaaaagaaaaactgggctagtctaggatctgtgctctcttagaatttaagcctttgaatcctataaaaacaaataattcttgtac

SEQ ID NO: 89106 - DNA, 329 bp, Glycine max
agcttcctcagggccatttccttcgagaacaaacatttagaagttagttttacaagataattcttatcttaacgcaaaaaatgtcatgctaatccctccggtttataacgaactcatgcgcacgtttaaagtaacacatttatgcacatgcatatgtgtagaatatcctattatttatatcaacatagaggccatccaacacattctaattgtcatacatatatatgcatttgaaaagaacacacattctcacgctcaaggcattgcgccaaaatttacacttaactatgtcctaaacatttgctatcacaaactacctacacacactc

SEQ ID NO: 89107 - DNA, 323 bp, Glycine max
atcttggctgtacaaattatttgtccctaaaacgagcgcggacaattgtctgattctcctacaaagaacaataaattccggatcctctactccatgcgcttgccactacactggcttgtccaagaagagaggctatctcaaaatgatagcccttaccttactctaactgctcttgcatgagcatgatagggtcatctgacctaataggaactttaagaatggatgagaaggaaacacttcagcctgggagcctcctccgccaggccctcccattttacgaaccaaagacacaacaacctactccagatcatgggatatgacac

SEQ ID NO: 89108 - DNA, 323 bp, Glycine max
  unsure (1)..(323): unsure at all n locations
agctttgtaaatttcttttagtcttactnagcgcaaaaacgtgcgtggaccttgcgttaatgccttcttttgttaaaaagaatattggacgatcattatttataacccttgaaaatgtgagattttgttttctaaaaaaagcttttgaaagtctgataggaataataaggcaatagattatgtgccatgagacaaagcgagatcaaaaatgataaactacttagagaaagtgagtctaagataagagaaaaatgtgtggtatgttaatgtctttctattaaacttggtttcggtttttatactctataggcgatatattacac

SEQ ID NO: 89109 - DNA, 270 bp, Glycine max
gtgccaaaagactattgcaaaaactaaggaacatctctaaaacctgaaaaaaggacgggcataaaaagacatctctccaaaataaaagctggacctatgtattgattaaaaaacaatcatgtacgtctattacttaactaacaaatgtaacactgacactcctgaaaaaaataatgggatattgacgtagctcatatcagtcgcacttaatgcatacaaacctaaatatatagatacaaaattctattatacgaactatataaagaaaga

SEQ ID NO: 89110 - DNA, 323 bp, Glycine max
agctagggcactgtattttaggtatcataaagattgatgcctatggcgaagtccatatacacttcttcccacaaatctctgttctaagaagcattattaacatataatgggagaagacactactttctcacagcaacaacacagagcaaaactctcacagtggtaagctaggccattggagaaaatgtatcatagaaattgattccagcttattgaggataccctttggcctccaagcgagctttgtatctatccacctagccatccattttatatttaaccttatacacccatctgcaacccatacaatgcttatcaggtgg

SEQ ID NO: 89111 - DNA, 316 bp, Glycine max
  unsure (1)..(316): unsure at all n locations
agctttgnacgttgcacttatgcttgtctaatattattagacaataaggcaaattannnttagaggccccactttttagcccnnnccaaagatcataactactcatgttactccaagaatcanttaacaagtgatcgaccagacctaacaactattttggaggcttnattggttaatatgttgactcaattgatttatgttaaaaataatnnnnacatgggatttcctaatacaactgagatgtgtaaaatttgatgacaatgggattctctaatacaattgagatgtttaaaattaaatttaaaaattatcattt

SEQ ID NO: 89112 - DNA, 320 bp, Glycine max
agcttttttcttcaatttcttcaaagaaccccggagggacacattaagtggccatgtaataccaatggggatttaaatggattaaaaataaccctttctgctaatgtggacaacattttcatgctcatgataaatataacacaatttgcaagggggccctacactctcatttatgatttacgatcttcaacaggaatataacctctgtaataactatttgttgaaaattaaagatatgcatgataaacatcacaaccccatattttataacattgggttgaggaaattaatattacatgtttgtataattgtgtactatt

SEQ ID NO: 89113 - DNA, 319 bp, Glycine max
agcttcaatgttaatgtttcatcagataatgtcaaaaatcgtatcaaattatggagatcgtggttgggatggcactaagcacatgatcacagttgagaatgaaaatgcttggaatgaatattgcactgtaaatattctttaaatgttgctatttgttattcaaagtagattggatttgactttttctttgttttctagtcgcataaatcggctaaaccatttcgactcaaggtgcttcaaattgggatgatatagtggatttgtgtgctaaagatagagccaccggtcatggaggatgctgatgaagcgatgagtagac

SEQ ID NO: 89114 - DNA, 329 bp, Glycine max
agcttcaagaataacggtctcatcaaattatttatttcccgaagggaattctataaataggccttctatttttaatggcgtgggttaccattattggaaaacccgcatgcaaatttttatagaggcaaaagatcttaatatctaggaagcaataaaaattgggccctacattcccattatggtagcaggaaatacaaccatagaaaaacctagggaagaatggagtgaggaagaaaagagattagttcaatacaatttaaaagccaaaaatataattgcatctgctttaggaatggatgagtacgttagggtatcaaattgtaaaagtg

SEQ ID NO: 89115 - DNA, 319 bp, Glycine max
  unsure (1)..(319): unsure at all n locations
agcttgnaagaatattttgtacccaccacaagcgggcatagggggcggccaggcgatagagcgcaacaaggccaccaaaaccacaaagcgcgcaaaaacaaacccacgcccggagcccacctccaactgaactcacgaactaccaccgaacccaaaacatcacccatcatcacgcgggtccccatcaatactcccaagcttccacaacatgcaagcgaaacaacaaccaaacagcacaagcgatgacagccaagcaaaacaaagcaaaagcagaaaactctgctcaacacatcaagcaagatcacaactcaactcccga

SEQ ID NO: 89116 - DNA, 330 bp, Glycine max
ctgcagcttgttttaactttttttttctcttttctccccctttggcaacatcaaaaagccaaagatctcggaaatcaacacagctataacaatggagctactagatataggtatcacaggattaaatccaagaagcgcaactcataatcaagaaaataatctaaccagaattcaaataacataaaaggctatcaaccacaaaatatccaagactgaaacacaagaaaaataagcaaagtacttagcataataatgtagattctaagaaactaaaagccaaaatacacggcttataaaagatgaataagccgaatctaaaatctaagaaga

SEQ ID NO: 89117 - DNA, 327 bp, Glycine max
agcttagtagggggtactattttctatgattgcatctggctaaagggcaacatttgttgtctcctcactttttcagtgattgactactccagctcgtccctaatattcagtgtcagctcctccttaagattttgtttgattcaatcctgctcttttaggctaatcgatgtagatgtccaggagtttgctgaagttggtcttaagtattgtctgattgtcacaccgactccagtagcatggacatggccagggtgctctggtcgcccaacgaaagtagtcagtacatcctgatgtccatgggctacaaagctacccagtgtaaactac

SEQ ID NO: 89118 - DNA, 267 bp, Glycine max
  unsure (1)..(267): unsure at all n locations
aatcaaagctttttatntctcgcattccttttttgnnnncagtaaaaaccttcgttccctcagcgactataaaaatcatannnntagaattagatcttttttgtcaattatcaaaggagtgnnnnaagcgagaatgtgagtcatccccctgggatcaaaagaaattctctacatttggacttaaaatgannactaataatggctcaatttcttaatttctccaataatatacnncncttaaaaataactctccttcagagattgact

SEQ ID NO: 89119 - DNA, 325 bp, Glycine max
agcttgtaagattatgttgtacccatcacatgtggtactaggtggcggtcgggcgatggtgcacaacaagtgttccacattcacaatgcgcgcataaacccaccatcccctgttgcccacctccaactgaactcacgttctcccacgtagcccatatcctcgtttctctccacccgggtccccatcaatcctcccaagcttccacaacatccaagcaaaacaacattcaaacagcacatgctatcacagccaagcaaaacagagcaaaggcagaaaactctgctcaacacatcaaccaaaatcacaacttttctctcttaaggac

SEQ ID NO: 89120 - DNA, 324 bp, Glycine max
agcttaacttaacataattcacatcattttaccaatcattgtgtaacttcacttgtcctaaggatttaatcacaaaatcatattctataccttcacattaatcacatgctcataacaaaacatctcaagtacaacacaacatctctcacacacaattcattacccaccatcacgtagcaagtcacaatgatcatcacacagacgttatgcaacatatatactaagactcaatcctatattgaatgtggtatcttgtcagtgaaaaataacactagggcaaatctctccaccaaagggaggctttcttcacaacatctgaatttc

SEQ ID NO: 89121 - DNA, 327 bp, Glycine max
tagcttatagaatttatttcttatgaacaatgacaactgaagagtctatacatgtttcctttgatgagtctaatgacattcttccaaggaaggattttttaaatgatatttcacattccttagaagatacacatattcatggaaatgactctaaagaaaaagatgaaggaagcactgaagatcctcaagataatggagttagagcaaataatgaacttccaagagaatggaaagcctcaaaagatcatcccctcgacaacattattggtgatatatcaaaaggggtaacaactagacattctcttaaagatttatgcgataatatgg

SEQ ID NO: 89122 - DNA, 322 bp, Glycine max
agcttgatcacctgttatatgttcctgtctaaatataaatagatatgttttagtttgtacaaattcgtttgtgagttctcttgcatttgctgaaattagcagaaaattgaatcgccttataaatatgttttgtgtgtggctaagctctattgttgcttagcttataaaatgaccaacaaatacatctcagtagctgaaatcaattctgagaaagaaagttaaataatcatggttagggttgttcatttggggatggtatcacatatttcgactaataaacaaacatctagtctcagaataccattttacatggagacgatgc

SEQ ID NO: 89123 - DNA, 321 bp, Glycine max
agcttctcccctattttgctataaatagggggagaagtgaagaagaaaagggttcagccccttaggcccttctctctctttcgaatttgctgaggaagattattttcgtgaagaaaatccaagcctaggcgcttctgtaacgttttcgtaacgtttccgtgagtaattacgcgaagattctcgaccgttcttcaaagattcatcgttcgttcttcgttttcttcagtcttcaacgggtaagtacctcaaaccaagcttttcaattcactctatgtacccgtggtggtccacattttgtttcatgtatttttattctcgttt

SEQ ID NO: 89124 - DNA, 306 bp, Glycine max
agctttttccgtagatctctattgcaagactaggcctaaactaaacaccattattggcacatcataattaaaaccaactgttaattcgcacattcctcttgttagactaagttcaatcctactttaataaagttcttatgtaacaatacatttgccaatgcttatgtcacctaactatgcacacaaatggatgatcacactaaacgcatccaaactttaaacattgaacgaagcattggacgcagaaaacataatcaattagacattgaggatttacatcagttgttcattatgaatccacaacta

SEQ ID NO: 89125 - DNA, 330 bp, Glycine max
agcttccaagaatcaagatcaagattccagactcaagattcaagaatcaagagaagacttaatcaagataagtatgaaaaagttttttcaaaaactgagtagcacatggatttttctcaaaacatgtttaccaaagagtttttactctctggtaatcgattaccagattattgtaatcgattaccagtagcaaaaatgttcttcaaaaagctttcaactgaatttacaatgttccaattgatttcaaaaagctgtaatcaattacaatgttttttggtaatcgattaccagtgtgcttgaacgttgaaattcaaattcaaatatgaagag

SEQ ID NO: 89126 - DNA, 330 bp, Glycine max
agctttacacacacaacatgaatcttttatgcatgagtcaaagaacatcttgttcaaatatgacttttgagaaatatatattagaaggattagagttaatcacaaatgataaaaggttaacaattatttatgatatactcttttcatcaagtcatacaaacatccgagtccattttggcattcgggaaaatctttcattgttttcaccctctaggtgcacattttttttccaaaaaacctttcgtgttttgatccatgaatttccaaagaaaactggcgataagttctttttcaaaagaatgttagttttgttagtttttttagtttttt

SEQ ID NO: 89127 - DNA, 328 bp, Glycine max
agctttataagcgcgggtctgttatacaaaggtcaagtggtcgcgatatacgaagatgatgttccgagtacattagatttggtacgaccatgccctcctgatttccagctgggaaattggcgagtggaggaacgccccggcatttacgcaacgagcataatgtaaacctttacggttttaaaagctctatagtttggcctaggctttagagtttttccttttgttaaggctttgtgtcttttgtttttgaatttataatacaaggatctttcttcatctgttcctacgtctctacccattctcattcatttgcatgtttacttctttt

SEQ ID NO: 89128 - DNA, 264 bp, Glycine max
  unsure (1)..(264): unsure at all n locations
ctaaatcacccatgaagcagantaaggggcacttggcttaaattttcttttctttttaaatgtagtagctcagacacaattttaatgttatgtaaatatttacccgttagtagaaaaatattttctgttttgttaatttccctgaatttgctccataattgttcattgaatgttgttcacaatgatttgctttgtaaaatagagataatccaataaacgtgacggattgagaaaaactcacttatttggtggaacattacccca

SEQ ID NO: 89129 - DNA, 283 bp, Glycine max
agcttgcccttgttttatacatgattggtacatgatttgggacttgtaggattcaatttgggcaaaattggatgagggaaaaagtggttttcgaaatctgcactttattcagaattttgtataagtgcagaaaaatgcttgtgtatggctggttgtgaaaaggggattacatatggggctcttgacatttgcttgcataatccacggtcaaaaggatacttatgtcctatagacttccagtaaaattttgagttaatccaatggttaccaattggaagaaaga

SEQ ID NO: 89130 - DNA, 324 bp, Glycine max
agcttttctatttattttatgcaccccaagtggtacacatggtgtctaatgcacatagctacacattttgtttactctttgtacccactgttgacgtgcaatatccagcctacctaagacatttctcgcgtacctccttgactagagagattgtcacctagcattagaattgttttatgcgtctacttgggttaaagtcaacttcgaccgtgcttgtggtttagttctcatttcatattttggctaattgactatgtacctgtgtttaagtgacgcctacacttaggattggaaaaggaaattggtgcgttgcttgaaagaatt

SEQ ID NO: 89131 - DNA, 327 bp, Glycine max
tagcttacatacttaatttttttcttttggcaatggaaatgacagataaaataattgtgcctgagacattatattatgttcgacgacactatataatattttttctaataaacagcccagaagaaagacaatgatgaaattaactcaacaatctttatgaaagggataacaggaaaattatctaaaattatttcgcaatgcaaattaattgattgagtttagtctgtaatcttgaccatagatgtactaagtgccactacttatgagcattccatgctccactcttgcttatcttaaaattgttctctgcataagcatggcagtttt

SEQ ID NO: 89132 - DNA, 320 bp, Glycine max
  unsure (1)..(320): unsure at all n locations
agcttncatcacatgctatcactcaaaagattttcttaatctcccttatccaattctgagcaccatcagggttttatcctcccatgaaaatagatggattattttgttggaagcagttcaacacttgatactcaacaactccagtagcttctcccttattctgattccccatagcctgagctaaggcttggagagcatcagctatcacatgaccattccgtccaaccatcactccctatacacaccaggaagtgagaacatcggaagaatacacacaagaaaaagaacaaaacaaaaccacacctatctcaagtccctac

SEQ ID NO: 89133 - DNA, 321 bp, Glycine max
agctttggttataggttttaattttactgtgaacctttttttaaaaaggtgagaataatggtcatgaagttgttttacaagaaacattttcttcaatactttcttgtcatatattttgatatgaagtcattgtacaagatgagataggtagtggaaattatatggagattatgagtatgagtgcatgataaagggatacctaggcaggcatctaatcaaggctccatctccgagtcttcactctcataagattgcctattactatcagcaagaatacgggtcactggggaaaggtacgatcgatggtcctttttttaatgt

SEQ ID NO: 89134 - DNA, 448 bp, Glycine max
  unsure (1)..(448): unsure at all n locations
tataccagagatcattaagccatgcatgtcttccaaacgacttgttgagcatagtcaatttcgacacatatcctcgtaaagcatcatcttttcaccctaatagtattgcaattgaccttcgatcataaggtgacccactgtcgcaacaagtgctaacaggaaactatagtcataatacaccaagtttaatctaaaaaaacatacttataatacagttgttcaactctcgcacaggggatgtctattctagtttccatttcgttgttgccaaatagtgttaaaatatcatctaaacgcctataacaatattttaatacgtgtgtggtttgatattggaaacttgatcttgagtntagaatctatttttgaaatatttttatatatttaaatttacgttagagaaacattcaaatttaattatgattaagacaatcttgagtagcttttg

SEQ ID NO: 89135 - DNA, 330 bp, Glycine max
gaaaaaaatgaagtggctccttaccatgccccctttttttattaacccttaccaatggccttaataccttaaactctgaattaaggaaaaaaagactaagatttctcttttaaaccaatattattttttgagtatattataaagcatcaatagaaagaaattacaccttactcaactcgaaaataaattctcaatgttggatcacgtcgcctcagaataattaagaaaggggggttggaataattattcctaaacctttacaaattaaaaatttactcttctaaagctttactatattgttaagtaaatgaagaatagaaaagaaactta

SEQ ID NO: 89136 - DNA, 449 bp, Glycine max
  unsure (1)..(449): unsure at all n locations
tgtacgcacatcgntcgcgtgtatgatatccacttcacaatgtgtgatattgatgaaagcttcaaccctataacggcacgtggcggacaaaaatgggcagcttacatgaatggtcatcattgtcaatgcggaagggattctgcgcttcactattcatgttcacacatttattgcaggtttgtgggttatgttgagccatgaacctacctacccactaaaataggatgttgtttatacaaaccagcacatcttataaaagcttactccgcacaatgggggcctcttgcgaatgaagcagcttttcctccttctgatgacgcatggacacttatcactgacccaactacaattcgtgcganaggtcggccctaatcaagaacgataagaaatgagatggattatgtctaaccatctgagcaccgacaaaaatgtanttgatgtggaaccca

SEQ ID NO: 89137 - DNA, 269 bp, Glycine max
cttacagcgcctgcagctgcagctatagtttgcatgagtgaccctgactttatagacatctgctaaaccttactatatctaggagagcatatggctcaaacacattacttctaatttggtggagaaaagactaaaagaatgaacaaaaaaatgtttagtctcatcacacgcatcaaataagttgtatgttaaaaaaaaaaacaaatagttgtgctggtactataacgtcaaaatcaaataacaaaagggaatattgagaatgctatttt

SEQ ID NO: 89138 - DNA, 429 bp, Glycine max
  unsure (1)..(429): unsure at all n locations
tatcgntcaagaatctcacatatattgtgagttcttcacattccaccaatattattattgttgctcatttcgacatcgtcataatctttgagtgcttgtgcacattctctccatagatcatacctatcttctatttgatgaccatgaagttcattcagctcctttagatccttttgaagatatctcaatttgctttccaacacctaaaagttcttgagaaaagnagctttttccttatcacttgtctcaatctcaagacatatattggactctttgtctttaagagtcatacgagctccacatgtctaagaggatgcgtgcagagaaatttctacttgattctgaagagtnttctcaagttttaaattatctttggataattcttttgaatcttataagaaggtttgtaagcttttgagagaatacatg

SEQ ID NO: 89139 - DNA, 439 bp, Glycine max
agcttagccctagaggggatggaccttttcttgttttggagaggatcaataacaatgcctataggttggaccttccagaaaagtatggagtcagcaccacttttaacatgtctgatttaattccttttgcaggcggagctgatattgacaaggaggaactaacaaattcgagatcaaatcctcttcaaggggaaggtgatgatgcaattcttcctaggaagggaccagtcactatagccatgagcaagaggctccaagaggattgggctatagctgctgaagaaagccctagggttctcatgaacctcacggtagattttgagcccatgagccaagtttgggtcctattctcgttgtacatattatactacgatgccattatattcaatccttgtatttagggctccatattgtaggtaggggaccctaacaatatatg

SEQ ID NO: 89140 - DNA, 344 bp, Glycine max
ccggaccttacagtcacctgctgctgcaagctaaacattctacttcgagcgtcttgatatattacgggcgccaaacagacatactggataaaagatattgatgttagcattggctcacatctataacattccataatcgtccgctgcgatatttctctggccacattcagacatcctagtaaaaagcttttgtcgttctaattggctcaaagattcaacatttcaattcgagcgtctcgatatattacaggacttaagctgacttcccagtaaaagttattgccgtgagaattcgttccacacttccacatttcatttctagcgtctgatttatcgacgggctc

SEQ ID NO: 89141 - DNA, 429 bp, Glycine max
  unsure (1)..(429): unsure at all n locations
tagagccaattcanacgacaataacttcttactcgtatgtcttattgagncccgccatatatcgagacgctcgaaatttaatgttgaagcttttatccatttcaaacgacaataactttttactcgaatgtctgattgagtcccgtaatatatcgagtcgctcgaaattgaatgttgaagctctgagccaattcaaacgacaataactttttactcggatgtctgattgaatcccgtcatatattgagacgctcgaaattgaatgttgaatctctgagccaatccaaacgacaataactttttactcggatgtctgattgagtcccgtaatataacgagacgcccacanatgaatgttgaagctctgagccaattcaaacgacaataactttttactcagatgtctgattgaggcccggcatatatcga

SEQ ID NO: 89142 - DNA, 431 bp, Glycine max
agcttaagggctatacagaaagaattattattatttgtggctcatatatggtgcaagggagtaaatatcatcaaaggttagccttgtggctaagtggctaataataagaagaaacatggccttgatcatttccacctcatgtaattaatctgaaagtctaagaatgatgcataagcgggaaattaaaaaagacgttctctcataagtaagtatacacaactctctggacaaaacaaagatgttggcttaccgcaccatgatttctttccataaaataaccttttcctctttgtgtgtgattcatactccattacttgaactgggggttgccttcatggaaccagcattttcacaaaaattggtatgcaacatttctagtgtctgagtccttcatagaaagcttagaagtgacttccaagttttatgcactt

SEQ ID NO: 89143 - DNA, 420 bp, Glycine max
tcaacctagaggagacggaccattccaagtgttggagaagatcatcgacaatgcctacaagattgacttgcctagtgagtataatgtaagtgccactttcaatgagtctgatctatctctttttgatgcagatggaggggccttgtattagaggacaaatccttttcaagaaagagggagtgatgatgacataaccaagggcaaggaccatgaagcacttgaagggcccatgaccagaggcagacttaaacaagcccaacacgtcatagagacaaagctggtcatttgtatagctaccattgatgatgattgaaggcccaagtggagaaagatgaaagcccataggcagaggcactaccaagactactaattgttgctgaaggcccaagttaaataaggttttagttataatttattttt

SEQ ID NO: 89144 - DNA, 300 bp, Glycine max
agcttaataatgctatctccctcaaagatcttggtggccctgactatttccttggaaaggtcaaacatcaacctgtggggtcttttatccttacacaagccaaagtatattcaggatctgctatccaaaactaatttgtctgaggcaaagcctatctcctcccctaaggtaaccttctgtaagctaacaaagcatggttctgaaattcttactgacccttccatgtacagatcagatgtgggtgctctgcaatatgctactattaccaaacctgagaatagcttgtttgtcaaccaaatc

SEQ ID NO: 89145 - DNA, 411 bp, Glycine max
  unsure (1)..(411): unsure at all n locations
tctaaactntatacaagaatgaagctctgataccttctgttgtacaagtggcctcaaatatcttaagaaggaggggttgaattaaaatattacaaaatatttccccccattacaaattctactttgattccaatacaagttccaagttcccttatagatggatttctaaacaatgattctaatacacaatctgaatataaatgtgaagcaataattaataaaagagtttaagggaagagaaagtgcaaactcagatttatactggttcggccacacccttgtgcctacgttcagttcacaagcaacctgcttgagaagttcactatcttgtaaaatccctctaccaggtctgaaccacacaaagacaacccttcctttgtggtctgattctttacacaagagaccctcggc

SEQ ID NO: 89146 - DNA, 103 bp, Glycine max
agcttgagatgaggaagtgtttgattggtgaatctctctgcttttattgcagaccaccgattggttccctgatatattgttccgggggctagaaaactttgtg

SEQ ID NO: 89147 - DNA, 378 bp, Glycine max
ctcagcttggctattcttcttcttcattccttctttctcttgccagtttaattcaaggactaaccgcctgagaattcttttgattcttccttctccctcttgccgaaagattcaaaggactaaccggctgagaattcttttgattcttcctcttccctttaaacataagatttcaaaggactaaccgcctgagatatcctttggttccccttacaaagattcaagggactaaccgcctaagaattctttgtcttaacacaatggagggtacatcctttgtggtacaagtagagcgcacatctacttgggttgtaatactgagaacaagagagggtacatctcttgtggatcagttcaagtggagggtacatccacttg

SEQ ID NO: 89148 - DNA, 396 bp, Glycine max
  unsure (1)..(396): unsure at all n locations
agctatgaaattgtcgacttcatgtaccttgctttatgtttangagagcacattgcgattagacaatattggcctcaatttaggggagtttgtttgacggataatttaaaaggttagaaacatcctcgcaccccacaaattatataaaatgtttttgtcttaaattaataagagaaattcatatttgtgtgcactcgttaaacatatacaagtgaaaggctatcgaatggactaagttgattgaataaaccaactgcgttagtctatgatttgtgctctctttgaactcaagcattcgcattctaaaaaaccaatatttttgtattccagcctcactacaagctcataaaagtccttctgattcaatttgtgcacttctaactctatggaatgaga

SEQ ID NO: 89149 - DNA, 195 bp, Glycine max
agcataaccatagaaaaacctatagataaatggtctgaagaggatagaaaacgagtacaatacaacctaaaagccaaaaacataataacatctgccctatgaatggatgaatatttcaaggtttcaaattgtaagagtgctaaagaaatgtgggacactcttcgattaacacatgaaggaactacagatgttaaa

SEQ ID NO: 89150 - DNA, 369 bp, Glycine max
gcagctttaaggagttctaggaagctcttcgcttaatgaacagtgtacacttggggacttgatgatgaaagctttgagacacacttcaaagttaacttttcttcctctgttactccgtcaattacgtgctccccccgtctctctgtctgtttctccattgaagcatgctctttaagcctcttatccaagacacattcttggtggtgaagctccttcttgcatggcttgatttctagtggatggtgcctgccctgctctcttttattttccttccgttgatttccgggtggaaaatcaccattgaaggacctcattggagctaaagatgcagcctccatagaagctcgacagcaagcttgcattcaatgt

SEQ ID NO: 89151 - DNA, 443 bp, Glycine max
  unsure (1)..(443): unsure at all n locations
aacttaagctntagatcaagggggttggagatatttgaatgtatccctctcaaaggttctttataacaaatgggtgacttggatggagatgtgcngtgaatattgggatttccaagggtggctaatggaaaaaggacctgaccaatcttaccagagagagggctcatacatagggatccattgtcccattatctttttatattatgtatggaaggtctcacctctggactaaaccaacacgagagaaagaaatcttcatggtatcaaagggtgtaagggagctcctattttcacacactcattttttggctgacgatttcatttttactttgaagggcctcaaaaaaggaagctgaaatttttcatgatatccctggggcttttgaatcttcttcagggctctctattaacttgtaaaagtcaaaaaatttcttaatagaaac

SEQ ID NO: 89152 - DNA, 412 bp, Glycine max
gcctttaggggatggacctcttcattgtttttataggatctattaacaatgcctcatggttggacctatcagaaacagtatggacgtcagcacccacttttaacatatattgatttaattccttttgctggtggagctgatattgacatgaggaactaacaaatttgagatcaaattccctctttctaggagaaacgggaaagatgcagatccttccatggaaggggaccatgtctctaaatccaagatcaagatgcctcaacaggattgtgcttgacctgttgaagaatgccctagggttctcatgaacttcagcgtagatttttgagcccatgatccaatgttggggtccaactttcgctgacataatatacaacgatgccatattttcatccttgatttacggctccaa

SEQ ID NO: 89153 - DNA, 435 bp, Glycine max
  unsure (1)..(435): unsure at all n locations
tccgaaatgtcaaaagaattgggctgttgaataatgcattaccaaaccttctgtgattgggttaaagatacaatctttgcagatgaaaatgccttctaaacattaagaaaactagcagatgggcctaaaaaaaatgttataatccttcgaggatacgacataaacaggtattcattttacacataagcacaagatgacaaaagttcaatgcagaacagtggggtcaccctaagggctgaatctcaacactttgcaagtgtcaatgacgccaatccctgtgtagcttccatcccttactttgggttcattgatgaaatttgggagcttaattatgtgaaatttacagcatgtgttntcaaatgtaaatgggttgacagcaacacccgtgtgcacaccgatgatatatgatttaccctcgtagatctaaagaacttg

SEQ ID NO: 89154 - DNA, 399 bp, Glycine max
  unsure (1)..(399): unsure at all n locations
agcttntgaatcgccacgtcatgcagcacctgttcatattgcgcgtgcaggaaagtggagtatatcgctacaatggagttgtacccaccaatcgccagaccccgcacaaaagtcaccgcgtgttgcctggcaaatgccacgtttaaataacgatccgggaatttacgtgaatacttgaccatgccggaaccttcacgcattgccggagtaatcgccatcagctttgtgtctttcgctgccgtttcgcacaaacagtcgccaaagaattttgaatagctcgtgcaaccgccgcttctattctgcaacaaccgctggagggatcaatattttgcaccgggtggatagtgaacgggcttattttgcctgttaataccacaacctttttggcatgaatgcaag

SEQ ID NO: 89155 - DNA, 142 bp, Glycine max
tgctatctgaccaaaaagtcgggtataaccgcaaaaaagaccgtcactttcacccggcctaattgatcctcacggtgttgcaaaagacggggttgcgactttcaaattttggcatggtggcgaacgcgcaagaacaagctgt

SEQ ID NO: 89156 - DNA, 345 bp, Glycine max
agcttgtatgagtatggaggacctttcacattttgtactaagtggcggccgggcgatggtgccagtcgaatattcacatccacaagatcacacataaatacaccatcctcaggtgcccaccttcaactgagcttacgtactcgcacgtatccagtatcctaggtcccctttacaccaggttccaatcaattcctccaagcttccgcacgattcaagcaatatcgacatccaaacatcttgaaccattaaaacctatcaaaaacaaggcggaggtagaaaaatctggccattacacaaaccaagacctcaccttttcttactgaaataccccaacaacaatctctt

SEQ ID NO: 89157 - DNA, 239 bp, Glycine max
aggacggttttagcccatcaattctctttctatatctatcatattaaagatccgggctcctctgaatattttacaggagagattctatttcacctgtaatccgattttgtcatcccgagatgtgaccggtttatttcatataaatgaacttccttctttcatatgtgcacatacaagagttgggctagcgcttcttttcttgtacaaaagtaaattaaaccattttcaccagattagcg

SEQ ID NO: 89158 - DNA, 439 bp, Glycine max
  unsure (1)..(439): unsure at all n locations
agctagccttcaatcacagccactgtcgcctttattgtagctganttctgaactccatgtgtactctggtataatgcctgcggcctgcaaatatcgtaactgctgtacaccggcgttgactgattgcaaccactgtgtttcggattggcaaccccaccagcagattatctacgttttatcttaatataaaccaatactcaacattttaactatataataaagcaaagcagcaactagcaagtttctgtgagacttctatgaaaggaccttcagatgataccatatgatgagatacttgggagaaccacaccgctaaagctagcttgtgtatatctagagccaaacgccttatataccccacactagaattcatactttcaatgtgggactncacgtaccatatgctttaacttgaatctaacgctaaacatcttcccct

SEQ ID NO: 89159 - DNA, 404 bp, Glycine max
tcttgctgaccaaagagaattattttctgacccaagtagattttgtattttggcagaaagctaaactgatccaattgtaacaagaccaggcatcttttgttgtaagtgtggtcattaaaatgcagatgtcagaattctgatatttcttaaaggatcactagtaaaaggatggattagtgtttgagaacagagggcataaggagattattacctatacttaataggagatccacatatggatattgtgttctattaggagtgaatctctttcatggaaaacctcatgaagcaaaatgcggttgcaaagtccagagctgaagcagaatatcaagctatgactctcactacttgtgaactaatatgtctaaaaaccaataaatgactcatttaagagcttaaaattt

SEQ ID NO: 89160 - DNA, 376 bp, Glycine max
atgcatgcgaattacgacgcatcaactagaatcaagcctaggtctttgtgcaagcaatcaatgatgcttaacacaccgtatgattgtgacgatggatggctcaaattctcacaaatgtaaactcatcactttcaaaatgagctctacaaacttttatcacatgtatagaaaaatcaatgatttcaagtcacataatgtcaagaactgttattttcaaaacaattacccatttcttgaacatattctataatacaaagaaaaacatgcatagttttacatgcacacaaaagtgaccctaatattaaactaattatctgatgatactaacaacatttacaaattcacacatcttactagttaacaatacctactttac

SEQ ID NO: 89161 - DNA, 432 bp, Glycine max
  unsure (1)..(432): unsure at all n locations
tctgatagtatgacaaagaagaaaattcttcagattggtggttagaggtggcggcagtttaaatcggacttgactaggaaatgggcccttgcagccgaccaggacagtgtggacgacacagtttgtgaaaaatacgacattatcaaggagaaatgggcccagttttgtcagacacgcagagacccttcttgggaggtatgtactttgtcattttagttgttttccacaaaagattcaagtcgtataattcgttggagtaatttgtaccattaatgtttgattttttcaggatgtgcggaaaaagacacaggccatccaaaagcaaaacactggcccccacgtgttgtctcatgggggttatgaatatttgtaccattaatggctgagaataccanaaacaagctggaggaaactgcccagtctggagcactg

SEQ ID NO: 89162 - DNA, 409 bp, Glycine max
  unsure (1)..(409): unsure at all n locations
agctagttagaactatcatcacatgacgctttattggcacagaattagttgtcttctaagcgacttgagattctaacagatacacttggttagtagccatctaaactgtctattggtctaactacacattcttctgctttgcaagttataggttgttccatctgtggtgaggctcatgaaacatggccattgaagaaaacacttaataagtctactatatgggaaatcaacagcgacaagggtatactcaaggaggattttgatgcttccatcacggtccttataatcaacaaggacagaggaggtcacactctagcaatcatttgaacaaagaccagngcagaccttcgaacaagacaatcaaacaatggcctaacatcttttagaagactacacagatggaggagac

SEQ ID NO: 89163 - DNA, 354 bp, Glycine max
  unsure (1)..(354): unsure at all n locations
tgtagctcaccatctnttcatagtagaatacctgtaatgggtctactatcattgtcatcatgttttttccgtcattgaggagccacttgagctgccaagtctcttcacctttaggcgtattcttttgaaagattcgtgccccctttttttgcacataatttgtagttgcatcctatccgaagccattataccgacactgcctaaacgaaggcaaacattaggtcctcccacgaatggactcgggaaggttccaagttagtgtaccaggtaacaactaccccaataagactttcttggaaagaatgtatcaacaattcctcatcttttgcgtatgcccncatctttcgacaatac

SEQ ID NO: 89164 - DNA, 315 bp, Glycine max
agcttgagatgaggaatgtgtgattggtgatactttctgctatgattcgtcgaccacagagtggttcctggagatattgtcgcggcgtgtatgagaccttggggacgttatgtggggtgctattgccctaaaccaagcttgaccattcttgacccaacccggcgctagttagtttatgagatcctttgatgtccttaacatgcgagcttctggcagtttactgatataaggtataaagaccacctatcatggaggcttgtggtggcttgccctctatgaacttgattgatgtgtgagagatggcctttggttatc

SEQ ID NO: 89165 - DNA, 303 bp, Glycine max
  unsure (1)..(303): unsure at all n locations
tgctctanattacattgatgtttggatttatgggtggatgttttatgccattnttgntntaagaatagtgtcccactggtaaaactaactttccaaatgtttgccttcgcaagaaatggccccgaagaagcttgcctcaaagaggtccacgaaagacaaggcagccgaaagaactagttccgctccggagtatgatagtcaccgctttaagagtgctgtacaccaccagcgcttcgaggccatcaagggatggtcgtttctccgggagcgacgcgtccagctcanggacgacgagtatactga

SEQ ID NO: 89166 - DNA, 426 bp, Glycine max
  unsure (1)..(426): unsure at all n locations
agctcctaactngtaacgtacattnataaactattataacttattagttaaacccaccaaacatgtctgttgattgtgtcttaattatttactccaaacaaccactcttttcacctttaaaattatgcatgaacgcgaaaagttccgcctgcaagctaagatcgatatcatgtaatgcacatgatctctgatatacaagtatgaagcacgtgcgcctacaattatctgtacacaaaacgccttttgctacacgtatattgccattcttttactaaccctcccctctcgccatttattaatatatttctttattcacattggtgttaacctgcgccgacaattttatttgtcaacatatatacatgacgtcacactattgttgtttaaactataaccgagttttaccaaacttaccatttcaaatct

SEQ ID NO: 89167 - DNA, 382 bp, Glycine max
  unsure (1)..(382): unsure at all n locations
cagatttctgtttaatcgttcacaagaaaccaaaatcaaaatccgctgctcaagataaatgtatgaagaagaagactttgagtgaggctgaaaaattatgcacgagatttaaatattgacgaaatcggaaagttattggcggtggaactaaatttgcagcacttatagattacgaggttgtcaggaaggactaaaaaaattgtaattgtggtggccggtgaggtgacgcatgtactaaatttctttctcacggtgagagatttgtcgagctcttccatcctagacgttgccctccaaattaaatagtanacatcttgtctaagataataatcacatttgattgagttaagacttcaatttaacgcgcacaaatgtgaaaccg

SEQ ID NO: 89168 - DNA, 389 bp, Glycine max
  unsure (1)..(389): unsure at all n locations
agcttcatacaantctcaactctgtcagaccattgggaattcatagggcacgggtccggcgtgccctgggcacgatcctatctcagagagagaacaaaaccaaccaattctccatttgatctgcaggctcacgtatcaccaggataagaacttatgtatctagtgaatccaatattaattccctacctacttaaacgaacaccattatgatcctcaagtacatgctctttatcaggtcacaagattaacaactcagtggatgggctgcattaatctcgtcggacatctcaccatacatagaacatactcaaaaataaagcttattccatgttcgcccatatctaagaagctttaggatatgccatcgatactttatgatatggaagtaa

SEQ ID NO: 89169 - DNA, 429 bp, Glycine max
  unsure (1)..(429): unsure at all n locations
actaagctagtctgcattncagatacaaagaacctctatatttggttgtccaactggccttcctattagttacacctataaatcagaatctgataagttggttaaattaaaaaagacctttgggattaccacaaccaacattggttgggcccttaaggtacttaatgattcttttaacagctgccaagtgagattccttaggaattcgcctgataccttgcacacaagcaaacactaagcataatatctggtctacttgtagttaagtaaagaagtgaaccaatcatacctttatatccttcttcatcaactgatttacctttctaatcgaagtcaagatattgtgaaattgccattggagttgatgggtcttggcatttttccatgccaaaattcttaattagttcagcacaatatttggtttgacat

SEQ ID NO: 89170 - DNA, 413 bp, Glycine max
  unsure (1)..(413): unsure at all n locations
agctnttcgcaaaggttgatatgcaagtcatttctgacttgaggtttctcatgcctggcatgagacagctagagtataatgctacttcaaagggctaaggttgggcatgagactttagatgacatggtgatgttacctgataggacggtcgttgatacaacaatggagttttggatgatgccacttccagtgaaagaagatattcatgttagacgccacaacgattacctcgataagtctgagattggttcaacaaggaatccagagagaagctctcaccaaactttattaatgcccacaagttcttttttttgaaacaaaaaccaatactttattgtgtatctgaactaaagattaaaatagacatggaccttctaacagtttggcccaattacataaataaaattcaactt

SEQ ID NO: 89171 - DNA, 389 bp, Glycine max
agctaccaaaaaaatggggctgtgctcatatgaagaaataaagatttctcgctcaacgaaaacacaagttgcaaccaagaggagatagctcttttcaagctctagataagataagtgacagtgcttacaagctagacttgccaagagaatatggggcataagtgccaccattaacgagggagatccatctttctttgagaccggtacgaatcaaattccaggagaaattctctccaaaagggagggaatgatataggtgcaactagcccttctaatgatcctctacatgggatagaggccctatgacaagggccaagactaagaggatgaagcaaactttacacggcctcttctctctgatctcacgagaagaagaccaatatgaatta

SEQ ID NO: 89172 - DNA, 304 bp, Glycine max
tagcttctagccaaatggacttaccttgaattatattctatgatagcccctttgagcctattttcccctatctttgttttgaagctcattacaagccttaagtgaaataccatgatatcaccttacccttaaggaattttgaagcttgcgaattgttctgggaataagtgtgggggggtatgtttcattggaagatatgactttcggccatgcttaatgttttattctggccatgcttgatgtatatatatattgcctagctctttctttaatcttcaatttcgtactactcactctacaaaaa

SEQ ID NO: 89173 - DNA, 276 bp, Glycine max
acacccgcactggaatgcctagataaatgtgcgatttatatagggggaaaaataagaacatgccttcactgcactcaaagaaaaatatatgcttgcgccaatgcttgcattacctaattttggcaaatcccttgaaatagagtgtgatgcgtctggggttgggatatgagttgtcttaatgcaagaaggacaccccattgcctactctagtgaaaaactgaatggggtggtccttaattatcccatatgataaagagagttgatgtgttggtaaag

SEQ ID NO: 89174 - DNA, 146 bp, Glycine max
ccttggatgcaattgtgatcgtattctcatcttaaattatatcttgacgggatttcaaaccatccttcgttcttgtcttgaatgttaaggagcttgccaatcacattggcacatacatgttattccacatgcatcacatcaaaaca

SEQ ID NO: 89175 - DNA, 438 bp, Glycine max
  unsure (1)..(438): unsure at all n locations
agcttcatagaaggctttttagatataaatatttgctctaaaataatctactactagttgatgtaatctattataagttcatagcgtatcttttctatactaattactttnttaatatatattgcgataaaatataaatttataaaaaaataaattattggatgccttaattgctttaatttatggcataaataaaagaaatttcttcaattacttaaatataaatataaattctggtttttcgatgaaacgtgaatattcttacaaactttggcccaaatcacttatcggactaatttatgatccatgtcatacttaaagatttttatctcttaatatattatgtaggaataaattcaaattccttttcacaaacttaattattgtattgttatcaaataagctaaactcactatattattgagtattgtatatata

SEQ ID NO: 89176 - DNA, 416 bp, Glycine max
gaggccttatgaagttagatgggaagctcttccatttctttgtctttaatacagacgtcccctggtacgtaagcacaaagacctctccgacatccgcacacagtggttaatgtttcaacatatgaaagttacaagtggggattctgtaagtcattctatattacctataaatggctaagatattgcttccaattcataaatatttaaacttgactttacataaacaggcatttcactgaaacatgtatgcgagcggggaattctcgattgtatggattcctcgagccacactccattcataggtctgggctatcgccagttggagcctgaatgttacataaagacttggtagcccaattcaatacacgaatctatcctggagcctccctaactgggtatgcccaatatacctgaat

SEQ ID NO: 89177 - DNA, 396 bp, Glycine max
gctgcagcttttaatcacaacgtatctatctgtttttatgtacaacaacgtctgttcagccataatataataacaactatgggattacatccacacaaagaaaacaacagaccaacgcgaggggaaattgtctattataagagagatcataactttagatttcacgttacgcatagtgaaagtattatattcttttccatgacaaaacctgttaatgcgctgtttatacaggtccaattttgctctagaaaaagctcttaaagtgccaccaactgggacataatctggaataacattgaatgcacccctccttggaacttacaaactgcacaaacctggagacatactctatgtgagacacagaggattgtcaccataaacaactaaagtcatcga

SEQ ID NO: 89178 - DNA, 395 bp, Glycine max
  unsure (1)..(395): unsure at all n locations
ntcttgaaggttaatcaacgaanaaagaaaaaccctttaatgtttgatacatttcttgaaggttaatcaactaagaaattatggtcgaactgggagggctttaagcaaaccctccaaagcagagacggacagagtctgtagcttgcaatcagatgaaatgaactgagcattttcctccattgaaattttgttgattaagtgcaacaaaacttgctccaactcttctccatcactccagccatggatttcaaccttaacaagcaaagggtctttgcatatcaagtcccacactggaaagttctttcttggcatcataaagtctctttctttgagcctcaagcttgggcaatagtccccactaccatcaccaagatagatcatnctcttttaccctc

SEQ ID NO: 89179 - DNA, 395 bp, Glycine max
  unsure (1)..(395): unsure at all n locations
agcttcgggagtngnatctacgcacgggatttgtattaccaccccacacgtccgtcttatgagacggcagctcttatataaacgtacaaatattacttaaaattatgtgaatattcctttttacgccctatgtctaatagagccctttaatataattatcatttggtggtggacaagggtgttttccatatgctccacttataccaaattgggagaaggaaattctaccgacgtatgtctttgataacaaagtgtatggtcaagttaatttttatctcttttttgtcagatgtgttcttatttgaatgaaaaggcattaagggtatgaccctaaaccatcttttaatttttttaaaaaagataatcatttaagcatggaccttaatgaacttata

SEQ ID NO: 89180 - DNA, 292 bp, Glycine max
acagcgacgcatatatacgtggcctgaatcagacatccgaatcgaaagatgtggctgtgtagctttaccatgtgctgcgatgctcaaatgtgagcatctcgatctatgatgcacctgaaacgggcttctgagtgagaagctatgccatatgaatgtaccgacagcttctacttgtcattgttagcgtgacaccatatgattggacctaatctgacgttcgagcctaaagggatgcggagcgagaatatacatgtgcttgcgcgttggaacgagagcaaggccaaatattatg

SEQ ID NO: 89181 - DNA, 386 bp, Glycine max
  unsure (1)..(386): unsure at all n locations
agctntttggagtagatacatgggaccaactcantttatttcagaaagtcgtatctagtcaatgtctgagagaccatacacagtttctagcgatttctaattatatgggccattaagtctatcatatgctgacaataaccgagaagcccatgaatttctttgggggcggagtaggtgtccgccattgccttggccttggctaacaatcggggaagttcttgactctcgtacaaggtaatagcaaaccgatccatccacatggtngcctcttggtgtaaagagtctatcacccttcctctagcctctatttccgcgtatacttgggcatactctgccacgaccctatgctcgtgggcctgggctagacctaactcttttttgtactt

SEQ ID NO: 89182 - DNA, 430 bp, Glycine max
  unsure (1)..(430): unsure at all n locations
ccttccactccagttctcattcgagtacctttcggttgtgatttttatatcgttaanaccagaatacacaataccctttagctaaccgacaagcaatttgtggatgaaatatactaccggcagcctttcatgtatgcaggtaatcaattttggtttcaatgtatgcaactaaaggatgatgctgatgttaacacaatggtaatgtgtaatcatgaatttttgtttgttggtccgattgagttattatgtagcattgctagaaccccagatggtattttaaacttacttgaagctactatgacccctactcatgatgccctgctatataacaatgggaggtggaacatgttacgccnaaatgagtttgttggtactcgttcacagaaatattccaatactttgacttccaccggatgtccatggatgactg

SEQ ID NO: 89183 - DNA, 384 bp, Glycine max
agcttaagctccttcaactgcacaatgctcttaatatttgaagagtatcctcgtggaaccttcacctgacgaagacactgaaaaaaacttatttcttcttctgaacaaagtatggcatgctgggggctaataaaatttcttctatcacaccttgaatgcgactgggatctttacccatatcatctacaacttggatagggttctaagccatccttcctctcgcttgaatgttaaagagcggtccattacactgtcacaaacatttttctcatatgcctacatcaaaacaatgtctaacgtcttaaaacaccattccgaagatcaaaaaaatagacctctctttcatatgcaactcgactttatcctcttgtgggcttccaaaac

SEQ ID NO: 89184 - DNA, 380 bp, Glycine max
tgaggaagcttcgcccagtatccccattgaaaaacctttattcaaacctttcaaagttagtgagaaagctaaaccaaaaattatggaacttagaaaaactaaatccttaattgaaggcgtatgcgacaatcatagtgaattactaaataagattggttgtttacttaaggtcattccagatactccccaaacctcgaaaaatacttccaaaatggtgacaagaagtacctccaaattaattaatgttattaatgaagatagtggccaaaactcagataatgatcagtatcagaaaagaatataaatccaattaatttccaacactggaaaacacccttcaaattatattatcaacgtccgactggccctgatcttttatt

SEQ ID NO: 89185 - DNA, 365 bp, Glycine max
  unsure (1)..(365): unsure at all n locations
ngcttgtcatcattggtcttgaatgcacggttattgatgtatgtggaatgttaaccattgatagagttaaggtgcacaacaagaaatggttctcccgtcatcctgtgtactgtcatggatagaatgggatgtatctgcgagtacagtgggtacggggttcttttgtagaaagatttaatggctttatatccataaagtgtccacatttgtgaagactaaaagccatatttaatgagggctatgatagaatggaaggcaagtatactagctgcttcaacaaatatggaggctttgtggtatatgaagtggtggggaagacctttgaggccttctcttgaggaaaggttgcttggatgatggagggt

SEQ ID NO: 89186 - DNA, 445 bp, Glycine max
cactcaagccttactcactatctcaagagatggcgtagcaagccattgagttataaatcatttatccatgatcacaaccatgttatgcttggccccaaaagtgtgtgttatatgaggtgtcataacaagatgagtgttgctgcacagagtcttgtggaaaaatttgaagaagaaagattgcctacacggaaggttgcttcaattttcaacaatggtgactcatcttcctccaatagagattgttggaatcatatcagaaatctttgaagaaagaatttagatgttggagatgctaaagctgctttcaattattgcaaaagaaaacaagttgaaaatcctaattttttctatgcaatccaatgtgatgatgattctcggatggtaaaatttttttgggtagatgctagatcaaggtagctgaccacaattggagatgtataacttt

SEQ ID NO: 89187 - DNA, 437 bp, Glycine max
  unsure (1)..(437): unsure at all n locations
agcttgtcaacccatggaagctcctaatatctcccacactttttggggtgggccattcttggatggccttgattttctcaaggtccacttggaccccatttctaccaactacaaaccctaagaaaactatattatctacacaaaaagtacacttctctatatttgcatagagggtgtttttcctaatgactgaaagaacttgcctgagatgtcctaaatgatcatcgaggctcctatcgtacactaaaatatcatcaaattaaacaactacaaatctacctatgaaatcccttaagacatgatgcataagcctcataaaggtgcttggtgcattagtgagcccaaaaggcatcactagccattcatacaaaccacacttggtcttgaaagcgggtntccactcatcaccctttttcatcctgatttgtgatacccac

SEQ ID NO: 89188 - DNA, 245 bp, Glycine max
  unsure (1)..(245): unsure at all n locations
tttctttggcaagctgcttttctaatctggtttagactggactcttatcctcttccaaactcaaagtctcttcntggtatctctaacttgaagagccaatctaaccctcgcgtntgaactgtcagccattcatgataactaccgatgatgccattacgaatgcccctgaagtctttatctttccttaatgggctgtcccacgccctatcgactctctgtataatcttgaaactctgcgcaccgaa

SEQ ID NO: 89189 - DNA, 292 bp, Glycine max
atcccctgggaatttctgaacacactaacatccaaatttttatatggattttgcatctgaccaaagaaccttgtatacaaaagttgtcaacctccatcggctttatttttaatgatgaactggaagtgtatgtgtcggaagaaaaccttaaagcaaaaaaaatgtcttattaccaagtaaacatgaacaacaaatggaagtggagaaacatcattgaactccaaaaggtgtcatgtgaatttatgcaacactatatccacaaaacacgatatatgaactctgggctatattt

SEQ ID NO: 89190 - DNA, 272 bp, Glycine max
gggacgtcacgtggggtgctaattgctcaaaacaaactttgacaatcttcaaccaacctcggcatagtcagtcagtgagaacctgtgatgtacctaaacaggcgagctcctagcagtcaacagataatatgaacatagaccacatagcacggaggcttgtgtggtggctggccaactgtgaatcctgtgttatatatgggttatcggcctctggtgatcaattaccaaggatgggtaatcgattacaaggcttaaaaatgaagacaggagac

SEQ ID NO: 89191 - DNA, 295 bp, Glycine max
tttattctaccctttccactgggttattgttttgcctaacgtccccttaatcatttcaattcttttctccaaatcctctatcgatgacatgacactctttgcctatactacactgtattatcatcttgttaatgacctgacatgataacatcatctctgacgtaaattaatgtataaccaggcaaatatcaatatcttttcattcaaccattaacaatatgattgataaagatctcttttcttttatcgcgttggcctacacacctaaaatttacattcatgaacacaaattttc

SEQ ID NO: 89192 - DNA, 376 bp, Glycine max
tgagaagtgaaaatgagaatgggggtaacttggagccaactctcatctcaaacaagtctatatcatcaatcgaaactcgctccaactggttttacgacgaaaaccctaccgaatcaaaatttgactcctcaacacccaattttaccctagaaatggctcttgttttcactttggtcactcatattcctcatttgcacaggctaagctttctcataagtcctaaatgacatttcaaactaggattaactccctttaacctccaaataccactaaatccaaatttggccttccaactatcaaagcctcactctttttccactcataacatcacattctcactttctaaccctatggtaactctacccttcatctctag

SEQ ID NO: 89193 - DNA, 263 bp, Glycine max
gcctatccctctgatttgaagactttctgatgttagcatcaggggctcaatatctttaaaatgcatgtggggtcacatctctcagctggggtcacatgtgattatttgtgtccaaaaggtgtttggcctcaatcacacctaatctcccttctccgtcgaaaaaaatgaccagctgtaaagcccagatggtggctagcctattattgcttacaaagacctcttccttcttcacagaaactagatggttttcatagttatctttt

SEQ ID NO: 89194 - DNA, 353 bp, Glycine max
agcttcattgcattcatagaaacttattaattcaggatagtcaaaacgataagaagtgacaatgggtctgagtttctcatgcccagcttctatgcatcgaatggaatcatgcatcatacaacatgtgtagaaacacctgaacagaatggcattgttgaacgcaagcaccaacacttgcttaatgtaacatgtgcactcttgtttcatgctgacttgccttccagttcctggtgttatgcattattacacgcagcatacttaatgaactgcatccctactccctttctaaataacatatctccctattacaagctccatggacatataccaaacaattcttattgtcgcatttt

SEQ ID NO: 89195 - DNA, 414 bp, Glycine max
  unsure (1)..(414): unsure at all n locations
gaaaaatcactgataaaacgttttattgtccatcttcttttacggtcctctttgcttttatcggttaacatggaccgtncaaaagcataaaatccacacatcactttactggcttttgcgagaactacgtaagtctaatttcctcttcgaaagaagatacgcaggaacacaagccccgctcttgtcaacctcgtgagatggttagaagtccaacgccttatctttctcaccaagtaaaatggatcattttaaaggccaacgccttaaatgaccaccttccaaggaaaaagaatcacttgattaaccccttttgatagaactacgtaggtctgatttctttatcacaattgaggaatacatatgagcaacggaaacacccttgtcgatcacacatagaaaaatataccaaaaaag

SEQ ID NO: 89196 - DNA, 431 bp, Glycine max
agcttcatcatgcttgttagtcattattttttacagcattgccacagccgttgtgcttattagtcattatttttcgaggtgtgtatctatatttataactgtggtgcttattacatgcttgttcatatcaaaatattatttgatattactagatctggttgcattttgagtgaaccctagtttctcgtttaagattcaatacattgattaatacgaatagttttgattaatcaatgtattgaatcttgaattgtctgtttggatagtttgggaggacatttcttatacttgattcacacgtatagctaaattctctttttcatgatttggagatgtgtcagtatattgcatttcaatttgtcttctgggcatactgactgccgtgaggtgcacatgtattcctttcatttgtgacctgagacaatgcgaat

SEQ ID NO: 89197 - DNA, 307 bp, Glycine max
  unsure (1)..(307): unsure at all n locations
tgtgtgttatgagtagtttagtatcttgatattttgtttaatgggtggcctgtttcaaatttcctattgagcgcttgccctatttcagtattgggagattnctgagaattagggtttgcgacagacttatcgaccatttctacttgcggcaaaccagagtagtagtagaaatcccttagcgacggatgttagcgaccacccatgctgaattatttgtgatttttagtctagtagctacgggtgctatttttggctgaatttttttgtggcaacttcttttgatccatattttgtgggaaaaataact

SEQ ID NO: 89198 - DNA, 359 bp, Glycine max
  unsure (1)..(359): unsure at all n locations
ctgcagctactcggctgttgaaatggggcatataggacanacagcagcaatgcgggtgatttaaatactgtgccgagggtgaaaatgctcaaacgaagtaaaatggcaactgcctaatgcaactgccttaattactgtgaagtttcaaatgacttccttaacgcatggactctctagcgagccacctgctctattccaacagagaaagaattgggcttatctagagcactcacttatcccacttcttgatattaattcataccgacaattatatctcttaaccgtgtttgtgcgctttatacagataacttctttggtccattcctacaatttattggcagaaacttattgtgcttatc

SEQ ID NO: 89199 - DNA, 401 bp, Glycine max
atcgatacacgtaattggtaatcgattaccaattttgtttctgaataaatcaaaagatgtaactcttcacaagggttttagactttctcaaattggtcttaagtttttctaaaagatataactcttctaaatggtcttcttgaccagacatgaaaggtctattaaaacaaggctttgaattgcttttcaatacaaatatcaattcattctttcacaacttttacattcaatcaatcaaatcctttgaagccttgaatctctttgaacttcttcttcctttttggacccacaagctttctgaaattttatggtgttccaacccttgaaaacctgggcttttcatctttcatcctctcttcccttgccaaaaaaattgccaaggactacccgccgagtccttt

SEQ ID NO: 89200 - DNA, 444 bp, Glycine max
accttaagcgacgcagctgcaactagtgataaaaataactaacttatatatgatcttacttggtaacacagaataaacaactattttactaccagcattatcttatgtacttgaaaaaccaccaacaaaacctgtatacaacttttcgcccttctcttctgggggaatacatcaaccactattaccagggtaagttttaaaatctaaaaaaatagttcggtaaaaagggtttgtacaatcacgcagcagtaactcgtgtgacaatatatgggttatggcagcctaatttctttattccattaaagagctacaatctcatgcctgtttatatgtgctaatatggttgaaatacaattgaactgaatctcttttagggaacttttcttttaagccgattatccaatgtcataacaatagcatatcttcactaatatttccattgtc

SEQ ID NO: 89201 - DNA, 424 bp, Glycine max
  unsure (1)..(424): unsure at all n locations
agcttcaagagatcatcctcttgacaacattcttggtgacatctcaaaaggggtaacaactagacattctcttaaatatntatgcaataatatggcttttgtgtctatgattgaacctaaaaatataaatgaagccataatagatgatcatcggatagttgctatgcaagaacaactaaatcagtttgagagaaacaatgtgtgggaactagtatagaaacctgaaaactaccccatcataggaacgaaatgggtatttaagaataagttagatgaacatggcgtaatcattagacataaggctagattagctgcaaaaggatataatcaagaagagggtatagattatgaagaaacatatgctccagttgcaaaattagaagccattagaatggctttagcttatgcatccataatgaatttt

SEQ ID NO: 89202 - DNA, 143 bp, Glycine max
aaatagggcgccgacggtggccatcactggttactcccacgcccaagtttgatccacaaaaagtccttagttttatgccaatgcttggccaacagaggagggcgtgcgtgacatgagatcctgtgtaatgggtcagtggatcc

SEQ ID NO: 89203 - DNA, 421 bp, Glycine max
agctctaaggactcattctttaactgccaacatatagaaatgcagttttgctaagcccaatttagagtatcttggccacatcatttttggttcgggggtggcagcagataaatccaacgtggcaggctggcaacaatgagttcctggccagttcctaaagatactaagagtttggggggttttaggactgacaggctactatacaagatttgtccaaggctatgagaaaatagcaaagcctttgattgaattactgaaaaagaatagctttgtatggacaccaataactactctagcttttgaaactttaaaaactgccatggtcaggttgcctttattatcagttctcgattttcaaaaactcttgttctggagacagatgcttttattaaggagtaaggcttgtcttatcataggcatg

SEQ ID NO: 89204 - DNA, 393 bp, Glycine max
  unsure (1)..(393): unsure at all n locations
ccttccttgcttcgaggactntgatcttntatagggtgactgttcttagctcgcctgtttaggtacgtcacaggttcttactgactgactatgcccgagttgagtcaggattagtcaagcttgggtttgggcaatagcaccccacctgacgtccccaaagtctcctgacccccgcgacatatttccaggtaccactctgtgctcaacaaacaaaagtaggaacactgactcttccacgctttctcgcatcaagcttagtggattatggggtacctgtcatatgtggtactatgtggcgatcgggcgatggcgcaaatcaactctcccactttcacaaatcagacttgaacccaccatcctcagttgcccacctttcaactgagctcacgcact

SEQ ID NO: 89205 - DNA, 355 bp, Glycine max
  unsure (1)..(355): unsure at all n locations
agctttcctgggccaagcacaatttggtgcggtattcactgagctaagcgagctttgctcgctaagctcccaacacttagtgaaattattgaagagttagtgccgctaagcatagcctttaaggagcttaatgcatatccttgcggcagatgttcagcttagcgggcactttcccgctaagccaattctgcaaaggctatatttctgcaacttccgctaagcggctccacatgtcgctaagcggtagttgttattttttttttntttacaaatgccagctaagccgactgtgtctcgcttagcggccaatgttttttcagttttattttcaggtcttgaaaattgaataacttat

SEQ ID NO: 89206 - DNA, 405 bp, Glycine max
gacttgagtcatcaagagattataaatatgggaccatggtatgagtttaataattatccttcaacatctttatcatccatcaatcatcaatcatctttgaatcatctatctttcaatatctttttacaaaattttttgattcatttctcttcatctttctaaaaagattttgatcagcactttctcttccaagaaaaagtctttgttcaaaaacttgggctattcatctttttcattctcttctccctttgccaaaagaacaaaagactaactgcctgaattcttttgtgtctctcttctccctttccaaagaatccaagggactaccgctagataattcttttaaattctccccttccccttaagccaaaagatttcaatggactaacccgctgagatatattt

SEQ ID NO: 89207 - DNA, 433 bp, Glycine max
  unsure (1)..(433): unsure at all n locations
agctnggttnganggtaatacccgttgaagaccgaagaatatgaagaacgaacgatgaatctttaagaacggtcgaggattcttccgtaattactcacgggaacgttacggaagtgcctcggcttggattttctccacggaactaattttcctcagctatttccagaaagagagaagtgcctaaggggctaaacccttttctacttcacttctccccctatatatagaaaattgggggagaagcttgccacccagctcgcccaggcgagcaaggttgcttcctccagaagcaacagccttctggaggaatcttctggagggcccaagtgggcctggttgtattttcacccccattttactaaatacaccccctgcttttttggtgatctttttcgaaagtacggaactatgatttcgaacgaacttgttcttc

SEQ ID NO: 89208 - DNA, 432 bp, Glycine max
  unsure (1)..(432): unsure at all n locations
atactcagctagctgccctagtcgtgcctagcgcgctagccaaaaccaattcacctatattaccctggaatcaaatttggagaagatttttgggccttttcttaaaggacctctgcatgtgaaaaattcttaaaaaaaaagggtcttaatcccaaaagttggaaaattttgctatgccaaaacctacaaagatcggagcttggagaggaagttgtcctgagagctcgagatgagtttgtgagtgattgtgagggcctaaaggtggaggagacatcccaactacttgtatttcttcaatccttcctttttctcttctcttttttgtaaggaagtttcccagatatggagagctaaatcctctgttggttcttccttgtaggtaccngatgtaaatacctatatatctatttaatgattgttgatggtttctct

SEQ ID NO: 89209 - DNA, 368 bp, Glycine max
tccgagatgggtgatctgcacaaaagtatgtgatagtttccagatattaatattctgtaatatcaaagaaagcccataaaattgtatcccaccttaaaaatttgagaattagattttgtttgttaaacattgggagaaggaaacatattttaaaagaacctggatgtgtcctacatataaccaaggacatgcatcagacgcataagaaaactactaaaattctataccattgtctttgcaacggccttaaagactccagtctcatgcttctcattgactgggatcttcaaactaataatatgtcagtcaagctttttcaattcattattcagtgaaaagaactttggcatctctataaatagggttta

SEQ ID NO: 89210 - DNA, 421 bp, Glycine max
aagtatgcccgagtcattcatccctatgagattgttgttgaagattggcgaacagaactgcaataccttggattatagggttgaaccaagctcacgcttttacaaaaaggttcatcaagtcaaaattgaaatatggcagtaaccgtctctgccaaattggggcccaagatgaatcacattacagctttgtctactgccaaacatatttacgattattgatgtcctagtaacttccagtttcaccttgacaaagatgtcatggaccatgttgaaaatctaaattgattcaaccccatatcctgcgtaaaaattcgcaatacttcgactgtacatcatttcgatgcatccatgcttatcatttggtgcattgctcatagcattcttttcttgagaaataaaaaataataaaataaaatgaact

SEQ ID NO: 89211 - DNA, 417 bp, Glycine max
  unsure (1)..(417): unsure at all n locations
ctactcatgtggcaaggcgggcttncttcaccttcttgtcttaacgctaacttngaccattgttcttgcttcccgcaatgcttcttttcatgtctgcctgaaggggcttatagcctaaaccatactttccacgatttccttgagtatttatcacgctagttatgccgccgttgttgttttctaaacccatcccgggttcaaaaccgttccccaacataactcgggccatcattaccgctgcatctgacagacaaggtttgccacagagggagtccacggaggaaatgctgaccacctcataagactggaaagcangttctaacgattcttctgcggcttccacattaagcatggaggatgggcagcttaccaagatatcttcctcgcctgacacgatgaccaagtgcccctccacta

SEQ ID NO: 89212 - DNA, 296 bp, Glycine max
tattggttgatttatacttcataatacgaatactcaacaaaatcgagtcctctattaatggcactaactacattacccatcaaatgttttaccatacaccaatttatcaaaatccattttcaagcagaatatgaattggcacaaactactgcttcgatatttcggacttatttagtttatttttggatggagccaactaaataattacttgtttacattgatgattcctcgatatagacaaattcctgagctcaatcttctgagatgaatcattataaaaagaaattaaaggtatc

SEQ ID NO: 89213 - DNA, 412 bp, Glycine max
agaaatagaaaaagagaagaaaagcgaatatcaatatctgttgatcaaaggcttgagataaaatagagtgtgaatgttgggtttaatctgtggtgcattcatctcaaacgttaaaggggcaaattcaaagattctctattgtatggtgatctgaattttttattcatggaggagtttctctctcttggggatgtaagtcacattgatccaaccacgcaaatcttgcgagctctcttatatactttctttcttcgtaatatatttacatttcaatctcttggggttattttgctgcataattacttgttgtcgctgctgcactctcctcttgttctgtgcctattattgctttattttactgcacaattggtcgaatctgttgcttgcgttttgttacactgctgaaagtaat

SEQ ID NO: 89214 - DNA, 373 bp, Glycine max
agcttcacaagcaagcgttcattatgtggtattcatatctcaagagcttcaagctggtgctcctttaaccttcattaatttttctgctctacctcctcttccattgtggtctctttatttatctccacgtatctcctcagatgtcttgtgctaaatgtcgataacatgatcctttagagtttcccccgatttaacttgctattgaagctagattagattttctatggtgcaaaaatcttgtcctatgtcctgaaccatgaattatgttgagctgacgttgctatgagacttgtcttgttatattttcgggctgaaacctataccataaaattcttaccataatattaaaaaagaagaaaactctccaaatcta

SEQ ID NO: 89215 - DNA, 451 bp, Glycine max
tggagaggatgctacaattgaggagaagatagagggagagtattatagaggggggagcacgaaattgaaggaagaaaaaggcagagaagttgaaccctgaggtatgtctcacaagactctcattcatcaaagttaccacaagtgttacacatgcttctatttatagactaggtagcttccttgagaagctttcttgagaaaacttccttgagaagcttctttgagaaaacttccttgagaagttagagcttagctacatacacccctctaataactaagctcacctccttgagaagcttccttgagaagattcttaaagaagctagagcttagctacacacacttctctaatagctaagctcacctccttgagatgagaagctagagcttagctactcacccctataatagctaagctcacccccattcccaaaatacatgaagatacaaa

SEQ ID NO: 89216 - DNA, 377 bp, Glycine max
  unsure (1)..(377): unsure at all n locations
agcttgaaggaaaactggatgcattggtcatcttggtnacccagctggccttgaatcagaaatctgtacctgtcgcaagggtcttgtggtatcgtgctcctttgctgaccaccatacagacctttgcccttcaatgcatcaaccttgagcaattgagcagcctgaagcttatgctccaaatatttacaatagacctcctcaacctcagcagcaaaatcaaccacaactaagcaattatgacctctccagcaacagatacaaccctggatggaggaatcaccctaaccttagatggttcatccctcatcaacaacaacagcagcctgctcctttcttcctaaatgctattggcccaagcagaccatacatttcttcac

SEQ ID NO: 89217 - DNA, 421 bp, Glycine max
  unsure (1)..(421): unsure at all n locations
tattatattgtccatttggtgaaattgattttgtttatatgaaaaaatcctttccattaataggtacttgctaattaatttttgtcaactaattgtaaacattcttgtggagtatgaaaatgggcatgatcttcaaattaatgagactattccggtagaatatgaacataatcctaatattatgttacttaacaatcagttttaaatattatgctgtcaatttggtaaaattgatagtgtaatatttaaaaaaaccctttccattaataggaactcgccaattaattcttgaaaataattctaaatattctgttgaagcatgaaaatggtcatgattttcanattaatgagactattccggtaagatacgaagaatatcataaaattatgttacttaacaatcagctgtaaatattatact

SEQ ID NO: 89218 - DNA, 326 bp, Glycine max
  unsure (1)..(326): unsure at all n locations
agacttntggagtagaaacatgggaccaacttattntatttcaaacaggaagtcgtatctagtcaatgtcttatagaccatacaagcttcctaacgatttctaattatgtgggccattaagtctatcatatgctgaccatagccgataagcccatgaatctcttcgtgggctgaggatgtggctggcatcgccttggccttggtaacaatctggggngtatttgacttccgttcaaagtaagagcgaaccgatccatccacatggctgcctcttggggtagaaggcaatcaccctttctctagctcttttttcgcgatacttgggc

SEQ ID NO: 89219 - DNA, 402 bp, Glycine max
  unsure (1)..(402): unsure at all n locations
cctggccacccagctcgcccaggcgagcaagggtgctttcttctttagcaacagccttctggaggaatcttctggagggcccaagtgggcctggctgctatttgcacccccattnttactaagtacacccccctctgcttttttttggtgattctctttcgtaaagttacggaaacttacgaatttcgtaacgatacttgttttctttccgtaatgttacggaaccttgcagattacataatcatcccctttttgacttacggaatgttacggaacctcactaattgggcaatgatgcttccatttgatttccggtgtgtcacggaaccttacggattgtgcatcaatattttctttttgtttccggcatgtccccgaatttcacaaattgcctaatgatgg

SEQ ID NO: 89220 - DNA, 306 bp, Glycine max
tttactgataaaaataatgaagatgctgaattaaacccttgctgatgaccaaaaagcagtcaaataactaaataaataaataaagtcgcctgaatagcaagataattagatggaatcctgccaatcctcaatcctgagctggtgtgggccatggatcccaagtccccagtgctgcagtgatgtgtgctgcataatcatcatccacgtctgcctctgttgcgcctgaagctttcttagccgttggagtgtgctcaatagcctactcaacctcctgagaggcctctgcagcctatgcatgtgtattct

SEQ ID NO: 89221 - DNA, 414 bp, Glycine max
gagaagctttaacccaacactgtcaagtgttattcataaccaacaaatgtgaccttcatattctattctctactacatcatcacctgcatgcctcagaaagaaagcaagaaagtgcaatttccaatcttccttatttctttctttataatttttctgttatcatttttgtacctttttacaaaacttctgttcttatttactcccccatgagtgccacagtttttaattaccttgcgaagcatataattaggtataatataattgaagtaataatatcttattagaagaacatatatatactacccatgaaacatgcttagtattttagcttattgaaattatgaattggttttatatatggattcatcttgttttgaccattgaatactcttctctccctttatcccatatct

SEQ ID NO: 89222 - DNA, 434 bp, Glycine max
  unsure (1)..(434): unsure at all n locations
tatacggaaagcagagagcgagaatggaagccaagtgcattcacatgtcttataaacactggcaacccatcacatgataaaagaaatgaaaagaatagagattaccgctgctaggaagaataccatgctgggctcaattaaaaagcattcaaacaaggtgcattgaatacaataaataaataaaaacattaatttgttatctgcgacatatgatgcgaatgcataatggtacctgacgcacgcatttgttccatgggtcggcaatgggaacgttaccgaagaggaaattaatttaggttgcggattctggggtgggtcgaagatgttgttgggntacacagtgagtgaacacttgtcctctgttgtgtgtgtgcgcgtacactctttctttgggttctttctgagctttagaaagagccttttcttttcttttt

SEQ ID NO: 89223 - DNA, 373 bp, Glycine max
  unsure (1)..(373): unsure at all n locations
acccggatccttcagtcacctgccgctgcaagcttatacagtggccacacctttattgtgtatatatacanaaatgaataatgtattaaatgctatgagttaagagaaagacaatctgttttattcatcatcattgaatagattgcccacaattataagttcaatgattgtgacctcatattgaatcacagaagagtactaacatcacttatctacacattttatatatcacatgcagaaaaaaatattccaagtattaataatataacactaaactagggtgcaacgctctaacactctttactgtgggattaacttcattaaaaaaatacaaaaaaccatgagttagactttataaatattgaggatagtc

SEQ ID NO: 89224 - DNA, 430 bp, Glycine max
  unsure (1)..(430): unsure at all n locations
tcgacccggatccttaagtcacctgcggcatgcaagctntntatcaagaggaacaacttaataatttaattcataatctcatctcataatcattacaactgaataaactcaatcaccatgataaatcaattcacataccaagcggtctgatttacattcccagtcaagtgacaaaatttcagtgctgcaatatatgggtgcatttctagacactggagttgatgtatcatatgatttgcctagggccagctattctgcctacaaagcaaaagcctcaacaaggaaaaattaaactcattcacaaataaataaaaaatgtaaaattaccatgttgtgtcgggatcctttggctcacagaatggtctatcttggaagagtgtgtagtgtcctcccatcattactctaatctgataaagcaagaaatctcatt

SEQ ID NO: 89225 - DNA, 334 bp, Glycine max
  unsure (1)..(334): unsure at all n locations
tctatatatgggttgaaacaagccttctgtcagttgtttcttaagtntcatgggataatttcttcattttgctttgatgaaaaccccatggatcaatgcatatacctaagttaggggagtgaaaatgtttcttgtttatatgaaggatatttacttgccgccaatgatcagggtttgctacatgaagcgaaacaatttctcttctaaaatttgacatgaaagatatggatgatgcatcttacgtcatcggcattaagattcatagagatagacctcaaggtattttaaatctatcataagagacctatattaacaaaaattttgagagatttgg

SEQ ID NO: 89226 - DNA, 349 bp, Glycine max
ggatccttcagtcacctgcggcatgcaagcttcctctaccctacagtgtcatgtttttgatatctaacaaaatggcgcaaaactttatagcttttctcatacctcattcagcaatactactacggaagacgatttatttttattaatattatcatcaataaaacatgaacacccacggtaacttagcatacatgaagttgagctacctaccttccggagaaagcttttagctcttatcacccacgaattgttcaccactctagtagcaacagtgtatgtatggttttctttgagcgatgacaattgtggttctgtggagttcgagcgatgacaatgtgggtttttctgc

SEQ ID NO: 89227 - DNA, 348 bp, Glycine max
tctacacttatgctatacttgataccaatatatggtgttatcttatttatacgcatatgacaatgttataccaaactctatatattctgctgcgttttgaataggtgtgtatgagaaagatttttttaaacatgtattgagattctttagttgttcttcattttttctttcacataacagaccgttccgaaacgaacataattatttggaactctgtatctctcatatttgattccatttgcctcaagcactatggcctgtgtttgctgaaactaacataattagtttctgttgctgatatttttttggaagccattattgagacataattaattgaagcattttaca

SEQ ID NO: 89228 - DNA, 336 bp, Glycine max
agtcgcctgcagctgcagctgtgcctggagaaaggttcgagttttgattcttgggagtccatataacttttcaaacaatctctatttaagaacatttttacatctaatggagaagacacttgtttctgcaacaacacacagagcaaactctcacagtggtaacgtggccttggagaaaatgtttcgataaattgattccacttattgagtattccctttggcaaccaatcgacttttgttctattccagagccatccttttatattaacctttacacccattacaacccaacaatgcttatatgtggtagggaaaagtgttaggggaattcctcaa

SEQ ID NO: 89229 - DNA, 434 bp, Glycine max
  unsure (1)..(434): unsure at all n locations
tctaaccttcacaccacagcaacacanaatctaagtatccaatacccctcttttattggattttcaaggtttgagaagtgaaattgagaatgagctaaatttgaagcatactctcacctcacacaagtctataacatcaatttaaacttgttcaaactggatttacgcctaaaatttcaccgaatcaaaatttgactcctcaacacccaaatttaccctagaaatgactctttgttcactttggtcatttgtttttctctctagcacagcccaaactttctcattgaaattctgataccacgggacagatgtcgtaccggatgtcacgacatcacgcttcagaacatgcagattatatgtgtccgtatgaccagattaaacaagttaataacacaagagaattgttaacccagttcggtgcaacctcacctaca

SEQ ID NO: 89230 - DNA, 413 bp, Glycine max
  unsure (1)..(413): unsure at all n locations
ctccttgatgacccattaggtctaaactaggtgaattttctacccatccatggngcctcaacaacctncaaatcatctatccaatcattgaactcttggatgttgttggtccctgattcctgatttcctttggcagactccaaatctttccgttgtatccctgatgctgttaaagtcacctaaaaagcaccacaatttcccagatagtgtgtttttcagctgcttgacctggtcccacaatacccttttactttgaatatcacaaggggaatatattgtaactatattgactggctgggctccttgatatactcccctgctagaagaatataaccattgccaacgactctnctgtgaagcttaaaagtcttttcactccacgaacacaagatgccttctgcagtattaataac

SEQ ID NO: 89231 - DNA, 189 bp, Glycine max
cttaaatatcaccctttagttaaaaagaatcactctgttaagaaagaactacgtaggtctgatttcctcttgcaatgggaattcgatgaccaaaggaacaccctgttgccccccaaagaaaatttaaatgggctttggtttttagacctaaaagggaactttaaatcaagcatgtttgccattccatta

SEQ ID NO: 89232 - DNA, 112 bp, Glycine max
agctggtcaaacccaatgttggttcttgtttatcctcttcattgccaaattttgcattcataaaaatataaggtatgcgagcttcacccttgcgaagctttcctattattca

SEQ ID NO: 89233 - DNA, 413 bp, Glycine max
  unsure (1)..(413): unsure at all n locations
gcctgtccgatgcagctgtaatgatggcccgagttatgtttgtgaacggttacgaacccgggatgggtttaggcaaagacaacggtggcataactagcctgataaaccccaaaggaaatcgtgggaagtataagttaggctataagcccactcacgcagatataaaaagaatcattgcgggaaggaagagcggtagtcaaaactcgtggttgaaacaagaatgtgaaggaagcccaccctgccacataagtaggagctttataaacgctggtctggggaacgaaagtcaagtggtcgcgatatacgaagatggtgttccgagtacattggatttggacgaccatgcnctcctgatttccagctgggaaattggcgagtggaagaacagcccgcatttacgcgacgagcataat

SEQ ID NO: 89234 - DNA, 407 bp, Glycine max
  unsure (1)..(407): unsure at all n locations
agctncttatatgaatagtcaggtacagtatatatatatttataacaaaactctgcatgcagtatacttcaagcagaatttggtactaatacgtgtcctaacatttgatactttgggggatgattataatagccaatgtataagttaagtattagagtatttgtgtcatcctccgtattattgaacagatttggctatattatctggggatgttgtaaaaaaatgtatttatgagatgcttgtaatacttctttcaaagcaataaaattaaaaaatatatatttcatattttctcagttaataataagattattactcatatattacaggagatgtattcctacatacatatgcaaggttattattaagaaatggaatttgtgtcgcctgagaatgtattctactgt

SEQ ID NO: 89235 - DNA, 408 bp, Glycine max
  unsure (1)..(408): unsure at all n locations
agctntgattagtgttcatccaagaaataaactttcgattcagagatgctngggcttaaatagtacatcgacaatatcatcatggtcttggtaaagaataatattgtgtcttggaagatggatatgtaatcttttcacaataggctttctgccatgaattggaaaaccaaacattctccaagtagcttcacaaggagaaatgtatctgctttgaagacatccattcattaaacaatattggtgagatcaattagatattacaaattaagcctacctgcaatctagataatctttggtcttctcatgatgggttgcagcatggaaggttgcatcattctcatcgtgaactataacagcagtgcctctttcatatcctctgttatatacttgaataaatatttgaaggat

SEQ ID NO: 89236 - DNA, 377 bp, Glycine max
  unsure (1)..(377): unsure at all n locations
tccacccatttgggagtgggacctaaaaaatatgttgttttaaaccaattttttcttgtgttttatttatgaaaatgagtttttataatcatagacatcaatacaaagtttcagctgaatgatctttgattaacaactttntgaaatggctaaagcaataaaataatttccttattaaaacacgctataggacaaattttatgaattttggaaaataaataatataaaatatttctaaggttcatataattccacagaaaatcaaagatgttcccctaattcatagagcaaccttatggttctaagttttccaaatattgcacccaaattttaaaaaaattaanaacaatggctaggacatatgtgacaaactttga

SEQ ID NO: 89237 - DNA, 436 bp, Glycine max
  unsure (1)..(436): unsure at all n locations
agcctgctntctaagatggtgcttacgtatctaccatttatatagattactttcaaagacaatgctgacgtatgcaccgcccttgaatgtcatatatgcataagccataaggataaacctattcatgtgtctgccctattcccctgcggattttactgagcacactagcatccaaatttggatattgatttttgatctcgaccaaagaccttgtatacaaagttgtcaacttcatcgtcttacttttaatgatgaactggaagtgtatgtgtctgaagataaccttacagcaaaacaaattgtctcagtaaccaagtataacattaacaacagaatggaagtggagaaacatcattggaactccaaaaaggtgttatgtgaatgttttgccaccctatatcccaaaacagtatatattaacttcggctatatttgt

SEQ ID NO: 89238 - DNA, 329 bp, Glycine max
acctggagatatttcgcgggggtcatgagaacttggggacgtcaggggggtgctattgcccattaacaaactttgaccaatctcgacccaaccccggcataaataggcagtgagaacctgtgatgacctaaacatgcgagcttctatcagtctacagattaagggaacaagaccacaaagcacggaggctcgtgtggaggctagccagctgggaatcttgtcgtatatatgggttatggcctctggtaatcaattaccaaagatgggttatcgattacaacgcttaaaaatgaagacaggagactaacatggtctcttgtaatcgatta

SEQ ID NO: 89239 - DNA, 364 bp, Glycine max
  unsure (1)..(364): unsure at all n locations
gagagagatacaaagcctctttatttgttgcccttggcatggatgcaaccaactcatggaaatttcaatgttcatgaaaggaatcactatcgattgttggaggatgatcaatgcttccgctggaagaaaatatttcaataaaaccaccactcaagtgaagaccataatttgaagatttggcgtctagtgagagaaccgtanaaacaaaccactcaaattcctcaaaaggtatgtatgaacttaatgcttaagataaccttttagctcttgaagaaaagatgcgagtgcnaatagaagaaatgactaaggcaatccaacaaatctcgcaacaacccccattagcgttcatgtgtggagatgcgga

SEQ ID NO: 89240 - DNA, 392 bp, Glycine max
tagactacatgtagggcctcttatctttatcaatgtacccctttgtggctgtgttgaagaacaaatagaatttcatttgagtgcataaagcctgagagtagagacttctcttaatcaaaatcctaaaacactttaaaaaacttgaaaggtttctaaacactgagagaagtacaaatcatatcatcatcctctttagagaagagttatatatgacccacgactaagaaattctgtggtccaagactcattttttaacaaaatgaattaaaatgttattgtccaataattcaaaacaattacagtgataaaatcatttaattacctttagagagtgtttatttgcaagaatttatccttgcagagacgcatattcaattctcatacatatgttc

SEQ ID NO: 89241 - DNA, 433 bp, Glycine max
tcgtacccgcgatccttgagtcacctgcggcatgcaagcttcatgatgatgaatcaagttgattcatgtagttttgatgatgacaaaaagctcaagagaatgatttcaagattgagtcaacaagttcaagatcaagattaaatcaagattaatttcaagattcaagaaataacatccagaagaataaagattcaagagaagatgatttcacaagggaagtattgaaaagaatttttcataaaccaaacatagcacaattttgttttacaagaaaagtttttctcaaaattttataagttaccagagtttttactctctggtgatccgatatcacgtgtcctgtaatctactacttatgggcgaagttcgattcctaagctctgactggatttgaatggtccgttgatttataaatggtgaatcgattcagtta

SEQ ID NO: 89242 - DNA, 291 bp, Glycine max
  unsure (1)..(291): unsure at all n locations
aggccggagccgcagtagtgtggtacactaatttagaagcctcccgtatccgtacttggaaagatctgattactgccttcctaangcaatattaatacaattccgatatggctcccgatcgcactcaactgcagaatatattcaagaaagagggggaaacctttaaagaatacgcgcaacgatggaaggacctggcagcacaagtagctcctcccatggttgagagagagatgatcaccatgatggtagacactttgccagtgttctactatgagaagctagtaagttaca

SEQ ID NO: 89243 - DNA, 440 bp, Glycine max
  unsure (1)..(440): unsure at all n locations
agcttacaaatctattttaagtcctagcccatattcgaaatanaatataatcaggacatgataagataagattggatgaaataaaatctagacaaaataaaacctagatgaaataaaatctggataagataagatttgataaaataaaattatctgctctcttcaagtccaagcccaatttcgaattcaagcccaattgcttataattctcctgaaattaaattaaaagcacataattagtctagtagggccaaatgacaaaactgcataattaatttgacaattaaggctaattagtaattaaaatggtgacaaaaatggttaagaagtaggagaaaataatgacacatcattccctttttagtagactatggataaacttaataaactctatgcaaactcggtagactcaagttgccactgtgtcaacaagttataaa

SEQ ID NO: 89244 - DNA, 263 bp, Glycine max
tgaaaatgctaaggacttattacctatacttgacacaaaatacttataacgcttcaaaataaccataaattgcgaaagtttgatacaatttatacaaggtttatacacaaaagatagtcggtttcactgactaacaggcatatgtcccctttccaacacttcagtgtctttcgatcaagactattaaagtcttctttgtcttccagagacaatcaagtccgttggaacacagagacaatatatggtcatatgcccctttttga

SEQ ID NO: 89245 - DNA, 244 bp, Glycine max
atcctatttcactttctattaagtaccaattcctgacaatgaacttcttaatatgattaaaacaaaaaggctgatatctatatattaccatcataaatgaacaaagttcacggaaaaaagaagggccgactcggagttatactggttcggacacacccttgtgcctacgtacaggccgcaagcaaaccgcttgaaaggtcactatcttgttaaaccttttacaagttttgaacaacacagacaa

SEQ ID NO: 89246 - DNA, 322 bp, Glycine max
agctcagttactaataattaatttattctcttatggggatctatgcataactcaatatgatgcaattctgttggcaatcaaccccccaaaaaaccataacttaaagatttggatgcctgtgatctgattgtgctacatttctacattataactatgatacgaaacacacctttatagaatgatcaaaaagctatttgtgccttgtgttggtaactgtaatgtctaccgcattatgaattccgaagccactatagatgggcagtgaaagacttgactttgcatattcttccaccgaataattgattattgtccaatttaaata

SEQ ID NO: 89247 - DNA, 420 bp, Glycine max
ctggaagaactccttgagctcgaaactcatggagctcatcccctcgctcatatttctccccacttccacgcctccgattttcaagcgctctcccagtgcgctcactttctccatcaaattctcactcatcttctcttccttccgacgcaaacacaaacaacgcgtaaggactcgggaaagactttcctctctgcctttctctttctggttacaaagatattttttctataacttatttaatacgcattgcattcactcttatctttttaaaagcacactatttactaccatttaaaaaagactaatttcaaaattttgtctgtaacaaatttacgattttccttctacaaaaatatgagtctcttatttgatatttttctttcttaaatacacacttttttggaaaatattcttgttttc

SEQ ID NO: 89248 - DNA, 398 bp, Glycine max
tcaatttcgagcgtcttgatatatttcgggactctattatacatcgtttgaattggctcagactgtcaacattcaatttccagcgccccgatatattacgtcactgaatcggacatccgagtaaaaagttattgtcgtttgaattggctaagagcttcaacattcaatttcgagcgtctcaatatattacgggactcaatcagacatccgagtaaaaagttattgtcgtttgaattggctcagagcttaaacattcaacttcgagcgtctcgatatattacgggactcattcaaacatcctagtaaaaagttattgtcgtttgaattggatcagaggttcaacattcaatttcgagcgtctcgatatatgacggaacctcatcagacatccgagtaaa

SEQ ID NO: 89249 - DNA, 339 bp, Glycine max
atcctcagagtcacctgaggctgcagcttcagaataagatcagatccagactcagattaaattcagaaaactatcaaaagtgaaaagttttcaaacgagtaccatgattttttaaacatgtacccaagagttttctctctggtatcgaataccacatattgtatcgataccagtatccaaaaatgttcgttcaaaaagctttcaactgaatttacaatgttccattgtttcaaaaagctgtatcaattacacgttttttggtaatcgataccagagtgcttgagcgtgaaattcacattcagatatgatgagtcacatcctttcccaaaaaatctttgt

SEQ ID NO: 89250 - DNA, 370 bp, Glycine max
actgaacctcgaaccctcgtccgactgagacacttcaagcattctctgtatatccctattgttgacttggcactaatgagacaacacctcttatgtttaaactaaactaaactgagtttcgtctgcagatccctcttgtcagactagactcagctcaagctgcttacgaaaagctaacctaatttatcctaagcttcgtccacagatcacacttgtaagactacgcctagactaaacaacattattgtgacaacataattaatacccaaacttattccgcagaaccctctcgtataactaagtttcaattcacttccatcaagctctaaagcaacaatacatttccaatgctaaatcacctactatgcca

SEQ ID NO: 89251 - DNA, 389 bp, Glycine max
  unsure (1)..(389): unsure at all n locations
tgctggaaccttttaatgataaatttggttcctaaatctcctcctcttttgtccttggactctaactccttttcagaaaagcaccaattttgtcatccacttaaattgccttcctaagtgggaagttcgcagccaacttgcaagcgaccaaattctaaattgtttgttcgcataggtgtacgctcatcaatgttgtttacatctattcactgctatctgtagtcattattaaagtgacatcacttttttgggaatatatttgtaattggcaacatacatttactcattataccatctagaaaatgggatagataactttattattaatccttgtgatgtcattatgtggcacactagctacctattctttcatagntcatatgtcatac

SEQ ID NO: 89252 - DNA, 443 bp, Glycine max
  unsure (1)..(443): unsure at all n locations
agcttagctccggaccataaaacaacacatttcatatttattaatacaaaaaacatataagaaatgttgcagggatgaatttcaaatttttcgatatttatagagacaagaaacatatcttatgctatgatttttagctagcagtgtcccttactaatgtttattggttaaagatgattcatttaattttaattctttaaagaattattactaaaaaattatttctgctcaaaaataatataaagcaaattacatgtgtccccgaggtttaaggaaataacatatgtctctcttcattttgtaaaatctacacatgtntcccttgagatttgaggatattacacatgtttcctttctgtttttaaaacctacactactaccctaaatgtcgtttaaacatttgatagtaacacgtcatgtgcattgacacttttgatttaaaa

SEQ ID NO: 89253 - DNA, 410 bp, Glycine max
  unsure (1)..(410): unsure at all n locations
tacggaccttagatactcagcttctgagatgttaagacctgaatgtattgcaacggcataagtatctagctatgtcaccagccagcatgctgcaacccatttccattctaaaggtccgttgggctgatatctctcttgattttataattggactaccttgatcacatggttttgagtttatcttggtggtggtggatcacttctcgaggtatgcctattttttgcctctcaaacacccttttacagccgagatagttgcaaagtctttcactagagatgtaaccaaattgcatgggtttcccaattctattattagtgaaccccatctttttgagntaagtttgcggggaactcttccggcttcaaggaacaagtttgtgtatgatcaccttttatcaccccacattgat

SEQ ID NO: 89254 - DNA, 433 bp, Glycine max
  unsure (1)..(433): unsure at all n locations
agcttggaagatgcgctcatgttattattatgctancaagggcttcttattagggactactattacaaaaagatcattggataggagcctccaagaaccccctgtgcttccaagaagtcctgtccttcctattaatctctcatcaaactctgacaattctggttatgagttgtttaggaaactagatgaagaacttgccatacaaaagggataaaaaagtaaaatgtgaagcttaccacgccatctaatggggagcccaagtcctgagaaagtatccattcagggggagttttatgtctaaaatcttacttatttattccttgaagcactttattctgtactccaaacacatttcttgatgtgaacactcttatagcttaacatgagatatttatggtatttgtccagactttacctcaaagtcttatgatgc

SEQ ID NO: 89255 - DNA, 405 bp, Glycine max
  unsure (1)..(405): unsure at all n locations
aagctaaagggcttgttatattntgtatagttataatcctggcttcctgctcttttctttcatacttttaaccagttttactgcagcttgaagcacgattgacgaaccttgaaagccaagaattgggtcattttgctggttctaccaacggaaagcccaagatacaagcatatgacaaggactgaaacaaaggagttggacgattgataaccccaatttgtaggtatatatatatatatattctaacactagtcaaaattataattaagcccattaattagctagtgaggattgtttatatatatagccatgcatagaaaaacatttattaattctctatctggtgtattggttttacgtcttgcaagatgtgcgaaatagtgtcgattaagatggatgaattat

SEQ ID NO: 89256 - DNA, 87 bp, Glycine max
agctcgaagcctgatatctacgtgtggcaactatcttgaaaacaaactgaggatcgaatgaaatgcaaatacccaacattgaatcca

SEQ ID NO: 89257 - DNA, 426 bp, Glycine max
tagctgtctcccaagtcctaaatgatctttcatgtctagtataacgcactttgacctccatctaccacagaatttagacttactcttccaactctcaaagcctcactctatttccactcataacatcacactctcactgtctcaccctatgttaggtctacccttcatctctaacaaatttccatcagctagatttagcagataaacatcacaatctctcatcacaaaaacccttacacagaaaggggattgttaactcattcaaacatgggaatttcaacaagtttcagtatatgtcttacgaataatcattacacagcagataccttagaagactacccatcatttctcccacacctcttcccacgataattaaggagaagaggtcccgcaacctgaaatctcgagatccactcgggccttgcc

SEQ ID NO: 89258 - DNA, 438 bp, Glycine max
  unsure (1)..(438): unsure at all n locations
actcagcttgaagccttagatcttcttcatcaatgtgagtcctttgcttcttgaagatcaacggcagcggaatggagaacgaagatagattattggagacaccaattcatagagaagatgagtcaagaacaagctcaccaccataagaagccatggataatatcttgaacgtaggaaaatatgactggagggaggaggagagatagagcacgaaattttatgcctcaaatgaggtctgaactttgaagtgtaattctcaaatgatcacagttgaaaaaaattgcgcacataagacctctatntattgtctaagtgtcacacacaatgggagggaaatttgaaatttacttgaatttgaatttgacttggggagccaaatttgagccacaatttactaattttgattattgaatttagctatggtcaacccctaatcca

SEQ ID NO: 89259 - DNA, 262 bp, Glycine max
  unsure (1)..(262): unsure at all n locations
cacataaaacaaactgctgccatcatggaggggggccgttaatgccattgaagtgagtatgtcacatgggctccacaatatataagtgacgtatacgacctncttgaatgtttatttacatagcattgctaaaggctagcatgattcctcgcggcgggggcagaaaggattcttgttaatgcttccaggtgtactacatgacaaggaaacatgttctgcgcgaagagatctactaccacaatgagacggaagaggaacaaca

SEQ ID NO: 89260 - DNA, 412 bp, Glycine max
  unsure (1)..(412): unsure at all n locations
taatccgacgggtatatcagtatatactacaatagtagtcctgagtaatagtagtaaaataaaacttgctaattcttgggcacacacctgatggattccccaactactatagtgagcagcaggggtgaccagtagtggtaaatcaagcacaatgttacttggaagtactgctggaagaacacgtncttccctgtgtcgctccattaggtacaatgcaatacaaaactccctgagagaaagcatgctatcattatcttgatccgataagtcccaaacctgctttaaaacctctgaaaaatatataacatggcatacacataatgttcatgaaaatagctagccatgaaaagtaatacacatggaggatgtgaaaactatacataacccccaccccaaacagacaanaaaaaac

SEQ ID NO: 89261 - DNA, 328 bp, Glycine max
gtactatgggccctataggatactggaaaatgtatgaccagttgcctacaagttacagcttccagagaactctcaatccactcaacattcatgtctctttactcaagatattcctgcacctctctgataagcagaagcgtacttccattgattgagtggccatccctatttctgtgtatcttgaaaagaatctcaacaaacgtatggtaaggaagaagagtcgtattatcactataagatgggcgcaaaggctaggtttacctaatgaggaggctacatggattccttaattcaagttttaacagcaatacgctatgtgttgaaatgc

SEQ ID NO: 89262 - DNA, 398 bp, Glycine max
  unsure (1)..(398): unsure at all n locations
agcttccttgaggccatctcttgcgagatcaatctatttgtgaagttagttntacaagataatgcttatcttaacatagaaatgacatgctactccctctgatgttagaacgaactcatgtaatctattaatgtacacgcgtatgtgtagaatagtgctactatttatgtcaacatacaaggacacccaacacagtctaattggcacacatacatatgcgttgttgaaagacaatacacatttacgctcaaggcattgcgacaaaatatacactcaattacatcctaaacattgctattacaaactgcctacacatatttgaaatatatatcattgaaccttttattggtacactcacacttatgcagtatggcagctaattacatcatgcacacact

SEQ ID NO: 89263 - DNA, 456 bp, Glycine max
  unsure (1)..(456): unsure at all n locations
atcttaagtcacctgcggcatgcaagctntgagccaanatcctaactcaccatatttcttgactccaggtgagaatgtcaatccttacccttggaagcaaaatagaagagaaggaaaatttccaatcaatagaaaaaaaagaaggaaaatntcccatcaaagagaaagcacaataaagagagaaggaaaatttccaatcaaaggaaaaaagagaggaaaggatatttccaatcaaagagtgggagaaagcgaatagaaaagaaagataactcccaaccanagagtgagagaaagtaataggaaggaaagaaagctcctgatcaatgatcgaaagaaatcagaatggaccggacaatatctgtacaatacagaattgtcaccaaatgaacaaataaaaggtgaaaggaaaccacaacctgaaagtggcttctccctttattaccaacaaaatcctgt

SEQ ID NO: 89264 - DNA, 508 bp, Glycine max
  unsure (1)..(508): unsure at all n locations
atcctctgagtcacctgccgcatgcaagcttacaagcaagcttccatcttgtggtnttcagcacaagagcttcaagtaggtgctccttaaacctccagtaattntatgctntaccttctcttccattgttgattcttcattcttctccatgtctttagctaaatgttgctaacatgattctttagagtttccaccgattaaacttgctatagaagctagatttaattttctatggttcaaatttcttgttcttgctctcgaaccatgaattgtgttgagtttacgttcctttgagtgttttattgttattntttgtggctgaaacctaaacaattcaattcttaaaaaaatattaaagtagaagaaaacctcaaaaatctagagtgactcgttcacgtattgtagttttgccatagaagtcatgtctagtcatgaaacttgtcacataagatntcttatgttgtgctgagtctattttcatggttctttggctaactcatttggtcat

SEQ ID NO: 89265 - DNA, 400 bp, Glycine max
agcttgtctcagcgtttatgcgagactgttactatcatgctagctatcatcgccaagtaccaagaagagttaggtctagccacggcccacgagcatatgatcgcggacgagtatgcccaagtatactctgaaaaagaggctagaggaagggtgatcgactctttacaccaagaggcaaccatgtggatggatcggtttgctcttaccttgaacgggagtcaggaactttcctgatggtagccaaggccaaggcgatggcagacacctactccgcccccgaagaaattcatgggcttctcggctattgtcagcatatgatagacttaatggcccacataattagaaatctgtaggaaacttgtatggtctctcaacactgactagataccactttttgaat

SEQ ID NO: 89266 - DNA, 350 bp, Glycine max
  unsure (1)..(350): unsure at all n locations
ctctagcttctcaaaannagtttctcaaagaagcatctcaaggatagtttctcaagacagcttcttaaggaatctacctagtctataaaagaagcatgtgtaacacttgttgtaactttgatgaatgagagtcttgtgagacacaactcaaagttcaacctttctccctttttcttccttcaatattgtgctcccccttctctctttctctccctctttctttttctccattgaagcatcctctccaagcttcttatccaaggctcatcttggtggtgaagctccttcttccatggcttattccctagtggatggcgcctcctctcacctctttctctttgttttccact

SEQ ID NO: 89267 - DNA, 337 bp, Glycine max
  unsure (1)..(337): unsure at all n locations
tgagtataccctntggcaaccaatcgagctttgtatctatccacagagccatccatattatatttaaccttatgcacccatctacaacctatataatgcttatcaggtggtaagggaacaagtgtccaagtggaattctcctcaagagctttgatttcctcattcattgcctgacgccattcacgatagggggcaactcgatgataaaattaacgttcatatatagctcgaaatctggtaatgagagctctgtaaggggagctaatagccaacaaggaacaatgatgttggatcagatatgcagtctttggtttggtgtacatactcagacaagtat

SEQ ID NO: 89268 - DNA, 434 bp, Glycine max
  unsure (1)..(434): unsure at all n locations
caggcatgcaagcttgcttatacatgtggtaggagataaaattatattgntctgttataagcccaatccatataaatttagtgggggaggtgagcattcacttactataccccattgccacattatatagtcacactttatgcatgtgctttatgctgtacatgcctcatgacacctatgctcacttagtggagaatcttggaattgatcttggattagtgggctgattcataactacaattcactaatcataattatagaaattctggcttcaaagtatggctccacaaattcaatttcaaattctagtgaaatttgaattgaaattcaaattttcctctaattgtgcgtgacacttaggctataaattaaggtcatgtgtgtgcatttttctaactctgatcatctgaatataaacttcagatttagaactc

SEQ ID NO: 89269 - DNA, 308 bp, Glycine max
  unsure (1)..(308): unsure at all n locations
agcttacctcgaacacaacagcgacaatgccagttattattgtcctcangtganatgtacctcagctgaccacaaacaccacgtactaccagtcaaatgtacctcaggtgaccaccaattcaccaatccttgcaccagaaaccaaaaaaggtccttagcttaaccacgagttcaagaaacagacctagcacggtcacgctctttagtttaataaaacaacacaggtagatgaagcgtacctgtcacggtcttcagtgcaatggagaacaatatccttcgatgttaacagtgcaatggagaagagaacg

SEQ ID NO: 89270 - DNA, 527 bp, Glycine max
  unsure (1)..(527): unsure at all n locations
taagtcacctgacgcatgcaagcttcttacaaagcatacggctatctggatgtttattattatatctatacagatggatcttatatatctatatatctatacatagatctataaacatagatatatacatatatgatcatacaatgaagtaccgcacgagcgggtatataggaatccaaatctgccgaatcactcatgttatgatcatctacatcctatgacttcccgttccttcatctgggttatggtctttatgtagcattcagactgaatgactctatgaaattacgtcgctacttccacatggtaccggtaacgtaggagacatctctattnttcccggggggaatccttagaattaccacagcttagctttcaattcgcctctgaccatctaatgaaatgtgaataacccgtcctcccctttttgaaactatgacacataaggtgcttccggatctgtcggcgcttgaacaatcttgtcttctccatatactatatcttgagagtcataactttaatgacga

SEQ ID NO: 89271 - DNA, 348 bp, Glycine max
  unsure (1)..(348): unsure at all n locations
gtcacctgcggcatgcatgctctgaattgagttatcaagagattatatatatgtggccatggcatgaacttcaacaatcaaatctttcaatctatctttcaatatcttctttcatctatttcaacagatctttctgatctgttttctcttcatctatctaaaagtctttgttcagacactntctattccaagagaagttctttgatcaaaaacttgtgtcattcatctttttcattctcttctccctatgccacaagaaccaaggactaactgcctgaattcttttgtgtttctcttctcccttacaaaagattcaaaggactaaccgccagagaattcttttgattc

SEQ ID NO: 89272 - DNA, 480 bp, Glycine max
  unsure (1)..(480): unsure at all n locations
agcttatgcgcacacttctttacgaacgttcactttcacaagacattcttataactaagaanaatgcacccatatacaatcaaggcaccttcgttacctagattattcacatgtacttccaaggtgtatttgttacctacatcacacacatttccttngctaaattcacatacatgcatactctaagcactgtggctatcaaaaattgcatacgtgcacatcttggtatatctcatacctatacatacacaaacttcatgatgaatcttgactatctacacaataaggtgctacatttcatgcttttttcaagtggttttactacctaaagccgcatgcaaattgaagtatatattcttttgcttactaaaattgtattcacattaaaagggtattttgtaatgtatcttctctaataacatgcaacatatntatagattcttgtgagacattntgactacaaaatattatatgtacata

SEQ ID NO: 89273 - DNA, 501 bp, Glycine max
  unsure (1)..(501): unsure at all n locations
agctngatacaagattctccttgcctatcacttataaccttctagntgggtcatatagatgtcttcctctaaatccccatgcaagaatgcagntttaacatctaactgctccaagtgaagattctctgcagctactatgctcagaataactctgatggtagtcatctttacaactggagagaagatctctgtgaaatcaattccttgtttctgctgaaaccctntcaccacaagtctcgccttggatcttcttctaccgtcagattcttcctttagcctatagacccacctattctgtaatgccttctttccttctggcaagttagttaaagaccacgtcttattcttctgaagggatgccatctcatctttcatcgctagcttccactcaatagtgtcattcccctgtgtagcctcattgaaacattctgactcaccagcatcagttaacaacaaataatgcaatgaaggggaatacctatctggtggactgaaattctg

SEQ ID NO: 89274 - DNA, 454 bp, Glycine max
  unsure (1)..(454): unsure at all n locations
agcttgctagaacgatcatcacatgattctttattgtcacaganatacgttgatgtctgagcaacttgagatcttaacagaaacactcggatagtcgccaactatactggctattggtcaacctacacattcttctcgtttgcacgttatatgcatgaccatctgtggtgaggcttatgaaacagggccattgaagaaaacactctagaagttcactatatgggaaatcaacaccgacaagggtatactcaaggaggattatcaagctgacatgacggtccttataatcaacaaggactgtggaggtgacactctatgagtcatattttctaacaccagggcagagcttctatcacgccaatcgatcgaaggcctatcctcttttagaggactacacagatggacgatactatgactcatgttttgtanagtacaatgacaaatataaaacact

SEQ ID NO: 89275 - DNA, 456 bp, Glycine max
  unsure (1)..(456): unsure at all n locations
agcttccataggtggntggcccatttcttcttgtactanattcttcaagggatggcaccaatcctccttccaattcccaatatggcaacccataaacaaggaaacagagacaagcaataaccaaagaccaaaaaaaatgaaatgaaagctaaaccaatggagttttaacaagacaatttttcaaggattattcaacaattaaatcaatgaaaaggacatagaatcaagctaggactcaaagagaaacttagaatggctctagagtagagtaaaaaaacaaaataaaagaagactcaacaaacccctagacttggcacttgttttcacagtaattntaaattgaaatttcggaactaagattagtataacatacgcaccaattatagaataatttntgagaacaaacaacaagcacacttccctgtcactttatnnttcctggatactggattttct

SEQ ID NO: 89276 - DNA, 349 bp, Glycine max
  unsure (1)..(349): unsure at all n locations
ataaatttacctaattcgatcaagaaatatccaataatcatacatcttatgcaaacaaggcatgctaagtccctaacattctcatcccattgaattctctattgattatattgcttcctattattttctttttctacaattatctgttattaattcttgttccctttatatctacctctctttatcttttctcttattaattgagaattatacaatacaagtacaaaacaaagtccctgtggaaatcgacactcagacttcttgagttttactacatggacatttagtgcacttctcaaatccgtaacaccaacttatactanggattcttttccaacgttgaccaatg

SEQ ID NO: 89277 - DNA, 144 bp, Glycine max
ccacacactcaattatacaaaacaactcactggatataattctccatcagagcatactacaaactagcgtgttgtgcaagcgttcaacttccagtacagaaatgtttaaagactggaattaccccatttaaatatataacatgc

SEQ ID NO: 89278 - DNA, 220 bp, Glycine max
  unsure (1)..(220): unsure at all n locations
aagcaccgcagctgcagcttggaagtgcgtaatcccttctccttatctttctgtggctagcgagcgccgctaacgcacactcctggctcggcgcgagaggactctggaagaagaagaactgacatgttctgctaggacacgcgtgtatttactaaccaccgcacttcgncatccgctatgtgagaaatgcacgcgctcagccgatatctactaatgtgcg

SEQ ID NO: 89279 - DNA, 433 bp, Glycine max
  unsure (1)..(433): unsure at all n locations
gtccctgaaaccctctatgtanattagacagcctcatctctcccttcctaanaacccactaaaaactgcctaaccccncctgttgttactccataatttattctgcaataactgcttaaggcagttacatatggtcctaaatcactacacattcagttacgattaaccctttgtgtcctaactagggttcgaaacatcacaacagagacagaccattgaacaatggattttcatcattaacatacaacagagacattccttcgatggaagcgcagacacgaactccacatacgcgaactcgacaatgtggttgcagtcacggaagcgcaacccagtntgcgacaaacacaaactcatgcagaaggagagataacaattacgccctgtgttaaacgacgaacgcctatatgtaaaacggaggacgtaccttaat

SEQ ID NO: 89280 - DNA, 437 bp, Glycine max
ttagtatgactagaaagtaataaacaataccaaattgaataatcaatttacagtcaagcttcttttcgtcagatatcacttaagatcgtttcaaggtccaacgccataacacgtctctctgctgtttttcaaatgaagtaaaacattgtgccaaggtccaatgcctcaacgactcttctggttgcatctacaatgaatctttcaaaaaaaacacgtgtattcttattaaagaactacgcaagtctgacttcctcattacactcgacgatatgtaagagcaagggccacacccttgtcgattcaaaaatataatactaatactatgatactaaatatactaataaagaggggaataaatattttgagcacattttgcacatcgataaacgtgcatccttggagggcgatgggtgtataccttctatgcgtaacactct

SEQ ID NO: 89281 - DNA, 419 bp, Glycine max
atgcaagcttgtcacatatcaaaagaaacttaccgtttattttaatgtaacatactaacatccttgctgacagccaagatgatcataaacaagctattgcgtttaacaaccacaacaaagagaacaacagattagtgtgaggtgatattgtatattatagaacagatcattaatttcagatttcagttcacgcatctgaaaattattctattcttctccatgacaaacctgcttaatgcgctgtttaagttggcccaatttttctctagaaaaagctcgaaaggtgccaccaattgtgacataatctggaataacattgaatgcaccacctccttggaacttagcaactgtcacaacctgtgaggacatactttatgtaagacacagaggattgtcaccataaacaagttaagttcttg

SEQ ID NO: 89282 - DNA, 448 bp, Glycine max
gatccttaagtcaccgcggatgcagcttgctgaaagcatcaagactattttttcttcctgtgaaatgatttctcagattactggcatttattgtcctatcttataatggaacattattctcgagaaaattagaatattttgactccggaatacggataaattgtgtcttgacagtccgcacaaagtctctctatattactggttgcatttcctaattagcttattatgatgcaacaatctctccatttctgctttttaagaaagcatctggaaaataatgattatttctttgaataaagactatccaacatgcatcttatggtatacttaataataattctatgatttatcataataccgacttattcgtcccaaattgctctaattggtgtgatcgtggtttaaaacggattgctgttgacactgacaggaaacatgattaagttaa

SEQ ID NO: 89283 - DNA, 446 bp, Glycine max
  unsure (1)..(446): unsure at all n locations
agctngcttctacanaacctattgacaatatattgttgtccataaggataaattagagaatgtgaaaaatggttagaaattaaaattttattaaaagataaatatgcatgctacaaggctaacaaagcatagttaaaatgagataaagagaaagaatccttgaaccatttttccttttcttcaacactgccttcctcttcaagagattgcttatgaatgtaaggtcacccttctttcttgccatgatgtcataccctaatttcgttcgggtaccattgtttgagggcatgcaacctttgtttaaccgctttgaggtacttggcaccctttgttgcacaatacgtgaagctctgtgacatgctagagatcaaaaggaagcatcgttacataattcgtgagattccgtaacatgctcgaaatcaaaaggaaacattattacacaatct

SEQ ID NO: 89284 - DNA, 377 bp, Glycine max
  unsure (1)..(377): unsure at all n locations
aacctctgtcacccttgttgcccaaattcctttaatctctcagtacaatacacgttccatctccaaattccatgtaaaataacttcttgtttcctcattattgtttcctaaaacttnttttttgcccgtcatatattcattaaatgactccattgaagataatgtcacttatttaacttgcacataacaaatattagatgccaactactttattcattngattagtccactgcacaatcatagataatatcttcaacacacattttatgcaatagcaaagtacataatagtctatcttctatagcaaagtacaatatgtacaaagcacacaaagtttgtctacaatagctaattatatttataaaagaactattctt

SEQ ID NO: 89285 - DNA, 379 bp, Glycine max
  unsure (1)..(379): unsure at all n locations
ctgcagcttgaaccatgatgcnttcaaaatatattcttcttctcttcatctaacaatttatcgatctgacatgcacatctaggaagtttgagttcggaagatcaatcatttatctatataaaccattcataccacatagtcctgatataatcggacctctgccaacaaaggaagggtgtaactgttgaggacgataaacccaaccccatgaggtggtcctctcctacatgagatgctgcaatgtgaatattcaaacatcttaggcaaatttctattactcacagattgggctcctaagtggtctccagctgcagtgagcatcacatgcactaatccaagtatctgagggcttggtgcccaacatagctggactttttac

SEQ ID NO: 89286 - DNA, 441 bp, Glycine max
attgtcttactagcaccaacattcttgcatgttcagttatccaatctcaatttcttctatcacttagtagtgatgtgggtatctatcttcttcctcttgatgatcccatatgcctcctctttgtcctttaacttccctaggtctgatcctaatgacgacagaataatatataacagatcagcatacgctgtggcaccgaatatacaacttacaacaaactcatctgacaagggcatgaatggaagcattggtagagccacttattaccaacctatgcacctgtgggacaaagccactggaactctcacagatttcagtaccaatatctcttatgtcatacactcacgacgtcatagtgtatatggagatggaattgcattcttccttgcccctgctggtgaatgggttctaactccacattatgacgtactatgggtctga

SEQ ID NO: 89287 - DNA, 444 bp, Glycine max
  unsure (1)..(444): unsure at all n locations
agcttaattagcctctaatgcaactggtaatctttactntactgcaacaagtaataattaaactcacgatcggccagccttgtgtgcatganaagcctctgacaaaacacctcgtgataagtagccttgctattttttaaaaatggaaaatattctatatcaatttcaaaacacaacttgaacctagccgatatcaattgtcagacattaacagttgtctctattcccttacggaccctaattatgagttcatgtgaagttgacttgcacaataattnttcaatgttatacagacttttattgttttttcaaacaaaaataaaattaataagtccatattcgtttggcttgccaatgtcttattatattattcgtcggtcacgttaaaaaaccgtagtctcgcgacgctaaactttgttttgcttgcattgagcgcaattatta

SEQ ID NO: 89288 - DNA, 286 bp, Glycine max
tgactagaaagcaataaacaacacccaaatgaaaaatccatttacagtcaagcttcttttcgtcaaatatcacttaagatcgtttcaaggtccaacgccataacagatctctttgctttttatcaaatgaatcaaaacattgtttcaaggaccaatgcctcaacgacttgtttggttgcatttaagatgaatctttcaaaaagaaacacgtgtattcttattaaagaactacgtaagtctgaattcctcattacactcgaggatatgtaggagcaagggcaacacc

SEQ ID NO: 89289 - DNA, 412 bp, Glycine max
  unsure (1)..(412): unsure at all n locations
agctntgagaataacactctaaggaacatattttattttattaaattcaaacttcaacatagagagtggtatttgatatacctcttggatcatgctaaaaggatccttcacggcaagaggtatgaattccaaagttctttaatcaccccataaatataaaaacatgagtgaaaggtatgatacaaacttaattgctaaagcgtcacaccaactatccaaaatttgtaccaaaactgtacaccatcaataattgtcacagatagtatcaattaatttgttatgaaaatcatataatgtagcatgacagattattaacgagcagagaaggaatgtaaaagctaaacaattgtctaaagtcacacacaacttgtgtagaataaccttacaacattaacttttgggtcttcatatg

SEQ ID NO: 89290 - DNA, 365 bp, Glycine max
  unsure (1)..(365): unsure at all n locations
agctntacacataagaataatcatatatatttatttataccttcacccgaatcctatgtaagctaatacttgagaatcttcatgtctctcagatgaaagatgcttcaccgaaacattgagagaagatacacagttggaatctcacattaataaaaagtttgaactaattacaaaaacagtactgtattatttataagcaccatctccattgaaaagagaatgttattcttattgaaattagtaacatattaagacgctgaatataaagattagaaaatgagtcagaatgtatcacaactcacactcaagagggacaattggataaaccaatatacaagacgaaggaaaaggtgagtttgtttaac

SEQ ID NO: 89291 - DNA, 419 bp, Glycine max
  unsure (1)..(419): unsure at all n locations
tttggtttaatttcactaataattagatatatatttagtgtttctaatttattacggactctataattttaggtttcattgtaggcaaagaataggatttgatgattntcggaaaaatagcatttggaagatcaagccacacctatggaagcaagttttcaaggtcaatattcacttatttttcttcggccatcttaaggctaagccttgaaaagttgaagcttatcctgaaagcatcaaacagctcctttgttgctgtcagtctaaggctatgtgtggaaaactcgaggctaagtgataaaccactttctgagtgatattntgtgtcagtttttgtactatatttatgcattntcttggcagaactcacgtttggagactatgtttgtcttgtagaagtatagtctctcaatggagtg

SEQ ID NO: 89292 - DNA, 414 bp, Glycine max
  unsure (1)..(414): unsure at all n locations
agcttcttagtctcggctgatgaagatgaattcttgtctacttcatgcactcctctaatgacaatagtatcacttctggcactaaatcgctgggagttagaagccatcatctcaattaaatctctggcttcagcaggggtcatgtctacaaatgctccaccactggcagcatctatcatacttctctccatgttactgcgtccttcataanaatattggaggagaagatgctcaaaattctggtggtgagggcaactggcacatagtttcttaaatctctcccagtattcatataaagtctctccactgagtcgtctaatgcttgaaatatctcttttgatggtcgtggtcttggaggcagggaaatttttctctaagaatactctcttgagatcatcccagctcgtgatggac

SEQ ID NO: 89293 - DNA, 488 bp, Glycine max
  unsure (1)..(488): unsure at all n locations
gtcacctgccgcatgcaagcttagaatctaggagagcattcatccgtagataactcttnnttttattcctaccccatacttaccttttatttaagcacttagcttcatttcattactttgcagcatacacacttattaaattcatttgcctttttttcttgtatgctatttactttgaccatttcaattcttacctagtgtctcccccaaatttgggacaaatttgccttgaaccaaaattctctatggatgatgctctcctaaaacctaagacaaggtagcataagtctaagactgtataggctcaaggttcaatcaatcaatcattcattcagctcacactgggtgcaagggataaatcatccaagcacaatgtcagctttttggctaaagtagctaccacaatcaacacatggccgtcatcatcctcaattcttgcatttacgccatactttagagaatgatgctgaaatcagtactaaatgata

SEQ ID NO: 89294 - DNA, 367 bp, Glycine max
aaagatgttctcttctatatcaacaaatcatgcctgcagttccaatttcaattctcaggagtcaggatgaacaaaatccataaccacgtcagagacacgtgcatgtgtagattagtgaaaataaaataaagataaatgaaacctctctattgaaacatttgattattcttctacggcgtttgggatctaatactaacgcaaataaaagcgagtgattgattcagcatccaaatgattattatattatagaagtagctaaatattataatagctcgattatttatttcaattgcattacgcatgactgctctgtcccattctattaatctaggcttatctatatatatatatatatatatgtctgaac

SEQ ID NO: 89295 - DNA, 407 bp, Glycine max
  unsure (1)..(407): unsure at all n locations
agcttcatgctgctcaatcgctccaggntgctgctatgtaatggcaaaggtctgcatggaggtcatcagatgagcacaaaccacagacccttgcgacatgcacatatttctgattcaggccagctgtgttaccaagttgaccaatgcattcagttagccttcaagcttcttagtttcagaagatgcagatgggtttgtagctacactcatgcactcctctaatgactattgcatcatttctggcgctaaactagtgggagttggatgccatcttctcaattaaatttctggcttcagcaagagtcatgtcttcaagggctccaccactggaattatctatcatacttctctccatactactgagtccttcatataaatattggagaagaagctgttctaaatctgat

SEQ ID NO: 89296 - DNA, 361 bp, Glycine max
  unsure (1)..(361): unsure at all n locations
cttaagtcacctgccgctgcagctagcgganaccagctgtatctcgcgcattcttattggctggcgcagcacgggagtcagttgtagcagagagtaatcatactataatatagcgacttgatgatgaccctcatacctatccgttatatgtgtagtgggtgtataagacaatatgcgttaagatgatgatttgcatttgtatttcaaactttccgacactgcatacatgaatattacgtttcaggtctataaatgtattaattatctattgactcgctgactcacctctgatgaataatgatatcggtggggtctcaagattcaacccgctcctactcatatggtagcacagttattggat

SEQ ID NO: 89297 - DNA, 390 bp, Glycine max
gatccttaagtcaccgcagctgcaactgaagaaactgatgcatgggtatcttgtgacccagctggccttgaatcacaaatctgacctgtcgcaagggttggtggttcgagctcctctgctgaccaccatacagaccttggcacttaaatgcaccaacctggaacaattgagcatactgaagcttatgctccagatgcttacagtatagcatctcaacctcagcagcctaatcggccacatcaaagcatatatgacctctacagctacagatacaaccctggatggaggaatcaccctaacctcaaatggtgcaggcctcagcaacaacaacagcagcctgctacttacttccaatatgctattggcccaagcggaccatacattgctaca

SEQ ID NO: 89298 - DNA, 407 bp, Glycine max
  unsure (1)..(407): unsure at all n locations
tgaggcatgcagcttagaaaactgangtatncacctcatgattaataatatagtngagtccaatgatgatatggatgataaagttcaactataagcacctctatcaccaatccaccttgaccactctgaacatcaatgagaacccaccgttgatcccaacctctttgaagaagacattgcaagcttatggctttctgtgacctatctctctgagaatgcttacactagttcaacggagattgaatgcataatactaccctctaactgattggatgcaactgcccttggatgatgatgaacagattgtcacatgcccttcgtccgtgtacaaataatctgaagcggaaccatcttctagtgtatgggatcaatctatatggattgaagaccttcctccaccaacttgg

SEQ ID NO: 89299 - DNA, 337 bp, Glycine max
gcaagcttctctggccattcctaggaggcatatattgttaagtgagtttaccaatggatgctcctcttaatacatatatggcatactacctctctgcgataaatacaaacaatcatgtatagtaatagccagcctatgcacatactctcttacgaacgtttacttgcacaagacattcttataactaagaaaaattgcaccatatccatcaatggaccttcgtacctatattatattatgtactccaacgagaatagtagctacattcatgccttcttggcaaaaaacatcatgctactaaagatttgggagcgacatgagatgtgacatccgtttc

SEQ ID NO: 89300 - DNA, 298 bp, Glycine max
tgtctcacattattttccatgacacacatgcaacaatgaagattttggaaatttatgcaaaactagtcatgcatgcaaccatgtgtgacactcaagcatcaagtttttatggtcatgtgacactacggctcaagattcatattccctccttatatcaccctagtgttgtcaaaacatgatttcttttttatcaatgtatgcattcattcgagtccattatgggcgttcgggaagaatttcacaacattcacccttcaggtgatacacatttttttatcaaaaccggtgtatgatcagt

SEQ ID NO: 89301 - DNA, 398 bp, Glycine max
  unsure (1)..(398): unsure at all n locations
agcttatgatacttgntaatgttgtcttactatttatggntatngtatntgtgtattaatttctttaataataaactcactcctcacaatttttgtaccgtgtggttggtacctgtgatgatcacgaacctttgttcgtgggagcagaatgacagctatagtggacgagaagtgagattcttttgtggagccgccgagctgacgtgatgacgttgggattattttgggagagagttgtgtattgttaattgactcctccatagctggttccctaattctttttgttgatttgaagatgtaaatcacaaatttaattatatgtatgaacaaatttattttccattatgtgaatgatgtgtactangntattatacctatatatatatatatatatatat

SEQ ID NO: 89302 - DNA, 474 bp, Glycine max
  unsure (1)..(474): unsure at all n locations
agcttgtaacttatatgactaaatgttgtatatatgtggtgcaactgacgtttattactctttcaagtagcttaatatttatttttcccatacgcgaagaacatggaaatctcctagtgtnttaactctctcgtatntcataacacacataacactatctatgttaataactacagtatttattttaatttttaataaaatatcgaactttcaaaaatcaataagaaatttaaatcaatgaaaaaaaatctagaactaacttgtacatatacttttgtctactaaaccaaaataaaaatagaatctatagaaaaagttacataaatgcgtcctttatgttattttatcacctacttcaacaacacattattccatacatgtttaattcaatatctaatttaacacgtgtaagcttgaactagcacgaacatgccttatctacctataacattacggagctatagtgtaacctgc

SEQ ID NO: 89303 - DNA, 407 bp, Glycine max
  unsure (1)..(407): unsure at all n locations
acatatgctnccacacgtcaaattctccgcctatatattcaaccttcccatcactggcacgtggagtgaatcttcctccatgagcgcaatacttaaagctagtagtgtcattcatgctacacaatcagaaaccacagacattgtcatatttgaggcaataaaaaacctatactaaactcaaacatatgcacatcacacaacaacatgcaatgtcatctatcaaaatagagcatcataaacgaaaattataaaggaccataaacctccctacaaagcacgaagacaatgcaaatgaatccccttgaacatatgaaaccgcaaatgaatctcccaaaacaatgctaatgatatgaacgcatataaaccaccaacctgactgccacgcgcgaacactcacaatcaccgac

SEQ ID NO: 89304 - DNA, 436 bp, Glycine max
accatttggaaagaagagaaaagtgattttactctatagattcagtcaaatgtggataaagttattgcatgttcatatatttgtacccaatatacatgatttatattaataaatttggttctcaaacatttaaaaagcatgtgaagttacaggcctctaaaacatgaattctcacagaagagagactaaattcacacgcttattataggttcaaaactaaattcattgatagagtccaggaacctagattgcatttcacaaacaacatagagaataataacactttcttcaatttattatttgaagttacaaactgttcgttagtgttactttatgttactggtttgttgggttaagaattagtgacaatatagacaacaaagcttacagtaagactgtgcgcaatgatcaatctcttaaatgacatatcaaaatc

SEQ ID NO: 89305 - DNA, 386 bp, Glycine max
ctgcagctgagataggaatatgaacgggaaactctctgctttattcttgaccacagagtggtacctggagatatgtcgcgggggtcacgagaccttgttgatgtcaggggggtgctattgtccaaacaagcttgaccaatcccaacccaacccggtcatagtcggtcagtgagattctgtgatgtacctaagcaggagagcttctggctgtcacagattaaaggaacatataccaccaagcaaggcggcttgtggtggctggccagctgtgaattttgtgtgatatatgggttgtggctctggtaatcgattaccaacgatgggtaatcgatctacaggcttataaatgaagacaggagactgagatggtctctggtaatcgatta

SEQ ID NO: 89306 - DNA, 340 bp, Glycine max
  unsure (1)..(340): unsure at all n locations
tgacattgcacgtagacatgttactgttgcactgacagtgtacaacttgctctgttaaagcataatgggtatcgctcctatctatgatacctacaatataatatacattgacaagggtgtataaagactcttacaacatcatctaacttttgtggacttttatttaatgtctaaatattatgccatgcttatgtaatttacactatccactcattataagacattgtaagtatcaactatactgtaaaagtcaatagagttaccatacctgactatntgtgtatgaattaaattgtaaaatctgttaataaaaatattgatagaacatgaatattaaacg

SEQ ID NO: 89307 - DNA, 321 bp, Glycine max
  unsure (1)..(321): unsure at all n locations
ccacgcagggtcgcctgangctgctctagaatggggagggtgtgtcttctggtntggagcacaacgaccctattctctacaagtgctgatcagntcagacgcacaagagaagaacaagggtcgcacgttcttctgccagaatttactatgcatcaacatcatctctgagtatccaaagccaccgatgtaatgcggaggcacgtcacacttctggcaatgggagtgttcatgatgaatatgatgacattgatgatgatgaggatgatgatgatgacgacgaggaggaggaggatgtgtttgaccgagatggctagtcttgtt

SEQ ID NO: 89308 - DNA, 369 bp, Glycine max
tgagagaccatacaagcttcctaacgagtttaattatgtgggccattaagtctatcatatgctgacaatagccgagaagcccatgaatctcttcgggggcggagtaagtgtctgccatcgtcttggccttggctaacaagcggggaagttcttgactcccgttcaaggtaagagcaaaccgatccatccacatggttgcctcttggtgtaaagagtctatcaccctccctctagcctcagtatccgtgtatacttgagcatactcgtctccgattctatgctcaggggccgtggctagacctaacccttcttggtacttggcgatgataactatcatgttggtctccgtcttgcataaacacctgagac

SEQ ID NO: 89309 - DNA, 499 bp, Glycine max
  unsure (1)..(499): unsure at all n locations
actatannaatgacttanacatagtggaataatgtcgaattagtgaaattactgcgacagaacaagtcatttaacagattctgaagaattatgaaccagaagtggataataaacaggtaatgtactactatctttatgttcaggcaaacaaaggcacaaaagtttacatgacccatcaccgaaaataatacagacacaaactagaacttacacattctaaataaacatactattagtctaataatatagccaaagtagtgcacacacatcgctatagtaaacagaattgaaccaccacatactagtacacttgaacttcggtgcataatcaatgaagcacanatntcccaatgggttntttctctaagggcacttggtcttgctgccatgggtagtcatatcagtgtagcaaggtccacataggttcctactttcagatgtgccaggtgggacacacttacacctcacacagcacgtgccacacgccctagtgcacaag

SEQ ID NO: 89310 - DNA, 176 bp, Glycine max
ttgctagcataacaaatatatacaattatattcatccttgtctcttaggagcacatatgatatatgcattcactctgagaatataggatgaaggatctcttattcatattaatttctttttctggggggggggggggggcactaataaacacttgttagtaagtgaaatgtacacg

SEQ ID NO: 89311 - DNA, 401 bp, Glycine max
  unsure (1)..(401): unsure at all n locations
gatcttaagtacctgggctgcagctatgcaatgagtgctgtcataattaactttttctttgctaatgaaaagcaactaagagagtgtatatcaaatntggtatttacagctggcaaaatctggatactttggatttaaatagtaatgacacacgtacctatagacatggattgataagagtgataacgaacttatttcaactatgttgtgaacaaaaacaagcttagagttcagtacatatgaataaaactacttgagcctcatcattctttaaaatcatattctgtataatatttcagaagttaacgaccttacatgatgaatacatgacagccatatttgtctcttcttgtatacatgcggaactggataccatattgtggctgattcatatgataaat

SEQ ID NO: 89312 - DNA, 407 bp, Glycine max
agcttgtcttgtgcagaatgagggtactcttatttctctgaaatttcacttacacacactgtagagcacactgcagtgcctatctcgcgaatagagctctggatgcagcaagaggagcactttttgcagacatacctatgtccaacacaatatacactctagtaggcggatttctaaagaacaaccgatgtgattacttcaatatgcaacgtgactgtgatttttttgtgtcaatgtctctcttcgtgcgtacacttctgatgctcttggaatgatcacccatatgtgtgcatatttacgggtctatagcattatttgcggctttgaacttgaatgaatcacaattgtacctaatctgacattaggatctgggaacatgcttggctttaattggctgcacataatgt

SEQ ID NO: 89313 - DNA, 411 bp, Glycine max
  unsure (1)..(411): unsure at all n locations
agcttgcattgannatgcaaaatctccccttcttattaggatttgttcctgccatctcaaacaaacaaatcaaacgtaacaagacaattatagttgttggttgaatacctcacccactcaagtgtatcacacaattatggctgttctctaatgaaacactcttgccttttaccactctaattccccttgagttcttaagcaattcaagagaattatggccacaacaaaaacaattcaccaatatgtgtaaggtaaggctagagagacaaggaaaaggttaaccaagaaaaaggctaacaatgtntttaggcacaaatgaaggaaataaaattcagaantatgaattangtaacaatcttcatgaacccaatataccttcagagatttntttaaagttcttaagcatgacca

SEQ ID NO: 89314 - DNA, 380 bp, Glycine max
  unsure (1)..(380): unsure at all n locations
agctantaaggatgaagctaccttgtatgtatcttggctgctggagaggacaatggaacgtctccagctaacaaggtagcacttcctgaaatgactgctgacgctatggctgttgacaatgctgggccagagagggatgccatctggacttcttggagcaatgcaatggatgcccttcaagttagtgacctagatttagcctttgcagaagtattgtccgctggcgatgatcttntgcttgtaaagctaatggataaaacgggccctgtaattgaccaactttcaagtgaagttgcatgtgaaactcgtaatgccattggacaattcttactggaccagaacatgtatgacatctgtttgttttggattcacaggtatgg

SEQ ID NO: 89315 - DNA, 389 bp, Glycine max
ctcctgacgatcaagcctcatgattgcaaatctggaatatgtacacaaggtctccacctcttctagcactacatgggtcttcaaaaatgtgatgaatgtatcctcatcaaacttgactaaatgacctctcaccctcacctgcttatgtgattcatcttccaggacatagaggacggcataaaactccttcacaatgtagatgtctatactggtgacaaaataatcactcagctcttcatcccaatggcgcctctcgagttcctacttgaactcgtcaaactctgtataatagactacctcattcctatctgcgagtagcttccgtggcaccactatgtcagcgtatctctcccaagtctcttgtgatgcgaatctggatcaattaaatt

SEQ ID NO: 89316 - DNA, 417 bp, Glycine max
  unsure (1)..(417): unsure at all n locations
gcttgnatctttagttatgtatctgtaatcttttatctctgaacgaactattcaagnttgtaattcgaactttaattatctattaattcgctcctaaagatagatcgccaaatctgttgctaactgcacattaatctgttaaagatataacagatttatgtgtccagtattntcgggcaagatgtcctggacatcgtatccgacatcgtggatcctgcagcttcaattcttcatttgacattttatcttgccttgtgcattgtgcagcccaatctgattccttgacataacagtggatatcatgtgcagcaactccagctttccttcaatgtctaagtgcttatgttctaacaaaattttagccaatcttgtatagttcagtaaagctcagcactaacagatacaattggtcgtaca

SEQ ID NO: 89317 - DNA, 386 bp, Glycine max
actggcatttatctttctatattagaatggaacattattctcgagaaatctaagaatattttgactcgggaatatggatgaaatgtgtcttgacagtccgcacgaggcctctctatattactgtattgcatttccaaattagctcattttgaggcaacaatctctcaatttctgctttttaagaaagtatccggaaaataatgattatctctttgaataaaagctattccaaacatgcaactaatgctagtacttaaataataattacgatgattcaatcataactacacaacttaattatctcccaagattgctcctacttggttatgatcgatgcgtctaaaacgggattggtgattgaccactgaccagcgaagacattgatt

SEQ ID NO: 89318 - DNA, 317 bp, Glycine max
ctaacgaagacactgagcaaaacctatcttcctcttcttggacacagtatggcaggctggaggcaagtaaatattcttccactcagaccttggatgcaactgtgctcttatacccatatcagctagatcttgaagggaattcaacgcatccttgtcatgacttgaatgtaaaggagcgttccaattacactgtcacaaacaattttctccacatgcataagatgaatacaatgtctaacgtcaagatcacaccagtgcggaagatcaaagaaaatggacctcttctttcatatgcaactctgacttttatccttctt

SEQ ID NO: 89319 - DNA, 440 bp, Glycine max
  unsure (1)..(440): unsure at all n locations
agnctgagaatcataatgttatggtcgttacgtgtaatagcaacattgaaagtttatctgctagtgctatataattacctgacttacatgagtgattctaaatctaatcattatatgtagtaactggtttagatgcaataccatgatgtgagtggccaaagacagataattactgaggtttgcttgtaatgtgccttaccatgatgtatttatgttattattgcatatacaccactacacccaatctaattcacccttagcttatggtgcactaaaagtgattcctagtttcttagttctttgaaaatatcttaaattagcactaggaaaatttctcatatcttattgaagttatcttttcaggtcataaaatacagtatggagatcttcatatctatgttgtatgtcggctcgaattatatctttatgatctaaactga

SEQ ID NO: 89320 - DNA, 403 bp, Glycine max
  unsure (1)..(403): unsure at all n locations
agcttgngttcctaggcctagaattgcattcggtcactcattntaaatccttcatgctgtccctatacatataaaacagtcccacaacccatagctcacaaaaccatgctcatatctcgttgaggcatttcaccgagcacttggtgggcgcatgtttaggcacgaatatcaagagaatggggacaatgtggcatgcgccatcacttcagaatacaccctaggccaaggccattccttacaacccctcaatccaacaaaaacaagcaacaatctgaggataaatccctcacgtttcttagcaaacacatgcaatttatagcaccacaatacatcaatggatagctaganagcccaagaatgaggtacttacttgttggagacgaataatagagcaaaacggaat

SEQ ID NO: 89321 - DNA, 421 bp, Glycine max
  unsure (1)..(421): unsure at all n locations
gaatcgggtaatatattcgagacgctcaacaattgagaacanactgctctgagcaagttgaaatgacaattactctatacactgatgtgcggttgagtcccgtaatatatcgagacgctccacattgaaaacggatactctcagaaacatctaacaacaattactctttactctgacgcccgactgagggtcgtaatttatcgtgagatgctccacatagtacacaaaagctcgtatcatactcaaacagaaatagcttttactcggaatctgattgattccgtaaatatcgagacgctcaaagttaagccgagctctggaaaatgaatgacataacttatacaagatgtcagtgagtctgccttagggacctgtaatgagacgaagtgcagaaacaaaaattattttactggtgtcgata

SEQ ID NO: 89322 - DNA, 341 bp, Glycine max
  unsure (1)..(341): unsure at all n locations
ctagngggaaaatttacagagactgtatattgttctctggcacattataatatctctcctaagtctctagcttttgtgaagtatacggagcaatttctattacagtttcttacgtagggataccgttattattctatcagaattgatagtgtcaacaattaatagctggagattaacttctattctggtctcataacaggattaaaggcgccacttatgagcatccatggctccactcttgcatctttatatgaaagtcactccatgatcatgtgagtttgtactgatactatacactaatcacaattttctgttattcattcgatttatgcacgctcatg

SEQ ID NO: 89323 - DNA, 287 bp, Glycine max
agcttataagaacaaaagtgccttattcatttgtttatatgcgtgtgaattaggacgcatcaacaacaatcaagccaacgctattgtgcacgcaataaatggggcataacacaccaaatgattataatgatggatggctcatactctcacacaagtaacatcattactttcaaattgagcttctcaaactatcatgacatgcacagaagaatcaaggatttcagcctcataatggcaagaatctttatttcaaacaactacccattcttgaatattcctataatcaa

SEQ ID NO: 89324 - DNA, 442 bp, Glycine max
  unsure (1)..(442): unsure at all n locations
agctngaccacatccttatctttaaaagtatacacatttatgatgcatgtttcaaacattcatacataattggttccactgaacctcacataanaaattgtacgcccattctcgcctcacatagtctaggtagctcatggtcaaaatacgactcagacccattctcgccccacataggctaggtcacttatctcaatggcctctaatcacaactcaccatatctcttgttcatcacatgcacgacataaatagatatgtgttccttccaaataatggtcagacattataacctttatgatgcaatcttatcctccaagggcattggatagaagactctaagaagatcgngccagaaatgcaagagaaagccctacggttctcatgagccttatggtagattttggcccatgtgctaagtatgacccacttatctctgacata

SEQ ID NO: 89325 - DNA, 446 bp, Glycine max
  unsure (1)..(446): unsure at all n locations
agcttatccacaaacatttctagaagattttttttaataatccgntcataaattgaaataaacatgggcataaattaaaaattatctcttatatagattatataaaacagcttctaccaatcaacttatatgcatatataatggatactctaatccaactaaagaattctcatgattacgacttatcatagggataaatagagacaatatgcactacccaattactgcatcaattagaaagaaacaaaataagcactaccttccaaccttaaaatttatgggcttgtttaagatgattgcgagtcatctatttttggttttcgaacattactttcaaaacaaaaatgtgtttgacacaaatggacttaaaatgattcttatatcattttcaaaccaagaanaaatgccaatttggttttaggttataaaacccaacatttttacat

SEQ ID NO: 89326 - DNA, 129 bp, Glycine max
  unsure (1)..(129): unsure at all n locations
ctttcggcacctactatatngtgacttgaccaacgctgttattggaatgctgcgacaatctttcaacaccttattcacacattctgataaagtggttgtcatgtgaccatatcgtcgtccagatgtatc

SEQ ID NO: 89327 - DNA, 436 bp, Glycine max
  unsure (1)..(436): unsure at all n locations
gcacagctttcaaattgggcactntagatgtatcacacaatcaaataaaggggcaacttccagaattgtggaaatcagtaaagcaattacttgttcttgatttaagcagcaataaattgtcagggaagattnctatgtccatgngcgcccttgntaatatggaagcctcggtcttaaaaacaatggttaatggggagtgcctctcttgagaatgcgcagttattatctgacctatgaaaatgtgtcggtcatacctcaggattgacaagatgcacattgatatctgacatgcagaaaaccttcagaattacccttcttctgtattgaccgatcagtgtggacttaggaaactgcagagaatcacatctaaaaattactcatgctgacaacatactcagacatggctcgattatgctataactactgaatatggtac

SEQ ID NO: 89328 - DNA, 238 bp, Glycine max
  unsure (1)..(238): unsure at all n locations
ctgcagctatggtattataggcattattcttcaagtgttgggtgtctctaaacatatagatttctttacttgatctcacgtctgaagatgcaactgttgggtcattaaatgcacatcatcttcatgccgganaaccattttctttagaatgtgtgaagaatacttcaacataaaccacttgcatnttgntagagtaggtctgtcacaagagggcgtgtcttttgatactgtttgaact

SEQ ID NO: 89329 - DNA, 302 bp, Glycine max
  unsure (1)..(302): unsure at all n locations
actattccttattgaaaattcccttacttagatattccctagattcaattatttctttaattataagttactcgaataataaataaggagaagtaaccttagagaaatataaacacaacagaaacgtaaagagattaagggaagagaagaatgcaaaccggatntatactggttcggccataacctgtgcctacgtccagtcctcaagcaaaattcacttgagcgtttccactaaccttgtaagatccgntacaaacaatgaaccacagaggacttcctttcttttatgttagtgtttacac

SEQ ID NO: 89330 - DNA, 367 bp, Glycine max
acgtaatcaaactttccttctttcaatcctacctcgattctttcgccgcaaacactatatccgcacagctggacggcatgtaacctactagcttctcatagtagaacactggcagagtgtctaccatcatggtggacacttctttctcaccatgggagagtactgtgccgcaaatcctcatcctgccatatctttaaggttcaccctcttctgacatatctgagtgagtacgacggaccatataaatgtctgatctgcttagaaaagaatagatcttcaagacgatacgaagctcaatagtgaccacctacgggctcgcactatttaagagtgatatactttatttaatggcccatctacgagcatt

SEQ ID NO: 89331 - DNA, 323 bp, Glycine max
gctcaagtggagcgtgcacactcctgtatttgcctcctaaaccttaaggatgcatgcagcggcagttgggtggtgtatcagaggaaagatggtatcttacccattgctctctgaataatattcaccctgttggactacactgggcttgcttgagattgagcttatatacgactcgttgagttcatgacacaagctaaaactgtcgcagaggatcattgagcagaaatgtgggtctcagtatattggcttctactcagaagtatgataccaccctaccgaatctactgctgattatagttgagtaatgatagaatcagatgatt

SEQ ID NO: 89332 - DNA, 154 bp, Glycine max
  unsure (1)..(154): unsure at all n locations
ataactactatcacagagtttagaatgaggaatatggtattgatgggtaactactgcaagaataaaaaataatccttcaatagtaattggtgcatctgggattaattaattcaaatctagctctcgcctttngattatattccacagtacatgc

SEQ ID NO: 89333 - DNA, 408 bp, Glycine max
  unsure (1)..(408): unsure at all n locations
gccttgatctagctattgtaaaaaatgctaaatatntatgcaagatgttaagcatcatgccctcaactcccttcaaattaatttttcatacagttatgataaaaccctcctcctatatgaatggtcaccttaaaatatgactaatgtatctcactacttccttaataccttatcgatcagacttattgctctattcaaagataactgaaaccatcaaggaaccatacacattacctaattagatctacttacactcaacatgtgtcagacaatgaacaggccggaacaaagaccattgatacaatgatcaactgaacttagatgaaatgtgaaataactgtgagatcatctgcgatgggcgcctgggatgacatcctaaccatttagtctcttcacctgaatatataa

SEQ ID NO: 89334 - DNA, 229 bp, Glycine max
  unsure (1)..(229): unsure at all n locations
cttaagcacctgngctgcagctgtggccgttatgcaaccaagcttggtatgcttacgaaagctatcaacaaagtggggcaatcctctgtgtagaaccacgcaagcaggaatatatggacgcgcagaacatgatagaacatctcaactcatgccaacgtacagtgacaccctacacgattgtagatgtgcacatacatgatgaatttcgaactatctttctcctctactc

SEQ ID NO: 89335 - DNA, 236 bp, Glycine max
  unsure (1)..(236): unsure at all n locations
tttgagcnnctgttccctttccttgtgttgaagctcactacaagccttaagtgaaaaaccatgatattaccatatccttaaggaattttggagctttggaattgttttgggaataagtggtggggggtttttgttcattggacaacttgttntgttggctatgcttcatgatgtatnttgggccatacttgatgtacattgtatanttggtaaatgntggacatgctgaatgaaat

SEQ ID NO: 89336 - DNA, 339 bp, Glycine max
  unsure (1)..(339): unsure at all n locations
gctctatagagcctgatcttgagcttaatagggccttcgttggtggattttagccatggagttgcagcggaagataaaggagaagaggtgagaggatgcgccatccattatagaataagccatggaacgagaagctntaccaccaagagagtgccttggatatgaagcttatagaggaagcttcaatggaggaaaagaatgagagaaagagagaggtgggcgtggaaattgaaggacaagaaggagagaagttgaactntgaagtgtgtctcacaagtttctcattcatcanatttatgatgagtggtacacgtgcttctatttatagcctagcacatg

SEQ ID NO: 89337 - DNA, 246 bp, Glycine max
  unsure (1)..(246): unsure at all n locations
tttctggatgaaagagagagaaggtctttgctttaacannttttttctttttctttntctttntaattgcatttccacatgccaatttgtgattggagcaaaaaggggcccacctttaatttaactttgaccacatgctcagccataagagaagaaaaatctggacctttttggatactgaaatcttgcctcgatttgcatgtcatctccccggttccaattcttcgcgtttctctacacccgtcg

SEQ ID NO: 89338 - DNA, 454 bp, Glycine max
  unsure (1)..(454): unsure at all n locations
acttgattgattcacgttaaagcctggtatcgatacactntttgaattattggaacggtgtanattcaatatgaaaactttntcaaaacaattntgctactggtaatcgaatacaacaatctggtaatcgattaccagagagtaaaaactctttggtaaacatgttntgagaaaaatcatgtgctactcaattttttgtgaanacattttatacttaatttgattaaccctttctttgatcttagatcttgagccttgaatctggatcttgattctgagatctgatccttaatctgattcttgactctaacttcttcttgagcttgaatcttcttgatctatcttggctctgaattgtctttgatgccttgacttttgcatcaccttgcatcattttngtatatcaaacatcttgaatacttcgatcacatgagcttgctttcagttaagtgtc

SEQ ID NO: 89339 - DNA, 221 bp, Glycine max
  unsure (1)..(221): unsure at all n locations
acttctaatgctcttaatctcttctcatctaaatcaactaactcatctgacatcantttccaataatggtcgattggaatgtcccatttgttttgtaccctggctgatngcaaatgtatttcgaccggaagtacagcatcatgcccataagtcagtcgaaatggggtagtattagttgattccttatgagaatttctacatgcccatagaacttgatctaa

SEQ ID NO: 89340 - DNA, 303 bp, Glycine max
  unsure (1)..(303): unsure at all n locations
ctcagctagagagatcccgtctgggaggaatcttccactgaatgcagtctgagagatggtgatgtgagtcaaggaagtcattgtcccaaggaaagaaagaaatgacataccttctccaaggaaataattgccgctcaagtccaagtaattcaaatgctntaaatcagccaaacaaggacttatctctccaccaaagctccatctccgataagcttcctcatcgaatctatggtagaatccattatagtagtcatacttgaaagcataatatgaagtggtgaggtgaagctgaagaacatggga

SEQ ID NO: 89341 - DNA, 424 bp, Glycine max
  unsure (1)..(424): unsure at all n locations
accatattccaatgaagcaagttcatataagatttcacgtgaaggcttctaaagttatgaacttccaaaatgacatgtatatcatacacatccatccacagtcatttgaatgtattagcttcatttgaaatccatattcaatataacaagaaacttggaaatcattgaatgctaaagcaaacaatggtcgactatgaaacccactaattaatatttatcagattaacatccctagcctctataagacaccaatgaatacatagctctctttccgacttgatcaattgtgacaattctgtactctatagaaacgtaaaaaatgtgcaggccttaaaaaaatatttagaacttggctatctataacaccccgtctgttacactacccccacaataanagaaccaatcatagatgctcgacaatgca

SEQ ID NO: 89342 - DNA, 310 bp, Glycine max
  unsure (1)..(310): unsure at all n locations
tcttcctgtctntaccttctaattagaacatgtgccacatctatctttccatanaacgaggaacacatgcaacaatgcatataagaagacagaaggccgatatttaccttgtgtaccggtctatgccaactatcacttgcacttgcatgtntactcaatcaacgcttctaacagccatcaataggaattattgacaattctgttgtgccaacaagctntttacatttatccatctatgtgaacattcactctcacacattgtgcagaataaagctaaacccatcaatcgcctgtattttcctaacacatg

SEQ ID NO: 89343 - DNA, 219 bp, Glycine max
gtgctccgatcattcattgtcatattcatgttttggtggcatactcaccattgtgtatttctttatgaatttcatcatatctaagaacacaccaacgtccccctataacactcgatccagagatatggataatgaagacggcgtgcatgaacagatgaacgccgatctatcggctctaacagatcaaatggcttccattctcgaggtcagtgttaaact

SEQ ID NO: 89344 - DNA, 433 bp, Glycine max
  unsure (1)..(433): unsure at all n locations
tctcatctaacatttattagaactaaccaaagagcattcaattaagaccatcatcataatatgctctcttatctcttgtctcggnggttgtatacacacgggtcttcttctaaagtttgtattaatgaccttngtctttaactcctcactaatcattattatgaagactttgaacgatttttgacnattattacactcaanggaggtataaaaaggtttccattataacatgaaatcggtggaaatgaggacagtataagtatgtagagagacttagtgttagaacaaaagattanagtgangcgatgggcaaatatatagccttacctcagtttaacacaaagattaagccaacaattatggtacagatactacaattaattcatactctacatcatgggagctaattatctacatatgacaatcacagtat

SEQ ID NO: 89345 - DNA, 165 bp, Glycine max
  unsure (1)..(165): unsure at all n locations
ctatatataactacacgtgttactcaanaacacggtggttataatattatcatgaattcatatagtctcaccaaactctctctctcctctccctctctgtctattttcgattatctctttctaatgtggtatccatagccaaaaagatccttcaatggcagaatc

SEQ ID NO: 89346 - DNA, 265 bp, Glycine max
  unsure (1)..(265): unsure at all n locations
gttctggtggatctgganatagcctctagtaatcgattaccattcatgggtaatcgattacaggggttaanaatggagacagaatgttaaatggctactggtaatcgattaccaattgtgtgtaatcgattacacacggtgatagggcactggttatcgattactagttgggtgtaatcgattacacagtgttacctgctactggtaatcgattaccatttatgtgtaatcgattacattagtgtaattttagtttccaatgtgc

SEQ ID NO: 89347 - DNA, 383 bp, Glycine max
  unsure (1)..(383): unsure at all n locations
agctntacagcatattttagtaatgaaccactatcctataatttataaacttaatgccattaacctaaggaattaatataaacttaatggctgagtgtaactgaaattgtggcaaccacaagtcacccccaacagccaacatatcagccaccatttggtctcccaataggctgatgcctatgatgccaattgggcccttatctacaaatgaactaaacctaactaaatcccttttagttgattaacccaaaacactattttggtcacccaactttacaaggaatgggccattattagacaaactnacactctaaaattgaacaaagtggtgcattagtcctcctcatttggccatgatacactcaaaccttgacttttctctt

SEQ ID NO: 89348 - DNA, 424 bp, Glycine max
  unsure (1)..(424): unsure at all n locations
atgtcctccttcttcagtatatgttggtaatttctgttggaaaaatttcttgcagctcctgattgatcagacaataacagtatataaacataactaatacggntacacacatacatatantttgttcctaattcctgtatttgatgctaaatgataactatatacttacctggatgtttaattatatatatgcaacgacataagatgattaatccaacaatagtcacaccaacagtgattcccactatcatnttcttggtgtttccgtggccatgatctgaaagaaatagagcatgattagttaccgaattaatacataacagtcttttactgaagctatactatttggaagacagctatcagtactagtacttttatccgtgtacaaaattgcaccccaatctttattcatcgcattaatgat

SEQ ID NO: 89349 - DNA, 465 bp, Glycine max
  unsure (1)..(465): unsure at all n locations
tatatctatctatctatcgatagatgtgtggcattcgattcatacgatatagattctaccatgaagtaccgcacgacgcggtatatatgaatccatatctgccgaatcactcacgttatgatcttctacatcctaagtcgtgccgntccttcatctggcttatgttcttcatgtagcattcagactgaatgactctatgaaattactgtgctacctccacatgggaccgtaacagaaggaaacatctctatatttcccggcgggaatcttatatataccacagtttactctcaatgcgctctgaccataaatgaaagtgataacccgtctccctcttgaacttgaacaaagaggctcggtctgtcgngctgaacatttgctttcctatacatattcagagcatatttattaggacactactcacactgtgcgtctctcagtttgtgagcatctgaagactcatga

SEQ ID NO: 89350 - DNA, 358 bp, Glycine max
  unsure (1)..(358): unsure at all n locations
gagaagtgaanatgagaatnggggtaatttggagtaaactctcatctcaaacaagtctataacattatattaaacttgctcaaactggttgtacggcgaaaactccaccgattcanaatttgacctctcaacagcccaattaccctagaaatggctcttgctttcacctttgtcactcatnttttctcattngctcttgccaagcttacccctacaagtcctaattgactatataaactagaatcaactcactttagactccaattacactaactccaagtttagcttctctaaccctcaaaatctcacacttttctacctacaacattgtcattctcacatttaaccctaagttaac

SEQ ID NO: 89351 - DNA, 193 bp, Glycine max
  unsure (1)..(193): unsure at all n locations
accttcaactgagctcacatacatctacgtagcccttattctcggtcctctcagcaccgggtccccataaacaccttcaagcttncacaatatccaagcaattaaattccaattaccatgaaactaccctaaaccaagaaaactaggcagaggcagaanactctggccaaaacacattccaataccacaactt

SEQ ID NO: 89352 - DNA, 241 bp, Glycine max
  unsure (1)..(241): unsure at all n locations
atggagatgccacttcaacgagaagatgagtcaagaacttaaaggtagaagaagatgagtggagggaaatggagagaatgngcacaaaatttatgcctcaaatgaggtttgaactttgaagtgtaatttctaaaatgatcaaagttgaaaaatgcacacacaaggcctctatttaagcctaagtgtcacacaaaattggagggaaatttgaatntaattcacattcgcttgaattaaattt

SEQ ID NO: 89353 - DNA, 182 bp, Glycine max
  unsure (1)..(182): unsure at all n locations
atgactctatgcaaataanacanattcatttaagtacatcaattacaaagaccatataggtaaaaaatggttaatagcatagttaaaaaaattgattttatttcctactaaatatgaagtacattattttgatataacgcagctacgtaggaatggtctctcataagatttcatcattatta

SEQ ID NO: 89354 - DNA, 406 bp, Glycine max
  unsure (1)..(406): unsure at all n locations
tgagctctaccttagttngctgctcttcttagtaagttcttaatcagtgcggtgccattgtccgaaggttcttatcaaattattgggtcattttgtccacttggctaaccatataaaagtatcaataagaattgaatgtggggttcattttgtgtggcagtgatgtgcttgacaagagtacacccaagcaagtttcatccggccgggatggtntcacaattgaggaaattttatttattggttgggttgattggatgatatgcttaatatttggtgtgactctggaacatttttggagataagaccggaactcggaagcaactggtggttatctatcctgctaagctgacctangaagacagtgtcttctgatccagtttctggttaagttgatcagttttgttgt

SEQ ID NO: 89355 - DNA, 164 bp, Glycine max
ggactaatgaggacacactggatatatcttgctaatcctgagtttgatgaatgataacagactgagaagctgatgactacacacctttgacaaagttacctgatgataatatatctttgcccttttgactgaggatatgcataaatgaccctgacctaaaatta

SEQ ID NO: 89356 - DNA, 272 bp, Glycine max
  unsure (1)..(272): unsure at all n locations
gctnnttaggaagtttctcaagaaagcttncaaggaagctacctagtctataaatagaataatgtgtaacactcggtgtaactntgatgaatgagagtcttgtgagacacaactcanagttcaacttctctctctttntcttctttcaattttgggctcccccctctctctttctcntcctctttcttttcctccattgaagcatcctctccaagcttcttatccaaggctcatcatggtggtgaagctccttcttccatggcttattccct

SEQ ID NO: 89357 - DNA, 303 bp, Glycine max
  unsure (1)..(303): unsure at all n locations
ttctcacaatggtcannaatataatgctcangatgctcananggactaaatgatgtctaactaatctatganatgtcctatctatcttacgatcaaagaggtgtaagtcaaatggatttcctctagtcatacactaaattcagcatgcagaattagttaccttcttaagcaagtaacaatgtatgtttgaactacagctaccatcaaatgatgtccanatgactcgaaatattgtgagcaaccttatacaatgatgagaagatagcacataaaatntcanacanaaattcaaagtctaactat

SEQ ID NO: 89358 - DNA, 406 bp, Glycine max
  unsure (1)..(406): unsure at all n locations
ctcaaaacttgaaattgtcttgtacgctnccgctaactgatgatccattgaaatcactacaaaatatgcctcatttgttgtttctatactttggctactgtgcttatgaagggtggaagttgtattttcaaaatggagggtttcaacaactaaaggaactatatctctatgaattacggtacttgggttccatcattatctgataaggagcactatgttctctataaacaactcgaattgattatattacacctcgagacagtacctcatggtatccaacacttggaaaacttcangttctcaacgctttatgtttgccagataannatcatggaatgcgtgctcccgatggangaccagagcacccaagcatncaacatgtgcccccttgtagaaatacttctat

SEQ ID NO: 89359 - DNA, 208 bp, Glycine max
gagtctaagtgagaacagatttactaaagttaaaacaagcctagacttaaaaaacacttaatataaatgaaaacaaacttggttaatataagaacacacacaatatatataatatacacactcagtaaagacactaataataaaaaacacacaacacacatatcacacaaaccaacaacacacaaacccatagcacacagaactttct

SEQ ID NO: 89360 - DNA, 133 bp, Glycine max
tacgcccgcctgccatatcgagactgtgaattataacatctgcgactgagcatacaacgatataactgatgcacggatacactgtgctgctataattgcatggagacggcaaagtgctattgccttaataaat

SEQ ID NO: 89361 - DNA, 464 bp, Glycine max
  unsure (1)..(464): unsure at all n locations
agtcgataagttgcttataaggacccaccatgtgggagcagagannttacttggtaaaattggatgtaataatttgaacaacttaagataaatattatagaaaatagtgatattattattttttgaagctnttgcagcaaggattgaagcggatgagaatcaacataaacctggtttaacaattgctaaatctatataactacaatctagtaataaattacttcaataattngaaatatagttcgcacagaacatcaacctctggctcttcacatagtgtggtatactcttaaatctagatatgtcattcgcggtcaacatgaaggcatatgaggtaagaagatatctagtgcatattaataaacataanggttcaagtatatatcccanaacgtaaaacaagttgttcaaagaccacaagtcatggagattagtatactaacatanaacatacttattatact

SEQ ID NO: 89362 - DNA, 145 bp, Glycine max
  unsure (1)..(145): unsure at all n locations
gctgtcacgagtntctaagatcgctcctactcatcagagttcatttgtccactcgactgacactttctgaacgagagtggtgtgagacacatctcacgagccaactgctctccctttctttccttaagtccgtgctctcccctct

SEQ ID NO: 89363 - DNA, 527 bp, Glycine max
  unsure (1)..(527): unsure at all n locations
ccgcgatccttgagtcacctgcggcatgcaagcttaagctccttcaactgcacaaggctctntaatattgaagtagatccttgnggaaccttcacctgacgaagacactgacaaaaacttatcnttcttcttttggacanagtatgacaagctggggcaagtaaattntcttcccatcagaccttggatgcaactgtgatcgtatccccatcttagctagatcttgatgggtacttaacccatccttcgtcttgccttgaatggtaagggagcgtccaatcacattgtcacatacatttttcttcacattgcatacatcaatacattgtctaacgtctagatcagaccagtnggatgatgaaagaaatnggacctcttcttcatatgcaagtcttactttatccttctttngggtctttccaaaacagtattcaggtggngaacccactggtatacctgctcactagtcaatggtatcggtgcaatatcatgctcctgacttcattaaaagctttttcaatcgctat

SEQ ID NO: 89364 - DNA, 336 bp, Glycine max
  unsure (1)..(336): unsure at all n locations
cttctatgatatatagacttgntgcttatgagtacatggctaatggntcattggatanatggatattcaacaagaacacagaggnaattcaagntggattgggatacaaggtataacatagcacttggaatagcanaaggacttgcttatctacatgaagatggtgactcacacattattcattgngacattaaaccacgaaaacgtgcttctagatgataatttcaaggttaacgtttctaactttggtttggctaagctcatgaaacgtgaacacagacattgtttcacaacacttagaggcactagagggtatcttgcacctgagtggatcac

SEQ ID NO: 89365 - DNA, 424 bp, Glycine max
  unsure (1)..(424): unsure at all n locations
cgtacctagaataattacacgtacttccaaggggtgtatttgtacttacatcacacacatnctcttggctaaattcacatacatgcatacncaaagcattntggggtaccaaaaatngcacatgtgcacatcttggtatctctaatacctatacatacacaaacttcatgatgaatctngactatctacacaataaggtgctacatttcatgctcttttcaagttnttgctacctaaagccgcatgcanattcaagtatattttcctttgctgactaaattgattcaaatanaaggatacattntttggaatgtatcttcttacataacatgcaacatanttatgtatatttttttgtgagacactttgactaccannaaatatatgtacatacatncaagtatttngctatcatacccaaagt

SEQ ID NO: 89366 - DNA, 390 bp, Glycine max
  unsure (1)..(390): unsure at all n locations
ccgcgatcttagcacgagctgcagctgtctgttttctaatcttacaacttgactattctggcttataactgcttgcctggcgcacctcacaaaacttcacactactgtcttgattgacaatctgtatgaatgttcacatcctcaaacttatgatcattttgaagtggtgtatgtggcaatcacgtcttttatatagcatcncattttcttgaatcatcaccatgtgtatgctggatagtcacaaatttgaatctataaaatggctgcagaggtagtgctaaatatttaatacattagtttagacttataacgccctaaatgaactaccatttcacttttttgtgatataattcatgagtgtgttggcaccaaacataacgggagtgcaca

SEQ ID NO: 89367 - DNA, 385 bp, Glycine max
  unsure (1)..(385): unsure at all n locations
ctaaattacaccacttacaggtaaattccaaatggcatgagtttaagtttcattgaaaagtcnggagttatcaccacgactttngaacgatgattttttaattaaatttattttaaatttgtttaattacaattataaaaatattntaaatattatattatataaaaattatttttaattgatttaaaaataatttcttataaaataattttaattgttaagacataatgtattaaggatatattttctatatattaattatcaaactagtgaaataacttgttgaaaattaattattagactttgagaataaaatctnatataatgaatataaataattgacaaataacaaataccatgatgcatgcattcactgaattaaaga

SEQ ID NO: 89368 - DNA, 213 bp, Glycine max
acttgtattttggcaatctttcatcttgctcttctctctattgaaaagaacgcttcctggtatggaaagttatatcctctgttggatcttccctgtacgtacctgatgtaaatatatttctatttatttaatgatgttttgtgtgttctttgtgctatctgcttttcattccagtatgcctttaccttgatcacgtagatgcatgctgtcgca

SEQ ID NO: 89369 - DNA, 228 bp, Glycine max
  unsure (1)..(228): unsure at all n locations
tactcatacgaaagaacacataattaactcacttcaaatctatgtgttaaaaaacactctttctgttttcttttttaacgctttcaattagaaattaaaatagtctgtaaaggacattctgaaggtaatataaagacttatattaagaacacttatattgctacagcatatattntatataacaccttttttataagctattctttggattctttatcacaacataca

SEQ ID NO: 89370 - DNA, 472 bp, Glycine max
  unsure (1)..(472): unsure at all n locations
aagatcgtttgttcttattggtatagaattgatctttcaattgacttgatttgtttaattgttaatttagaaatcagagtaaatctcattatgtatttgacagagtgaaaattctgagcactccataaacttaccctgtaaagagtattagcgcatgtttggtttggcatccactattcatgttcatgtcagatntagataagaattaacgtaaaagcaactaatagttagttatgagtgcaagtattgatgttatanatccgtaaagtaggtgccaccagtaccaccatgtggatggactactttttgagaggaatgagatcatttcatgcccttaacttgtgaatatttcttatatgacaacagagtatatgatccggggctgtgatgagcaaaatcaatcactgaacaacaagcccaccataaataatggctgcaattctgtctgagagaaagtcatcacactgagtgg

SEQ ID NO: 89371 - DNA, 528 bp, Glycine max
  unsure (1)..(528): unsure at all n locations
cttacaatagttgtatggctnggaacaagcaccgaggttgtggtacatgaaagttaatgagtttatgagcaactcacgattcanaagatgtgacatggaccattgctgctatgttaaaaaatatactaatagntatgttatccttgttgtgtatgttgatgacatgttgatcgcaggatctagtatggcagaaattaacagggtgaagcagcagttggcagaaaactttgaaatgaatgatcttggttcagctaaacaaatccttggtatgagaattcttagaaacagatcagatgaattttgaagctgtctcaggagaaatatatacacaagtggcttgacagtgtntaccttggagatnctaagaccacgaatacccctttgggatctcatttgaagtttcaaagaacaatctttgagacagatgaagaaaatgtacatgtaagagtccatatgatcagcagtggagttgatgtatgtatgtgtgacagactgctagacatgagtggagtgtagtagtctataatc

SEQ ID NO: 89372 - DNA, 69 bp, Glycine max
gagttctggtttcacaccttgttctttcacttataacaagagtgcgctatatctcttcattatcttctc

SEQ ID NO: 89373 - DNA, 161 bp, Glycine max
  unsure (1)..(161): unsure at all n locations
tattggttcttcatttntctccatgtatctnctcacatgtctagtgctgaatgtngtaacataatttttagaattccaaaataaacttgtatagaactagattgattttatggtcanattcttgtcttgtcttgaccataatatgtgagttaggtcctttg

SEQ ID NO: 89374 - DNA, 267 bp, Glycine max
  unsure (1)..(267): unsure at all n locations
accgcgatctctaagcacctgcggctgcagcttctctttaattacgagcgtctcgatatactacgagtctctatcgtgttcccgagtgaaaagtatggtcgtgtgaatcngctcagagcttctatatgcaatcacgagcgtcacgatatattactggactcaatcggacattcgagtcaagaggtatagtcgattgaatatgctcagagcttgtgttgtcaattacgagcgtatcgatatattacgggactcaatcggacatccgag

SEQ ID NO: 89375 - DNA, 488 bp, Glycine max
  unsure (1)..(488): unsure at all n locations
ctcagctgactcctgatcttgtcttactagagctgtctatgcaatcttnctttgaagaactaaatatgagtgcaattccttatcttttcatttttatttcttctgcatgagattgttgaatcaactcgtattcatatgcaagcaatntttcgaagagagcttccatcgacattgatgctaagtccctggattccttgatcattgtgatctttggntcccaatttcttgtaagatagtntaagattgtgatgcttagctcatcgccttcacaacattttccaagaccaagaaggtgattcacaatatgggtgaatcttgtttgaagttctaanatggtttctccattcttcattcagaaagcttcatattcagatacaagagcgtgctntcttgctcttcttaacatccacagtgccttcatgagtgacttcaagcactttccatatttcctttgcactnttgcaccttacagtattaaanaagtcatc

SEQ ID NO: 89376 - DNA, 186 bp, Glycine max
  unsure (1)..(186): unsure at all n locations
acttttcacacggatgtccgactcnggcgcataatatgttgagaggatcgaaattgaacaacggaagctcttgagaaaatcaaatggtcataacttctcacactgaggtccgattcaagatcttactatatcgatacgctcgaaaataaacatcggaaactctcgagaaattgatatggtcataac

SEQ ID NO: 89377 - DNA, 488 bp, Glycine max
  unsure (1)..(488): unsure at all n locations
gctgatcgacatcgtggaaagtatgtcattgaattctaagacttcgagtcaattcagctttcacatattatgcccaatcgactctgtgaagtataccattgaatatctcgaggcttcgatgtaattcgagtgtatcatacattataacctgaatcggactcctgtgaaaagtatgactatttgaatttcgcgagagcgtccgatcgtttactatcgagcgtctcaatatattatacgcctgaattggacatctcgcgtgagaaggtatgaccatttgaatgtctcacgagctatcgatgtcaatatgagcgttcatattgattgcctgatcgacatcccgtanaagtataccattcaattccgagagttcgtgttatttctcgttcgaatatatagccaatcgactcctggaagtttacattgattcacaagctcgtgtattacacgcttatgtaacccatcgaatcggaaagttaccttaattcaac

SEQ ID NO: 89378 - DNA, 466 bp, Glycine max
  unsure (1)..(466): unsure at all n locations
acaccttcaatcctattacgtaacgtggcggacaaaagtggacacgtaacttgaatggtcattattggcaatgcgaaaggtattctgcgctccactatccattgtcacacattattgcagcttgtggttacgtgagcatgaactactaccaatatatagatgttgtttacacaaatgagcacatcttaagagcttactccgcacaatggtggtcttttgtgaatgaacngttattcctcttctaatgggcatggcacttatcctgaccaactcaattcggcgaaggtcggcaatataacaggatatgaatagatggatttgtcgaaccattgacactgacaaaatgagtatatgtggaccgaatggataacatgcgtcctgccaatgcatctgacgtggaagtgtcaatattgntatgatgtagtcagtgactgattattacgtctctcatgattgaattggggtg

SEQ ID NO: 89379 - DNA, 355 bp, Glycine max
  unsure (1)..(355): unsure at all n locations
atcaatattatacttagactattctataaaatggatagcttttcaattggaaacccaagattgctaaccagacctttaagtcagatcccattctttattgcttctattagagcatgcattctacctttgtagtggataaaaccacaatgggctaaagaagttccttcaaactatcaagagagttgccaatgatgaatgcgtaccttgtcatagttctccttgcatccaaatctacagcatagtcnaaatcttaatacccagcagacacaagacgtgtctcatgtagacaagtcaatatagttgtaccatagtacccaatatacatatacaactaccaatgtcgcacctacccttc

SEQ ID NO: 89380 - DNA, 213 bp, Glycine max
ctgcagctatacattggaagtaaaccccaacaatgttttatttataaactacaggcatatgtaagcgtaaagtatatatacacatagtatttcactaaactatttagcattttctataattgagcgacctactagcttggtagatatttcttaaagctacaagctaacctacttataccagaaagagacattttaaaaagggtgtgcatgaca

SEQ ID NO: 89381 - DNA, 432 bp, Glycine max
  unsure (1)..(432): unsure at all n locations
atatcataagcttgaataagtaccttggtaactcttccaatcaccaccacaccacctcatttgtacgcaatacttgctgaatatttgttntgtagagcaatgataaattgtaacatggaatatcaagaatttatttntagcactaatgaatctaataatcaaataaacacagtttggtttctatttgcatgtatttgaattcatncatacattctggaaagagaccaactttactttgtgatattatgcatgttcaaataaatgtatatctataaaatatatagcattatcgtgttgtcataaaaattgctgttgcttgtcaaacgaatgttctaaattattatctggtcttattgtaccctcttcatagtgatatatatataagacgtgttctgacaaactgataactatcttattgttatctcataaaaa

SEQ ID NO: 89382 - DNA, 159 bp, Glycine max
  unsure (1)..(159): unsure at all n locations
tcgactgtcgagtgacgaaatcacgatgaggggtgacttctatgatattaacatcattttgtaaggctggccgcgcctctttggctttaagagtctcagtagcattttctggctacttcatgatctacttntattatacaaatcatgtcatcatctaat

SEQ ID NO: 89383 - DNA, 211 bp, Glycine max
  unsure (1)..(211): unsure at all n locations
gtagacacggagatggacaagaaaatccgcagtattgtgagtagcattctgaaagatgcttctgtgcctgatgctgagaaagatgttccaacatctttcaccccagatgttcctgtgcctgatgtcaataaagatgttccaacatcctccgctccanatgctgaagccgctccttcacccagtgaagaggaatcaacagaagaagaggatc

SEQ ID NO: 89384 - DNA, 200 bp, Glycine max
  unsure (1)..(200): unsure at all n locations
gaacgtgtcttcgaacccggagattgggtgtgggtgcacatgaaataataaaggttctggaacaaaagaaatctaagctttaaccacaggggagatggaccactttcaagtgctcgaaagaatcaatgacaatgcttacaanagtgagctgtccggtgagtataatgatggntccaccttcaatgtctatgacttatctc

SEQ ID NO: 89385 - DNA, 524 bp, Glycine max
  unsure (1)..(524): unsure at all n locations
agatgatcactaacatacaatttactaataatcanagtgatcaattgtaacatagaaagtaaagcaatagaaagataccaataacttgataaaatngaatatcttttttttaaaaaaaggaactaaagtatgggtacaactacatcacaatccgagttctaaggggtttagccaaccatattcatagaataactaaacaacatacaatattgcattagaaataaaagagatngagaattcttactgatttagaccctaattgttctgggtgtagttcttctcccaaaagctctttgttctaaaatgtctaatgtctaattgagtagatntctcaatgggttgcatgtaatagaatttctacttatggggttaagtctttgataggtttaaagcatntgtgttatgcattttcttatgaagttgcttgtaaactcgaaaggtatagtggaaagaatcaagtgggtagttgatcaactgatgtagattctttacatcgaccaatataatatgtgncatctttctct

SEQ ID NO: 89386 - DNA, 77 bp, Glycine max
  unsure (1)..(77): unsure at all n locations
agagtgtctgggatagaagctacagatgatgcttaangaatgaagagaatgagagagatagagtgatgcaatcctac

SEQ ID NO: 89387 - DNA, 449 bp, Glycine max
  unsure (1)..(449): unsure at all n locations
gctaatgatatgtaatntcttatactgcttctctggaagaaaatatgcttatagacatagatattagaaatggttcactttatttactttatagtaaatgtaatcttattctattgttngagtaatacactnttaagtgaaacagaatttgtgtgtaaaactgacggatatgcngctgtttctaaagagaaggtatgcattccataataattataagtggtacaagaataatgtttcttccattntatctatgcaaagatttgttggttattgtttatcttcagctctttactaatactagtatatgctggttaattncaaggtatatacgtagaaagagcataaagagtgcaaaagacatatgtcgtttccctttccaacaagatgccaccatactttacttatngcacactgtgtacagaggcagagagaatctnccattacttact

SEQ ID NO: 89388 - DNA, 486 bp, Glycine max
  unsure (1)..(486): unsure at all n locations
aataacttatatgaaagaaaacataattaactcacttaaaatctattggttaaaaaacactctttttctgtttctttttaacgctttcaattagaaataaaaatagtctgtanaggacattctgaaggtaatagaaagatttaatttaagaaccacttatatcgtacagcatatattntatataacacnttttttatagcctattctttgtattctntatcacatcatacacctttttggagcttattcttgtgattactaaaatgtatgtgacaatgtgtaaaattaacactggacgccattcatacaaacacttagctttattatttntgagctgtacatcctaacccgtgtgaactgatgcaacattgtcgcttgcatgttggatataggtgtactttcagtagatntgggannatcaacatggtccattttcttgtcctctaccttcccttcttatgtccaaaaatcagctttactccttta

SEQ ID NO: 89389 - DNA, 230 bp, Glycine max
  unsure (1)..(230): unsure at all n locations
agtatatagaatggtgtatttagtgagtgttcaaactcccaagatcgtctgttcttattggtatagnaatagattttcaattgacttgatttgtctaattggtaatctagaaatcaaagtaaatttcattatgtatttgacagagtgagaattctgagcactccatanacttaccctgtaaagagtattatcgcatgtttggtttggcatccactattcatgttcatgtc

SEQ ID NO: 89390 - DNA, 374 bp, Glycine max
atcacttgtaatactgataaaattgttccgtgaaaaatccatgcaggcgcttgcgtacgtttcatacgttctgggggattcggaaatttaaccgtcttgtcgtcttgcgtcttcgctcaccagaagtctcgaatcgaactttcaattattctatgtcccttagggcctctttgtgtcggactttatttcttcattacttccgacccctttgacgtgcttagcattacttaagcatttctcgctatcaaaaatcaataatctccgtaaatgaaatcaaccgttggcatgccgacccgtggaaccaaagagtaaatatatatatatcaaatactttataaaaaatcaaaatcatcgcgttttcttggatcacttct

SEQ ID NO: 89391 - DNA, 441 bp, Glycine max
  unsure (1)..(441): unsure at all n locations
atgaagcagaagttattttttgtctgatgactattataaacaactattttatctattgtgaaagatgatattatctaaattctgatattcttcaaaaacttaaacttactaaanatatttaaaatggttctttttttcaaagaaaagttatttttttaatgaaaaaacaaacaagctcttagttgattatgaaataatnttttcaagttatgctatgatttagggtaaacacttgggatatggaatatgtgtctgccgctggatattattcttacgggggcagtgtaaacattatccacactatagttttgactgtgatggaatactttatactgaaaaataacggctaattcatcctgctattcaaatgcattatgcactactcattagttttttttttttctatgcaggcagttgatcttgacaaaactcaatgtacac

SEQ ID NO: 89392 - DNA, 324 bp, Glycine max
ttatccactgaggaacatgtacgtgtgctggctctgttcactctctctattatacggcaatatgcgcctctccataaatcctttatccaaaattaagtcattgtaaatttcgtcttaaataagtcacatatcttaattgtgcactctcttattcccctcagccttacgactacgaaaattctcctcctattttgactgaattgtcttagaacaacatcgtttgcctagcatcctccagtattttatgccgaaatagatgaccacccaatagctaccaatttcaatctttaacacaagttacttcacattcatacattcccactt

SEQ ID NO: 89393 - DNA, 265 bp, Glycine max
atctctcagtcacctgaggctgcagctttataacatgaactgacaaattcatattgattttaacttctttttatatcacacctccgataggcttctttatagatgtaatacataaatggatctgatagacctactactttatttatatgatgtcttgtgtccttctatcaatgtattgaagacacgtaattgaagtttgttaacaacttgtaagagctgggaataagcaattgtgacattagttatttattcttccctgatatct

SEQ ID NO: 89394 - DNA, 433 bp, Glycine max
  unsure (1)..(433): unsure at all n locations
ctctccgaaagggcccagttacgagcgttacataccctcaacgaccaatcgcactacaatccttgagaaggctttcaagttggaggtacctatcaagctacctccgccgcttccttctangccagggttagacagaactaaatactgcanataccatagtagctaaggtcagaacacaaaagactgntgtgccctgaaggacaaaatataagagctcatacaagctgggtatctagcctagttngttagaggtccgaaactaccaacaggagcaaacccgaggacccttgtgatgacattgaatcacaccataagaaaaaaataattctgcctgattgctaccacaacctgacaacatatcgatggatcatcacgacctttatagagccaagctatgagaatgcaagtgactcaccaatcacaggccgactac

SEQ ID NO: 89395 - DNA, 286 bp, Glycine max
  unsure (1)..(286): unsure at all n locations
gaagcccctaagagcattcanattgggtatagtcgtgctctccggagttcgaattaagaaactggcaagttgttgagcgacccggagtttccgtggcgagaataagtaattggtagttctaaccctatagttgggcctacgctttatgatattctctctgtgtagggcatttgtctttctgctattagatatgtaaaatacgatattttcgtatttttgtctgcgacttcaccctttctattcatctacatggttatttctggtgcgataaacggacagatccgac

SEQ ID NO: 89396 - DNA, 436 bp, Glycine max
  unsure (1)..(436): unsure at all n locations
cctagagtagctagagcttagctacacacacccctctaatagctaagctcactttcttgagatgagaagctagagcttagctacacacacccccctataatagctaagaacacctccatgccacaatacatgagaatacgaaaaagtccctactacaaagactactcanattaccttgaaatacaaggctaatatcctatactactagaatggccaaaatacaaggcccanaagaaggaanaacctattctaatatttacaaagaagagtggacccaaccttggcccatgggctcaaaaatctaccccgagggtcatgagaaccctanggccttcttttgcagctctagcctaatcctctgggagtattctatcanatacccttaaggggtaggatngcatcacaagatcaagtaaatataagataagaacatagt

SEQ ID NO: 89397 - DNA, 223 bp, Glycine max
  unsure (1)..(223): unsure at all n locations
cttaaatcgaaactaaccggttgaagatcaaaaactgatggcgaacaacgaagaaagacnaagaacgtttgcagaattgatcatggatacatcatgaagcgttatggaagcgccttggccttgattttccccttctttcttcttctnctcactaattntaagtgaaaattgattgccaaaggtgttggatcgcttctcctcagcccccaatgtccatttatag

SEQ ID NO: 89398 - DNA, 232 bp, Glycine max
  unsure (1)..(232): unsure at all n locations
gctagagcttgactacacacgcgtctgtttgactaagctgacctcctagagaagcttgcttgagaagatgtctagagaagctagagcttagctgcacccacctctgtaatagctaagctcaccttcttgaaaagagaagctagagcttagctacacacccggctatgtagctgagctcacccccatgacnaaatagatgataatacagtggacgtgcctcctacanagacta

SEQ ID NO: 89399 - DNA, 104 bp, Glycine max
gtgtgtgtcgaccgacacctgcatgttttcattactcggcaggaaagcatatcccacctcggaaaagacatgatcaccgatctgataacaaatatgttaccgac

SEQ ID NO: 89400 - DNA, 190 bp, Glycine max
agacgctcgtaattgaaaacagaagctctgagcaaattcatacgacaataacttgtagctcgggtgttcgattgtgttcccgagtatatcgagacgctcgtaattgaaaagggaagctctaataagaatcatacgacaataactctttactcggatgtccgattgagccacgcacattatcgagacgctc

SEQ ID NO: 89401 - DNA, 186 bp, Glycine max
  unsure (1)..(186): unsure at all n locations
tctttgagggacattgaaaatanantctttcgccacctgcaggatggaaatgcagcccacaattgataccccttatatcaacaacaaaagccaacttaaaagaaatgattattcgtaacactagagcccgtatagcacaacagaccctactaaatatcattgatgacacttgtttgcttcacaaaa

SEQ ID NO: 89402 - DNA, 315 bp, Glycine max
ataaaatattcttccttgagcgagatactatattaatctcactttttcccaataatagttactgaaagaacttgaactaaagaagatgtatccgcttcaagtctatttgaacatattaagagtttagtaaaaaaaaaaggcaacaactactatttttgcttatggaaatatgtactgaagctttgaagtaaattttgtactaagcgtgatggaagtgaaaaatttaaattaggttgtaattttattgtatgaatacaaagaccgtattgcttatatctgatatttataaaagggtttattgccgtgttttatttg

SEQ ID NO: 89403 - DNA, 468 bp, Glycine max
  unsure (1)..(468): unsure at all n locations
tacctccacgaggaaagacgtgcatcccaataagaatctcattgccatatccgagagcaagaaccctgaggtgaggttaaaaaatatattctgtaaattacaaatttataatattatgccccattcaagaggaaaaaaagaagaagacataaatgtctcattaagcccatatagatggattagccatgaacaagaaatatgaaaaagtaatgagaatataaatggagaacgaaacgattagagtagatactttgacataaatgacattttcatacatcaaacctagtgatatatacattangaaaagctctagcctatctttctacattcatgatcaatagagatatgaaacatgctaagaagttttttttcacaaagtttttttcaactatgtcaacatcacaagtanatctaaaatatatagctcaagcacaaaactctgcccaatgatactatgacatctatatt

SEQ ID NO: 89404 - DNA, 548 bp, Glycine max
  unsure (1)..(548): unsure at all n locations
cctatgcgccttattcaactttctataananaaacttgtacattcttgtaaagtatagaaaagctctcataacactttgagcatatngagagaaaagactacatgttgattgtatatccttcggtaagatgatcatagcaatagtcatcgtgcacaaaaaanaacaaattntttctgatttgtatagagccattagtggcttggtaagacacagaataactgagtgtatcaagcttggatagagctttatttgtagagctagaagtggcagcgcataatacttgtaataactagtgataagttagtggaacttggtgaatttcccagaatagatgtaatctcggggttgnacgaaccaatataattccccctgctttattgtgctatctctttcagntntatatctacctanggtngaattgatttatanacaaaactctatgttaaacattatttaatcgctaatgtgtttagacattgtcttggcttacaagtttttttcagacatacttattgttcaaaagacttaatttacacacatcaccatc

SEQ ID NO: 89405 - DNA, 415 bp, Glycine max
  unsure (1)..(415): unsure at all n locations
tgtatgctctaagcctatggtggcaattttttgctgcttgaggaacccatcagactntctaggaccttccactctgttatctcttaccgctgaaagtttatttcccatgaaaatatggtggggtcatatgacctccatatggatatgggctatgtgcacaatcagttgcgatgcaaccatgggaagtcaaaactgggatattgtgaaactaatatgctctaggtttgataaaacatttgtttctgtgcgcctatcgaatatagacaatctgcttatgtaaactgactggttgactgtctctatgtgacttcttgttgttcatgctgagatatatgtataacaataggctgtgtgtgactatggggtcatgattttacgaatcatgttctccaatacagattacaaatttgagaac

SEQ ID NO: 89406 - DNA, 267 bp, Glycine max
  unsure (1)..(267): unsure at all n locations
gtcattcacacctctattatgctctatgttgtaccctagcataattcaggagataatcttatgtgaggtagcaagttatgctaatgtatgctgtntggttagagtttaattagctcggagtggctagtatggaagtaagagtactacttgttctttatagcgtggagaagctaatgtaaatagcacttgtgcttgtatcatatcttagtgataaaatagtcgatatggtcggacaaatgataatggttgagcgataccatatatagc

SEQ ID NO: 89407 - DNA, 158 bp, Glycine max
  unsure (1)..(158): unsure at all n locations
aaataaaatctagattagaatagaatagatcaaatctagatgaaataatatccagatgagataaaatctggggtagataagatctggtagaataatattgtctactctcttcnagtccaagcccacatccggattcaagcccaatggcttataattct

SEQ ID NO: 89408 - DNA, 273 bp, Glycine max
  unsure (1)..(273): unsure at all n locations
agagatagtgaactgtgagttatgtctcacaagactctcattcatcacagttacaacaagtgttacacatgcttctatttatagactaggtagcttccttgagaagctttcttgagataacttcctagagacacttctttgagaaaactttctttgagagctagagcttatctacacacacgcatctaanaactaagctcacctgcttgagaagctagagcttatctacacacccctactatagctaagcttacccncatgacanaatacatg

SEQ ID NO: 89409 - DNA, 403 bp, Glycine max
  unsure (1)..(403): unsure at all n locations
atctctgagtcacctgcggcatgcaagctntanatcaccagatcacatgtacatctgaatgttgtgatagtgggcatattgactagagacctttcacaggcaatctttaaaagactgatgattggattggttactgcttctgaatgacactggccaaggtcttaatttgaaagcaccaccaaaaagaccatcttgatgggaagcttgttccttgaaatatcatagtttttccacttagtaattttaaaagaatttaaaaataaatgacatttctattgttttgaaaagtatatgcttggaatgggtatttatatggctgctttgactgcctcacatactaaaaaacctttactggttgaggtttactcgttaccgggggagatgcgtaagcctgcttacatat

SEQ ID NO: 89410 - DNA, 469 bp, Glycine max
  unsure (1)..(469): unsure at all n locations
atctacatgggtgaagcattctcacaaacagcgagatcctctctatgatngtatctagtgagagagacctgacttaccagtgtgtggtatgtcttgtcatgtactcctaggcacccgatgaggtttntcactgacatggtaccacacttcatatangattaagtcttagtgtatctgttgcataacgcatgtgtaatgatcattgtgantcgctatgtaatggtgggtaatgaatttgcgtgagtgtgagatgctgtgttgtacttgagatgtgttgatctaaacacatgaataatgtgaaggtgtgtaatatgattctgtgatacatcatatgacaagtgatgttctcaataagtggtacattaagtgaattgtgctagttgagttactatacttatatatatatatgcgccttcattatctctacatattagaatgtgaacacactcctgtggtgttatgttgatct

SEQ ID NO: 89411 - DNA, 239 bp, Glycine max
  unsure (1)..(239): unsure at all n locations
gctcttgcgtagccgctcttggtgctcagattataccaaatacaaatctctcttattactagctatcttgaatgctttagttcctgaatgtacaacattcaaattgttgctcgctcccctctttgtgttatgcaaaaaatgaaatcaatatcaaacanaacatgcatacaattgtcatcgttattgctacttgaaccataatgaataccatctaaagaagtacttcaaaacgtttattt

SEQ ID NO: 89412 - DNA, 535 bp, Glycine max
  unsure (1)..(535): unsure at all n locations
ctcagctgacactgtcgtacatgtgcagctcaccttccattggcacagtcacttccttcccaagagggaaagcctgaagatggatcttntgagctntctttgatattgacaagtgcttgcctctcttcttcattgcagccaagagaggagtagcaactggaagtggaagataacaactgaaatgcacttagaaggataacanagcttaagtaggttgagctttgcatgtctgctgctggtgtatctaaatcanannagttgctgcctatgatgaatattgtaatatgatgatatggcctntctgagctacanaggaccagtanagtgngagatatatangcatcactnagttttcaataattctttnttagtgaaaaagtttatcctttcactcatannacattttactctntnntctntaattttgttcttattctctcttctttctgcaacacctaacaggataagtgaacaacaacattnttttcttgttaaatcgcaatctttaatcaagaatacaatatcgggtattata

SEQ ID NO: 89413 - DNA, 268 bp, Glycine max
  unsure (1)..(268): unsure at all n locations
gatacttgagtcacctgcggcatgcaagcttntangaccacnacacgacaagaatgggtgtaccttactttattacatggtaaatttgtgttcgtaatatgttacattggattatgatgtaaacactgttttatgttatgttaacctaattttttttgtagtgttggatctatgagcatcttccgagtgagcatcagtgtgtcaccgatgatgcgtatgaggagacgtccncttgtngcctccggtggctgacgacgaaggctcatat

SEQ ID NO: 89414 - DNA, 217 bp, Glycine max
tactaaatacacccccctgcttgtgtttatgcttcttttttcgtaaaaggacggaaacttacgaatttcgtaacgataccttgtttctctccgtaatgttacggaaccttgcggatcacataatcatgcctctctttgactaacggaatggtacggaacctcactaattgtgcaacgatgcttccatttgatctccagtgtgtcacggaaccttacg

SEQ ID NO: 89415 - DNA, 354 bp, Glycine max
  unsure (1)..(354): unsure at all n locations
agcacgagcgcagcttaaaaagatattgaattgggttttttgnggacacacagacgaagtctctccctcggaaaaggtactctggtgaatttggattataacacaacctttatgtatattacggtatttatttaaaaagttacttcagataaagaagtcatatgaaaaattaaatactgcaatctgtgcaagccaaaaaatagtttgaaaattcacagggcgttgattatccgatgaacaaattcaaagtaataaataataagtgagtgacacatattgcttatctgttaaaaaagggtaagtactgtaatcaatagcaagctaatctggacactggcttgggaataaaggtat

SEQ ID NO: 89416 - DNA, 434 bp, Glycine max
ccttaatgtatgctaaagcttgacacccaaatcattattattagctggttttaaggaaagttattggttagctgtagactaccaatatttagttttctctttaaatttgtactaaaactatatactcactgattcattatagatactccacgaatttagaaatattgatagttattaattgagcatatatgattttaatcagaggtcaattttcagatagtgagataaagtcaatgcttggcaccaggaacctattttcggcatctactatttattgctctacctcctcttggctgaaaataatttaactataaatctgtaatagtttagacaaataaattgacttagcatatgtaaattgaaaaatgttaggatttatcaatttttcctattactagtatacaaaatattgttaaaacataaataagatattt

SEQ ID NO: 89417 - DNA, 220 bp, Glycine max
tataaccaccattccagattctaacctttgagacattagttggcttcaaatccttgaatagagtcttatcatatgtcatgtggtttgtcaaccactatcaatcaaccaacatttagatctactcctcattgaataacatgttgtagcaaaaatataatcttctttcttctgctcacaacttaagcatcactttatgctgctgaaattgttctacaaatat

SEQ ID NO: 89418 - DNA, 320 bp, Glycine max
  unsure (1)..(320): unsure at all n locations
gcagcttgtactgngtaatcgataccaaaaccatgtaatcgattatacatagctttttatgaaaagatatgactcttcacaattgantttaaatntcaacgttcagatacactggtaatggattggcaatatcttgtaatcaattacaccatttngaaatcaattggaacgttgcanattctagtgaaaagctttgaaatcaaactttgccactggtaatcgattaccagcttcctgtaacttagaaaaatttggagaaaaactctctttgaaaataaaactgcgctatgtttggtttctgaaaaactattcaatacttc

SEQ ID NO: 89419 - DNA, 408 bp, Glycine max
  unsure (1)..(408): unsure at all n locations
taacagcacctttgtcaatgattntcttcatgcctcttaagtgcagatgtccaaatctttgatgccatantttgacttcatcttctttggaggatagacatgtggaggagtaactgtgttcttgaggtgccatangtaaacagtgtcctttgatctgctgccttcattagaactcactcttctcatttgcaccaagcattctgactttgtgaaagttacattgaatccttcatcacacaactgactgatgctgatcaagtttgcagtcagtcccttcaccagcagtactttgtcagactangaagtcatcatgactagctttccattcagtgatctttcttagagcatcntcaatgtacatactagtgagcanggtcaatgtcccaagaatcttaactctgcatgtgt

SEQ ID NO: 89420 - DNA, 424 bp, Glycine max
  unsure (1)..(424): unsure at all n locations
agctngctgtgcangccttataatcttctttataagactgtgtatgcttgtctgcangtctcacaggtctataacaactacagngtaactgaaaacagtgggaatataagtaaccaattcctaacacggattatttaatgtactttatctccctgctgggtacgtgtgggtatttaccagaagtttgattgataaanctacccatcgattttgtgaagcatatactcttgggagggacagtcggacatttaatacagatactcattcattcatgaagggataccaaaatttctgattcctgctaactattttaatcataaaaagctcatatatccctgagaaactcgacctccacctttacacgaatataaatcatatgctacaatctcttcttcttctctacttttctttcatcatttttcta

SEQ ID NO: 89421 - DNA, 475 bp, Glycine max
  unsure (1)..(475): unsure at all n locations
agctngatgtatgctaagcctcgcatctcatgtttatcgcatgctgcataaagaatnttggngttgcagaaagcgctaagcaccgctgctgctctaacgccccaatgcttactggaagtacaacttcaattgggcttagcacgaagctaggctaagcgctagtattntaaactcagatgtcacgttggcacgctaagcgcagctgcgcactaagcgcgccatacgtaatttagttntctattaanagtaaaggcagaggcacttaggtggctaccttgggcacctaacctctgcactctctcatcctagagcattctttgttctatggtgtgctatatgaacctctgcatcttggttcttacactctgcatacacaatccaagtaagctcttgattcattttgctttgattcattctcaaccttggataatgattatgtttctagtagtatgtgtaggtagttactagtttaggg

SEQ ID NO: 89422 - DNA, 444 bp, Glycine max
  unsure (1)..(444): unsure at all n locations
ctcaacagaagaatgacttttcccctctctgatcaaaaagtcaccacctagaatgtnggtgngttgctttatatgggtctaatccactggataaggtccactangtaagtgtctaattaaacctaactcnctaattaagcttataacacttaatctagtttaactcacttttactattaatctacccctactaagtcttttatttaataatacttttaatgagtttttttacattaccatattcataatgagttgatcaagtcatccctcctatnactctatagctatggtgacttttgtgactntctatagttcactaaaatgtgtatnntctcattttcctctactcctaattatctatttctcataataatacttctactaactatcatgtatattctaatgaatgttctaattctatattgactttggatatacaatttt

SEQ ID NO: 89423 - DNA, 499 bp, Glycine max
  unsure (1)..(499): unsure at all n locations
tctgtcataaataactctagcagttacttatgaaatgctactaanagagtgtaataacaatatttggaatatacagctggcacaatctggatactcttgatatagatagtaatgacacatgtacctatagacatgggttggtaagattgatnacgaacttcatatcaactatagtgcgagcaatagaagtanggttcattcattgatagaataattagcctcaacttctttagaagcatatcttgtgttaatattaacanagtaacgtacgttacatgatgaatacatgacagccatatttgttcttcttgttacatgcggaactgataccagatttggctgatcatatgaaaattgacttaataaataaactacgtataanctcatcaggtgtgatcgataggaattgatataagtatgtgtggcgaaaaagtatattcatgattgtaaacattacctgccttcttaagcatactatgtatctataagtgtcaaatat

SEQ ID NO: 89424 - DNA, 487 bp, Glycine max
  unsure (1)..(487): unsure at all n locations
gcttgattcaacctcaatgtgttgcattctatcagattgngtctaancataaaaaattaaatatgctttcgggttctctatatataccagcctttactctttacatttgatcctgtgatttccaaatattgtgtgtttttacccttgctattactcttcattacaaaaatgaaaggcttcacttttgaataggtatttaactaaatattactcctctgaaaaggtactttgatggaccatttaataagtgatctctgaatatttttttattaatgataggattaattggcccacacatttatatcatatatctaatataatggattatctnctctgcctctaatcctattcttcttaacccttttaattatcggaagttatatgtcatttgaaactcatcattttatcaagagattagttgtactcttttttcanatcacaagagacacaagctcatttcaaacaaacttatgaatataataataat

SEQ ID NO: 89425 - DNA, 178 bp, Glycine max
  unsure (1)..(178): unsure at all n locations
tcaaacgtatcaagactattataggtggtggttgaatacctcacccactcaagtgtatcacacaattatggcttttctctaatgaaacactcttgccttttaccactctatattccctngagttcttaagcaattcaagagattatggccacaacatagaacaattcaccaatatgtg

SEQ ID NO: 89426 - DNA, 268 bp, Glycine max
  unsure (1)..(268): unsure at all n locations
tgtgtagctaagctctatcttctcaaagaatatttctcatagaagaatctcacggaagtttctcaagaaagcttctcaaggaagctacctactctataaatagaaacatgtgtaacacttgttgtaacttttatgaatgagagccttgtgagacacaactcanagttcaacttctctcccttntntcttacttcaatatcatgctccccctctctctgtctctccctctatcttttcctccattgaagcatcctctccaagcttctta

SEQ ID NO: 89427 - DNA, 440 bp, Glycine max
  unsure (1)..(440): unsure at all n locations
cactatatactaatatgatgttcctagtacattggaattggtacgaccatgcccttcttgattccagctgggaatatggcgagtggaggaacgccccggcatttacgcaacgagcataatgtaaacctttacggtttataagctctatagctgggcctatgctttagatttttttttccttttgtaaagcttgtgtctttggtctttaatttataatacaaagacccttcttaatctggtctacgtctctacccactctcattcatttgcatggttacttctttttctgaacggcagatccgatgacgagtccccngatgtactaatacctgggaccgcctatcgacttcancangaaatgaataaacggaaatgaaggaaacaggatgtggacttccccataatagaagaatggcgccataggaccaaaatgggctcat

SEQ ID NO: 89428 - DNA, 257 bp, Glycine max
  unsure (1)..(257): unsure at all n locations
cttaagcacctgngctgcagctagcaccactctgggatangcctangatgcatatctgaatattacacangnntctcccctcttctagcactacatgggtcttcaaaaatgtgtngaaggtatcctcatcaaacttcactaaatgacctctcaccctcacctgcttangtgaattatcttcgaggtcatagagggtggcataaaacctcttcacaatgttgatgtctatactgttgccaaaaaatcactcagctttt

SEQ ID NO: 89429 - DNA, 277 bp, Glycine max
  unsure (1)..(277): unsure at all n locations
acatgttctctcttggcatcacatgaaaccccatgccatgaacaaacagaagctgaagaaaagttgtagacctgngaggatgctaaatccatcttcttcaagaactctgacacaaagaaatcatcagtgtttgtgtgctgagatgccaagtgcttcaagaagagtgtcagaactagaacagaaccaaacacttccaaacccatcagtgagtgactgagtgatatcanaaactgagagaaatggtgcanaaaactatacccaccttgaaaatgctctt

SEQ ID NO: 89430 - DNA, 459 bp, Glycine max
  unsure (1)..(459): unsure at all n locations
ttactggcatttattntcctcatttagaatggaacactatacttgagaaatctaagaatattttgactcgggaatagggataatatggtgtcttgacagtacgcacaaggtctctctatattactgtattgcattctcaaattagcttattgtgaggcaacaatctctcattttctgctctctataaaagtatctggaagataatgattatttccttgaattaaagctaaccaagcatgcactaatgctagacttaaataatattacaatgattcatcatattacacacctaattagttccaagatgctccaattggtatatcgatggttaaaacggattgggatgaccctgaccaggaaacatgatcaaggtcatggctatatggtaaaggtggtgactgcagaataataatatatattttagatattatatttagaataaaatataattattataat

SEQ ID NO: 89431 - DNA, 246 bp, Glycine max
  unsure (1)..(246): unsure at all n locations
gttaggtagaaagataccttggatatgcatgtatgtagcanaaatacttcacaaaatatatatatatgtatggttagggtagcaagataccctagatatgcctgtatatagccaaaatatctcaccaaacgtatatatgtatgtttaggtagcaagatacctttgacacacatgtatatagcanaatacctcacaaaaatatacgtatggttaggtagcaaaatacctcattgaaaaatgagagcg

SEQ ID NO: 89432 - DNA, 472 bp, Glycine max
  unsure (1)..(472): unsure at all n locations
tgcaagcttgaatttagtcaaaaaactcctcgaacatattctaatattcatgcaccntgtacattcaaaaccagaaacttagattcctatgcatgagtcatcctgttggcactntagtctagcttctacaaactacccacacactcacaatgcgcacaatttgtttcgcaaactaagttccacaatatcatgcgcanatgccattgaggcatttcaccgaacacttggtaggcgcatgtgtaagcatgaaaatcaagggtatgggggcaatgtggcatgcccattatctcaaaatgaccctatgcctaaggcacacctacaaccctcaattaacaaaacaagcacaattaaggataatcctcacgttgagcaaatcatgcactatagcaccaaaatataatggaagccaagagcccagatgatgacttactgtggaatgatatgaacaaatgaatcaaaccaaaatgggact

SEQ ID NO: 89433 - DNA, 216 bp, Glycine max
  unsure (1)..(216): unsure at all n locations
ctaagcttatttttagcctctgttcctaatcttgttggtctagttggtagcttcatcattatcattcatgtatatgtggtctatgggtacatccatncnncnctnnttgttatttctagccgaattatagaaatctattagtgtaatggtattgcatttatgctcaccctctatatgtcagatcactaattgagaatctgaaatacacttaatcac

SEQ ID NO: 89434 - DNA, 298 bp, Glycine max
  unsure (1)..(298): unsure at all n locations
ccgcgatcttaagcacgcgctgcgctgngcctgatttttataattgattctttgttcttgggtctgattgcagcagaatggagaaggagaaagatgaatggagacgccactttaagttgaagatgagtctataaaaagctcaccaccataagatgccatggataatagctttaaagtataagaagactaatgaatggacatgaaaagaagagcacgaaatttaatgcctctaaagaagtctgaactgtgaaggttaattctcaaaatgatcaaagttcataaatatgcacacccatga

SEQ ID NO: 89435 - DNA, 231 bp, Glycine max
  unsure (1)..(231): unsure at all n locations
ttcaggcactcattttatatccttcatgctggccctatacatataaaacagttccacaacccatagctcacaaaaccatgctcatatctcgttgaggcatttaccgancacttggtgggcgcactgttatgcacgaatatcaagagaatggggacaatgtggcatgcgccatcacttcaaaatacaccctatgccaaggccatcccttacaacccctcaatcctaacaaaa

SEQ ID NO: 89436 - DNA, 370 bp, Glycine max
  unsure (1)..(370): unsure at all n locations
tctctttctttctctcgagtncttntcttcttctagtttctctctctgaactcacgttatctctctctctgcgagntccttcgagcttccaaggtcacgcgtatcgcggaagttccctatccctcgaaagctatgtatcggtgcacttacttgtatggagtgaacaaggataccaatatggaagcaaagcacacaaatggtggcttgggggctgcanaatcatgcactgtcgtgangctccacgtttttgaatgctgaggggaagttatggtgtgaagaaaagctcacacccgctgcccttttttatgtttcatgtagagggtgctcaccccggcaagctaactctgnttaattttttgggaaaattttt

SEQ ID NO: 89437 - DNA, 399 bp, Glycine max
attgaatcgggtaatatatcgagacgctcaatattgagactagaagctctgagcaaattgaaatgacaataactttatacacggatgtccggttgagtcccgtaatatatcgagacgcttcaatatgaatacggaaactcttagaaaattcaaacaacaataacttcttactcggatgctcgacagagtgtcgtaattatcgagagatgctccaattgacacaaatcttcgatcaaattaaacgactaaactctttccccgattctgatgagtccgtatatattgagagctcaaagtagatccgagctctgaaaattaattgacaatacttatcacgatgtcagtgagcctgtatattggaacctgcaatgaaacggcctcgtagaattcaacacatac

SEQ ID NO: 89438 - DNA, 364 bp, Glycine max
  unsure (1)..(364): unsure at all n locations
tatatcgagacgctccanatngagaatggaaactcgtagcacattcgaacgacaataactntttactcggatgtccgatcgagccncgtaatatatctacatggtccaaattgagaacggaagcttgtacacaattcanacgactataactnttcactcagatgtccgatggagtcccgtaatatatcgagatgctccaaattgataacggtagctcatagcanattcaaacgacaatatacttttacttggatgtctgattgagtcccgtatatatcgaggactcgaaatcgaaacggaagttcgacacatcaaacgacataccttttactcgaatgtcgatgtagccatatatataagatgc

SEQ ID NO: 89439 - DNA, 359 bp, Glycine max
  unsure (1)..(359): unsure at all n locations
acatctctttctacctctgaccgatcctgtgcagctctgccgccgctttggtttattctcttctcccgcttcacatgttccgtgcggctctgtcgccgctcctgcttcttatatgtgtatgatgctctaatctaattttcattagagctttcattctatcataattctatatgtattgctcatacatactacattcttactttctttctcgccgcttgacctacttcgctgatctctggcattatagcctgatggggaagacgaatatngtgcgtagggtatatgtaactgattaatggactgaactatgacattatatttcactatgacatactctaattatcagatgcgttgacata

SEQ ID NO: 89440 - DNA, 261 bp, Glycine max
  unsure (1)..(261): unsure at all n locations
ataactcaatatttttgtcctaccaaaccggtgctggctntatacaaatcaaatagaaattggtgtttgattgcacaatgaataattctcaatcattntacagacgagtatacaatctcagcccttaatcttttctcttaagatngtttaagagcttctaaagaactttacataaatatattgaaaagtttttntacagaaagaaagcgaataagagcgcgttagttcctcgttcatgtcttcaaaacttctaaatattat

SEQ ID NO: 89441 - DNA, 343 bp, Glycine max
  unsure (1)..(343): unsure at all n locations
cttcactcatgctttttcttttgagtttgactctagcgtagtcagcatcatagtaacttgataacctacaatcattcccaattttgaaacaatgaccaagaataggagttccaactaaatattngaaaatccctttaacaatagataaatgaacttcccttggttcctttgaaatcttgcacactaacaaacactaaacatcatgtcaagtctagacaccattagatatagtagaaacccaatcattgctctatattangttccatccaccttttttgattccttgccagtccaagatattttggtggatgcatgggtggcttcatttcttttgcataatcat

SEQ ID NO: 89442 - DNA, 322 bp, Glycine max
  unsure (1)..(322): unsure at all n locations
atctaagagaaagcttatagaatagaaaggaagatccccaatcatagagtgggagaaagcataaagaaaagatagaaattcccaattatagaatgggagaaagtaatataaaaagggaagaagaagaacgataganagctcctgatcggggatcgaagganaaacagaaaaaatgtgcagagaggtctctggaccggacaatatctgaacaatacagaattgtcaccaaatgaacaaaaaaagaaggagaggaaaccacgacctanaatggtcttctccctttgattaccaaccaaaatcccgtgcgctagcgacttttttt

SEQ ID NO: 89443 - DNA, 453 bp, Glycine max
  unsure (1)..(453): unsure at all n locations
gctacaagatgtataagtatgatatgaagttttttgacttaatgtgctagatattagctcatctcacctaacatgcactcntttactatctataacataactnatactgtgtacaccacatatataataaaatatatataacagatagtcacaccttcaacatgtgccatgatgtggtaggaacacacactangacgagattgtggagaaaagctngtggcaatgatgtcaaaatatctataaaanagtgttgttaagtttagctnttgttattgtctctgcaatacatagatgtttcatgtttcacatggaaattgtcgataaattaaaattcagttgatacatagattatntattttccaaacttagtgacagatatgagaataatctatggaacctacctatgcgtgagaactataaacacgtgccatacctaattctcattcatccatg

SEQ ID NO: 89444 - DNA, 467 bp, Glycine max
  unsure (1)..(467): unsure at all n locations
gataagatataaanttaaaaaaaatttacatgagctngctaccaccatgcatactatatctcagtatgcaacanagatgtatataccaagagcaacattcttcagagcatgtccaagtccaagtttgagtgatggaaacacaacttatttttcaagaggaatctaataatttaatcaaacacatcataaatactttttcattagcttcgatttcatcaatcgaaataagttacaactaagtaattgaacaaatttaacatatcactgaatcgcacagatcaaatgttaggttgcttatgtgtgtttgaacattctcaacattattaggaatgccaaaacaaaaaacattaagcaaagctagagtaggtattagaaagaagcatgctggagattgctatcaaatggcctcattaattaaatccagcctcaccatcaacatatgacgtanagtttataacatgggatac

SEQ ID NO: 89445 - DNA, 487 bp, Glycine max
  unsure (1)..(487): unsure at all n locations
agcttcaattaccttcacagtctaggatacatccagtttntcatgtctncttttgtgaaaaggctatnggtgattattctgtgcaaggggatctacccacagagctagaggttactgatatnggatgaatttatcctgagaaggcattggttcacgcactatcactcaaggaggagtatctgtgcctcaaagtcttgttcagtggaagcacaagtccagtgatgatgtgacttgggaagatgatgcgttcattagaggacagtttccagattttaaccttgaggacaaggttgttgctaaggaggatggaattgatagaaaccttagtaaggaagtgggccttgatgagaatgtaataggcccaaggtttggagagtgtatacgaggaagaatgganaagggaaaaagaatgatgaggtggcagaggatacatcanaatagtactatataagtagtagtattgagcagtagtgggcaggaaaagaat

SEQ ID NO: 89446 - DNA, 449 bp, Glycine max
  unsure (1)..(449): unsure at all n locations
ctcagctgtggatatggggacccataatgtggactatgtggcggtctggcgatggtgcacaacaagttnttccacatccacaatgcgcgcataaacccaccatcccctgtagcccacctccaactgagctcacgtacttccatgtaggccatatcctcgtttctctcaacaccgggtccccatcaatccttccaagctttcccaacatcaaaggaataccacatttcaacagcacatactatcacagccangaaaacagagcaaaggcagaaaactctgccaaaacaccaaccaaaatcacagcttttctcacttaaagaccccagtaacaattccttcgttccaattcgttaaccggtggatcgactccaaatttttactggaagtctctagtacataagcctacantttgaccggtgggatctactagcanacatccagaactcatt

SEQ ID NO: 89447 - DNA, 429 bp, Glycine max
agcctgaccttgaagctggcacaaactacgaatacttttgtttttgaattctgaacatgcccttttccttgtatagcacgtaaaagtaaccatctaggagaagctgggagccaccacattccaaggtccatgagtattggcataggactactaactccatacatataccggcacccaactacaggttcaacgaacaagcctccaattccatatgctgcctggataaatgatatgtagtcacttttcgtaatacccagacgttcataactgaaagcaattagatagaatattatctcagaggaggctatacagtgttagaaggaaaaattcaaaaaatttattcacttatggcatttatagaacacacaagacaatttgaggtcatcccagactgaagaacttacaaccatcccaagtactatatagaac

SEQ ID NO: 89448 - DNA, 477 bp, Glycine max
  unsure (1)..(477): unsure at all n locations
gcaacaccacccattgaaaatgattgcttaatcattggtgaaatccaatgggaacttatgcctggtggcatgcttgttcaaaaaaggaagagtaaccaaagtgcaggggagggaatgatcacaattatagtgtcaactatgtcacaatctcaagaaatttctattgaggccacatcaacttttggtaagtctaccacacccctttctcatagtcactctggaattntggctatagattcggttggagaccatccattgatttggccaaaatagtatgtaagtgaaggatatccttccctctacaaaataggtctaaatctaaatcctaagcaagagtatantttagtaatgaaaagtgctatgaagcaagacactcttcctaacacatattctttcattcgttgaaatttattaaaaattataaaataagaactattaaatgagataccagatccacanaaatttattaattttaat

SEQ ID NO: 89449 - DNA, 394 bp, Glycine max
  unsure (1)..(394): unsure at all n locations
tgcagcttcattatttatgtcccgtagggccaattgtgtttggcattttattctcggttggttactttttataccccctggtgacgtgcttaagccattttacttaagtcatttctcgctaaacttaaaaataaaataaatttccaccgaacgtttgaagtgtattatccattaacttcggttaaaataaattccgaccgttcggtcgtgccgtaaccacgttggatatcaaaaagagggtaaaaataatataataatcaaaaagacatcttttagtaaaataaagcggaaaatcaatcggacgttntctctntgggatttctcattcttaatcgaatggattaataactaaagtgaaactaaaggctaaaatcaattcgcctagtcaagctcg

SEQ ID NO: 89450 - DNA, 478 bp, Glycine max
  unsure (1)..(478): unsure at all n locations
gagcttcaagtatgtgctccataaacctccatttatctttngctntaccatctcttccattggtgtttcttcatttntctccatctatttcctcaaatgtcttgtgataaatgtgtttaacatgattctttagagtttccaccgattaaacttgctataaaagctagatttgattttctatggntcaaatttcttgttcttgttcttgaactatgaatttgtgttgagtttaaggttcctttgagttttgtcttgttattttttgtggctgaaacctaagccataaaattcttacaaaaacattaaagtagaagaaaacctcaaaaatctagagtgacttgttaacctattgtangtttgtcatagaagtcatgtctggtcatgaaacttgtcacataagatttcttatgttgnngctgaatttatttttcttgtttctttgtctaactcattnnttcatgagtgtatgacattcttt

SEQ ID NO: 89451 - DNA, 390 bp, Glycine max
  unsure (1)..(390): unsure at all n locations
acaaacttaatggctgagtgtaactganattgtggcaaccaacagtcacccccaacagccaacaagtcagccaccatttggtctcccaaaaggctgatgcctaggttgccaattgggcccttattacaacttgaactaaagcccttttagttgattaacccaaaacatanttttggtcagccaactttacaaggattgtgccattatttagacaaactaaacactctcaaaatgaaacaaagtggtgtcatttagtcctcctccatttgggccatgatacaactcacaaccttggactnttctccttgaaacttgggcttgtattcaaatagtatggacaacacttgttgaagagctctgagncaaatcaaacgacaataaattcttact

SEQ ID NO: 89452 - DNA, 376 bp, Glycine max
atttttttgtcctgacctacggaagtaaaacaaaacttaatgactgagtgtactgaaattgggaaccaaaagtcacccacaacagccaacaagtcagccaccatttggtctcccaacatgctgatgcctaggttgcccattgggcccttattacaacttgaactaaacctaactaaagcccctctttagtgattaacccaaaacatacttttggtcagccaactttacaaggattgggccattatttagacaaactaaacactctaaaattgagacaaggtggtgtcatttagtcctcctccacttgggccatgatacaactcacaaccttggacttttttcttgaaacttgagcttgtattcaatagtatggaca

SEQ ID NO: 89453 - DNA, 466 bp, Glycine max
  unsure (1)..(466): unsure at all n locations
gatggacacagttttgaactgttatccgcggaagccctgcggcagaaatagtggattcaagccacaacagaaggagctgatcctgttgctcccaaagcaaaaactcaacaccagcatcacgatcggcaatggtgagatgttcaggcggaatttgcagttgagtgagaagatgaanaagatgatgtcctttgagaacaggttcaacctgctgacaccaaaggagataattggaattggtaaggttttgtgaaatggagtgcaaaaactccttcgcagtggtaaccgccgaagaacctatcagagagccaccgttccctggcggaggaggaggaggaggagcanaancggaagccatgaagatcgaanacagagctctatgataccatatagaaatctgagagagagagagaaaatatcacttacagaatcgaggtgaagtgaagtattattcaacccaatgagaaaa

SEQ ID NO: 89454 - DNA, 427 bp, Glycine max
  unsure (1)..(427): unsure at all n locations
ctactatcctgtngctggcagatngagcttgacatttatgtggtcgaatggaagtggattgtaacgctaagggagtgacattgattgaagcagaaaccacaaacacatttgctgattatggagactntactacaccttcagagtccacagatgaacttgttccaaaaattgattctactcaacctatagaggagactccaatactggtagtgcaattaacaagggttccgtggtggtgatgaaggccttgccgttggatttggtatgtttcattctttgactgatgcaaccggcatcattcacttcatgaacagatgggcaaagctggctataggggaagaactaaaccctaatgaaattccgtttctcgatcgaacaatactccaattattttcatcatcatcgcaacacgtggatcaaccggagt

SEQ ID NO: 89455 - DNA, 481 bp, Glycine max
  unsure (1)..(481): unsure at all n locations
gcttagactagaatatacttactctggatacattctgtcagtntaaagatgcaggggggttcgaggccttggtctctgggaagactactgaatggcaaaagattgatgtgaatgaaaggataactggtcttgagcggctcaatccaacacctcgccccacaacgtgagttactgagagtgcccttgtctatgcttctgtataagaatgttcatgcaatttatgctacaggtcacccttcttggaggggcgatggaactntgagtggtttggttctggaagtccaggcttgtttgctgctaggtttatatttgagtgagttttctctntgaacatttgctnttatcttgtcaattattgtgcctnctcttgggactntagattgaccccttntaattataaagaatantaaagtttttatatttgcaataaaattgggttgatctcattggtgagtaacaatgctcttatgtactttatatc

SEQ ID NO: 89456 - DNA, 334 bp, Glycine max
  unsure (1)..(334): unsure at all n locations
taaatttcaagattcagccaaatcttgagggcccccactgactctgtaagatgaatagtcctgaaaaatcagccgttagtaatatctcaaagtagccctaacttattgtcataactggcattanatcccttacttatgataataatggcanatcagaccatgtcatnacctttgcatgtctgacatgaaattccacccattctgtatgtaatccccaagatcttcatgcaacanagttaagaacaatttccaattgtctttgttctccacatccaccacaacataagcaataacaaagatggtggtattggcatcaaccccaacaacagagagc

SEQ ID NO: 89457 - DNA, 434 bp, Glycine max
  unsure (1)..(434): unsure at all n locations
ggatcttacacgcgctcactttacgatgctggcagttcatttctcatattagtgttatcaataatttgtatagaattatttattctttgttaattttcgtttatttattttattccactgttcgtaatgttttatacctttttgcttgtcttgacaatgtatgcaaaccangtcccaaaacctagaatcattagaagtacctgagatagaaaggcttgcccgtagactgccagtactgccctanggtgtcacctttgacttcaaacataggttcctacgaatgatagaaagcaacaagttcaatggagcttcccatggaccccatgatgcacctgaggagattcttaaggttctatgacatgatcaaacaacccaacattatgaaggaatcaaaaggctggcttctttcctttctttctaaatgagagagcatg

SEQ ID NO: 89458 - DNA, 485 bp, Glycine max
  unsure (1)..(485): unsure at all n locations
agctcatataacttagcataagctcatattagcttatggagaagcttattttattgttttctcctataagtgctattggagaagagtacccaacaggcccatggtccatacaactttttaaactgtgtcaagtttcaacattattcaacaactgnttactactgtcaatcttgcattcatggttgctaattataataatgtcttctatagtattttaataatagcttctatagaatgctaccatggatgctaattatcttgccatgtcatatatcgtgcttcagttgtggcacacactctcaaagactatggctgacgatgctcctcgaaatttgcaatacaacagcttgacatgattttatttctcagctatggtggaggacctctctacaaccatagataattaaagtgttagccaatttaacctaaaaatggaattacattactctgaagcggctgataaaatctgtattcctttctgatct

SEQ ID NO: 89459 - DNA, 491 bp, Glycine max
  unsure (1)..(491): unsure at all n locations
agcttcaacanaaggccaaactcnctttcataatctgatttcaggcttaaataggtggctntgttcgtgctcatgcgcttagcgcacttcagaaccgcttagcgcgtattagtgaatttcggcttagcgcgactnttctcgctcagcggattgaccgaagcggtgcacttagcgggatggcccttcgctcagggaacaagcacaactcatccttcttccagattcttcctcgcgcttagccgaggatggttgcgctcaagggatagctcgctaagccagtagattggcttagcgagagagtgaaaatcagcacttcaaaacttgcctaattatcttngaaatgagagaaaatgattattaaatacacaaaatcgaagtactacgtatntattacctatctttaacaaanactaattacaacactacaaaataaccatgaattggaggagtttgatacaatttacacaagntttatacataanagttagtcg

SEQ ID NO: 89460 - DNA, 435 bp, Glycine max
  unsure (1)..(435): unsure at all n locations
tgctctcgccagatatctcaatgaatgtctatattttaattacatacatgaggcaaacatgcagctccatgtttgttctctacttatttccataccactttttggggatttcttcttatggcaaggaagacagcatgctagagcagattagatcttctgtcagtcttcctttccattcaattttgggtagcagtgaagagtcagaacctacagtagaaactcatacctgancatctgaaatgttagagtcacagagacctgtttctgatgtagtttctgtctctcctctagatgagattataatgctagaatcaggcacgggtgcagagaatatggagcagaataacctacatagctccagtgagcacagggagaaagattctgttgtgtccatttctggaaaagaggatgaagatgagtcagtatcactgttgg

SEQ ID NO: 89461 - DNA, 351 bp, Glycine max
  unsure (1)..(351): unsure at all n locations
ttttctgcatgtatctcctaacatgtcttgtgctaaatgttgttaacatgattctttacagtttccactgattaaacttgttatatatgctaaatctgattatctatggctcagatttcctgatcttgctcttgaaccatgaattgtgttgagtatacgatcctttgagttntgtcttgttattttttgcggctgagacctaaaccatataatgcttacaaaaatattaaagtacaagacaacctcataaatctagagtgacttgctcacctattgtagttctgtcatacaagtcatgtctagtcatgacacttgtcacataagatttcttatgttgcgctgaatcttatt

SEQ ID NO: 89462 - DNA, 322 bp, Glycine max
ttgacttgatgccatgtttactaaagtgaacaataatcggcgcgaatcacaactccaacatctatcatgggtggaatggatgaatgcatgacgaaatatgacacacatgcaatttatgaacacgggagcccgggaaaattgctgcttcttagatacaacatcttgaggtagcaaagcgcctgacgtatgtattatagaatgagactcggaccgtccgacggttcttcaatgtgcgtgatgcatatgcgaaaggtgcaacacgggaatgtacatagtatgacaatactcactgaatatatagcaaagggtacatgacacttat

SEQ ID NO: 89463 - DNA, 456 bp, Glycine max
  unsure (1)..(456): unsure at all n locations
agctttntgtacgacaccttgtatgcaaattcattgttaatcctctcttgaatcaaagaaactnttattgatggatcttctctgatcatgcatgttaataaaataacaaaatttaaatgacaattaacgcaaaagtagcataatatgaacaaaaaatacgtacctactacacaagtggcaattaaatctgaatcaagcttctcgtgatcttgtgtcatgatcatattgagacgtgtgtggtccaccccattgtgtgactttccatgaatcagtatttaaattgccctcatatagaanaggcaaggacactctgtacttttattcaagcaacaaacgacatacttgttcaatatgctttcaacaactttgaaactntgatgcaccttcataacatatagttggactgcatttttgaccgcatctntactatcaaaatccatgtcaacatataattct

SEQ ID NO: 89464 - DNA, 461 bp, Glycine max
  unsure (1)..(461): unsure at all n locations
ctcagcttattagattaactacctcatcgctgttaggtacttngctcatttaactgatatgactagactggttcctaacgacaaaacaaacattgttgtatgcactctccactagagatctctgaccttgtcgtattcatacatagattgtgaggatgtgaaaccccgtttgctgtatcatatgatatctctcaagttgttctttgacgcgaanaagattaaatatgaagctaagtacctaaatgctgctggcaatagcattgttgaaaatacacgtaaaggcaagtccacatggtaatgccaacctctcttcataagattttcttttcctcattattattatattnttgaattatcatgttatcagtaaagaatattcactaattntattgatgattaattnttgttaaaaacctgacatctctgatagagtcttgaagtctttcttccgatcacatttt

SEQ ID NO: 89465 - DNA, 495 bp, Glycine max
  unsure (1)..(495): unsure at all n locations
gcaagcttgatntaatctcttaattntcaatggatataatgttcttctttctgtcaaanntgatagaatggcattaactttttatatacagggcacactaaataaaagtaatgaaattaaaaaataataataagagaatcatattgaaataataaaataaatagaaggacaaaatagtcatttcacgcttattttataagtttgaacgacattaactattctaaagccagatggtatcacctgttggcgggtgttagaattcagcatgactccagaattagaagttctcgatttcttggccagggtctcccttaaacctcttctggagatgaaggacatgcatggaaagaaaaatactttaataaattgagtggaataattaattgtcatggactattgtttgcgtttgaacaggacaatattaaagaatgaacaaagaatatgatgacagcgaatttgaattataactggagatagttgacttgtggatacata

SEQ ID NO: 89466 - DNA, 463 bp, Glycine max
  unsure (1)..(463): unsure at all n locations
taaaaagtatttattagatcgttctttatacaactaatctanaattagaanaatgccactacatgtttattatattggttattggcggaccaatctaaaaggcttattaaaattatgttttttgcactagtgtatgacttggtttcctagtaatatttctccactcaaggttgaggcgaaagctttgtaagttgccacctcttgtgcttattgagtgcatttcacaatcttatctntgagctacactgcaaacaatgatggcaggatttcaaatcatatggttaacatagcacagtcttatcctaacaactctntntagtgaccttcactcataggaaagtcaatcgagtcgcccattcgttagcaaggatgtctaagctttatgctcatcatcagagttttgatgacataccagttgtattcatgccatcactaccccaaaaatggtcttctacaacacaag

SEQ ID NO: 89467 - DNA, 357 bp, Glycine max
  unsure (1)..(357): unsure at all n locations
ctcttccattggtggttcttcattttttctccatgtatctcctcacatgtcttgtgctaaaagttgttaacatgagtctttagagtttccaccaattaaacttgctatagaagctagatttgattttctatggttcaaaattcttggtcttgttcttgaatcatgaattgtgttgagtttaggttcctttgagttttgtcttgttatnttttgtggctgaaacctaaaccataaaattcttacaaaaatattaaagtagaagaaaacctcanaaatctagagtgacttgttcacctattgtagttttgtcatagaagtcatgtctagtcatgaaacttgtcacataagatttcttat

SEQ ID NO: 89468 - DNA, 454 bp, Glycine max
  unsure (1)..(454): unsure at all n locations
agctngaaggggtgtaacccaccatcttctcatagtataanaatggtaacatgtctactatcattggtaccatctccctctccatcattgggggcactacttgagctgccatgtccctccacctttgggcgtattctttgaaagattcatgctccttcttacacatgttctgtagttgcattctattcggagccatatcagaattgtactgatattgccgaatgaaggcaaccattatgtccttccaagaatggactcgggaaggttccagattagtgtaccaggtgacagcttccccaataagactttcttggaagaaatgcatcaataattnttcaacttttgcacatgctcccattttcttgtagtacatcttcaggtgattcttggggaaggtagtccccttgtacttattgaagtccgacaccttgaacttcgaagggataacgacgtc

SEQ ID NO: 89469 - DNA, 449 bp, Glycine max
  unsure (1)..(449): unsure at all n locations
atcttagtctctttaagatccatgatatatttgtaattaattacattaattntaaaagataaaattatcacttcagtatttaaaataacaatgtaattgacttgttttttttatttgattttaaaaaaatcattatttctatgttttaagattaatacaacggattcaaaatttctgaagattaagatattcattttaaattaacatctcacttacctctctctgaactgtattagactcttggaaaaaaaaagacaagagagtaatataatggcgtcaaagtgtcaattaaatacagcttagcttacaattacaaattaataaatttcaaatttgtcaaccatattttattggcgtagtgggttgaattagtaatagccaacatgttgacctatgtcagaaatatagtaaaacagaatcttatttattaattatactcttaagtctaa

SEQ ID NO: 89470 - DNA, 374 bp, Glycine max
  unsure (1)..(374): unsure at all n locations
gatcttaagcaccgcggctgcagctgtgtctcatgcctgagacatgactgtctttttctaccgagtgtctatgactgaaacatgacggtagtctattctaaactcggggtatgctaaagacctctttnttggtntcctggtgcaagggattggcgaagtggtggtcaccctgacgtaccatttgactggtagaacgtggtctttgtggtcagctgaggtacatttcaccttgatgtacaatctcgcccgcattgtcgctgttgtgttcgaggtaagcttcatgtcttcattggaactttgtgcttccgcgtacgtggcctttgtgctctttggtctatagaatggtagtaagttcttatttagttctactacta

SEQ ID NO: 89471 - DNA, 468 bp, Glycine max
  unsure (1)..(468): unsure at all n locations
gacatgatacatgtcangggttggtttggttctatgataaacagggatgccccacattatttccatgacacacatgcaaaaaaatgatgatttggaaactctatgcaaaactggtcatgcatgcacctatgcggacactcaagtgtcaaatttttatggtcatgtgatgctagggctcaagattcatttcctctattttaatcaacccaatgtttgcaaaatatgttcttttatcaatatgtgcattcatccgagtccatttcgggcgtccggggaaatttcacagcattcacccttcatgtgtagacacattttccaaaaataggttatgatcaatgaactttntttttttgggaaatcgtctctcttcaaaagcatgtcgttgtttagctagacaacttattgtttcttttttctaccttctttgttgttattgttatcattatcacttggttatatctttttctt

SEQ ID NO: 89472 - DNA, 450 bp, Glycine max
  unsure (1)..(450): unsure at all n locations
attctttgcccgactcaatatgtaaattgatccatctgcgctatttagatctctctggttcaagtgtagaaacactgccaaagtcattgtgtaatttatacaatctgccaactctgaagttgtatgattgcaaaaaactgaccaagttgcctagtgacatgtgcaatctttgtaaccttgcgtcatcttggcattgcttatactcctatagaagagatgccgagaggaatgagtaaattaaatcatttacaacatctggatttctttgttgtgggcaagcaccaagagaatggaatcagagaattgggaggactttcaaatcttcgtggtcaactggaacttangaacatggagaatgtttcccaaagttgatgaagcgtggatgcanggatgatggatanataacacatctatagtttacagttggaatggtctgatgtacaacaacag

SEQ ID NO: 89473 - DNA, 430 bp, Glycine max
  unsure (1)..(430): unsure at all n locations
atggtggtcaccacaagagcataaaccacagagtcttgcgacatgtacaaattatggattcatggctatgtaggataccaagataaccaaggcgtctagtttaacttcaagcttcttattttcagatgattgcagatgagatttgtggctacctcatgcactcctctaatgactatagcctcatttatggcgctaaactgttgggagtcggaagccatcttctcaattaaattcctggcttcagcaggggtcatgtctccaagggctccaccactggcagcatatatcatacttctctacatgttactgagtccttgataaatatattggagaagaagctgctcaganatctggtggtgagggcaactggcacatacgtttntaaatctctcacccattcatataggctctctgcactgagtatgctgat

SEQ ID NO: 89474 - DNA, 506 bp, Glycine max
  unsure (1)..(506): unsure at all n locations
tatatgcaagatgcgtatgagttgagtagtaatcaaatccattatatgcattcttgnntatttaaacttcttgatcattggaagggaccagaaaaggttacatgttttatttggaagctttgtcatgaatacattatgactaatgttaggcagatgagattgagtttcacaaatagatatttatgtcctgcttatgactcccatgaagagactcttattcatcttttntcaaaattgccaccatgctatttcggtgtgacaattgtctattataaagaatgatggtgttgacatttattccatagttgattcgaagatatggctgcaaactaatttgtctagaaaccacctattccatgatgtaaattgatcattggtgtttgaagggatgctatattntacgtggttgaggaggagtaaggtcatttttcataacaatcattggactgtccaggatattattcagaaagctttgtagtgggccctataaagcacggggatgcttt

SEQ ID NO: 89475 - DNA, 431 bp, Glycine max
  unsure (1)..(431): unsure at all n locations
tgagtcactgggtcaatggtcaaatcagtggatcactaattgacccgtataacccagtatgtatttatttttttntaaaaaaattataccctaccttaaaaaaatcatataaaatattaatataattccccaagcttattcttcaagttcagatccatattggtattatcttatttataattcatatttatttaatttaattatatatatatttaaagatttatatatagttctttatgttataaatacttttattatgacattttaaatntaaaatatttaatagaattacccctaaaatgctagttntgtctgctaatatcgattatatatttaatgccaaactgatgattntatatgtatgttnagtttaatattactatatctttattattagtaagaggaaagtaaagtagtatattnttttatgc

SEQ ID NO: 89476 - DNA, 450 bp, Glycine max
  unsure (1)..(450): unsure at all n locations
acactatcattatcctattggaaattaattatgtaaaattactagtagaactagtacaagcctaagcaagaattggtgcattgtgatggtaaaagtactagtagaactagtacatgcctaatgaaacaaatcaagaaagatagcctaagcaagaattggtgcattgtgatgggtttcgaaatttgattggttgggtttcgagaaaattgggttttgtgtttgggttagtgttggatcgagaggcctcagaataattaagaagggggggttgaattaattattcctaaacctttactaattaanaattactcttctaaggcttttactaaattgttaagagaatgaggagtggaagagaatcttaacagaaagtaaaagcggaaattacatgcacagcggannagtaaaagagttggaagaagaaaacaaacacacaagagtttttatact

SEQ ID NO: 89477 - DNA, 480 bp, Glycine max
  unsure (1)..(480): unsure at all n locations
agctngatgcacctccatcttcgaagttggttccatgtaaaccatcctcacctcatacaataattggctaatagactcatcanaattctgacccctcccttgtgtttcacttgtacaaaacaaagcttaaaagtataaggcttcattnttcagcgttttagtctccgtacaccactcaccatcaggtatatctaacccgtggatctttttccttttctacaaaccattgcttgtgcatggaataatgatgtattcctactacttaaacaaatccactntttgcatgaatnttgaaaccataatgtttcttcctggaaaatgatcctctcatattccaccaatagctacttatacaaattacacaatagggccaagactacattgtctaaagttcattgaatccccttaagtcgggcattcaatttcttcttcctacctgtcataccttaatttcgttcggcgacctttatttgctaacac

SEQ ID NO: 89478 - DNA, 452 bp, Glycine max
  unsure (1)..(452): unsure at all n locations
gtcttcatcttcatgcatgcaccatcagtattctttntctttgttttaagcgagtttcgaccaatcgtttaagccgtaatctcacttaatcaatgttcaaatgaatttcaaccgatcgtttgtgttgtaatctcatttaatcacctttaaaataaaattcaactgattgtttgtgctgcaacctcagttaatcatcagaaaaataagtttcaatcggccatttacttcaaaagttctctctcaatgagttgaaagggaaaataaactaagaatgtaagtcatgattgttcacatttgagtaaaggctattgtccttgtgacgaacgcgtggggcactaatacgcttctcgtgcgtaaacaactccttgaacctttatttttaagaattgtagaccatcgttttcggttttctaacattgtcctcgaataaacgttggtggagactccacatg

SEQ ID NO: 89479 - DNA, 281 bp, Glycine max
  unsure (1)..(281): unsure at all n locations
aaatccccagtggagtcgccaactgtcgcaacgtgcccttcgcgggcgagcgaaggcgactctcactggtgcgcttctcaaggatgaaagatgcacggagtncccaccaacgtttatttgtgtcaaacgtctggaaaaccgaaggaaaccggtccaaatgaaaattcttagttcgggagttgtatttacgcctaaggaaggtattatcacctctcacgtttgtctcaaaggacaacaacctatttttcagaattggggaaatggcgttatcttaactttta

SEQ ID NO: 89480 - DNA, 455 bp, Glycine max
  unsure (1)..(455): unsure at all n locations
ctatcagcgacaacacatcactaanagatgaaaactctagatgaggcttcactatcatcaagggagtcggagacccaacatgaccattgattcacctccactctttatggctcacatagaaccggacatatggcctaatatctcaatgtgtgtgtgaggtgtaggtgtcatgtgtgtgtagaaaaagggtatttctaactatgaatgtnattgatagacgaacacaccaaacacaaaaacatagcaaagattatgtacaaatatggacaaaanaccaaagataaaagggaagggagaacataaataaagaagaagtcatgatgagatgttgcacactaattgatngacctaactctctaaaaaccgtccccagtggaatcgccaactgtcgcaacctacccttctgtgggagggcagacgcggactcacggngaaaatgtcgccaccaacattta

SEQ ID NO: 89481 - DNA, 479 bp, Glycine max
  unsure (1)..(479): unsure at all n locations
agctggtaagattaaagtctcacgattgtcacatgttgatgcaacaattggtagtcgtggatatacaagacatcttgccaaacaaagtcaggttagccataactcgcctgtgctttntcttccatgccatatgtagcaaagtcattgatcctgtcaagtttgatgagctggaaaatgaggctgcaattatactgtgccaattgaagatgtattttccccctgctttctttgacatcatgattcacttgattgtgcatctgtcagagaaattaaatgttgtggtcttgtttatttgcagtggatgtacccggttgagcgatacatgaagatcttaaaagggtatacaaagaatttatatcatccagaagcatttattggtaagaggtacattgcagaagaagccatctgaatttgttcagaatacattgagaaggctaaacctgttggccttcctgagtctcagcatgatgacatagtgg

SEQ ID NO: 89482 - DNA, 500 bp, Glycine max
  unsure (1)..(500): unsure at all n locations
ctaatcacatacatgtatatatatacttattatgattatctatgactaanaacatgtagtcacgaanatgaaatacatacatgtacagaagacacaacacanagttttctctgtcagtctcaattgtaattntgtttcaaggtgttacaaaggaactgttagtattagaattgtctaacacttagaaataaaatgattggcacaattntgatgaataacaaaacacttaataagaaaataacacaacatcttgagtattcaataagagcttaatcaaatcagaattccatatcttgtcacactacaacattttatgctttatgccacaccaatgattccaatggttagaaaactcttgcaatacaataagtaacatttttataattataatttatttatatcaagccacaatttcaaaccattgacaaggtataaaccatacttgtcaatcccatcatagcgaaacagagttgctgaccctaaaagtgtgacaacaggat

SEQ ID NO: 89483 - DNA, 475 bp, Glycine max
  unsure (1)..(475): unsure at all n locations
aagacanaagagactagtgtgggctctactgcaccctattcatagtatccaaacccaaacaccacacgagttaagttccttggccttgggttcttccctttgtttgtagtaatagcaatatttatggttcacattaattggggcacaatggaagtggcaatggtggcataaactatggataagaaaggcataaggaacaaaacaccaccacatcactcttacactttngcacacactacgaccaggaaatgacatgaagtacaattagcatgattgaaaaaactctaaggctacttgtttgcattatattttcagtgcaaagatttcatatgggttaagcttaagcatgtagtcttgggttcatttcgagatctatgtttgtggaagcaaaaatattattgataatgcttgattntagagaaaataataggcttaaataattaattggttcttatnttatgttatgtccctatgt

SEQ ID NO: 89484 - DNA, 467 bp, Glycine max
  unsure (1)..(467): unsure at all n locations
agcttgtatgtatgcacaggtcgttacattgcctataanaagtatatatgagaccctatattatgtcatttttcttatagtatgttccttaaagaaagggtaattttttctttcttaaatgtacttccatattaatatcacacatgtatttataattacttatccagttatcctcttatgacacaaatccaatgttttgtgtaaaatactaaagaacacaaagggaaggtgatgaagtgaggctcangtcccctctccaactaaagtgatgaggtattntaccataaaaaatctcacttgtcgatcaccagtcctaattcttttgattttttggaaagtggtaggggtcatgggaatatattantnnatattatantnnatattataatattaatattantnnatatantnnatatattattatgganggcttggtcttctataggttcttcgtttggtttctaaat

SEQ ID NO: 89485 - DNA, 380 bp, Glycine max
gtgagtaaatggttggaatggagccatttgaaccaactaagagcaggaccttgaatgaagaatggaatgagaatgatggcggcggggggtggtgtgtccgttaggtcaaaatagtgttcaaccttgaagatccagtcaagaggatctttcccttcaaaagaagatagggttattttgggtaatttgatggttgattgtggcgggtcggttcgaaccggagaggatgaatgggctgcagattgggaagaaattagttcacgtatgagaaggggtaattgtgtggtgagaaaattatggaaatctgtttgttgtttggtgaccgcctcaagacacaattgcatttctcgaaactgtgcactgacctcatcggcagaattgtc

SEQ ID NO: 89486 - DNA, 402 bp, Glycine max
  unsure (1)..(402): unsure at all n locations
attttaaaaattaaaaacctacaatatatgatagggtgtgaatagatgaccatctaaaaaaatttacattgtcagtacataaccctttttctctatcttattaggggaacaaacaaaaaattacaatatgatggtatggtatcatatnctatcctatcatatcatatcttggataccaaacgtgaccttaaactcttgcaaagtaaactttgttacaaagtatattaataaaagatgtatttataagttcaattttgattctttttgaataagtagtccctgaaagataannaatataattagtccctgaatgtgcaaaaaataaacaaattaatccaatcngtaaattggtgagtcattntgctatttaattgaatgtacaatgaccaaattaaaaataag

SEQ ID NO: 89487 - DNA, 200 bp, Glycine max
  unsure (1)..(200): unsure at all n locations
tatctacctgcgcagattgggggtgctaaccatgttatgatgcctaaatntgacaagttattcctccaaacatttggttggattcatgtcccttttcttttaaaaagatgaatcatgcaagcttgtttgaatatcacttacttggacatgggcagcatcgacatgaattacattactatcttaccaccatgattcctatt

SEQ ID NO: 89488 - DNA, 425 bp, Glycine max
  unsure (1)..(425): unsure at all n locations
tactgcagcagatgttgacagtatcaaaactaggcgatatgtctaatatgaggtaccagtgggcattcatgcacagcaaaatgaaggaccatttcaggcagctaatagggaatactttccatagcangaatttgtcaacaaacatagacctgagtcgccatggaacatatcaaaacanagggggcatagcatatataaagtaatagtaatactggaatttcattacaatttctatataaaaaaattaaaataaaagaagggcaaagtgcttatgatggtgatggtgtaacaccccaatatttatcttctattatattatgtaaacaagtagtgaaaatgtgtttatataattattntaataaatattntggtgaaagcgtgcatagaaagtgcatcctatataaaccatgtgttgcacatagtag

SEQ ID NO: 89489 - DNA, 452 bp, Glycine max
  unsure (1)..(452): unsure at all n locations
ttatgantaagtnttagttgggggacaagagaacaagaacattcactagtatacaatggttttatgatgtgcatatgaaagcacaactttggtaactaagcagctaaatcctattatatctcctttgctttatcttttaaatgttttccctgcataatataatatctaatttcattggttctgtcttggctatggattanggtaaaattaatagtactgatcctttntgttccttcatgcangatggatgaaaaagaatgtccaagatggtatacatgatgttccttttcaatcttctcaggtggctntaaatactgtaagtgaaaatggaaatacagctcttgcattattggcttcagcatatggaaattcttctgactctgaggaagatcagaaatgcggtgacagtcatgaatcaaatgtgataaactctgcttcagaaagtttacttt

SEQ ID NO: 89490 - DNA, 472 bp, Glycine max
  unsure (1)..(472): unsure at all n locations
agctngagagttcaacattcaaaacaatgatggtgctaatatgatatttcttgcactaaactntcttttaaactntaattaatgttcccttctttccttctacatgtcacgttggtgaaactagtcagtattttcatcacttcaaataataaggacctggtttacttccttttttttttttccagagttttctattaaaaacttgtttgaggaataaattgaagatttactctatttgcttctcatgactcaaactcaaggcgtaaactacacagcattagagaataaacatagatattcccaagcactacatgtaaggtagaattgcttcaaagcatatgtgaaacaagtctttactgaagtgtttcatcaatagtttagtaggtattttttatttttcaattatatttacttttaattaatccttgcaaaattcccaagatgacgtttgatacataactaatccatgaac

SEQ ID NO: 89491 - DNA, 449 bp, Glycine max
  unsure (1)..(449): unsure at all n locations
agctcaaaggtcaagaacacttcatgattaccaagatgatgatcttaagaatcaaagaacgagttccagattgaatcaagaacaattcaaggttcatgaggaaatttgattcccagaatcaagatcaagattcaagaatcaaagggtgatgacaaaaaagctttaaaggtcaagaacacttcatgataacaaagatgatgatctcaagaatcaaagaacgagttcaagaatgaatcaagaacactttcaggttcaagaggannattgattcccagaatcaagatcaagattcaagaatcaagagaagactcaatcaagataagtatgaaaaagttntttcataaactgagtagcacatggatttttctcaaaacctctttgccaaagagattatactctcttggtatcaattacccgattattgtaatcgattaccagtagtaaaatgg

SEQ ID NO: 89492 - DNA, 477 bp, Glycine max
  unsure (1)..(477): unsure at all n locations
agcttgtgactagtgaaggaaataatcatatngaataatgtacagcaggtatgggcagaacaattaggaatangaactcatccactaacaatgttagtggtattcgtaatactcaacaaccatttccattntatgtggggaacatgagaaggaatgataaagcaaatgaatatagaggtttctttgctcccttaaatcattgtcacaatngcatctagtaacattgaaccaatagctttctggccatttgcttggtggaccaccttaataggtggtttatggataataattatcaaccgttagatacatgctgntaaaatatgatatgatacatgtcatatcctaatttcgtctagggacgaatgtttgcaacatttggatcttcgtcagccgatttgagctgcttaacaccaattgttacgcaatctgtaggggtttgtgacgtttcggaaagaaatgagcaaaatactcaaaatg

SEQ ID NO: 89493 - DNA, 417 bp, Glycine max
  unsure (1)..(417): unsure at all n locations
cttcaaatgggaattttgctttatataattatatagcgcctaactaaataggatattgagtttttttttttacatgcatttacttaacaagaaacttaaacattagtaagttttaaactatatagttggcaaaagaacaagttgaagagtgaaggtttccaaacaacaatccttgacaaaaaataaaaaaagctgggtctaggcanattaatcaattcaacactaagagtgagaaataataccagcatccctatccaaaaaatattcaaggatgagacgtgaaaaaggtcaggattttcatgctgctaatgatatatctaacataataatcttgttccttttataccttttanggttattatggagatggacgggagtggtatcgatggtgcctcaaatattgggaagcgaaatgag

SEQ ID NO: 89494 - DNA, 326 bp, Glycine max
  unsure (1)..(326): unsure at all n locations
tgtttcaaatagtccctgaagtcaacatatgttaggaagtatgtgcatataaacatctcaaatggtgtacttggctcttagaataagactatgggtcttggtcattaaaanaaactgcagtttagatacattcaccccttaattttaatgggcatttgcatgaaacatctaggcatgagcaatatttaaaatatgaaggtggtttctttctacatcacatttctgctgtggacattctacacatgaaaagttgtgtatgacacctctctttgagaagaagattgaaaaggcagctcttttgcattgtctgatctgagccctttgat

SEQ ID NO: 89495 - DNA, 481 bp, Glycine max
  unsure (1)..(481): unsure at all n locations
atgcttgcagcttacgcctctttctacctctttctatattaaggggtaaataagtgttaaataattattaaatntaattataattcaactacagcttaaatcaaaattaaatgaaaaaaattcccaaaaacaaagaagctagggttagtcgagaatggtgaaaatgaagaggacgatgcatccatacttttcgttaattatttttccttttaaaccgatgcacttagatatgcgtgcctcattcaaaggctgttgtttgaacaacatttcttttatctaccacaatataatagaccgaccaaatgtattagcgaaatagactaaccatgtctccatttgtttttgatttttgattntttgctaaaaagttttatgtgtaaacactaacctttatatcaattaagcaatctcattgctactgcaacttgcgaatggacatggnggcgattgaatatttattattgtcaacatatatgccata

SEQ ID NO: 89496 - DNA, 463 bp, Glycine max
  unsure (1)..(463): unsure at all n locations
agctagctgtattcctgatatgagttctgagattttttccttgagctctgatgccaaaaatgatgtatatgcatgttaaaacatagaattaaccttatatgtcacccagatcatagttttctagcaaaagttacaaataaaataagtttaaggacctttagtaaaatgaaaatatgccccaaatctggactgagagtgacaacagtatggactatctttattaaggctntgacctcaaacatgagttctttacgtttgaaaatgtacggtagcgtataatatttgtgaaaatccgactaacagagcaccaagagcactaaacataagttaggagcgaaactgtgaaaaactgagtcacaaagagattattttaccgtagatgacttaactntggaatccaagtctctgtataaattatcttagaattatnntcttttaggaactgctgacttattactctata

SEQ ID NO: 89497 - DNA, 432 bp, Glycine max
  unsure (1)..(432): unsure at all n locations
cttaactaataataaaaatatgcatttattatgtcatatatgtgagaagtagttatagaggtacctgaatatcaagaatggcttgccatggaaaaggaacaggagcatgtggattgtttaaaagaaagttgaacaatacaaaagtatccattgacaaagtaaatgagaatagagagtcactgatacttgagatgactcactctatatatagtgagtcatgacatgaatttcaactatgcatttatctttcccatattaatgtaaatgaaagaaactacttttattgaactggtttcatgaaattaaggaagtgtgtatcacataaaaaaattgctttaattgaggaacacaatttattgactttgaaaangtaaatgaaccatccttaaaataaagggataaaattaattaaatatattaaatattttcttg

SEQ ID NO: 89498 - DNA, 490 bp, Glycine max
  unsure (1)..(490): unsure at all n locations
atcctctgagtcacctgcngctgcagcttttgctaggaagaagaagaagattaagattaagatgttcanagagattcaaaggttgtaaaagaatatatggaaaaagttgttgtaaaggttggtagtattgtaagttgtcttcaaatgcaaatcaaggtattgcttntatagactcttcaagtctggtcaagaaaaccattggaagagttataacctttagaaaaacctgaaaaccattgaaagagttacatcttttgatctttcttcaaaacttgtcactggtaatcgattaccaaatccttgtaatcaattaaacaaagcatttttgtgaaaggatgtgactcttcacanaattaattgaatttcaaagttcaaacacactgataatcgattacaccattttgaaattaattggaatggtgaaattcagttgaaagcttttgaaacaaactttgcactagaatcgatacaggaatctggaatcgatact

SEQ ID NO: 89499 - DNA, 513 bp, Glycine max
  unsure (1)..(513): unsure at all n locations
tactaagcttgcttctcactactactctcaaacatagaaccacgacctcactcgagaactcataatacagaggaagaagggaaactcactcgtggaactcacacgaggaagaatagtcccaagggattgtagtttattacttttnttatgaattaatatgattacaataagatactgctatttatacaaatgaaagcaatgggacccgcttaaattctaaccaccctttttatttttgacctatacagttattttataaactgagtattacatgtggggagatatcaattntgaagaaataggtgttccatctaaggaaatcataatggttgcagaattcttgtaaccacccgtgatctaaggatatggagcttaatgggatgtgataagataattcaacttgatctcttacctgaggaagatngcatggatcttgtcaaaaagcatgctagtttaagtgatagttcctctaaaagtatcctagataagggtcgtaaaattccaaagaatgca

SEQ ID NO: 89500 - DNA, 470 bp, Glycine max
  unsure (1)..(470): unsure at all n locations
agctntagtgaagaaattcacccgttgtgagacaacatacacnttgactatgaacctacacacaaacattcattttctttttgtaaaaaactctttataaatgtctatataactccgcaaaataacttgattatcttaagaaaaatgactaagggctaagattgtatattcgtttgtaagacaattaagagcccgtcattgtgcacacaaataacaaatgtgtttgatttatataaaggctaantaaaatgtatattcatatgtaagaagattaaaacctagccattgtacaaacaaacaacaaattcatttgatttatgtagagtcaacaatggctttgtaggacaaaaatatcgagtggtagaaaccaagccaatataatttgtcttatgtactcctacttataacttcngagttgaaatttttttaaatctctattattagaaaaanttngtttcatcgtctgatcg

SEQ ID NO: 89501 - DNA, 430 bp, Glycine max
  unsure (1)..(430): unsure at all n locations
aggaatcttctggagggcccaagtgggcctggatgctatttgcacccnctgtttactaaatgcacccacttttctattttttgtgattctnttccagaacggtacgaaactttacgaatatctgaacgatacttattttccttccgcaagggtacgaataattacgggatatgtatatactcttttttcggctttcagagaagatacggaaactcacggattgtgcaaacacacactctttgtatatatgccacattacggaatttcacggactacgcaagcttgcttccttttggatatctgagacatctcgggacttcatcgattgtatgtcatcaagtaataattcccggacgaaattatggtatgacagctgccgctctttacttacctctcatcggagataatatgaaagcaaagataagacact

SEQ ID NO: 89502 - DNA, 482 bp, Glycine max
  unsure (1)..(482): unsure at all n locations
gcttgtagacttttgactctgtgttgtatccaatgaatatacactnttctcctttatcgtccaatttcttcctaagttgatctagagcatgtgcatatgctatgcacccaaaaactttaagatgtctaattgatggtcactgtccattctaggctttttctggcgtcttgtcacaaacacttttagtcaggcacctattcaaaaatgtaaataattgtagcaactgcttctgcccataactccttaggcatttccatggccttcgacatgcacctcaccatatccatgattgttctattctttctttcagctactccattctgctgaagcatgtatcttgttgccaattgatgttgaatcccatgctggtcaaggaaagttatgcaagtgagatattcttgtcctttgtcagttcgaagtactttgattctacacccattntgcttctctaccaacacattgaaagcatcacaagcttctga

SEQ ID NO: 89503 - DNA, 507 bp, Glycine max
  unsure (1)..(507): unsure at all n locations
tcaacttacagtgagtgatttaagcttagcgccactacctgcgattatcgcacttccaatgatttcacaacagaatgatgttggcgcttagcgcattcttccccgctaagcccagcttgaaagctcaacttacagaatgaatctagggcttagcgtangattgtgcgcttagcgcatctataataaattttcatagagaggaagtggcgcttagcgcatcatccacgcctagccccactgcttaaggtgcaacttacagtgaagatagtgggcttagtgccgcaatgtgcgcttagctgaaccatttatccaatcaatcangggtctntgtgtttagcgcgagcaagctcggcttatcgcgtgaaaagatggcgcttagcgcaaggtttgcgcttatcggataagcaatctgaaaaattttctaagtcattttctgcttatctcttcacacataatttaaaaacccttttttttcattactaaacaagctgaaataaatcacaatca

SEQ ID NO: 89504 - DNA, 444 bp, Glycine max
  unsure (1)..(444): unsure at all n locations
agcttgtccctttntgaatntggaacaggtgatcctcagacaatttccatcctanaactctctagtactttattgatatattctttctaagacaagcctaacagttcatgtgatccatttcaaaatatttctattcctgtgacatagcttgcctcacttgtgaatgtatgaatacatgattttgatgatgtcaaagtagaatcaaacaaggttgcttcaaaggagaaacattgcttcaagattaatacaaggttgcttcaacaaacaaagctttgcttcaagattaactaaagatcaagccttgcctcanaacaaagtgtttccaagacatccaaggctccggtaatcgnataccagacagtgtaatcgaataccagaagataagnttganaatagcttgtaaaaaggatttttgaatttgaattttgaaacctgtatcgatta

SEQ ID NO: 89505 - DNA, 409 bp, Glycine max
taaggtttttgtgatacatgtgatacaaagatatgacaaggtgatgacgaatagctcaaagatcaatcaaagaacaactcacgtgaatcaaagatcaatcaaagaacaactcaagtgaatcaagaacaattcaagagttcaagataagaatcaagaagaattcaagactcaagaagaaagtttagagtcaagaatcaagattcaagggtcaagaatcaagatcaagattcaagactcacgattcaagaatcaagagaaggcttaatcaagataagtataaaaagttcttctcaaaaattgagtagcacatggtttttctcaaaacatgtttaccaatgagtttttactctctggtaatcgattaccatattggtgtaatcgattaccagtagcacaatggatttgaaaa

SEQ ID NO: 89506 - DNA, 477 bp, Glycine max
  unsure (1)..(477): unsure at all n locations
agcttgcnaatatagagaanagaagacaagggatttgatcaagtaagatgcattaaagatgaaaaaggggaaagtttggttacatataaggatatcaaagagagatgggagaattacttntacatgcttttcaatgatggtcaagattcaagtactaatatggaggggttagaaatccaagaggaggaatgaaattggtattgttatggcataatttgcattggtgaggttaaaaaaaagtcttataagaatggaaagggtaaagttgttggtccaaatggtatccatattgaagtttggaagtgtatgggagaacaaggttttattcggatcactaagcttttcaatgagattttaagatctaagaagatgtcaaatgagtgaaggaagagtactttggtcctagtttttaagaacaaaggaaatatcgaatattgtgcttactatcaaggtataaaacttttgagtcacaccatg

SEQ ID NO: 89507 - DNA, 491 bp, Glycine max
  unsure (1)..(491): unsure at all n locations
atattttccttcttattatcttctcctattagggtnggtgtgaaattttatccaagcatgcccttatatacctttcgaagaagttgaatgacaagaagttctatagaagtgcataagttgattttagtctatgtggaatatcaactcattttaccttatcatcttctcctgtaagtacttatagagaagtttatctagagaggaccttgtacactctctaatgtgtaatataatactttctttttgttctaagaaaataataacagggtcttgcagcggaaaaaggtgacatcgcaagaggcacagatttcactgcgacattgcctctgcctcacacaacagctattgatttcaggcaaacttccaaaatgacatttctatttattatcaaacataatntggtggatttaatttcgagcaagactttgacgttccttcaaatttaacgtatcaatnntagtagntagatgtaatcttaagtcagacatacg

SEQ ID NO: 89508 - DNA, 421 bp, Glycine max
  unsure (1)..(421): unsure at all n locations
atgccccacattatttccatgacacaaatgcaaaaatgatgatttggaaactntatgcaaaactggtcatgcatgcacctatgtggacactcaagtgtcaaaattttatggtcatgtgatgctaaggcttangattcatttcctctattttaaatcaacccaatgtttccaaaatatgttcttttatcaatttgtgcattcacccgagtccatttcgggcgtccgggagaaatttcacagcgttcacccttcaggtgtacacattntttcaaaaactagttatgatcaatgannattttttcaaagaaaagttggaagtcatctcttttaaaagcatgtcggtgtttcagctaaacaacttatntttctttttctttntttttctctttttcctttcttttattgggtaatntctttttct

SEQ ID NO: 89509 - DNA, 230 bp, Glycine max
ctaacaccataatcaaacatccctgctactttgatcatcaatgtcaacagcttggacaacaacactaagtgtgaaattaacactgaattaaaaactgagtaaaactgaattaatgactgacttaatataaatacctgaataactaaatgtcagatgcccaattaatgctgctctgggtgctctgtgctctcataagccacactgacagtgggatctgaagaagatcttac

SEQ ID NO: 89510 - DNA, 493 bp, Glycine max
  unsure (1)..(493): unsure at all n locations
agcttggagtcgcacctttcanatcttctatccactattgaaccacctctccaatatatcccacgcttccttagttgtagatgcttagagatcttgtcaaagatacttgcatctangctctggtggatcaagaacaaggctnttgtgtcactttttactgcatccttgtgtataactctttgtgcaaccgtaggattatcaccaatttcttggtatccgttctgcaccaatttaagcacatcttgaaactggaacaagacattcatctgcacgctccattgctcccaattcttgccatcaagaattggaaaattctcggggaatccaccattgccccctatgatcgtagcaacaatagtagaatgaagaagatgtaatgatcacagcgacaaaatggaagagaaatgtgttctctcacactcaacaaaaactcacagatgaatctctcttgatcttgctctcactcacttgtgatcttacacactttcacttg

SEQ ID NO: 89511 - DNA, 449 bp, Glycine max
  unsure (1)..(449): unsure at all n locations
cctatctcggnttttatcctctataaaatgtgaaaaggtttttgtcgatgtggctttaacgagacacatcgtatcatatcactattaatgaagacttcttttcatcatatttctttgcatactgtgattcttaaggattgagttctaattcattaacaatatcttcccgaataccctctccagctaagggtgaacttaacaatttaataanaaagntccctcctgaatactctattcggctaatgttgaacttaagaatttattataaagtttgctctttgtcccaacctacccttcagcgggagggcgacgcggggctcacgggtgcgtcttccaagaaaggaaaatgcacggcgtcgccaccaacgtttatttgatgaatacgttagaaaaaccggacaggtttggtctacgaactctaatcgtgaaggttcgggagttgttttacc

SEQ ID NO: 89512 - DNA, 466 bp, Glycine max
  unsure (1)..(466): unsure at all n locations
agcttcgtccgcagatccctcatgtgagactaggcctaaactaaacaatattattgtaacagcataattaaaaccaaaacataacccgcagatccctcatgtaagactaagttntgatcttgcttcaatcaagttctaaggcaacagtacatttcccaatgctaaagtcacctaactctgcacacaaatgggtgatcaggccaacaacatacaaactgtcataccctaantttcgccggngaccgttgctggatgacatgcgacctttctttggtccttngtgaggtgcttggcacccatcattangcaatntgtgaaattccaggacatgccgaanaaccaaaaaaaatatatgatgcacaatccgtaagtttccgtgacacaccgganatcaaatggaagcatcattgcataattaagtgaggttccgtaacattccgtaagtcaaaagggggatgattatgta

SEQ ID NO: 89513 - DNA, 467 bp, Glycine max
actcggatgtctgattgagtcccgtaatatatcgagacgctcgaaatggaataccgaagctctgagcaaattcaaacaataataactttttactcggatgtctgattgagtcccgtaatatatcgaaaagctcgaatgtgaatgtagaagctcatagcaaattcaaacgacaataactttttactcggatgtctgattgagtcccgtcatatatcgagatgctcgaaatggaataccgaagctctgagcaaattcaaacaactaataacttttactcggatgtccgaatgagtcccgtaatatatcggaacgcttgaaattgaatgttgaagctctgagcaaattcaaacgacaataaacttttactcggatgtctgattgagtcccgtaatatatcgagacgctcgaaattgaataccgaagcgctgagcaaattcaaacgacaataaacttttactcggatgtct

SEQ ID NO: 89514 - DNA, 462 bp, Glycine max
  unsure (1)..(462): unsure at all n locations
aatatactcttaacatttacttgattgtaaattaaaacagatgaaacaatggaaataaagaataggaaagtacccttgcgtaaaatctaatggaagtataatgaatgaaagagcatatgggaaaacatttttctacacattagcctaccttttaatgtgttccataaatttctcggagaataaaatataaggggtcagacccatattaatnttacctccactttcaactctgaatttactcctacatacccaaacaataaatagtggcaatcttgtccaattttaattttccaaaattaaccattaaaataaacggttaaagctggaagtaagactataatacaacctaatgatgaacttctgccattcgacgaactgaatcatataatggcttctacaggcgcttcaattctgttttctcctttgatgtagntctacatagtttactatcatagatattct

SEQ ID NO: 89515 - DNA, 497 bp, Glycine max
  unsure (1)..(497): unsure at all n locations
cttggagtagaaacataggaccaacttatnttatttcanaaaggttgtcgtatccagtcaaggtctgagagaccatacaagtttcctaacgatttctaattatgtgggccattaagtctatcatatgctgacaatagccgagaagcccatgaatctcttcgggggtggagtaggtgtctgccatcgccttggccttggctaacaagcggngaagttcttgacttccgttcaaggtaagagcaaaccggtccatccacatggatgcctcttggtgtaaagagtcgatcacccttcctctagcctctntttccgcatatacttgagcatactcatccgcgaatctatgctcgtgggccgtggctagacctaactcttcttggtacttggcgatgatagctagcatgttggtctccgtctcgcataaacgctgagacaagcttcttttggaccttgaacanagcaataactgctctttcagaaccatgctatgtgctcgc

SEQ ID NO: 89516 - DNA, 341 bp, Glycine max
  unsure (1)..(341): unsure at all n locations
ctcataattcaaatatctaagctctaggagtgcattctctattccctatctacctgaagaatcaatttttgctcatgaccactaaacctttgcgtcaagtcactattcacagcacataattantttattgatgtgtatttaacggcaaatcttgttcccttttttcttttattttggctttattatatatatatatatttaacaacatactacaagggaaatatatgttctaaattcttttgtgtggtctgataaaattaccttccctgtaacaaaattcatcccagacagacccccaaatttggaaacatattgtcttgatccataacaatgctctccta

SEQ ID NO: 89517 - DNA, 435 bp, Glycine max
  unsure (1)..(435): unsure at all n locations
gagattatatatatgtggccatggcatgaatatcaataatcaatattctatctttcaatcttctttcaacattcttcaatcaatctttcaaatacctttcaactccttctacaaaaatttctgattcatcttctcttcatctttctaaaagattttgttcaatactttctctttcaagaaaagttctttgataaaaaaatagtgctattcatctttttcattttcttctctctttgccaaaagaacgaaagactaactgcctgtggtcatgttgggtcttcgactcgcttgataacaatgaagcctcatctagaattntcctctnttagtgatgcatagtcactgatagtccctatcgccacaatgtattacctaagaggatgatattngtagaagccagtaaagttacatgaaaccacccttgggagttgcact

SEQ ID NO: 89518 - DNA, 419 bp, Glycine max
  unsure (1)..(419): unsure at all n locations
tgctactctaccatgtaatgcaggacacatgtataacaagcatcctctatgtctaaactacttaaatatgacatttgccatgagaatatgtctacaaagcaatggctttgctgctcatacttattgtgttgtcggcaactctagacgtatctagttcagagataaactccaatatgatattaatcatactttttttttaatgtgtaatgatacacacaccttctttatcttaaacattatattaatatctatcatgtctttgtatatctcttttcccgncacaaaatacggacaacatggagaattataactttcttntatatatcttcaattataataaatacgaaatgtgtctcatattctcaacgtattgaataatgtttttttcctaatatatctttatacatagaagaagctct

SEQ ID NO: 89519 - DNA, 483 bp, Glycine max
  unsure (1)..(483): unsure at all n locations
actcgagattcttcatgttctctcaaggttggagaataggatgagtgtgaactaccaagatcaccacgttggaagatctttattcactctaacatgactgagctccactagccatcttggggatcaaattagacaaaaccacattnttaatagctaatcttgacatcctgataggacctttgctcctgaactaagatcctatttanggattcatcgagtgtgagaaanacaattccacctacacaatcatctagtgtacattaatttcacagaatccccatcaccttggtttttccagaaaaaattgtaattattataaataatagtatatgactcttaatagatattcataacttgaaagtaacacaaattttaaatgaattctaattaaatattaaaatttacaagtaaggaatcctaatctaatttaagtataagagaactaatataacatgtgttaagaatatatctattgtatactat

SEQ ID NO: 89520 - DNA, 242 bp, Glycine max
  unsure (1)..(242): unsure at all n locations
gcagctgcagctctcaaagagaacatctgaagttttagcttctttttgtggcanccatgaggaacccctggaaaagacatcttcaacattcctgcgaataagggttgaacactcaagagaaacataaatagggaactcgatagagatctcacctctctctgtgatgtgaatcacactcttcctcgggagtagcactcttcaatctcatatgcctatgaggaaccccacaagaatcctactct

SEQ ID NO: 89521 - DNA, 447 bp, Glycine max
  unsure (1)..(447): unsure at all n locations
tcagcttaaccangngatatggaccatttcaagtgctatgaataatcaatgaccangcttttctttgttagctgcccggtgagtataatgttagttccaccttcaatgtctctgagttatctctttntgatgcagatggagaatccgatttgaggacaaatccttctcaagagggagagaatgatgatgacatgaccaagagcaagggcaaggatccacttgaatgacttggaggacctattgttgatgacatgaccaacagcaatggcaaggatccacattaaggactttgatgacctatgacaagggctatagctaggaaagccaaggaagctcttcaacaagtgctgttcatactatttgaatacaagcccaagtttcaaggagataagtccaaggttgtgagtagtatcatggtccaaatggaggactaaatgacaccacttt

SEQ ID NO: 89522 - DNA, 431 bp, Glycine max
tcagatgaaacatgggaaataaagaaaaggaacgtgaccttgcgttataatctaatggaagtataaggaatgaaagagcataggtgaaaacatctttctacaaattagcgttccttttaatgttcaccataaattctcggagaataaaaaataaggggtcagacccatattaattttacctccactttcaactcttcattgtctcctccatacccaaacaataaatagtggcaatcttgtccaattttattattccaaaattagccattaaaataaagggttaaagctggaaagtaagactaatattacaacctaatgatgaacttctgccattcgacgaactgaatcatataatggcttctacaggcgctccaattgctgtttctcctttgatgtagtactacataggttactatcataaatattctaaa

SEQ ID NO: 89523 - DNA, 287 bp, Glycine max
  unsure (1)..(287): unsure at all n locations
aatcttctggagggcccaagngggcctggttgctatctgcacccacatntttactaaatacacccccagcttttttttggtgcttctttttttgaaagttacggaaacttacgaatttcgtaacgatacttggtttcttttcgtaatgttacggaacccntgccggattacataaatcatcgctttatttgacttacggaacgttacggaacctcacgaattgtgcaacgatgcttcctttnttatttccggtatgtcacagaaccttacggattgtgcatcaatac

SEQ ID NO: 89524 - DNA, 236 bp, Glycine max
  unsure (1)..(236): unsure at all n locations
gagaatcaagatacatcatcaataagatctctagtaatttagggagggaattccacattgaaacacaagaggtttggccagaaattaagctaaatgtcttttcaagagattactctctgggtaatcgataccagaggatgtaatcgattaccagtggtcaaaatgatttataaccactattatgaaattgaatcanatttacactgtgaatcgattacacatgctggtatcgatac

SEQ ID NO: 89525 - DNA, 447 bp, Glycine max
  unsure (1)..(447): unsure at all n locations
catactctaatttcgtctggngactaccattcactgattcttgctagcttgcattgttcaacaccagttaccgcacaagacgaaagatcattcaatgttttgatcaagaatgcaaaggatatcacaaaggaggggcaaaagggtctttttattgagtttccttgaccctagctcgcccagacttacctctagcttgcttgggccatcaaaagacttcaatgttaagaaaccagctcgcctgggcgagccagttacttcatgactaatgcatgagctcgcctaggcgaagtgccatggtcccaaatgcctttntntgctataaataggcacacaggggagctgaggaaagggttccaaggttctaaaggtgagggaattgagagaagacagaaaagaaaacaaagctgaggcactaccgaatcgcgactgtgatcaatctctacatcg

SEQ ID NO: 89526 - DNA, 442 bp, Glycine max
  unsure (1)..(442): unsure at all n locations
atcctctgagtcacctgcggctgcagctataaaatgtccaatgctaattgccctctcccccccatgatctagagggttcatcggtattaataagctcttcattatatactttgctccgcaagttgagtcatccctcttctttgagnagcatacccatgttcctaagctgaagttctccttcaaaataacatccatgtgcaacggatacaaatctttggtcctcatggggtctttgtccatgaaactgctagatctatgtacatgcacaagtgccctaagaacagctactacattcatgtacatgcaatattattgcatcaaagtcactgtctgcaattgtatgtcttatgaataaaagtgatcaacccttcgtggttaagntnttctttccttccctggggaaaggaaaggaaaggaaaacgacttatgtttactctcactt

SEQ ID NO: 89527 - DNA, 391 bp, Glycine max
  unsure (1)..(391): unsure at all n locations
ctgaataatatactngtccttcattaactgactntgtgcttggtgtgccacgatcatcaaagtactttcgacacctattgtatgttgatttgaccaacgctgctatgggaatgttgcgacaatccttcaaaaccttactgatacattctgagaggatggttgtcatgtgaccatatcgacgtccttctctatcaaaagccatcggacatttctcctttgaaatgcgatcaatccatgttgctatggctggactcagctgacacaaatattctaaattttgataaaaaaatgtgttggcaaggagtgtaggctgcataatattatttatgaataacaatnttaagtatatatgaaacttatattaacgtgaccatcacatatgaaatcttac

SEQ ID NO: 89528 - DNA, 462 bp, Glycine max
  unsure (1)..(462): unsure at all n locations
agcttcaaagactaactcaaggaaataagagtgtgtatgagtataacanagagagggagatttccttgattagggcttaaattaaggagtctcaagagaccaccatgacaaggtttttgcatggtctcaatagggagatccaagacattgtagagttacaccactatgcctctttgaggatctcattcatcaagctataaaggtggaacaacaattaaagaggaaacaaatatacaagaaatccccctatgactcttaaacttggaaggataaggagacattcaagaaggaggaaggatcttcattcaaatctcatgaaaatggtgttgcccttggtaaaaataattctaaccctattctcacttcttcaaaaatgagttgtattaaaatgttataagtgctttggaagggtcatattgtctctcgatgacgtaacanaagaactatggttgtgttgggaat

SEQ ID NO: 89529 - DNA, 467 bp, Glycine max
  unsure (1)..(467): unsure at all n locations
tatatggtacattcatgttgaaaaaagtgatnggcgttcactttttatgtgagtttctatcttntatacctatgctgttagatnttgtttaatgagttgtggcgtgttaaagtttaaaggaaaataaaaagttaattggtttatttatgttgatacatgggttagtagtatactataaaatatttggaaagatttaaatattcattnttctttctaattataaaacttagnctcttaatttctatacttacaaatatcctttttaatgtctatacttactcttcataaagtgtggtgagatttctatgattaaataatgagatacgcacatgagatgagggaaaagcaaaaagaaaaataaactacatcatataataatgaanaaagcacaaataggtcatggacctggagcatgagagagtggagacgatattgtagtgtatagataataaacatggatgcccatg

SEQ ID NO: 89530 - DNA, 475 bp, Glycine max
agcttctcgatatattataaacctgaatcggacttccgtttgaacagttatgaccatctgaatttctcgagagcttccgttgttcaatttcgagcgtctcgatatattatgcgtctgaatcggacttccgcgtgataagttatgaccattcgaatttctcgagagcttccgttggtcaatttcaagcttctcgatatattatgcacctgaatcggactttcggttgaaaagttatgaccatttgagattctcgagtggctgcgttattcaatttcgagcgtctcgatatattatgtacctgaatcagacatccatgtgacacgttatgaccatttgaatttctcgagagcttccggttttaaattcagagcatctcgataagtgatgcgccagaatcggacttccgtgtgaaaagttatgaccatttcaatttctcgagagctttcgttatcaatttcgagcgtctcgatatata

SEQ ID NO: 89531 - DNA, 379 bp, Glycine max
gcgcataatatatctagatgctcgacattgaacaaccaatgctctcgtgaaatcaaagggtcataacttgtcacacgggagtccgattcaggtgcataatatatcgagacactcgaaattgaacaaccaagctctcgagaaattcaatggtcataacttgtcacacggaggtccgattcagacgcataatatatcaagatgctcgaaattgaacaacgaaagctctcgagaaattcaaatggtcataacttgtcacacggaagtccgattcatgtgcataacatatcgacacgctcgaaattgatcaaccaaagctctagagaaattaaatggtcataactttcaatggaagccgattcaggccctaatatatcgagaa

SEQ ID NO: 89532 - DNA, 468 bp, Glycine max
  unsure (1)..(468): unsure at all n locations
gctttataagcgcgggtttgtgagacanatgtcatgcgttctcgatatgcgaagatgatattccgagtacctttggattggtacgaccatgctctcctgatttccagctgggaaattggcgagtggaggaacgccccggcatttacgcaacaagcataatgtaaacctttacgggtttaaaagctctatagttgggcctaggctttagagttnttccttttttaagggctttgtgtctctttgcttttgaatntataatacaaggatctttcttcatctgttcctggtctctacccattctcattcatttgcatgtttacttctttttctgaaacggcagatccgatgacgagtcccccgaaggtactaatacctgtgacccgtctatcgacttcgagcaagaaaatgaatcatacggaagatgaatgaaatgaggatgtgggacttcctccagaactagaaagaatg

SEQ ID NO: 89533 - DNA, 488 bp, Glycine max
  unsure (1)..(488): unsure at all n locations
agctctgtagagggctggatcttgagcctcaatggtgattttctaccatggagatgcagcagaagataaaggaaaagatgtgagaggaggtgccatccactanggaataagccatggaagaaggagcttcaccacaaagagagtgccttggataagaagcttagagaggaagcttcaatggaggaaaagaaagagagagagtgagagagagagaaggggggcacgaaattgaatgaggaaaagagggagagaaagtgaactttgaagtgtgtctcacaagactctcgttcatcaaagttacaacaaatgttacacatgtttctatntatagcctangtagcttccttgagaagcttccttgagaatcttccttgagaaacttccttgagaagcttcctttagaagctagagcttatctacacatactcctctaataactaaactcacctccttgagaagcttccttgagaagattcctagagaagcta

SEQ ID NO: 89534 - DNA, 479 bp, Glycine max
  unsure (1)..(479): unsure at all n locations
aagcttctacttatgtggcagggcgggcttccttcaccttcttgtctccaacgcgaactttgaccattgttcttccttcccgcgatgcttcttttcatgtgcgcctgagtgggcttatagcctaaaccatacttcccacgatttccttgggtatntatcacgctagttatgccgccgctggttttgcctaaacccataccgggttcataaccggtcctcaacataactcgggccatcattaccgctgcatctgacaaacaatgctgcccaaagagggagtccacggaggaaatgctgaccacctcaaaagactggaaagcagtttctaacgattcttctgcggcttccacataaggcatggaggatgggcagcttaccaagatatcttcctcgcctgacacgatgaccaagtgcccctccactacgaatttcaacttttggtggagtgtagaaggcacaactcccactgagtggatcca

SEQ ID NO: 89535 - DNA, 491 bp, Glycine max
  unsure (1)..(491): unsure at all n locations
agctacatgccananatatctacagaaggagttagattactgaaacctatatcaagccttaaattctttcaatattaccagacatatactaacaatctttntatcaactatcaagaagactagacctcatttagtcaaccacattatagtgactgcaattttataccagaaggcagatacaaaggggcaaataatcattattaattgcaatcatatctgtaaacctacaggtaataattaggcaatctgtgagaatgagggggagcagggggggctgatatgggatagatgaanacccacaggccacagctaatatgtatagcagtaaaaaagtcacagtaaaatctaaaagaacacgtatagcatagcacattatgaaggagagcaacattcgaatgggctatttggtcactcctgtatcaattaatggtgagagaacttaatttacatagctataacaggcttcaatatcttcaacaagtccatgacat

SEQ ID NO: 89536 - DNA, 431 bp, Glycine max
  unsure (1)..(431): unsure at all n locations
aaataaatcaatgcatgtctataagtattgctaataaaaataagatatggaaaatatctacccagtctgtatgcctgtgatgagattntgttaatgtacgtangtattagtaaggtcaggtttaaataaaggttaaataaattaaagtttattttacgaattaaaatcaacttttatatattntcagtttttggaaaagttatacaagtgcacaacgtagtaatcctccctgntttagtctgcaaagttgattgcagcagggctccaagttaatttgataatctcaanagcatacgataccagataagtgagcctcaaccattgattatcgtggtgcttngaagtccctcttaactgagccattgaagttcgtgattctattttcatagtaagaggagacaagactcgcgtggagaagaatgccatttact

SEQ ID NO: 89537 - DNA, 456 bp, Glycine max
  unsure (1)..(456): unsure at all n locations
gcgctcagctaccccagaaggccttaatagngctttatatgagcttcatggaggaagagaatgagagagggagagagagagaatggtgtggaaactgaaggagaatacggagataagtngaactttaaagtgtgtctcacaagtttctcattcatcataagtatgacaagtgttacacatgtttctatttatggcctagcacatgggaagacttcttgtgaagctagaggaagacagcttccttgagaagctagaggggggatactcacacctctctaatagctaagctcacccncataccanaatacatgagaatacaatggaaagcttccttgagaagtaaggaaggtggcttccttgggaagcaaggaagaaagcttccttgagaactaaaggggggctactcacacccctataatagctaagctcaccccatgcccaaatacatgaaaatat

SEQ ID NO: 89538 - DNA, 402 bp, Glycine max
cactggtaaaactaactttccaaatgttagccttcgcacgaatggccccgaggaagcttgcctcaaagaggtccaggaaggacaaggcggccgaaggaactagtttcgctccggagtacgacagtcaccgctttaagagcgctgtacaccagcagcgctttcaaaccattaagggatggtctgttctcctggagcgacgcgtcaactcaaggacgacgagtattctgatttttagtaggaataaggcgccggcggtgggcaccactggttactcctatggccacagttgatccacaaatagtccttgaattttatgccaatgcttggccaacagaagaaggcgcgcgtgacatgagatcctgtgtatgggtcagtggattccgttcgatgccgacgctatca

SEQ ID NO: 89539 - DNA, 300 bp, Glycine max
  unsure (1)..(300): unsure at all n locations
gctcatgagccatatgagtcatgtatgtaaagatcattttacacgacgtagtaatctaatcctggaatcaccgttagttcacagtaggagatctaaagctttcacccattgaactaaatntcacacaacacattcaacatactttgatcgaataacacatccatcatcttttccaatcatacgagacctctgaagaagaagagtttcgtaaacccaactctgattttgattgccacatgatacgattatcaccgaattgcttagaacacatttgaagattgaatcccactttcattgtga

SEQ ID NO: 89540 - DNA, 363 bp, Glycine max
ctcgcttctacaagaacacaagtgatgctcttgccacacactatttttctcttctccttatgtcgcaagaatgagaccaacaatccaaattaaatcaatttgcgtatcgaaagattaacaatattatggcatttgtttatattgcctgcaggatatgaaaagagtgcaatttccatataacgataatattacataattgttaaccactcgagactcatctcaatatgatcttacgataataactctaacaaatactaacattatcatgcttaataacatgtcattatataatacaattaacaatctgtgcatagagtactctaataaaatttataaagatacagtttcaagaaaatatatttc

SEQ ID NO: 89541 - DNA, 348 bp, Glycine max
aatgagatcctctagagttcctttctgcttgcatagcaatgcccaatcagcaagactaacctgttcctttggaaggctaggattgagaactggcctggcacacaaggcttcatacagaacaaccccaaatgagtatacatcagaattttcagtcaattggtgcctcctgaagtattcatgatccaagtagccaaaactacccttcaccacagtactaacatgaccggtgttcatgtttggaccatgttttgacaagccaaaatctgaaaccttggcactccagttttcatccaagagaatgtttgtgggtttgacatctctatgaatgatggtgtacttagccccagt

SEQ ID NO: 89542 - DNA, 501 bp, Glycine max
  unsure (1)..(501): unsure at all n locations
cggtcctggcttcgctcatactgtggtcagatatatntattattctttataccctactgaactattttggcatggctgaaactggctgggtaaaggtgtatcagttaatctcctagcatgtcctctgcatatttccttcactcacagatgtatgtatatataaattcttttattttgatgctgttgcaggttgcatatcacaagacattaaaccaatagtatgcacacacctactccatttaacaatgttgtctggaagagaaagtgatttatagaacagggagaacactgcaaagagaagtttcagctcgtgttactaattttgtattgttataatacttgtcggtagagagcaaaaatgtaatatcctctctcaggtactctctgtatattgtatacttgctgaagaaccgngataattaacactaataacaactagtactgctgataatnaaatttcaatctntcgtttgtatgagaagattccatgtgttggattta

SEQ ID NO: 89543 - DNA, 424 bp, Glycine max
  unsure (1)..(424): unsure at all n locations
ttaatagtcgntttttacatcaatttaatgtctganaacaattaaagtgattaatattttcatcttataagttacacagacgaagataatgatttctatcttttaagaactaatgcaatcaacttcaaatcattcaaaattaaagatgatgtttcattcttaaattaatttaaacatttacttgttaattagatagctctnttgctagagtttttcctttcataaagttctcgcatcacgaggtttttcaattgtcatatttttttatcttttaaaatacgtgcgtgcgagcttcatagcaatttagtcggtttatagtataatttagtgtgttagtctttttcanaatatagaggaattagtctctattaccatgtggctattatgtgtccacgtaaaacagaaatatggctattatgtgtat

SEQ ID NO: 89544 - DNA, 443 bp, Glycine max
  unsure (1)..(443): unsure at all n locations
acagactggcgaacccactctgtctcctgcaatctggtggtttaaaacatgcaacggtatatagagtataaacaccaactcctgttctcaatgttacttaaggggccgaagttgaatcattataacattgttgactgggatggatttcatttcatattttcatcatacaatgcattaaagtgatgatatcaatgtttatattttcaaattatctctccatctttgtattcctaactaacaaagatatttggttgtctttgtcaagttgtgcttatctttctcgtgtgctggagtctgctttactgctttaaaagccttacaaacaagcattcctgactgattggatgatattgataactgacattgaaatattgattaatgcttattaataaatagttggtgcttgtcagaatcaccagataggcggatgatctnttataaag

SEQ ID NO: 89545 - DNA, 489 bp, Glycine max
  unsure (1)..(489): unsure at all n locations
gatcttaagcacctgcngctgcaacttttataataagcatctcttttttatcattttcaacaatgaactagattntaataggtgaactctcttttagtgagaaacaaacatactaaatatatgtttcttttcatcgatcattacatattttatgtttctgactcaatttcattctattattttatgttcattttcatttttcattacatctttttatcaattctttttgaatatattcctttattatatatttctctacctcccttccttctattgtatatcccaaaaaatgagaacggggtatccatactctttctagtatatcctaatatgctacagcaattttaagaaactaagcatttctttttattctgttagtgtaagtttttaacaacttgaaatggattcgcatactacctcacacatgcatgnttatatatatcttcattcgaatttatttntccaacgtaaatactagttcattgatat

SEQ ID NO: 89546 - DNA, 373 bp, Glycine max
agctcgaaagagcccgggtagtcaaagataagatctcgtctatatctcatcacagtctgaagagagtctgatgaactcacggacgtcgatatggccaccgatgaatcctctgaatgagacacctataatgtccgataggaagaacacgaccgatgccagttttgatgcgctttatacggctactatagtgagctcaaactctgaagaggtgaaacgaatcatcactgttcaacggcatgatctggaatgactagctaaaggcttgccttaggtcgaagagaaatacgccccatctcttaagtgtgatattgaaaggaatatgtgggccatcatcgatgagtgcaaagagaagcttaatctagcggcgactcac

SEQ ID NO: 89547 - DNA, 434 bp, Glycine max
  unsure (1)..(434): unsure at all n locations
taagctctgctgttaggaagttctagagagagaaaggccaagttccatagagttctgagagattttgttgtgtgaagatctacagagatgtgagttcgaagcgaaatccgttctgagaacttgagatgagtttgtgagtgattgtgagatcctagaggtgaaggagacatcctcaccacttgtgtttatgcagtctttcatcttgttcttctctttgntgtaaaggaggtttctcgactattgaaagctaaatcctctattggatcttccctgtaggtacctgatgtaaatatatttctatctatgtaatgatgttatatgtgttctctgtgctatctgctattcattccagtgtgcttttaacttgatgacgtatatgcatgctttgttagggtcattcaacagtgagaattggtctgattctaaagtccttg

SEQ ID NO: 89548 - DNA, 434 bp, Glycine max
  unsure (1)..(434): unsure at all n locations
agcttagagaggaagcttcaatggaggaagagaatgttttagatagagagagnaaaagtgacatgggaatgaaggaaagatagggagagaagttgaactttgtagtgtgtctcagaagattctcattcatcaaagttaccataagtgttacacatgcttttatttatagcctatttagcttccttgagaagctagtgttacacccctccaatagctaagctcacccccatgccaaaatacatgaaggaagaaagcttccttgagaaatttccttggggaacaagtgttacactccttggggctcaaacttagcctatgagaccaaaatctaccctaaggctcatgagaaccctagggccttctcctacatctctacccaatcttcttggagtcttctatccaatgccctggggggtaggattgcgttatcccct

SEQ ID NO: 89549 - DNA, 470 bp, Glycine max
  unsure (1)..(470): unsure at all n locations
gcaacaacataaactattttcatctctgactatgttctaattcatacaatgttgtacttcataatagtgatcatagagaaaaggcaatcaacaacacagacaggacaaaaaagctgaaaagcaagtctgtgctattgaggttaaaattaagatgaaaatacccatattagcctttatacattttaagtatattttggtggatgactttatgtagttttactgtcactttttcagacagacacaaataatttgtatgaaatccaatttcaataggtaacagaacaaacctgatatatgaagagctactctctcatattatagtacatgtgtataaatgggattaaatgaagtacatgaaagaaccaatgttgtaatagcacatgattgaactggttgtggtttaatatatcatttactggtgacaacatacacatctatatttacatgggattaatangtagcacttgatg

SEQ ID NO: 89550 - DNA, 449 bp, Glycine max
  unsure (1)..(449): unsure at all n locations
agctntgaaagtggtggtttcaccttctcgctaagccattctactggcttagcgagcatccgctaagcgcaacactcatgggctaagcacgacgaagactctggaagaagataagttgtacaggtttgctaagcgcaccacttcatctcattaagcgcaccgcttcagttcatccgctaagagagaaaggcacgcgcttagccaaaattcactaatgtgcgctaagtggtccataattgcgctaagcgcacgagcacgaacaaggccacctatntaagcgtgaaatcagattttagaggtggagtttggactgggattcagagctttgcatgtctagagtttctagagagagaaaggtccaagttttagagagttttgagagtttttggtgtgtgaagatctgcagagaccagagcttgagaacgagttgtgagtgattgtgagatcct

SEQ ID NO: 89551 - DNA, 415 bp, Glycine max
  unsure (1)..(415): unsure at all n locations
gatggtacatgattgggacttgtatgattcaatttgggcaanattggatgagggaaatagtggttttcgaaatctgcactttatgcagaattntgttgttgaaatgtgcagcacgaatttgtataagtgcagaaaaatgcttgtgtatggctggttgtgaaaaggatagtacatatggggttctggacatttgctagcagatcccaacggtcataatgtagacttatgtactagagacttccagtaaaattttcgagtcgatccaatggttaacgaattggaacgaaggagatgttactggggtatttgtatgtgaaaagctgtgattgagttgtgttttatgcagagttntctgcttttgccctgttttgcttggtttgttagtccatgatgattggatgtagaattacctgga

SEQ ID NO: 89552 - DNA, 423 bp, Glycine max
  unsure (1)..(423): unsure at all n locations
agcttatcgccaaaatatcttgtctgaatgcttcttatttcgagacgttagttggatagccgcgttgactcaccaacaatgaatagaaagagacccanatgacaaagaataagctcccatggatgccattctcttctctggattggaggacattcaacttacacaaacaacccttaacgaagccaacccaacactatgcacgggtgcaccactatgaatcttagaccgacatactccttttctttattgcgatcgatgaccagtgctaggggaagaagacgcagcttccttctattcttaaacgacaacattttcgttataaggaactctaatcttctattttttattttaatttaattaaagtatgacgtcatgttatatgacagatggtcaacttaaaacaccaattggtctagaaaatat

SEQ ID NO: 89553 - DNA, 470 bp, Glycine max
  unsure (1)..(470): unsure at all n locations
ctagtaaatgtgcaccattaagttatcacatacaatatataaagatatacatttatnnatttattggatatgactattatacttgaagtatcaaataagaattattaaagtgattgaaatataattcttatttattactttttattgtgtgatatgatgtgacaacctaaataattaatatcaagaaaataattattaaatgttgacattaatattgatattataggtcaataaaatatttcataatatatctatcttaaaaattagtttataataatgaatatcataatacttttttaggttaaattaagtttagttctttaatttattttttagactcaatttgattttttaattnntttgattcaatttaattttttaatttttttanattgattcaatttgatctttcgatttagattataaaaaatcacattttatgttagtttanaactgtcactaaatgtata

SEQ ID NO: 89554 - DNA, 511 bp, Glycine max
  unsure (1)..(511): unsure at all n locations
atcctcagagtcacctgcngctgcagcttgtacttacccattttgatgcctttttttaacttgctntaccttataatgtacttaagtgattcatgatcactatgaatgacaaattccttggaaacaaggtaatgttcccaagtttggagggctcttattaaggcgtaaagtgctttatcatatgtggngtagttaagggtggcaccactgaatttttcactaaaataagcaatagggtgcccaccttgtaacaatactgctccaactcacactntagaggcatcacattctagctcanatgttttagaaaagtcaggaagagctacaacaggtgccttggtgagcttttctttaagaaaaacaaagacttgctcttgtctttcacccaaagtaaatgccacattcttcttcaccagctcatngagaggtgaggtaattatagagaaattangaatgaaccttctgtagaagcttgctaacccatggaagctcctaatnatctccacacttt

SEQ ID NO: 89555 - DNA, 461 bp, Glycine max
  unsure (1)..(461): unsure at all n locations
tcgagaaccatatatgtgtaatcgattacacaatgcanattttgaattcaaattttaatagctggtggaaatcatntttggccactggtaatcgattacatcctctggtaatcgattaccatagagtaaatctcttgaaaaagactttttaacttgcatttcttggccaaaccttttgctacttcaattaggaaatccctttcctaattaatatacccttcctaagactctagagactgtcttgatcatccatcttgaatatctttaatttctttgtcttgaataaagctttgagaagcatgtgatccttcggcatcatcaaaacattcagcttgatcctttgtctacaatctccccctttttgatgatgacaatccttgaaatcaagacaagctatatacaagatgatagcacgttcacacaacccttactcccnctatcntttggcatgtatgcctaac

SEQ ID NO: 89556 - DNA, 499 bp, Glycine max
  unsure (1)..(499): unsure at all n locations
cggatcttaagcaccgcggctgcagcttgatgttgtgttgatgcataaggtatcagactctaagcaagaaattaggtgcatatagagctacagatgtctngcaatngatacatacaaacatttgtgggccctttcatacaacttcatggaatgctcaacaatattttatatcattcgtagatgattactcagatatgcatactttgttcttatacatgaaaagtcacaatctctggatgtgttcaaaacatttaaagttgaagttgaaaatcaactcaacanaagaatcaagagtatcagatctgaccatggtggtgaatactatggcagatatgatggtttaggtgaacaacatccggnngcctttgctatgtacctggaggaatgtggaatcgtcgcacagtacaccatgtcagggtcacctagcatgaatggtgtgcctaaaagatgaaacagaactcttaaggatatggtaaaaagcatgatttgcattctaact

SEQ ID NO: 89557 - DNA, 383 bp, Glycine max
  unsure (1)..(383): unsure at all n locations
attcaaggtgtggaaaccaagtttgcgacatatacacgtttgaggatgcccgtctgaagtatgaactattatccacaagagaagaaactaaaccctacaactattactaggtatttcattggatatgcttgaaagtctaaaaggttgtaagttctattgtccatcccacaacactatgattgtggaatcaaggaatgccaagnttcttgaaaatgacttgatcagtgggagtgatcaatttcagaacatgtcttctgataaggatcactatgaaaccgaaccttctggacaagttatagggtggtagacattcacacccctcaagttaatatgcgtgtttacaaccagcgattgatgttcactagctgttgatagtgatcatg

SEQ ID NO: 89558 - DNA, 402 bp, Glycine max
acctcagaactcaacactcagaactcagcacttcgcaccttccctgtgtgcttccacgtcaatgcttacatctttgtctatcgaacttgcataaaatctgtgcgatacactatttttcttagataacaaaaaatgaattaataattgtttaacaaacaaaaataaatgcatgtaaaaaaaaaaatttcaatctgccttgcttgaccgtaatactaccagacaataataattaataatatatattacataacaatttggaacctgactcatttatatgagatatttataaaaatatatttgaacatatattgattaaaggagtaaatttgaaaaatattatataaaattatgtcagaattataactccgattaatatggagaaacgaaattggagttaacaac

SEQ ID NO: 89559 - DNA, 498 bp, Glycine max
  unsure (1)..(498): unsure at all n locations
cctcactctgcactgtcgaaggggactagcctctggattgtataaattagcataaaactccttgactagggccacatctatgtgaccatcatgctgcatggtcaagggtntatgccatctctgcctctcgagctccttacggaactcatcatactgggtcacatacaaatcaacattcctctcaaggaggatgtttctggaatgcatgttttgctcataccgttcccaagcgacctcggaaatgaatctagacgtgtcatatggctcttgaggtctggagatggatgattctctctttttggaggccatctgcatcaaaagaagcgcaatagaaaaagttagacaggttttattgaagaatgataacagaanaataaaacaggataaaggactcggcgcttatcgagacagactcgcttagcgcgctgtaagaaaatatcagcatacgcttagcgtgcttagtgcagctattgagaaataaagactctggctaagtga

SEQ ID NO: 89560 - DNA, 382 bp, Glycine max
tcctttatatttgattcagatcttttggttgttatccacccggaaataggggtatttcaagggaacctgtgatctatgggaaatatgatctctctctcaaaagcatgttttttgtaccactgcaaaagaaaagattgtgagcgaatgaacaaatctcagaaatcgtcatcgtttaactaattttgtgctgctttttcacgtaaaagagaatctttgtacaatagaagcagaagtgatattgattattcaagaatcgaagccaatctgctttatacatttacctaacatatggcataatagagcctgcgattctttgatttgatgtctagtcacacttcaaggtggaagttatatgtttgaacttatacatgttaggattgga

SEQ ID NO: 89561 - DNA, 429 bp, Glycine max
  unsure (1)..(429): unsure at all n locations
ggatccctgagtcaccgcggctgcagcttgcatggtgagaatacagttgatcttcttgtgatgagattgtcaactgcccatntagtgcatttggcccccttttcttatcaatgccactgctactaattcattcacaccatccttcttctctgagtgatgctntgacagccacattactctctttgcctttttgttccaatgcaatcttatgaacaaaaaccaaactaaagggaccctgaaggccaaaaagtcttatcttctcttcccttgaaagaaaccatcaaaagttcctttttttttatttttttgccgtttatgttcccctatctgttgttggttaagtggcaccctcaagtatctttgatgaatcaaagacagtttttttgtgccctttgaatcttctctgtccctccctcaacataagacttg

SEQ ID NO: 89562 - DNA, 416 bp, Glycine max
  unsure (1)..(416): unsure at all n locations
gaaccatggatgcacagatctggaacttgtgagagaaagtgagagaaagagagaaaggaaattgatattattgcaatctgaanaactggttagagtaagttacaacaaaggtctatatagacctctgaccctctgaactaacactaacagaaattgacttcctaatactagtgaggtgctgttagctaagctaacaacccttacattcattctacaaaactggtttcacagttatacaagcacatactctaatactttgcatcattcatgccgcataaaataattagtataaaatgaaactgggctagtcattacatttatagtaatgaaggcatccataatcaattaaataatagaatacaatagcatacctaatttctttcaagagataaaataaacacgaaccaacttcatgt

SEQ ID NO: 89563 - DNA, 364 bp, Glycine max
  unsure (1)..(364): unsure at all n locations
gaacaagttttataatcttgaagaacaagttaaagtgcttattcccgtgactacctgtctnttggtgcattacatnattcacaccattctgtcttctgggcttctccaattcagcttaaatgtggctagaaaactacgatcgatcctcactggttttatgcaatataaatgcatacattcgctgcccatttaaagttggttttcaaatgattgtatggtacacattaagatacgacggattatgtttgctgacctttatcatatctgagatctactgaatagttgcgtgggcatatcatggcttgatacgaagacataaaccattctcttcatatcatagtcactgttccactacatatgtatg

SEQ ID NO: 89564 - DNA, 378 bp, Glycine max
  unsure (1)..(378): unsure at all n locations
gttgggatgttattttttaatgctacaactagtagctggagtgcatcatttagcttctagatattgntattgaatcacaaggaaaataataaacttagntatgtgtattttggtttattgcgtcactttcctgtaaggaggngggttttagggtgttgtaatatattctaattcgagaaatatctctccccaggatgtatagaattttagaccatcgtgtcaagttcatttagttttgaacttgatcatgtacttgtttcaaatcacctttgcccccaaatntgctctggtatagcctgcctgatgaattattctaacacncaagttccaagccatactattgtncagctatgtatattaattntatacttctgactg

SEQ ID NO: 89565 - DNA, 342 bp, Glycine max
caacagccacgacatttgatgacctctcctagaataaatatttatgtcttacctaggattaacatctaagatgagtgttctgaattgtggctccaagtcatcccaacgtcaacaatagccccattggctccataagtatcctagtgccattggcctattaaactgactaagcctttagtgatacccatacttatttggtagccaacttcaagattggctttttagacgactaacactctaaatgaataagtgggtatttatctctttggccatgatcactccaacctgacttttcttgaactggctgattcaatgatggcagactgtgaaacttcatgcttc

SEQ ID NO: 89566 - DNA, 294 bp, Glycine max
  unsure (1)..(294): unsure at all n locations
gcttcttgagaagctagagggggtctactcacacccctccaatagcttagctcacccccatgccanaatacatgaaaatacaatagaaagcttccttcagaagctagagggggggctactcacagccctgcaatagctaagctttcatgccaagatacatgaaaatacaaaaaagtccttactacaaagactactcaaaatgccctgaaatacaaggctaanacactatactattagggtacccttaacttttacccttanattgtanggtaccctataaacctaaaatgacat

SEQ ID NO: 89567 - DNA, 441 bp, Glycine max
tctctagaaccttacaggttgtgactttttcatagaaattatagtaaagccccatcaaaattcaaacactacaataaatctcacaatgctcagatgccacaataatccgatgccacttggctaactaatctatgaaagtcttctatttagaaaaagggttgaatacacctgaattgcccctactcatgcactatatgcatcaaacaatgtgctctcaaacaagcaccaagggagggttaaaactacaactatagtcaaatgatatccaaatgagctgaaattttgtgagcaacaccctaacatcatcaaaagatagcacaaaagatttatacaaaaattcaaagtctaacttgttggatcgagtggcctcagaataattaagaacgggggggttgaattaattactcctaaaccctttactaattaaaaatcactcttcta

SEQ ID NO: 89568 - DNA, 506 bp, Glycine max
  unsure (1)..(506): unsure at all n locations
atccttgagtcacctgcgggcatgcaagctntanataatattaaactcaccgaaatatatataatattcaagaacaagacaccccaagagatgcagatgttccactatgttgagaaactgatattgatttcataagagaaaatacaattggctcaaatgaatctcttagcactaatagatatttatagagcagagattctaactatgtaactaactgatagttgtactaactagaggttaactctaactagtagagttaacttacaaagaatacactcatacaataaactnttctacattaagaacaactgattcgtgtacgggagaaggtttcctaagttcaaacacaggagataaatacataagcaacaagtacgagtaacacaaaagggaaaaagactggtaatcacatacagaattaanattaaaaattattattataattattacaacaatttgaaggatatgatatggactaaaggaacatgatactggcatcacctatg

SEQ ID NO: 89569 - DNA, 462 bp, Glycine max
  unsure (1)..(462): unsure at all n locations
tttcgattcattctatgtacccgtactggtccacagtgtgtttcgtgtcattttattctcgncttagatactatctatacccctcggtgacgtgcttaagccattgtacttaagtcatttctcgcttaacttaagaataaaatcaatttccaccgaacgtttgaattgtattatccgttaacttccgttaaaataaattccgaccgttcggtcgtgccgtaaccacgttggagatcaaaaaaaaggtaaaaagaatataataataaaaacaaacatcttttagtaaaataaagcggaaaatcaatcggacgttttctctttgggatttctcattcttaatcgaattgactaataactaaagtgaaactaaggctaaaatcaactcgcctagtcaagctcgtccacaaaaatagggttttgaaagtttgtcatttcaatttcttactaagtaaaatggatcat

SEQ ID NO: 89570 - DNA, 415 bp, Glycine max
  unsure (1)..(415): unsure at all n locations
agcctngacggagttgtcgcatcggngaacaatttcactntanaagtgngtcccaattggattcctaattntcaacttacctatntggaagtgacatcatggcagttaggtcccagctttccattgtggattcagtcacaaaaccaacttcaatatgttggactatctaacacggggaatttcggttctattcccacacagatgtgggaagcactntctcaggtttcgtatataaacctctctcgtaatcatatccatggtgagattgggactacattaaagaatccaatatctatccacgttattgatctaagctcaaatcacttgtgtggtaagataccctatctttcaagagatgntgattggntagatctttcgagcaattcattctctgaatccatgaatgactntttat

SEQ ID NO: 89571 - DNA, 444 bp, Glycine max
  unsure (1)..(444): unsure at all n locations
ctatcagtccttcgcccacttcttctggtagagatcctttcaacaaaatatttcattgttggaatataatttttacattgactgttgagtttcaatggtgtagtactaaatnttgcactctattttaatgtgttatttagtgcattcagttgaaggaagttcccagaatggtagaaagcaggggacagatgaaacggccacagctaaaaatagtgcatcttatatcgggaagagattgttagaaagtttggttgcagttgcagggcttctaatttggttttcatgagcttaactcaaatattacctatatattaccattttcatatcacgttaaaatgtaaaccattgatgagttgatagtgtaaaaattatctacactcttgagtgtattaaatctctgacagactcacaatagacattattgcaaaaccttattggagaatt

SEQ ID NO: 89572 - DNA, 472 bp, Glycine max
  unsure (1)..(472): unsure at all n locations
agcttatattaagcttagggaaaagaaaatgttctatttcctaggagtcacttatagtagatgaaaatgttccttanattgtctgattcaaggagacttctatgaacagtagaaaaataaaatgcttgttctctatacagatattgggtttggaagaagatataaacaggcttaacattattcatgtggcaggcacaaaggggaaggtactctcttcacagtttggcatatttttatttatttattttatatatgatcagtttgttgacaagtcaattcagacaattctgttttttgcttcaagattcaagaacaaattattactactattaggaacattatatatatcttttaaataaattggtgcttggcttatgatggttgaaatanataggttactcaacagttatttaaccaatttatagttgtctgatgcagttgtcaggtatctgacatgacagaaagcacatcc

SEQ ID NO: 89573 - DNA, 434 bp, Glycine max
  unsure (1)..(434): unsure at all n locations
gatactagagagcttcctaatatgtggtatgtcccacttgtngtttttctatctaatttgcaacctataaaatcagaatctaaaaagcctgttagatntaaggaggtacctttgggatacaacaaaccaacattggttgtccccttaaggtacttaatgatccttttgacaactgttaagtgagattcctcangattagcctgataccttgcacaccagaaaactctaagcatgatatctggtctacttgcaattaagtagagaagtgattgttagagataagaggagcaacatgaagactaaaagcttgaagatgttntgtcttttacatgcctaactcccttgagtggcatttgtattagttgttatattgaatgtngcatcttagtccatatcatatcttttgtgcatcatgcatcatcatgagtaagtga

SEQ ID NO: 89574 - DNA, 458 bp, Glycine max
  unsure (1)..(458): unsure at all n locations
tcattgttcaaggagtttcacattctcgactcctttgaaacaaacgaaagcatacctccatccgctcctattacgattttgagctatgaagacttctgtcacatctccccatagcaatgattgaatgtctggagcatccctccaattnttcacgccctctctactattttcgcctcttccatttggctcaccgtgcgagcatgcttgccagttgcactgtttaccgttctacatgtcttgggtcccctattttatttctttctttgtctctccaccaaggttatcagactcgcgattctacgtagaatcgtggaggctctgtaaactcgactagtagaatcgaatcataaactcgtaagaatttactcaaataaaaaaatatattaatattcctttatataaaatncataagtaaatatttaaccctaaaatanatgaaaataataaactttaacaat

SEQ ID NO: 89575 - DNA, 404 bp, Glycine max
  unsure (1)..(404): unsure at all n locations
gtgtgcatcactggagaattaagtttgtagagggagaagacagtgactggtgcgaggcaatagacattcatgaaagtatgagatagaaggagggtcacatgtgatagaagaaaggaagggaagggacatgcatccgaaggcttcaacatgtgaagcaagaagtctcccaaggtggctcccataaagataaaagagaacaaaaactcagatcagaagaatatganagagagagaaacccatgccactttttgcaaataataataataataagaacaaagaacacaaaagcttgtaatgagtggcaggatgttgtgagttccaatgtatgtangctataaatgtangtgactgaggtgagacgtgttctacacgctgtgtagctgtcaagcaaattatatcatata

SEQ ID NO: 89576 - DNA, 432 bp, Glycine max
agtcattcattcctatgagtatgtgttgtagtattggcgaacagaattgccattccttggattatagggttgaaccaagctcatgcttttacaaaaaggttcatcaagtcaagttgaaatatggaaagtaccgtcttgaaaattggggccaaagatgaatcgagtcacatcactgcttcgtctactgcccaacatatttaggattatttgatgtcctttgttacttccagtttcaccttgacaaagatgtcatggaccatgttgaaaatctaaattgattcaaccccatattctgcgtaaaaattcgcaatacttcgactgtacatcattcgcatgcatccatgctcttcattggttgattgctcattgcattctttccttgaaaaaaaataaaatgaaatgaacttatcataaagaaaaggaaacgcttta

SEQ ID NO: 89577 - DNA, 489 bp, Glycine max
  unsure (1)..(489): unsure at all n locations
agctaacgaaacanacaaaagcatacaaaggaagaatgatatgtgactaatgaagaagaaaaaaacctgtgatgctaacanaggaagaagaataaatgacgaacgatgnatggaagagatgaccaaggatgatcggaagagatgacgaacgagatccgaagcatgggagaaaaatttctaggaaggcacagcacgaccgttctcacgaacgagagaaaattttagggttcagaanaatgaggagggtatgcttgtcattttgaaatttcttgaggacattattgtccaagccttattttgggatcaactctccgaaaaggagatttgagaagctggaaatcagagcttaagaaaaagatctgctaagagcttttgcttttgtaataagctaaaaataaaaaataaccaaacactcttaaaaaataaaaaagatcttttttcagtagataagaatgataaagatcttttgggccacatccatatgggccc

SEQ ID NO: 89578 - DNA, 451 bp, Glycine max
  unsure (1)..(451): unsure at all n locations
catgaatgagagaggtctcggagcgactcatagaggaactgacatagagctcacgataggtgaagggagtgtattataatttacggctnttgataccatagttagtgatgtagctccatgtggagcttgtaagccttgaatcttcttcatcaatagagacctttgcttcttgaaggtcaatggcagcggaatggagaatgaagaaagacgattggagatgccacttcaggagaagatgagtcaacaacaagctcaccaccataagaagctatggataacaccttgaatgtangaggagatgagtggagggagaaggagagaaggaacacaaaattttgtccctcacatgaggtctgaactgtgaagtgtaattctcatatgatcaagagtgaaaaaatgcacacacaaggcctctatttaaagcctaagtgtctgtcataccctaatttcg

SEQ ID NO: 89579 - DNA, 481 bp, Glycine max
  unsure (1)..(481): unsure at all n locations
caagcttcttatgggaccanaagagaatagtacatcttatgcttaatatanaaactntctaatattcacataanatagaatgccaaaaagcgcatggatgggattatggagaaatagaacaaattaaactagattaatgttactaacaagttcacatcaagatattcttaagccactaacattgaaacatggatggatgaacctaataaagaaccaacaaaatctctccacaatggcattagtaatatcaggaaaatatatttttagcagtgttcgctcaacaagttttttttctttctcctcctcagtatcatcctcacactcatcctctgggaacttgttaagatcgaacaagagcactttgttactaaccgacgacgatgcactngaagatgacgatgcactcgaaccttgaatcatttttgccgcacttgaaccttcgaccgcttgaagacgacgccacattngaactttcaatcat

SEQ ID NO: 89580 - DNA, 488 bp, Glycine max
  unsure (1)..(488): unsure at all n locations
gtctaaactttcgtaagctatgtattctaagtctagtccaacaagaggaatccgagggtaaagcttagttcaagctagtctaaacctangagggatctctaaatttaacctactccaactagacggatctgaggatgaagcttggattgattcagtctaaatttatgctttagatcattacaaaatatgcttagctgagcaacatcttcaaaattgtgattaggacatgntctcagcaatgatttgaattactcctatacttcacaaaagggatcttttgatcctttcctgaatgtagaaatatctgactttacattgatatacctagatggagggaaaaatctatcaagaacttttcttccactatgctccagcttgtcaaactttgatttggatgagattgtagccatgctttggctttccctgttaaagacaatggcaataatctaaggtacacaacctcctcttcacctttatgaatgcccatt

SEQ ID NO: 89581 - DNA, 62 bp, Glycine max
ggtctgtatgtttggtccttcaagaacataagccacagactcttgtgacaggtatagattta

SEQ ID NO: 89582 - DNA, 472 bp, Glycine max
  unsure (1)..(472): unsure at all n locations
agcttcaatggacgatgttcttcttgattgtgatattacacagctgcaaaatatatggaagacttacagcatttgacggtacatgtgtagcaacacgacatgtggagttgggagggagattctagcggtaagtatacagcggggagtgcttacgaattactcaatangaataggatgaaatggtttaagcactatgggagataaaagtcttgagtaaagcaacactttttgcttgaagattgatcaaggaaagactgtctacacaaaataacttaagaaggaggaatgtggaaactaatgacatcacctgcccattttgcagaagtcatgatgaggatgaggctcacttattcttcacttgtgctaacatcttgccgctatggtgggaatcgcgatcatgggtaaatgtagtgggcgctttctcagaaaatccaaaacaacactttcttcaacactactactacaatatcag

SEQ ID NO: 89583 - DNA, 333 bp, Glycine max
atctgtaagctcagcttataagttatcaactcagactgtataataagaaacaacttaaaaatgaaactcaattttcattacatcatatggcagagcttgagcatcaaacaaaatcaaagaatattttattaatatccacattttataaatatattcaacgcacgtctaatcaattagcaatgctgtctattcttgtaattcttgtgtggaaatgaagatagagaaacccccccctctcagaaggtcttcttcctttactcttatagagagcatattttcttataaaaaaaaaggcaaattatatttttttttgttataaacaaaaaaaaaaaa

SEQ ID NO: 89584 - DNA, 405 bp, Glycine max
  unsure (1)..(405): unsure at all n locations
actaatcataaaaaatgaacaaagctctaagctttgttgttgcgatgaataananaaccacagaaagctagtaaatgatgcacatgcaacatcaaaacccaacaaacctcgaccaaaatggtacataacaacaaaccacccaagaaaaatccataagcttcgtatacaaaacgataaactcattgtagaacaaaaaaacatccaaccttttgtactaatcataaaaaatgaacaaaactctaagctttgttgttgcgatgaatcaaanaaccacaaaaagctagtaaatgattcacatgcaacatcaaaacccaacaaaccccgaccaaaatgatacataacaacaaaccactcaagaaaaatcgaaaagcttggatacnaaacaacaaactcatgaataaatac

SEQ ID NO: 89585 - DNA, 333 bp, Glycine max
  unsure (1)..(333): unsure at all n locations
aatactataatcatataatattatagtaaatgatgtaatataatatgcgtaactgtagtagtacacaggcttaataatcttggttctatttgtttaaaaataattgtataaaataaatactttctattttgtctcaaataataaaaataattacatatttggtattatactgtgaaaaatatcatatgcttgaggttatacttacttgcatagaattctttttggtgaatttacgtacaatataaatattcatctaattttacatgaggtgaccattctaatactatataaatattaaagtcatatattatatatttntataatatatttctc

SEQ ID NO: 89586 - DNA, 455 bp, Glycine max
  unsure (1)..(455): unsure at all n locations
gatcttaagcaccgcngctgcagctgatacacgcgagactacatcgtcttctgacctttgtcatccagaggcggcgggcccgatgacatgcgggaaccatntggtcccacactttcttgctatctataagactcagagcatgatagaacaaaaggtgcataagactacgttagtctctacgtgtcttctgcgacctttgtcatccagaggcggcgggcccaatggcatgcgggaaccttttgttcccgcactattaaaagacttttccaattcaaaactcanagcatgatagcacgcagagactaacgtcgtcttctgcgccttttgtcatcgagaggtggcgggctcgatgacatgcgggaaccatttggtcccgcactttcttttgcaatctataagactcaaagcatgatagcacgcagagactaacgtcgtcttctgcgcattttgcaacc

SEQ ID NO: 89587 - DNA, 477 bp, Glycine max
agcaagaccaaagaaaacatgtgggccatcatcgaccaatacaaggaaaagttaagcctagcggtaactcacaaacaaaggctagaggacgagtacgtgaaggtataagtcctgcaagtggaaagggaagcaagggaaagggtgatcgattcattacacagagaagcaatgatgtggatggatagggttctctttacttgaattctgatactggggacagatgtcgtacaggatgtcacgacatcgcgcttcagaacatgcagcttgtatatgaccgtatgaacagattaaacaagtaaataacacaagagaatggtaacccagttcggtgcaacgtcacctacatctgggggctaccaagccagggaggaaatccactaaaatagtgttagttcgaagatctaacagccactgtttacaaccttctcacctaaccactacccgtgcaatctctacctaagagccactcttagatat

SEQ ID NO: 89588 - DNA, 485 bp, Glycine max
  unsure (1)..(485): unsure at all n locations
agctngaaagagctcgggtagtcaaagagaagttattgtccatagccatcanagtctgaaaagagtatgatgaactaagggatgtcaatatggccacagctgaagccttggaacgagaaaccaagaaggcctgaaaggaagaacacgaccaaagctaagttttgaggggctttatagggcagcaatagtgagctcaagctccgaagaggtgaaaggaatcatcactggtcaaaggcatgatnctgaaggacgagctaaaggcttgccttatgtcgaaaagaaatttgcccacaagtaagcgagactgaaggaatatgtgggccatcatcgatgagtgcaaagagaagctaaatctagcggcgactcacgagcaaatgctagaggatgagtacgccaagatatcagcagatagggaagcatgggaaagggtaattgattcattgcaccaagaagcatacatgtggacggaccgattngctcttact

SEQ ID NO: 89589 - DNA, 498 bp, Glycine max
  unsure (1)..(498): unsure at all n locations
ctgtagccttaatgtgaacatcatgctttctccgtatagaacanaaccatactacaatattctctcgtggacacaacacaagaagttgccaatgtgccctgaagtcaaaaaaatcaaattgaccatcaaataaatgcaaacacattgataatagccacatcaattgacttactgattcaagtaaggtcctaagtagacttctcgatgtaattccttgacccaacgttctatgtactattcacattcttgacgcgtgtcctttgtgcaacgtatagactgnggcttaaggaaaccataaactggagcaaaacctatgcttgtattccaatcattcacaaaccttttttaaagacggtaaacaatattngtagccaaatatagagtggacaattaattatgacttacattacgcatatataattacttacatcatccacaactgtagtatagatatgtttaaacatttgtcacctaaaatgatttcagttacatctgcat

SEQ ID NO: 89590 - DNA, 465 bp, Glycine max
  unsure (1)..(465): unsure at all n locations
agcttcaacatcagaccacttccagggtgctggaactacttcacatggacttgatggggcctatgcaagttgaaagccttggaggaaagaggtatgcctatngttgtgtggatgatttctccagatttacctgggtcaactctatcagagagaaatcagacacctttgaagtattcaaagagttgagtctaagacttcaaagagaaaaagactgtgtcatcaagagaattatgagtgaccatggcagagagtttgaatacagcaagtttactgaattctgcacatctgaaggcatcactcatgagttctctgcagccatcacaccacaacaaaatggcatagttgaaaggaaaaacaggactttgcaagaagctgctagggtcatgccttatgccaaagaacttcctattatctctgggctgaagccatgaacacagcatgctatatncacaacagagtcacact

SEQ ID NO: 89591 - DNA, 403 bp, Glycine max
  unsure (1)..(403): unsure at all n locations
cgctacaacaattgcagtgagacccactatccacaatgagagaacacattttgtttaaaaccttgcatcttgtatgaaagatgttctctctttgggtttgggttaggtcagaagattgactcccaaggagccttctcaccattagaagatcaccttcttcataggggtaaaccttttcaatatgcccatcacccttgggcttacccatagtttcacttgaggaaggagaagaagtatcctcctcttggctattatacatgtcttgacccctcatgatcatggttntctttgtggggcattaagaagcaatatggcctttggagggatttcctctatgtttttacccttatcatcctttggcttagaaggtggtactcctaacacacttagagcttgtccttct

SEQ ID NO: 89592 - DNA, 471 bp, Glycine max
  unsure (1)..(471): unsure at all n locations
agctntaannattgaattanaacattcaatatctgctggtaatcgattaccatatatgtgtaatcgattacacagtgcaaattttgaattcaaagtttaatagctgctgtaatcagttctggccactggtaatcgattacatcctctggtaatcgattaccagagagtaaatttctttgaaaaagactttttaagttaaaattcttggccaaaccttatgctacttcaattggaattcccttcctatttaatataccctttctaagactctagagactgtcttgatcatccatcttgaatatctttaatttctttgtcttgaataaagctttgagacgcatgtgaacctttggcatcatcaaaacattcagcttgatcctttgtctacaatctcccgctttttgatgatgacaatccctgaaatcaagacaagctatatacaagatgatagcacgttcacacaacccttac

SEQ ID NO: 89593 - DNA, 417 bp, Glycine max
gtgtataaaacttgtgtatattgtatcaaactttcccaatctataggtggtttgtaatactataagtacactttgttaaatataagtcatagataacttatacttttgttctatgcatctaataattaatttctctcaatttcaggttaaataggcaactctggcaaagagctatttttcactctttcactaagccaagctgctagcttagcgagaattcgctaagcgcaaccttcagtggctaagcacaaggaagaatcgagaataagatgagttgtcaagttcgctaagtgcaccgctcgaggtcatcaagcgcaccgcttcagctcatccgctaagcgaaacaagcgcgctaagccaaaatccacttattgtgcgctagcgatccagatctacgctaagcgcacgagcacgaac

SEQ ID NO: 89594 - DNA, 469 bp, Glycine max
  unsure (1)..(469): unsure at all n locations
agcttgcatatcctctgataaaccttcgatagttaccagtgaggcctaagagacctctcagctgctcgatattgagtggngtaggccactctacaactgcctgcaccttaatagcatccatagcaactccttcacctgaaactatatgtcccaagtactctatctccaatacaccaaaagagcattgagacaacttagcaaacaaaacattttctttcaacactttcaatacagcctctagatggcataagtgttcatgccatgtggaactatataccaatatatcatagaaaaaaactaacacatatttccttaaagcatgttggaaaatatggttcatcagacactgaagagaagccggagcattggttaaaccatatggcattaccaaccactcataatggccatggtgagatctaaatggtgatttatgtctatcctcangttggactagtatttggtgataacc

SEQ ID NO: 89595 - DNA, 514 bp, Glycine max
  unsure (1)..(514): unsure at all n locations
gcttagcatttgtgctctgatcagaccaacatggtattgcaactattgtgactcctaagcacaagggttctaatatggaattccaaccacaatgtgtcacanaacatcccacagcctcgtgagcaagaatntttacttgtggacaccatgtcactaccaaacccttgtctgttcttttctcaaaatctttagggagtttaatctgttcagaagctctaaccacccacaagaaataattcgagcactctttcaacaacaaactagttctttcatttgttcctcaccgaaggtaactaaactcccaaacgatacataaacaacggagccttttggcttatcatctagccattccatgcattcttcactcttaaattggtaatcccataatctnggtcatcttcacattagttgtctaagaagtaagatggtatgcttggtccaatggtcttaaatnttggccanatcttcataaaccaatctgtaatctaatataaaaatagtttttagagacaca

SEQ ID NO: 89596 - DNA, 480 bp, Glycine max
agcttctatataagctgaaccattttatcaataaacacaagttgagttttattcagaaaattagagtttatctcttttatcttagtgagagtgattctcctaaattcttgagtgattcaagaacaccctggctgtatcaaaggactttcacaacctttgtgtgttgccctcgctggaaagagtgattctttccttcctatcatctccacccttgttctttcaaaccacaattccagaaaatccacctctgcccaaaattatcttgtgaccataactcccattttacacactcaaattaagtgattcttgagcctaaattgaatttcaaaacgagacctttcacctcgttttggaatcacctcatttggagccctgtagcttccgttattgccatttctatatttctgtccagccaccacttaacctacgtttaccatcccattcatccatttatgccagaaaccaccttattaagaccca

SEQ ID NO: 89597 - DNA, 509 bp, Glycine max
  unsure (1)..(509): unsure at all n locations
taagctttggttcatntcgagcgtctcgatatattccaggactcaatccggcatccgagtaaaaagtattggcctttgaatttgctaggagcttctgttttcaatttcgagcgtatcgatatattaggggactcaatcggacatccgagtaaaaaattattgtcgtttgaatttgatatgggcttccgttttcaatatcgagcgtgtcgatatattacaagacataatcggagtaccgagtaaaaagtattgttgtttgcataagtacgagcttccgttttcaatttgagtatctcgatatattacgggaatcaatcagacatccgagaaagaagttattgttgtttgcattttgttcgagcttccgttttcaatttcgagcgtctcgatatattgcgggactcanacggacatcccttanatagttattgtcgtttgaatttgctacgagcttctntttttgaattcaagcgtctcgatatattacaggactcaatcggacattcgag

SEQ ID NO: 89598 - DNA, 479 bp, Glycine max
  unsure (1)..(479): unsure at all n locations
aganagagagaaggggggagcacgaaattgaaggagtaaaagaaggagagaagtggaactttgaagtgtgtctcataagagtttcattcatcaaagttacaacaagtgttatacatgcttctatttatagactacgtagcttccttgagaagctttcttgagaaaacttccttgtgaagcttctttgagaaaacttccttgagaagctagagcttagctacatacacccctctaataactaagctcacctccttgagaagcttccttgagaagattcctaaagaagctagagcttagctacacacaccccttataatagctaagctcactcccatgccaaaatacatgaaaatataaaanaagtccctactacaaagactactcaaaatgccctgaaatacaaggctaaaaccctatactactagaatggacaaaatacaaggtccanaagaaggaagaacctattctaatatttacaa

SEQ ID NO: 89599 - DNA, 339 bp, Glycine max
  unsure (1)..(339): unsure at all n locations
acatgaggaagatactcatccccagacttataggtgcttttagaagagcccttaaaaggcgggacanagacctattcactacctctaattggccatcaaattgtggacgacacgtggttgagaaaagaagctctatttctatctctacccataaagtttttaagaagtggctaacgaacttagcatctctatgtgacacaatggtcctatgcaaaccatggagtctcactacatccttgaaaaaaagatttgagatgtgggaagcatcatccaccttgtggcatggtataaagtgtgccatctctgtaaagctatccaccaccacaaagatatattcta

SEQ ID NO: 89600 - DNA, 484 bp, Glycine max
  unsure (1)..(484): unsure at all n locations
ctcagcttcatataagctgaacgcatttatcaataaacacaagttgtagtttattcataanattagagtttatctctcttatcttagtgagagtgatgctcctaaattcttgagtgattcaagaacaccctggctgtatcaaaggacattcacaacctntgcgtgttgccctcgctggaaagagtgattctttccttcctttcatcttcacccttgttctttcaaaccacaatttcagattaatcacctctgcccaaaatatctcgtggcataactcccttttacgcactcaaataagtgattcttgacctaaattgatttaaaacgagcctttacctcgtttggaacacctcatttggaccctttacttagttatttcatttctatattttgccagccccacttaacctacgtttaccatccattatccatttatgccaagaaccccttataagacccacgatattaccacctatttcaatct

SEQ ID NO: 89601 - DNA, 444 bp, Glycine max
  unsure (1)..(444): unsure at all n locations
agcnttgttcctttgtataagacgagaagttctgcttcttatcacgttatctaaaagaggccttgaggtggatccaagtgctctgatcattcattagcatattcgtggtgtggtgacatactcaccatngttttgttctttagggaactcaccataactaaganaatgcaaaggcacccctataacactcgatccagaaaaatggataatgaagagggagtgcaagaacagatgaaggccgacctgtcggccttaaaagatcaaatggcttctatcacggaggccatgctatagcttcagaaaactatagaagataatgccacggtggccgcctccaatacagctagggaagcggaaccggtgctacaacccacaataaacttaggccgagacagaaacatgacggtcttcggtcggagatatggtcctcaagcttacccttat

SEQ ID NO: 89602 - DNA, 453 bp, Glycine max
  unsure (1)..(453): unsure at all n locations
tctctggtagttctaccgattgcctgtcacttccagcaaggacatcagaccctctactaatcgagctntcatcaagaagtactgcgtccccaggcaggcgtagggcgatacaccacagcagccttgggatggccggcagcgggcaatatacgcaccgccatcacctctagagttcaccttatctcatccacaaaaagggtagagcgttgcttacgacccatggccgaccaataggcgaccaagttcaaagccaaaggtaagcatagtactatgttcgtgatcgacaagccatcaagcgtccagctcaagacgttaaagaagcgctactatgaggcaacctagtaccttataaatctctgcttgttatttgatcaccttttgtttctcaagtcatagcaggacacacctagttgctcatgatcctaggaaattaaataaacaagcacaagctcg

SEQ ID NO: 89603 - DNA, 445 bp, Glycine max
  unsure (1)..(445): unsure at all n locations
atctgacctgttgcaaggtttgtggtttgtgctcctctgctgaccaccatacagacctttgcccttccatgcagcaacctggagcgattgagcagcctgaagcttatgctgcaaatatttacaatagacctcctcaacctcagcagcaaaatcaaccacaacagaacaattatgacctcttcagcaatagatacaaccctggatggaggaatcaccctaacctcagatggtccagccctcagcaacaacaacagcagcctgctccttccttccaaaatgctgctggcccaagcagaccatacattcctccaccaatccaacaacaacaacaaccccagaaacaaccaacagttgaggcccctccacaaccttccctcgaagaacttgtgaggcaaatgactatgcagaacatgcagtttcagcaagagaccatagcctncattca

SEQ ID NO: 89604 - DNA, 81 bp, Glycine max
ggatccttaagcaccgcgctgcgctgacatacccacatgctcgttccgtagagacttagaacattctaccgctctctttat

SEQ ID NO: 89605 - DNA, 445 bp, Glycine max
  unsure (1)..(445): unsure at all n locations
ctatggaagctggagctttgagctttcatgatgtcctctaatggtgatattccaccatggagatgcatcggaagacataggagaatatgtatgaggtggcgccatccattatggaataagccatggaagaatgagcttcaccaccaagatgagcattggataagaagctcggagaggatgcttcactggaggaaaataaagagggagagaaacagagaggcgtgagcacgatatcgaaggaataaaacaggagagaagttgaactttgaggtgtgctcacaagactctcattcatcanagttacaacaagtgttacacatgcttctatttatagactangtagcttccttgagaagaattcttgagagaactttcttgagaaacttctttgagaaaacttccttgagaagctagagcttagctacacacaccgctctcataacta

SEQ ID NO: 89606 - DNA, 482 bp, Glycine max
  unsure (1)..(482): unsure at all n locations
gcttgaataaggctgaagaagctgctgctcatgttcaacaagatccagnggagaataatttatctcagcctaatttgtcacaagatagtgacatggagttgatggtaaatatttgtcacaacaaagtatttttatctcaacctaatttngtgcagcactccattcttatatattacaagttttattcatgtttggcatttgcatgtaggtccctacaacataacaagagccaaacaaaggaaggttgctgataaagatgatgcagtataaaaaatgaagaacactgaagacccattttttgttntattntgatattaggatgtgtagttgtatattttgaaagcttcactggtatgtgaaatgatgtaaacattatggtctgctgaacaattgcttctaactaccatgctttggtatgtcaaacattatgtgaaattgatttaatgtcatggttcttctctttcttttataattatacactg

SEQ ID NO: 89607 - DNA, 481 bp, Glycine max
  unsure (1)..(481): unsure at all n locations
ttaatataacttgacatatataaggatgatattatctcacataaacaaggcatggcatgtgcaatcaccatcgagaatgaacatcttacatcactatcaatcatcatcaccatgagtctgccgatcatgcgcaccaagcataccattaatggacaccaaagacaaactttgctccatggacatntacaacttcaacctggataccttgagggtcgaaatataacaacttttgtcctgccatctctctatgctcgagctcaatgaatacaagatccaccaacaacaaatacacatcatatggtatatggattccatagagggttgagatatgacacactttgacttgccatctcactatggcactccttaaggatcaaagattcatacccaacaacaattagtcccatatacattatcagtgtccctaatcctctcggaggtagttctcaactctctaacatgtgattcaacgacaaaactt

SEQ ID NO: 89608 - DNA, 480 bp, Glycine max
  unsure (1)..(480): unsure at all n locations
agctngatataaataacacaaaatgcatgtgttctagagcgatcacaaacaattgggtttatgacattcctaaaccaaatcatacttttctttaatcgtgcattggttntctctacaggtggggagagaaggaactacttgttgatttggtgtattaggaatcataatcgtgccttgggttttaacctatcaaggttgtcattatctcctaatggaccaaattagtttccgctcattaagcccatatcaattntatgttggtagtctaatgggttcattaaattagatcacttatatcgacccatctaaatgtaaacaactgatgtaaatgttataatataatatgtaactcatataaattaattaggaattagaaaattcctaacaatcttccacttgaactttatattaccttagacatttataccactattttttatgacacaagcgttgtggtacttttagactctctaaacagtt

SEQ ID NO: 89609 - DNA, 464 bp, Glycine max
  unsure (1)..(464): unsure at all n locations
acttgatgaaaaccttctcttataagcatgtgcttggttcgaccccataatccaaggaatagaaatattgattgtcaatacttcgaccacatatcatagagatgaatgactagggcatacttatgctatgcatgacaaatgtaattatgagattgacatgagatgcccgaagaaccattatttcctagctaacaattcattaggtaccatgttcacatgcttttcaatcattttttaagagaaatgagtgtataatcccaacatgtttgtttatagttatcatcatggtacccaacacatgtaactaagaatgtggtgtaaacttcattcttcattgtgacttcattntggtcttttttttggctttctggtcgtgtttttttattggtctttttcagaggaaaatgcaaggatcatgaatgaatgaacataacacgcgaataatgaaaatataatgtatgcag

SEQ ID NO: 89610 - DNA, 441 bp, Glycine max
  unsure (1)..(441): unsure at all n locations
agcttgaagacaagactatatgatgtatcttncttgtgtatagcaatatctctaagggctaccgtgtctacaacttgcaaactaagaaactcgtcatcagtcgagatgctgaagttgatgagtacgcttctttggaatgggggtaagaaaaagtggagaagaacattcttatacccgctcaactacctcaagaagaagctgaggaagaagacccgggtgaatcaccttcaccttcacctccaccacaacaacaaaatcaagaactatcatcaccagagtctactccaagacgagtaagatcnttggtggacatatatgagacctgtaacttggccatacttgaacctggaagctntgaagaagcgtcaaagtaggaagtatgggtcaaggcaatggaagaaagatacagatgatcgagaanaacaacgcatgggagttagt

SEQ ID NO: 89611 - DNA, 394 bp, Glycine max
  unsure (1)..(394): unsure at all n locations
tctcctatctggtagttcacttcgcgatgatgtccatcaacttggctgttcatagcagcttaagccttgagaagcttatttcgaatagcttggaaagtgttatccctatcagtcaacatctcttcaatggcctcaatgttcgaagaccctgtaatatattctggaaagttatagggggttttggcanaaggcgacttcataaggagtggctccagttcccgtgttccatgaagtattgtgggaccattcgacccacgggaggagcttcccccacaagcttggccggcgatggacgaaagctngcatatattgttcaattatgtgattcacaacctccgcctatccattaatttgtgggtgatacgaggagctcatccgcaaaaatgtcccactc

SEQ ID NO: 89612 - DNA, 467 bp, Glycine max
  unsure (1)..(467): unsure at all n locations
atcctcagagtcacctgcgggcagtgcagctgtgaaatcaatggaatccaagatttcgtttgacacaagtcgttcacatttgttcttagaaatgtgacctaagcgcttatgccataatgctcctgagnttgtattatcaattctatgcttagtaccacgcaattccgcattaaaggattcgccataggaagctacagtatcaagtaaatatagattatcataagtcaagagtgaaccagttccaacaatatatgaattaaaagacaacataaacacattatttccaaatgaacacaaataacccaatttgtccaaataagaaactgaaaccaaattccatctaaatgacggtacaacaaaagtgtctttcaaattcaaataaaaacctcaggacacacacaccacagtaagaaagatacatttctttgcacgccaagcatgatatgtggtacatttcttctttacat

SEQ ID NO: 89613 - DNA, 467 bp, Glycine max
  unsure (1)..(467): unsure at all n locations
tatntncttcctctctatggctggtctctcaaccattgtcgccagaatatgctccgatcatagttagcgcgcttgtcgggatcggaaagagtagagtacgcggcgtggatcttcatgttgacaagtggcctaaaaaatattaagaggggggttgaattaagatttattgactattctaatgaaattcctttttatattcctaattaatatttttttatataagtactcgaataacaaataaagagaaataaccttaaagaaatataaacacaacaaanagtaaaagagattaaggaaagagagaatgcaaaatcggatttatattggttcggtcacaacccgtgcctacgtncagtcaccaagcaacccgcttgagattccactatccttgtaaatcctttcaagaaatgaaccacaaggacttctctctttgtgtcagtgatacaaccaagaagtattcccacttc

SEQ ID NO: 89614 - DNA, 398 bp, Glycine max
ttcttccttggctttggaattggacccatatatattattagccacccctgcgcttcttcttttgtgaaaagaaggggttttggtgtatgtgcaacgcatcattctgcatgtcacatcacaattgctcaagaccctaatttggtttctttatatatatatataggtaccatccttcaatttggtgttaaaatgttaattagacgatttgggctctagcttaactagaaaatatacctgcccttgttgttgggcgtggatgcatgtcatttaaaataaacttccttttggcatggcccatatgaaactctatgtttgaaagctgtggataaatacttttgaaacttaagtagttttcaatgcatcaagatattattttacttttatttgtcaattttatc

SEQ ID NO: 89615 - DNA, 305 bp, Glycine max
tttgtgggctgtgctcctttactgaccaccatacaaaacctgtgcccttccatgcagcaacctggatcaattggacagcctgaagcttatgctgcaaatatttaccaaagacctcctcaacctcagcagcaaaatcaaccacaacagaacatatatgacctttccagcaatagatacaaccctggatagaggaatcaccctaacctcagatggtccaaccctcaacaacaacaacagcagcctgctccttccttccaaaatgctgctggcccaaacagaccatacattcctccaccaatccaaca

SEQ ID NO: 89616 - DNA, 361 bp, Glycine max
  unsure (1)..(361): unsure at all n locations
gcaagttttttattaaatggtttagagatattgacatttaatgaaggaacttaggttcttttcacttatgaagattaggattataatactatttttgaacaatgatcgatattaacattgaatttcaaggtagatattatgttttattgcaaataaagtttattacaatgaaatctaaccccgacgaccttcgtcatttgatttccataccattttatcatgtttttatctaaaaacccaagaataggttcaaacttgtgtctttatttatttaatccttggtatcgaatgttatgtttttattggtttatttgtagcttagatacgaaaaaaggttgtngaaattaccaaggttttcgtg

SEQ ID NO: 89617 - DNA, 379 bp, Glycine max
agtcacctgcggcatgcaagcttctagcgtcttgccttggacaagtttctattgttctcgagttatttttttgttaatcgaataatttggtcatagaatatttattcttgctaatttcgttattatttattcactgtcgtaatgtttatacctttttgcttgtcttgacaatgtatgcaaaccaggtcccaatacctagaatcattagaagtacctgagatagaaaggcttgcccgtagactgccagtactgccctagggtgtcacctttgacttcaaacataggttcctacgaatgatagaaagcaacaagttcaatggagcttcccatggaccccatgatgcacctgaggagattcttaaagttctatacatgatca

SEQ ID NO: 89618 - DNA, 283 bp, Glycine max
  unsure (1)..(283): unsure at all n locations
gtctaccacacccctttctcatagacactctggaattttggttataaaattcgggtggagaccactccattgatttggccaaaatagtatggtagtgaaagatatcctttcctctacaaaataggtctaaatctaaatccttaagcagagtatattttaataatgaaaagtgctttgaagcaagacactctttctaacacatattctttcatttcgtggaaattatttaaaattataanataagactattaatgagataccgatcacaaaatttataatttta

SEQ ID NO: 89619 - DNA, 436 bp, Glycine max
  unsure (1)..(436): unsure at all n locations
ggatcttaagcacctgggctgcagcttnncatgattcttgtagaccgcgggtctctcagtgagctgcgggcagtcacattgaacggatgcttacttgtggtgtttacagaaaggcgagcctgaatccataaaagctaaaaatgatgaccctctggacgtaaaaataaaataccatgggcatcgcacttgagaagggggttatccattaacttatgctaaaacaaattccgaccgttctgccttgctcgtggcgcgtgtgggactcgcccagacgtagcaaactatatatttattttgaagagatcttttagtaaagtaaagcggaaaatcaatcggacgcgctctctctgagattgctcattcttaatcgaattgattgagaactatagtgaaacttaaagctaacatcaattcgcctagtcaagctcgtccatag

SEQ ID NO: 89620 - DNA, 277 bp, Glycine max
tcttgctacatttcttgtttctatttctctcattctcagctggaaagtttactatcttagtcacataactgttaactaattgatttatgtcaatctgtcttgtcttgacataatggtgagttagtcttgattgctgtttttgggtgaactacctaaatttacaactaagaaaaaactaaactaatgctgtaccatgtgttgctaaatcagtgctgactgccaaatttagtggcgattattctgtctgcaccattctaggtaattttgcctttttggc

SEQ ID NO: 89621 - DNA, 387 bp, Glycine max
  unsure (1)..(387): unsure at all n locations
gagtatgtggatcttgcttttcatattagactatttatattgatatctggtatgcanaattcaggctanacccctggtatcatttgttattgttaattgaatcatttgtaaatntctcttgttctagctgaggttacgaaatccttgaatatccctagaagtgaagccacgtgcttttcagaactntaaacactgataggtgagttgtgtaagttacatgaatcatgattgctgcaggaagattatcttcctggttttctaccataaaaaaaatgaagttattaaagtttcttcagtgattctctgaggcaacttcattgttcttgcagatacatgaaatgtgtattgtacaatattatctcgagaaccatatctatgaattgaatg

SEQ ID NO: 89622 - DNA, 434 bp, Glycine max
  unsure (1)..(434): unsure at all n locations
ccccagcttacattctacggtctgggacattgctcaactacacgcttggcacaatgcttgtacagagctcatctccacccgcagcacaaaacaaattaattggaaaaatgaagaataacttgggtaagctagacctaataacgttcaagaagatactgtcagtttgtttcactaactaaatcaaataacatgtttttgtagcttatatatatcattaagaaaccagtacgacagtacctgaaggaagtgaattgtctctttatcgagtcagaaaccagtatatatcatttaagatatgtaagtgagtgttgtcttttcagacaatgaagcattatcgaagcanagacacattatcatgttgtgcatgtggaggtggctggagcctaactgcgtattcaatttatgtggcacgttatgtggaaatgaccaggctg

SEQ ID NO: 89623 - DNA, 176 bp, Glycine max
  unsure (1)..(176): unsure at all n locations
tttatatttaatggctaccaaaattggggatataataagaatatatttgtgattgggtaaaaaaggtataatattatgctggagtggttgcacgactgtggaggatacatacccatgctcagcttggntacccgcgtggggtcaatcaatctatatgaaatctatgcaaatatgct

SEQ ID NO: 89624 - DNA, 373 bp, Glycine max
  unsure (1)..(373): unsure at all n locations
aattcttctagatctcacccatgtattctacagtctgagcttgagttagcctatatcattttgtgtgagcggggaacctatgcattatgtggtggnttcattatattgaattgctttctgcatgcaaataggggtatacatttcatgtatcctgagaccaatggtttattctgataactaaggattttaaaacaaatgtgtccaacttcttcacttcgattaatggcaagtgaatattggaactttcccaattttatttataaggttttgtatagaaagaatcctttcactgcctggagatttgacaaactgcttgtaactgtaatcagcatcgtatctcgttaatgccataaccttgtgaattgttattgga

SEQ ID NO: 89625 - DNA, 208 bp, Glycine max
  unsure (1)..(208): unsure at all n locations
atggtaattttaattcaccaaatntcatattattatgattgctaatatattataacttatgtttatatatatgcagatttactgatctaaccatggaccagaagatgaggcactccaacaggggcaagtctattgaagtgaaatgaactatgagctaacaactgtatgagtatatactacttatacattatgctacataaatgttaat

SEQ ID NO: 89626 - DNA, 299 bp, Glycine max
  unsure (1)..(299): unsure at all n locations
taaaactagctaccttctgagagctgagctactccccccccctctatactagctcactcctgagaagagagctagagcttagcttcacaccccctataattagctaaagctcaacccccttgagagaaattcatgagaatacaaaagagaaggttctattacaaaaactactcanaatgccctgaaatataaggctaaaaccctatactactacaatggccaaaatacaaggcccanaagaaggagaaaacctattctaatatttacaaaggaagagtggatccaaccttgacccatgg

SEQ ID NO: 89627 - DNA, 269 bp, Glycine max
  unsure (1)..(269): unsure at all n locations
aatttattaggataaattaatgttgggatgcattaaaagtagggcctatatttccaccattgtagctggaaatacaacaatagaanaacctanggaagaatggagtgaggaggaaagaagactantacaacacatgattgcacaacagatgttaaagaattaggataaacacattaactcatgaatatgaactatntangatgaatgcaaatgaaagatacaagacatgcaaagaaggtcacacacatagtaaatcatcttccatcttt

SEQ ID NO: 89628 - DNA, 223 bp, Glycine max
tgcatttttaggccccggcacactgcactaaactgctagcgaatatgagtgatagacctcttgatggtgaaaaaggggagaactctatcccgtactcctttgaaactgagagaaaccgggaaccctcccttccccacaacagatcagactatctctccgagttctccaacagtaattttgtggctattaaaccttactggcctctgacctgaacttgaaacgc

SEQ ID NO: 89629 - DNA, 318 bp, Glycine max
aattgtgacttatgataataagggaacgaagttcacgaccagcctatgaatttcatgttgcccgtgaaataatttcaacagggcaacaaaaatcacatccagcccgggaaacactttcagacatgactacaaagatcatcacccacctgtgaattctctattgccctggaaccaatgtagaactcccaaaattaaagatacaaccagctcgtgaattccccgcttcttgtgaataaacgttggtgctttctgacactagtcactaaagttcataggtagcccatgaaattgagtttactcatgaaacacctacaataa

SEQ ID NO: 89630 - DNA, 254 bp, Glycine max
  unsure (1)..(254): unsure at all n locations
gaataactaatgtaggtggagagtacacaacaactatatgcgtgagatgctatataattactatcacatcattttaanaccgagtgggtgtaattatacttttttttaaatcttatatatacatggtattaaaatcgagtgattatattacatggttgaaaacaagtacgaatactttacatggttatacaagtgaagataataccgtgaaacttattttaaggattggaaagctataatggacccccttatga

SEQ ID NO: 89631 - DNA, 285 bp, Glycine max
actcattcttaaagagcttaatagttcttttgaatgtcatatgatcattacctttgcccttgttgcagtgctaacagatgcatgaagattgaagaattcaaactcatatatcggatggaatatgcacatccgtatgtggcggaagaggcactcacgagttaatgttctgctcttgccatatatcatatctttcttcataaggggtatattaccttgagattgggactgagactctctgctctgtttgccctgggtgctgagcagggtctcattggttggtggatg

SEQ ID NO: 89632 - DNA, 230 bp, Glycine max
actgctaaagaaaaaaaaggtattactatctggtaatgatttaaaacttgaactgaaatcgataatttcatacccccgcaaaagggattgtatccctttatttggcattttaaaaacttgacagtgtcacagctcattattatagtcataccacccgaaggaaggaaaacataggctaagcttgttcagcagtattataacttatcagcatacaacctaatattatatgc

SEQ ID NO: 89633 - DNA, 379 bp, Glycine max
  unsure (1)..(379): unsure at all n locations
gctgcacacaatccattctaaatagcctactcacaaatattcccagggaggcgccactgtcgcaacgtgccctttgcgggcgagcgaaggcgactctcacgggtgcgcttcccaaggaggaaagatgcacggagttcccacccactgtttatttgtgtaaaacgttcggaaaaccgaaagaaaccggtcaaaatgaatattctaagntcgggagttgtatttacgcttaaagaaggtattagcacctctcacgtttgtctcaaaggacaacaacctatttttcagaattgtggaaattgcgttatcttaacttttatttctttttattttttgagggcgacaaaagcggtgctcttgctcctacatatccttctttgga

SEQ ID NO: 89634 - DNA, 344 bp, Glycine max
  unsure (1)..(344): unsure at all n locations
tgccccacattatttgcatgacacatatgccaaacaatgatgatttggaaactttattccaaactggtcatgcatgctcctatgcggacactcaagtgtcaaaatnttatgggcatgtgatgctatggctcaagaatcattttctctattttaatcaacccaatggtttccaaataatgttctttatcaatttgagcattcatacgaatccatttccggcgtccggggaaatttcacagcattcacccttcacgtgtagacacatttttcaaaaattggttatgatcaatgaacttctcttttttgggaaatcgtctctcttcaaaagcatgttcgttttaact

SEQ ID NO: 89635 - DNA, 400 bp, Glycine max
  unsure (1)..(400): unsure at all n locations
gcgcatcanactacgtggctgctgagtgtanagagattgtagaacattatgttcatcccaaatgtttgtgaaccagaccataaaatagagctgagtccacacatgaggataggtgctgggcactacaggtttcgtgttcatctgaagctccgctaaacaaaattgcctcctcctataggagaagggcacgcattttggaaagaaccaaaccctcttgctccctatggatgcttttaacatttatatcatagacaatatgaattcaagacttgcttgtagtaaaccaagccatggtgagatttctctgtctcactaccactatgatgagcgaagaactatgggactaatctgttcctctatatgtcagcgccaaatccattgtgattctagagatatttat

SEQ ID NO: 89636 - DNA, 215 bp, Glycine max
tttttgggccgccagagccctctaccttttgggcgagatctttgaaagatccgcccccctttttgccaatgttctggagttgcattctatcccaaaacatatcacaattggactaatactgcctaacagaagctaccatgaggtccttccgagaatacactcgggaaggttccaaggaagtggcctctggtaacctctacccctgtgagactttc

SEQ ID NO: 89637 - DNA, 190 bp, Glycine max
gatcaatcatttttaacacagttgctttttagtcaagattaaccatagtcagggtcataaagatgactatgaagtgaactcaactgttgttcagatttgcaaaagtttattataattttacggcatgtcaataatgattttgttgtctcttaataattaagggtgtagattctatggactaaacatttta

SEQ ID NO: 89638 - DNA, 165 bp, Glycine max
  unsure (1)..(165): unsure at all n locations
aaacctttactcctattgcttgatatgaagctataagaatcatgccttgtctttgctgctcatgaaaacataaagctttttcaaatggatattanaagtgccttttttatatagaattattgaagaggaaatgtatgccagacaacgccctaactttgataatca

SEQ ID NO: 89639 - DNA, 417 bp, Glycine max
  unsure (1)..(417): unsure at all n locations
tattatctctaaataataatgatgaattataaaagaagatattattgaagaataatgatatttaatattttgttaaaaataaaataaaaacacgaatatcttttcaataaatactattaaaaaaggaaatgaaatatttatctaaaaaaatagttcattttattcacaatgataactataaaacgataaaaaaatattttatcaaaattatgaaaaagatatataatacttaagtattattatcaactctaanatcaaaccctatcaaataaaagtaattactggaattagaatatcacttatactangaaaaaaaatcaaaccaggaaatcagtcgggggggatgtggctcccacccccacagctcatttgttctgacatgacactgtgctgtagggcggatctgatattttccac

SEQ ID NO: 89640 - DNA, 189 bp, Glycine max
ttatttttaggtaaagtgcatcctgtatggcagactgacatgcccggcatggatttatcctcctgtggaaaagtttttgcatatggtaacaaagcctgttctgatccaaactgatccatgcattgaacattaacatttctccaagatgccgcgtgaaagtggtctttcctgataaggccagctatgggt

SEQ ID NO: 89641 - DNA, 222 bp, Glycine max
tctaaacaggtcaataaatgatggtaaaaacctcctcgttttgattataatgtcagcactttaaattggtttgtttgaatattctcacttaaaaataatctgtttgaatatttgagacttaaaaacaaaaaggtttttatgtacccaatttatctgttcttgtattccaatagggacgagcactgtatcaagtaaagtaattaataaatgtggttattccta

SEQ ID NO: 89642 - DNA, 334 bp, Glycine max
ataatacaccgagtctcttttaattaattatttaattattttaatatactaaactagataacccaacccgctctgctctcagggttggtttgtttctgcaatctggaccctttcctcttatctaaactacttccaattaaaaaaatatagaagtaccttaatttatcaaatcattcaattagtataatattttaccaatctgtttgataaataagataatttttatttaatatttttattgaaaagataagttaaaatatctcaacattatttacaataattcatttagaccccttatattattaaaattatccccttactatcttttaaaagt

SEQ ID NO: 89643 - DNA, 445 bp, Glycine max
  unsure (1)..(445): unsure at all n locations
attcttttgtttagggataaagcagattcagcaaagcaagatctcagataagattaagataaactctttagaaaagttttgaatagcaccactgattggccaagtgaagttctatcttaacaaatttacaaagcagtttactctctggtaatcgaataccagaagggagtaatcgattaccagtaacccaaatatttctaanaatggtgtttcaaaggtgtaatcgattaccattacgttgtaatcgattaccagtgctttaacgttaaaaatattnttgaaaaccttggtatcaattacacacaacatgtaatcgatactatatagcttgacgttagattcanatattttaaatgaagagcacatcttttgagaaaataactgtgcatcgatacacaacgttgaatcgattccagtaagagtttcagaaatctgcaacagcaca

SEQ ID NO: 89644 - DNA, 279 bp, Glycine max
  unsure (1)..(279): unsure at all n locations
caatgagcttacttctattggtgaaattggttcccatttctgaacaacctgacctaattctcgatggtcttcctgatgaacaagtcctcgatttctataatacttagttggttggtccattcactgtagatgaaagtggaacactactgcttatgtgtgaagtgcgtattgagatatctcaaaaaagagctctaagtnctattaaccttactcaaaggttatggtctgtaatctcacctctggaattcatcccttaatatttctgtaatcctaatctac

SEQ ID NO: 89645 - DNA, 277 bp, Glycine max
gtggtggggcccattaatcaagcatgtgcatggctcaagaagatcatctcaagaagtcaattacattggcaattccaaccgtcaagggtttcatcaaggaagaccttctggatacaatcaagggggaatttctcttatagtcaaggctagacattccatcctgcgaataatttcacaaagatcaatgcggcccattcattcgacctctcaaccagggcctaatctttatgagaataccaccaagctagaagacactctgactcaatttatgcaagtt

SEQ ID NO: 89646 - DNA, 302 bp, Glycine max
  unsure (1)..(302): unsure at all n locations
gaaggaaagatagttatgttggtaataaaacacttacaaacaccaagctaatctgatttctatataaatgaattctggttttttgtattggacctacaaatgcacataaaaggttcaaaccagcactaagcctgtaaaagatccagattaanacaataccttaacatcacttaagacaagatcaacaaatagcaaagaattagttcaaatcatgtcaaaacgcatattcatgttaaaaccagagcaaaattgctaatgcacgccatttcatttccttctcaaatntaacaaaatcacaccca

SEQ ID NO: 89647 - DNA, 201 bp, Glycine max
  unsure (1)..(201): unsure at all n locations
tgtgttacaagtaccttgtgggacagtttgggtgctcatgctaatcatgatttcccatctaaacaggtntttgattattgagttaaatcctcaacatgctcttngtgaagatctacgagcaagcattgctgatgactttggaatctcagcagtgacccttgatgatgtggtggattgttccaaaatacatgtaagatacta

SEQ ID NO: 89648 - DNA, 362 bp, Glycine max
  unsure (1)..(362): unsure at all n locations
catacactttgactatgaacctacacacaaacattcattttcttttggaaaaactctttataaatgtctatataactcccgcaaataacttgattatcttaagaaaaatgactaagggctaagattgtatattcgtttgtaagacaattaagagcccgtcattgtgcacacaaataacaaatgtgtttgatttatataaaggctaataaaattgtatattcatatgtaagaagattaaaacctagccattgtacaaacaaacaacaaattcatttgatttatgtagagtcaacaatggctttgtaggacaaaaatatcgagtggtagaaacaagccaatataattntgtcttatgtactcct

SEQ ID NO: 89649 - DNA, 346 bp, Glycine max
  unsure (1)..(346): unsure at all n locations
tatatagcgcctaacttaataagatattgagtttttntttttacatgcatttacttaacaagaaacttaaacattattaagtttttaactatatagttggcaaaaaaacaaattgaagagtgaagggttccaaacaacaatccttgaccaaaaataaaaaaagctgggtctagccaataaatcaaatcaacactaagaatgagaaataataccagcatccctatccaaaaaatattcaaggatgagacgtgaaaaaggtcaggattttcatgctgctaatgatatatctaacataataatcttgtccttttataccttttngggtattatggagatggacgggagt

SEQ ID NO: 89650 - DNA, 400 bp, Glycine max
  unsure (1)..(400): unsure at all n locations
gctagctccacccccttcatacttttttagctatctgagaagcttccttgagaagattcctaaagaagctagagcttaactacgcacacctctttaatagctagctcagctgcttgagatgagaagctagagcttagctacacaccccatataatagctaagctcacccccatgccagaatacatganaatataataaaaaggccctactacanagattactcgaaatgccctgaaatacaaggctaaaaccctatactactataatggacaagatacaaggccccaaagaagaaaaaaaacctattctaatatttacaaagaagagtggacctaaccttggcccatgggctgaaaaatctaccttgaggttcatgaaaaccccagggccttctttagca

SEQ ID NO: 89651 - DNA, 85 bp, Glycine max
tttcacctagaagacagacgggccctcttttcttaagaccaaagaatcaacaaagtagagaaaaatattaaggttttctttatcc

SEQ ID NO: 89652 - DNA, 199 bp, Glycine max
atcaacacatacttttctcgagtcgatgatgggaaattcagacctaaatgaacagagcttggcgattgaagacatacttatcacgagtcggtgagctgaaaatcagaccgcatgaacgagctctagattaacgaatactttaccgatgcgatgatggaataacaacgcccatgaataaactcggcaattaagaatactt

SEQ ID NO: 89653 - DNA, 257 bp, Glycine max
  unsure (1)..(257): unsure at all n locations
agacttaagaggagtaaagacctaagtaccttcttttcaggaaaaagtgatcctgacgcctatcgaagttgaacaaatattttcctacgataatgaagagaggaaggtaaaggtggcaaccctttaatttnttgattatgccttaatntggtgggaccaagtacaaaaggacacagaacgaaatagggactaccccgtagatacttgggagaagataaaaagttgatgcgaaggagatttatccttcatgataccat

SEQ ID NO: 89654 - DNA, 263 bp, Glycine max
  unsure (1)..(263): unsure at all n locations
ttacctccagaaactcgnattgatgtattgttccactgcttcttgctcaaccctctcccattataggatataccatcacccatatcgttaccagtatgatcattgataataaccagttcttattcctttagtgatatngagcacatgatggaaatcttcttatactgaacccaagctgcaggttcttgttcaatggttagggcttacaccagatgatacatcatgggaagattgggagcatccgaagagtgattatctccttg

SEQ ID NO: 89655 - DNA, 306 bp, Glycine max
tttataattgaattatatttattttcttacaaacccttcaaataaggtatcccattcatttcctcttcctataatatgactcaatctaagtgtttatttgtcttctatataaaaatactcattatccctccattattgcgataaagaaatactttctataaattaccttcgctaaaagtaaaatgcacttgtgatcttattcaataaatgataggattattaacaaaataaatattcttaattttctaaaaaatataaatttcgagataagaaaaacaccccaatacatgcaatatcactgctctg

SEQ ID NO: 89656 - DNA, 317 bp, Glycine max
tttaacagtatacttcactggtattttggcctatgaaacaaatcaaattgcgcatccttagaaacctttttttgggcttttttctaacctacagggcctttaaggcaaattacgtaccgaacttctcacagttttgggaagactaggaaagagaaaactaagtgacacacatggattacacggcagcacggtgggattgcttcatttcgtgaataacaaaaaacaaatactaaaatctcctcgcagcttatacccgaaccactctgtctatggattatgaataatcttctgggagacgcttaatacataatatcctc

SEQ ID NO: 89657 - DNA, 372 bp, Glycine max
tctccctatccattttcactttcgatttcattcttacacactaacattatttataagttttgcatacaattcatgagaagatggtgaaagcatacttacagaattgagaaagtttgaggccatagcttgacaggattccaaggagacaagggaatctccagcacctgcagtgactaacactggaatgtctcctacagcttgtaacaatgattcaacgtttttagccgaaatgatgggttcaaacatggcaattcttatttatatcatgcaattaaaacttaaggaaatgcgctaccttctcataaaaaattctaaatggttatgagactgcagtgcatgttctgtgagaaaaaaaaatatataatgaacaat

SEQ ID NO: 89658 - DNA, 239 bp, Glycine max
  unsure (1)..(239): unsure at all n locations
caaacaatatttatggacaaggggtatactcttatatttcacaagtccttttttttngttctaacatatggggtatttgatttagaattcctcctcatttattaatggaattatgtaacgtgcctatgtctaaactgtctgtattatgcacgtacaatntcgacaatttcaatgaagtacctctgcctggacgtacgagtgggtccagtactcactngagtgcatatgggatatatgga

SEQ ID NO: 89659 - DNA, 416 bp, Glycine max
  unsure (1)..(416): unsure at all n locations
ctaactcagtcactnntaaagtcctactctctaagtacagagtgacttgcaataatttaatgagttattaaacattcttctctgtatgtcaaattttgatatcatatagttatctaatatgaatatcttttgcatttcaagatgtgccgagtaccatgtactcatttatgaaagttgtaagattcactcatgtgaacttggaagggacagagtgtagaatagtttataatcatcataggaagactgcaaaaattggaaatatcttttcctctctgtatgtcaaattttgatatcatatagttatctaatatgaatatcttttgcatttcaagatgttccaagtaccatgtactcatttatgaaagtngtaagattcactcatgtgaacttggaggggcaaagtgtagaatagttta

SEQ ID NO: 89660 - DNA, 203 bp, Glycine max
aaagtatttgatctttgaagatgagctaaaacttaccttcatattaattaataagggcctttaattctgacttactgttctcttgtctgtacataggattcactgatttagtggagctacgttgtatatgtatgcggactgctatatgattcttatggaccaatatgtttttgatgaatactgctcataaatttattaccctt

SEQ ID NO: 89661 - DNA, 345 bp, Glycine max
  unsure (1)..(345): unsure at all n locations
tttggcacataatttggaaacgtcacccacacaacatgatagactgcgaccgttgatacctgtttggaaaaatgaatttctggctcaaaagcgcccagaggtgttcatattggttactatgcccacaagcttctgcgttaagtatatagtcttaagccacaaaataaagtatattatttaacctagcttggttttattgtagactagaagatgcatgtataatggagtttcacgatttgttttatgcctctagaagaaaaaaaggtatctattactaatatttaatataactttaatattaactgngttactggtgtaataatacggatacattcttttccttga

SEQ ID NO: 89662 - DNA, 262 bp, Glycine max
agaaaattagtggcgatatacagtagagctagtaagctcttgcttaaataatacgcagatttttatgacacagcattatgaaaatgtgggcaaactattaccaaccgaatctacaatgtgctatgaattaagtgatcaaagaactgtcttattattattacaatatatataatggaacgatatatttttaaatttcacaaacacatattttgtttaaatgctaaaaaatgatactgctttctaaaaaattggctgaacaaca

SEQ ID NO: 89663 - DNA, 275 bp, Glycine max
tggcctagatttttgtgagatgtgttagagaataattgctaaacaattccagtttcctttatgaacacaaccatgggaggactataggggcgttttttctttctcactccagaacctttcacttctcgatgccaagaaaaaactacctttctctgtgacataagatccttttactaaatcccactcttaaaataacagtacataaatgtgaaataattatattatttttaaaagatcatgaaaatatgagactctattttttaccaattaataac

SEQ ID NO: 89664 - DNA, 386 bp, Glycine max
  unsure (1)..(386): unsure at all n locations
gctgcagctggggagatctaaactttggattgttacttccgtttaatataagagtaagatattcaacaactactactaccaagaataggaaatgcattatgttctaaaatagcaagagaagagtatccactaattcaccaaaggctgcctagagaatctcttactcaagattgaactatgtaaaccatatttagaggcagagtagtaaacaaccactattgtggcgtttcactctcttgaatctgatacaaaataatatgggtcagtataccaatactttcataatgagccattttatatacaaagaataggaaattctgactcaggaaataaattggattcatcctataaaaatatgatactagaagaagaaatntaatggtgat

SEQ ID NO: 89665 - DNA, 328 bp, Glycine max
aaaataaaaataattggtaagagtaatatttggatactattttcaagatagtatctatcttcagtttttaaaaataaaaagcctaaaacgttgtttagttattctgatatttttactttgaatttgtattactcatattcttccttatactattccatcctttccgctactcctattaattttctatatattaactgttaaaaactaatttataaatggctaaaatatgtattgtaaaaaaaaaagtaaaatgcgtttgtgatgctgataaatattctaattgtaagttagattcttaataaatattcttgttgtttgatgttgatat

SEQ ID NO: 89666 - DNA, 118 bp, Glycine max
ttttccccccccggaagggagggaaccccacttttttacccagggctgaaattccgggtagaaactgggcccagcggggatgccaaacactgacatccaccaccgctagcacaggaaa

SEQ ID NO: 89667 - DNA, 61 bp, Glycine max
tcgggaagttactggatttggactcggtttttagcccgaatttgcccgatggctcgggaag

SEQ ID NO: 89668 - DNA, 234 bp, Glycine max
aagatatcacaaactattccctaattaaaaattctattttgattttaacccacatcccaagaattcttgtaaaatgaattcctcaataattattccaattaaacttactgaatagaaccaattagcaataattaataaaagagtttaatggaagaagaagtgcaaactcagttttatactggttcggccacacccttatgcctacgtccagtcctcaaacaacccgcttgagag

SEQ ID NO: 89669 - DNA, 426 bp, Glycine max
  unsure (1)..(426): unsure at all n locations
cgttgatcgagtggtcttgacaccaaataattcatatttaacgtaagtatcagcagcatgttaccaagaatatcttgaaantacctcccaatgaagattccatactctggcaacatgttttgtagtgatattattattttgatcacttagctgcttattagaggcataccatgtagattgaatgctacatatcttcttcaattgcatgttgaacaaattgaggttttctttcatagactgtgcattgtgaggttctctacctcttcaaagtctagcaccatattccaagagcttcttataaagttgatgtttgtcaactattgtgctcgtatcaggttgctttgatagatggtcactacctatcgtccttacataaaagaccacaccactttcagacgtcttgataattttatgtttgtgaacatt

SEQ ID NO: 89670 - DNA, 337 bp, Glycine max
cctggtcccaggaggaaaatgggtgaaccaattccattaaaccatagagaaaggttcgacattaggtaagtttaatgaaaaactctcttacaaactacttgatttggttaggcttttatgataagaaatactaatgatttttctgacccagcattgtttaatcattaacgcgtgcaaactcttatgtgtcttgacttctatccacaaaatcagttgtattaaattaacaacataatatcccaagataaagctgccaccaccattaccacagctgtcatttctttcacgagacatgactatagccatgattgccaccatctccacagatcataaaatg

SEQ ID NO: 89671 - DNA, 387 bp, Glycine max
acctttttatatacttcattattgacgtaattatgggaacccttaatgaggtgtagaccggaaaacctaaaccacaccttcgaccagctttaacagtggcttacaacaagatgcggggactggtaaagatagccatttccgaattacatgctgataatgtctataaataagaagtaatattattgtttgaccacattaggaatcatacttcagttttcatgaaaataccttacacagtcaccaacaacatgtgcattctcgtctgaggagactaacttttctgaaccatatgcaaaccacgacaaagatatgtagtaatttgtccacaaaggggaagaaaagagctgcaatgaaattgcaacttctatcttcccatatatcgctgaa

SEQ ID NO: 89672 - DNA, 247 bp, Glycine max
  unsure (1)..(247): unsure at all n locations
actaagctcacctncttgagaagcgttcctgagacactatcttgagaagcttncttgagaagattcctagagaagctagagcttagctacacacacctctctaataactaagcgcaccttcttaagatgagaagctagagcttagctacacaccctctataatatataagctcaccccatgacgaaatacatgaaaatacaaaaaagagtccctactacaaggactactcataatgccctgacatac

SEQ ID NO: 89673 - DNA, 314 bp, Glycine max
tcctggagatgagaagctagagcttacttcacaccccctatatagctagctcaccccatgatcaaatacatgaaaataacataaaagtccttattacaaagacaactctaagatgccccgaatacaaggctaaaaccctatactactagaatggccaaaatacacggcctagacgaaggagaaacctattctaatatttacaaagataagcgggctcatacttagcccatgggctcgaaatctaccctaaggctcatgagaacccacaggcctttccttggatctgtagcccaatctacttggagtcttctagc

SEQ ID NO: 89674 - DNA, 117 bp, Glycine max
  unsure (1)..(117): unsure at all n locations
cccccccgggagtntttggggttttttaaagggaggaaatgtataatttaagaaacgctctcaaccttgaattttatagtgaacggggggcactaaattaggggcagccaaaaaaat

SEQ ID NO: 89675 - DNA, 284 bp, Glycine max
  unsure (1)..(284): unsure at all n locations
gaagattgctcttgattaanactataacctgcattctgttgagttcaaccagtcctatatgtgcaccatggggtttattacctggtgggaaaaatattattctacccgttccgtggagacactactatcatgatctccaggcttgaaagtggctttacacaaccaacggtcgacaatattcgttcaaaccttccagctcaaggtattaacttacttgagactttctaactgatatgcatttctgccgtgtctaatattattactttcaggcgtcacactcatga

SEQ ID NO: 89676 - DNA, 210 bp, Glycine max
  unsure (1)..(210): unsure at all n locations
cattttcttctcgtaactcggcacactctttccagatgtctgtagtgactaacttgaatttttctttgacaagtcttggttttcctagttttggtnttagagctcggacttcttcatcctcttccggagcttcgaagttcttctcgttgataattatcaacttggagagccaatctaaccctcgtgtacgaactttcaaccattcatgat

SEQ ID NO: 89677 - DNA, 345 bp, Glycine max
tttttttgctccatctcctcggaactttttctgactgtttctccttgtgaatcattcatcccatattttgaatggcttgtcaatgtcaaataatactggacctgtgtcttgagaatgccaagtttttatattttcaagaaaattactttttttttattttcaataatactggaattgtgtcatcttagtatttggtccggggggggggggggtgttctccatttctctctctatgtacaaaaactttatctctcattgcatatgattactcttactttccttatattcatgaaccttataatcctccgtattgcttctgttttactcaatattataacacttcta

SEQ ID NO: 89678 - DNA, 203 bp, Glycine max
aaacttttatgtaccggcctctgcctgataatattaaacaacttttaccatgacactgtatcctttaaattgaatgaatactagtggtattgatacatgaaaacttaacatgtaatgcaataactaataacacttataattgtgatgatgcagtatctttctggggctactctgacgaaaagacttgagttttgggtacctga

SEQ ID NO: 89679 - DNA, 225 bp, Glycine max
atactttcttcgaatcctatgaataaaaagatactacttattaatggtgttgatgagactcttccatccttttggatgtgccaagcacacatacatcttcaactttgtattatttcgtgaagtttactatcaaggtttttttgcttcaaatttatcatattcaatgacatgtcactaggagaagttatagaaaaaacaaaacttcatttcgttactaatatttgc

SEQ ID NO: 89680 - DNA, 310 bp, Glycine max
  unsure (1)..(310): unsure at all n locations
cttttcatgttcgcttgagtgggcctattacccaaaccatattcccacgatttccttgtgtttttatcaggctagttatgccgccattgtctttgcctaaacccatcccggggtcataacccgtccccaacataactcgggccatcattaccgccgcatcggacagacaaagttgcccaaagagggagtccacggaggaaatgctgaccacctcanaagactggaaagcggnttctaacgattcttctgcggcttccacataaggcatggaggatgggcagcttaccaagatatcttcctcgcctgatac

SEQ ID NO: 89681 - DNA, 341 bp, Glycine max
  unsure (1)..(341): unsure at all n locations
atgctctttgaatagccctctatcagntaaccacgatgatttttattaaatcaacatcacccatatcaattaatttacaaaattgcaatcgtgttttcgtcgatgacggtttccaaaacctcgttggtgatggagcatcgtagaatgctatttttttaatagtgcaaggaattaaaatttctccaaataaattgttgaacaagtggcctcaataacttaagagggggtgaattaagtcttacaagattcctactaactttttaaaagataggctcagaatgcagaagaagaagcaataatcaatttaataatgttttttaaacatgaaagacaaaattgat

SEQ ID NO: 89682 - DNA, 269 bp, Glycine max
ccccaggatgtgtatatgtgtatatatggaatatattccgtggtccgggtggtgattggattttggtttggcacaagaaaaatgaagaagtcgagatgagagtcgtcatcacggaaagggcagggcggacgaaatcaacggcctatctttgctttcctcttatctccgatgagagggtaaggaagatgggcaactgtcataccctaatttcgtctggggattattacttgatgacatgccataaatgaagtcccgagacgtctcaaaaa

SEQ ID NO: 89683 - DNA, 294 bp, Glycine max
catcttgggatgttcccaacctttgatgacagcttttcaaggtctgctatccagtgatttgaggaaggccaccatccttgctttccagtattcatagttggttccatccagaattggtggtctggtcactggtcctccttctttctccatgttcatcagaatttatctccctagatctcactcagtgatttcgagtgcctgctctgataccaattgaaattctgataccactgccagatgtcgtacaggatgtcacgacatcacgcttcagaacatgcagattatgtttgactg

SEQ ID NO: 89684 - DNA, 166 bp, Glycine max
accctgggggcatgctacagtttttttacaaacatattttgggaggttgctaaaaggggaattttttaatgttagctttattgtaaaatgagatccttcttagctaacctcttggagagagacttaaccccttatacctctctgtaaccactaatggtatccttct

SEQ ID NO: 89685 - DNA, 196 bp, Glycine max
tgacatacaagagtagcgtatgctaagatagcctcgcttttatgtggagaaaaacaaaaggaaaagggtggtcctatatagaacactggcgtggaagttataagttatgaacaaagaaaatgcggagatacatgtttataaaaaaagaataaagaagacaggatccatatgctatacattaaggcagaataaacac

SEQ ID NO: 89686 - DNA, 411 bp, Glycine max
  unsure (1)..(411): unsure at all n locations
acttatatacaatataccataccttctactacgtcattaaacaaaactatttggggattggtaaataggtcatcttcctcaaaatcaaaattattttcagaaattaagtctgcattatgaaaaaaaaaattggttataacatggataaactaatcaggtgactaaaagcataccaaagctcttaattatttttaatatattaccttggatctattcccattgaggagaatatctgatatattctaaattgntatctgcatcaagatcagtgnnttcatctaaaaaaaatggtattttgtgtaccttcaaaagatcgcagtgttgatgttgaatagtcaaattgacaatcttccccagaatgcaagattctcagtgaatcataatggagtagtcacatgaacatcaaccttt

SEQ ID NO: 89687 - DNA, 262 bp, Glycine max
ggcaaaactttcctttttgcataacctgccgttctggcccctacgaaattgactttcccaatccaccaattgttctgctggaaaagtccaggtgacatcttctaagtatatcttctttccattttcagccggcgacgggggaatagctttacccaggccatgatcctttctgctacgggttatacccagtggactatacctgccaggtttgaccattgagttttgccaagttttgccggaatgagttgtcgccatgcatgat

SEQ ID NO: 89688 - DNA, 314 bp, Glycine max
tggtgggatatggagagattaacaaattaaactagagtaatgttactaacatgttcacattaaaatattcttaagccagtaacattggaacatggatggatgaacctaataaagaaccaacaaaatctctccacaatggcattagtcatatcaggagaaaatatttttagcagtgttcgctcaacaagtttttgttgtgtctcctcctcagaatcatcctcacactcattctctgggaactagataagatcgaacacgagcactttgttactaaccgacgacgatgcacttgaagatgacgatgcactcgaacc

SEQ ID NO: 89689 - DNA, 391 bp, Glycine max
  unsure (1)..(391): unsure at all n locations
agcatgctttcgtcaatctcttccatatgactatcaaaaagcattaaccaagcaaaactgcccatcatatctcccaaagccccatacccacgaaaatcaagtgagaaagaagtctacccaaacctgaaatttcgaggtcccacacgtagagatgcgcttcacgactccgaaaatgccttcctttcgcgatttggagcagaaatggtgaccagaggttagagctttggtgggcaacaatggtggatgagagaaaagaagaaaaggctgcgtgagagagagggagtgagcttctgaaaattagggctgagtgaggagagagagagtagttgcttttggttatataanaacggcttttctcttctctattattntattntaagctatgccacat

SEQ ID NO: 89690 - DNA, 388 bp, Glycine max
  unsure (1)..(388): unsure at all n locations
gcttcttgagtaggtgtgcacactctattcatatgctggaaactatgcattctgagaaagaatagcattagcataatctgtcgcttaaattgtgaagcatggtaagacataggaagacattgtattttattggattccgttgaggatgaagatatgcaaattatgttccaaattattctacccctcttcaatttgaagtttatgttcattagttaaactcattggagaaagcgattcatgcagcananatctggcacctattcttctccttagataaacatgcagttatatataaaacatcgtgcattataattctatctgaacatgtatgttgagatactatggagactcttgactctttagtttgaagtgtgatgggattntctga

SEQ ID NO: 89691 - DNA, 349 bp, Glycine max
tctgcttttattcgttgaccacagagtggtacctggagatatgtcgcgggggtcaagagacacttgggatgtcaagtggggtgctatttgccaaaaccaagcttgaccaatcccgacccaacccgggcatagtcagtcaatgagaacctgtgatgtacctaaacaggcgagctcctggcagtcaacagataaaaggaataaagaccacaaagcaaggaggcttgtgtggtggctggccagctgtgaatcttgtgtgatatatgggttatggcctctggtaatcgattaccaagggtgggtaatcgattacaaggcttaaaaatgaagacaggaggctaagatggtctct

SEQ ID NO: 89692 - DNA, 407 bp, Glycine max
  unsure (1)..(407): unsure at all n locations
ctgcacttcactttcaccttccttccgttttttcttctgtcacctttttttggtattcttcacatctctacctgatttctaagatacggtctcttgtttaactaattttctcttcgttgtaatctacccctttgattttctttatangtatctctatttattggacttttttattcccaattgtaatgggtccatcaagggaactaatcactggattgcatttgcattacatattgctttgaacaatttcgtattgttcatactgatgagtttagaattgggctatttcaaagtagaaacatttctagaaaggtggcccgattgacatgttatggaaggggctgttgaattattatcatgattaatacggttgtgtttcgctctcactagcacttggttaacaaatt

SEQ ID NO: 89693 - DNA, 313 bp, Glycine max
ctactctcagaggttaagctttgttacttctgccttatggttgtaaaagattcttctttgagcttatgtggttaaacttgaggtatatatattgcttggtggtttattgagcatttgaagcttaacattctttctactattcttagctcaatagaaatctctttgactttaatttctcacttactaatttggctagcaaagatgacttattggaattggactaagtttggatttgagcttacttacctattctgcttgtgcaagatccagaggacactctagaacttcaaattgagcgtttgagagtccatgg

SEQ ID NO: 89694 - DNA, 434 bp, Glycine max
  unsure (1)..(434): unsure at all n locations
tctcgtagtaatgggttccttaacaataagtctctttccatgatatttcttccctcctcgcaccaataaatgttaaggtagacccttcatactaattatataacatggcgtggcctattcatgtattcctattattcttaacggtgaacgcttcaatattctaacacataatcacatactaaaatccaataatattatcttatatggaggaaattactaaacacttgtttggtgccacttccttcaatgtcccacgataccacacttctactatatatattctctgcatgcagntacaccctctccatcctatctcttttaagnctatgcttttttttttttttttttctaaatttgctttcttctcatcaaacaatgaaacataataaagcttatataattctcatgggcttgctgttaacttaaatggaata

SEQ ID NO: 89695 - DNA, 371 bp, Glycine max
ggcgtctatttctactttctatgctggctcttcatacataacaaaaccccaccatcccaattttgcagaatcatatacctatatcattggggcatttccccaacacttgataggcgcatgtttggacataatattgcaaagaaaaatggaggcaagtgtggcatcccccatcgcttcagaatacaacataagcctaaggcctcctcattcaagtactcaactccacaaaacaagcatgcattcagatgcagattgcttcacgaattttgcaaaaatgagcaactaaagcaccaaaacacatctatggagagccaaataaccaaaggaaaatgcacttacttgtggggagtgaattatagcgtgaaaaggga

SEQ ID NO: 89696 - DNA, 214 bp, Glycine max
  unsure (1)..(214): unsure at all n locations
actattgtanacagttttaagaccactcctccctaaaatcaaagggctaataaggcttaatgggaataacagggaggaatgtttctccanacacgctgactaagtctgatgctgggacattaatgaagtcatttgaccacccatgaagccttgatgggtccctgtacttatgtatcaacatgtcattgagatgacaaacattgcaacaagactt

SEQ ID NO: 89697 - DNA, 344 bp, Glycine max
cctcggaaccaaaaaagaataaaggggaaatttcccatctaagaaaaagagaaggaaaatttcccatgaaagctaaaaaagaatagaaggaaaacttccccatcaaagagtgggagaaagccaaacaagaaaagaatgaaaattcccccatcacagagtgggagaaagcaaaaagaaaagaaaggaatattccccatctcagaatgggagaaagtcaaaaaggaagaagaagaaggaaagaaagcttctcatcatggatcaaaagacaacagaagatatgtgctgagaggcctttgaccagacaatatctgaacaatacagaattgccccaaatgaacgaaaaa

SEQ ID NO: 89698 - DNA, 239 bp, Glycine max
ccccccccgaagaaaattttgtgagccttttttttttctcccgcccttacgggcgagactatttttaataggtgcgtataaagaggtgacatatccccggacaataaccttcaacacatcctgcgtttgtgttgatctaatgaagatagggatttccgcgatacctatctctgagctttaggggggggccactctatggaaggggacctttctcacaaaaacaggctcttgggaatgta

SEQ ID NO: 89699 - DNA, 273 bp, Glycine max
atatactgaagctgcaacttaaagtgtcaaccctactcttctatattgaacaccgggacgagctactatcattgatatcatcaccttcattaatggaagcgctacttgagctactagaaccctccacctttgggcgtattctttgaaaaatacacgctctttcttacacatgttccgcaaatgcattctatcccgagccatatcagaaatgtaaagatactgcctaatgaaggcaacaatcaagccccaccataaatggacccgagaaagctt

SEQ ID NO: 89700 - DNA, 307 bp, Glycine max
agcttcttatgccatacccaatgatgctctttgtcttatagtaagcatgaaacctttcaactggatagatcaataagtttaatcttatagagatttcctagtgtcttagtggagaagagtaaagacttgtccttgttctggacgatacacacatccttgttaaaggtgacattgtatccaatgtcacataattgacttatgctcaacagattatgctttgaccctttaacatgtaaaacattatcaataggaagatagggaggaatacaaaccttacctacactggttattagacctttcttattcc

SEQ ID NO: 89701 - DNA, 361 bp, Glycine max
tgcatgcctgtattaacatgctcgctcactctttctttttgctttatgaagaaccatcctgacgggtctagggctgaataacaccccctaaattgagtatttcacccccattttgagttttttttacttgttctcttacaaaacatcgtgaaatcctatggatcgcatgacaattggctttaagcagcttaaagtgaccaacaaaaatccgcatgtcgacatataattgtcccttaaaaaaattagggtatgacacattctattatatagaaaacaaacaaattatacaaactagttctaaacctttcaacgtatatgacattttatacaactaagcaaatagtaacacttaccactacat

SEQ ID NO: 89702 - DNA, 304 bp, Glycine max
taatgctgatggttatccgttgaagatatttttaaataacatgaccaccctagcgcagacatggagtgttctatccttctctaacctaattcctacctcctatacttctgatgtcaccctagatagagccaaactcatttatggcatcatcatgaagatggatatgaatttggggtacctcatttcccaccagatctccctcatagcacaacatgacaatccagacttggatatcgtgccttgatcacagctttatataaggctagggtagttcagtcatattcgaggtccctagagagcctga

SEQ ID NO: 89703 - DNA, 357 bp, Glycine max
agcttgaaggcaaactggatgcctttgtcaacttggttacccagctggccttgaatcagaaatctgtacctgtcgcaagggtttgtggtttgtgctcctctgctgaccaccatacagacctttgcccttccatgcaacaacctggagcaattgagaagcctggagcttatgctgcaaatatttacaatatacctcctcaacctcagcagcaaaatcaaccacagcagagcaattatgacctttccaacaacagatacaaccctggatggaggaatcaccctaacctcagatggtccagccctcagcaacaacaacagtagcctgctccttccttccaaaatgttgatggcccaagca

SEQ ID NO: 89704 - DNA, 298 bp, Glycine max
tttccttgagctttaagctttagcctttatgttgttcaccatgttgctaatgttgctccccctatctctagcataaaatttgtcaataagtacttgtagtttttcatgaggaaaaatacttgtacttgggggcatgtcacttggtttgaaactttcttgagactaaggttgatcaccatggttaggaagttgcttgtgcacgacagggtgacctcgacacttgttgcctagttttcctaagtgaaagtgtcgtgtggacacacttaggctatttcttgacaaatgataccgcattgca

SEQ ID NO: 89705 - DNA, 313 bp, Glycine max
  unsure (1)..(313): unsure at all n locations
atataatcttaagcttgggcttttgnctcattcaccgaaatnttgttttcttttcaacaaaacgggacgggaggaaagttacagaaggccccccccgctatttattattaaaaacaaccctaacacacacgcgcgagggaaacaacgtccacgatactgcggctttagcctctatccctgagagctatactatgcgaaccaacgtggaactgttcaggtaacattgtattcttttggggggattacttcacagccgggtttatcacaagtgttgagggcattaacgtcattctcttatcaggcaataaataac

SEQ ID NO: 89706 - DNA, 355 bp, Glycine max
agcttctcgctgggtgccccgcgctcgatgacttggttctcgaatcaacctacaacgatgcctgcggaggtgtcgtttgcgccgaggggaactttcagctggatttgaagcacttgtccagcgccaaaattgggttttcttggaaggagaggtgcctcaagtccatgcttttgattttccgagcgctctctaacgttcgatgcctctcgctttcgacctccacggttgcggtacggtgcttctacactctagttttaatgagaaacatgtttttgcattcaatttggtgtttttattagatatgtttatggaaattatgaatgagtttatggtactctttgaaaatggttatagt

SEQ ID NO: 89707 - DNA, 305 bp, Glycine max
tgagttgcatacaaagatacttgatgaaaattctgctttgattcgatcatttataaaagaagactagctaaatgaggctacctaaatgcaaattctgatagagctgaagagtatcaacaacaatctaacacactggaagcatatatacttgtagaccattaactaccaacaaatggggatgttgcattcttcaatactttacttgcacaaatatatatgcttttagagatgttagatacgcgaactgagaactctcagaggaagcattgttgaagatgaaatataaaatctttaccaagtgagtt

SEQ ID NO: 89708 - DNA, 355 bp, Glycine max
agctttgagaaaattctaacgacatttacttttcactcggatgttcaattgagtcccgtaggatatcgagacgctcgtaattgaaaacggaagctctgagaaaaatcaaacgacaataagttttaactcgaaagtcctattgagccctgtaatatatcaagacgctcgaagttgaaaacggaagctctaagaaaagtcaaatgacaataacttttgactcggatgtccgattgagtctcgtaatatatcgagacgctcgtaattgaaaacaaaagctctgagttaattccaacgacaataacttttaactcggatgttcgattgagtcccttaatatatcgagacgctcgtaatt

SEQ ID NO: 89709 - DNA, 309 bp, Glycine max
aagactcaagcttccgttttcaattttgagcgtctctatatattatagggctcaatcggacatcctattcaaaagttattgtcgtttgaatttgcttagagcttcagttttcaatttcgagcgtcttgatatattacagggctcgatcagacatccgagttaaaagttattgttgttagatttttctcagagcttccgttttcaattacgagcgtctcgatatcctacgggacacaattggacatccgagtgaaatgatattgccgtttgacttttcttagagcttccgttttcaatttcgagcgtctt

SEQ ID NO: 89710 - DNA, 365 bp, Glycine max
tcctgcagcatccagccttgagggttgatgggttctttttcttttacgaaccactataacggctacgtgggactttatgagcacattttgacagggggcatctacggatgacatacgtaaacaagactgaggaggctccaatcactaaggaataaccatatagcagaaggacctttactaccaaaataacctttgatacaaaacttgtaatgcttcatgccaggaagaaaagaaaaagggagtgaaatacagatggtggagcaccacattgaaggaactaaagatggagagaagtggcactttgaagtttgtctaccaagactcttattcatcaatgcaacaacaagtgttactcatgcttctat

SEQ ID NO: 89711 - DNA, 186 bp, Glycine max
  unsure (1)..(186): unsure at all n locations
aatactnaaccttgcttctacagaangagaacnnttttttcgcatagattgtttttgaacgcaacccgaactctgtttaagagagcttggaccttctaaacgaggcttactgatgtcttgatgaggaagatatgtcgtaacacgcagctcagacgccttacgtaaaaatctccttgtatttttttt

SEQ ID NO: 89712 - DNA, 351 bp, Glycine max
agcttgaagcaagtttttttattaaatgtatgagagatattgacatttaatgaaggaacttatgttctttctcacttaggaaattagggattataatactatttttgaacaatgatcgatattaacattgaatttcaagttagatattatgttttattgcaaataaagtttattacaatgaaatctaaccccgacgaccttcgtcatttgatttccataccattttatcatgtttttatctaaaaacccaagaatagtttcaaacttgcgtctttatttatttaatccttgttatcgaatgttatgcttttattgttttatttggtagcttagataagaaaaaagtttgta

SEQ ID NO: 89713 - DNA, 293 bp, Glycine max
tctaggtgctggaaaattttacattacctttattattattattattattattattattaaggtgtgatttatatattattatttttagatatcacaattatattcaagctgaataaaattatattataaatgatattttttttttgtttaagtcttttaactgattgattacatgttcaaaggtggaacttgatttatatatttgtctaactttatgtccattaatttaaaaaggaatcttaaccaaaattacatcccagctgtctatcaaccaatgttgtaaatcttttgtt

SEQ ID NO: 89714 - DNA, 354 bp, Glycine max
agctttgacttgagtcatcaatagattataaatatgtgactatggaatgagtttcaataatcattaatcatcaaccatcaatcatctttgaatcatctattttttcaatctttacaacatcatctctcaacatctttcaatcaatctttcaatatctttctacagaattttctgagtcatttctcttcatctttttaaaagtttttgatcaacactttctcttccaagaaaagttctttgttcaaaaaattgtgctattcatttttttcattctcttctccctttgccaaaagaacgagggactaaccacctggattcttttgtgtctctcttctcccttacaaatgattcaaa

SEQ ID NO: 89715 - DNA, 293 bp, Glycine max
taggaaagtccttctgattctgttatacattttttactttatggcatgagatgaagtgcaaagattggacctcttgctacttgttattaatgaatacttaaacacttatgcgtgagggaaacaatggccatgagactgtggcttaagcttgtttccttgatatctatcttatgcctaacttcatctaattgttcaggttacattttattcttttctttggataactacatgccttgtaaaatagaagtgatgagggcattaacttcattctcttatcatgcaatcagtaactt

SEQ ID NO: 89716 - DNA, 349 bp, Glycine max
agcttgtcgtgccatcaccatacctgtctaaacccattcctagctcatacctatcccttaacatgacttgggccaccatcaaagaagcaccagataaacgtggttgcatcggaggagcctccatataagcattgttcacaatttctagtgcttgaaaagatgtttccaatgactcttccacagcttccacatagggtgtagaggatggacaactcactagtatatctttttcacccgacactataaccagctgtccttccaccacaaactttaatttctagtgcaacattgacgggaccaccccaacagaatggatccaaggccgacctagcaagcaattgtaggcggg

SEQ ID NO: 89717 - DNA, 300 bp, Glycine max
tgtacaagcgttggggtctgttgttgaacgtggtggtgcgagaagtagcagtacccaaaccttcaggtcataccgccacttgaaaaccacaaccatctttcaaaaccctgtgttgtgcgtcaagttctcccactatgaaatcctctaagccaccccaacccttcgcatctaggatgacaccatgtcaagatccacacctaggatgatgatgttttatgcatcaacttcaagatcctcattatatttgctaattatttttaaaataaaaagtccatttattacgtgaaaccctaactcaga

SEQ ID NO: 89718 - DNA, 349 bp, Glycine max
agcttgcttgggttgcttctatggttgctggatctttgagcttcaatgaggtcctttaatggtgatttttcaccatggagatgcagcggaagacaaaggagaagaggtgagaggaggcgccatccactagggaataagccatggaagaaggagcttcaccaccaagatgagccttggataagaagcttggaaggatgcttcaatggaggaaaagaaagagggagagaaagagagaggggggagcacgaaattgaaggaataaaagagggagagaagtggaactttgaagtatgtctcacaagactctcattcatcaaagttacaacaagtgttacacatgcttctattt

SEQ ID NO: 89719 - DNA, 292 bp, Glycine max
tctcaaggaagttttctcaagaaagcttctttggaagctacctagtctataaatagaagcatgtgtaacacttgtggtaactttgatgaatgagagtcttgtgagacacaactcaaagttcaacttctctcccctttttctttcttcaatttcatgttcccccctctctctttctctccctctttcttttcctccattgaagcatcctctccaagcttcttattcaaggctcatcttgatggtgaagctccttcttccatggcttattccctactagatggcgcctcctttc

SEQ ID NO: 89720 - DNA, 342 bp, Glycine max
agcttgctaattttactttttcatttcatgagacatattggatggaggaattgtccctttgattgagtatggtgtacattgatttgcttctttgaattaaattagacaattcaatctttaaaaaaataaaataatgaataatacgtttatgtcattatttcttttgtatagttttaacatatttattttgttgtagaattttttatttttttcatatttaattattttttattttaaattatttttgtgttattattttttatattgcatgatttgataatggagcgagataagataaaatattttatttattttacctattttcgatttacaaaaactttt

SEQ ID NO: 89721 - DNA, 289 bp, Glycine max
  unsure (1)..(289): unsure at all n locations
tcaagaaaaggccaaactcccatcataaattttatttcaggcttaaataggtggctttgatcgtgctcatgcgcttagcgcaattctgaaccgcttagcacgcattagtgaattttggcttagcgcggcttttctccctcagcggtgcgcttagtaggatgacccttcgctcagtgaacaccacagctcatccttcttccagattcttcctcgcgcttagccgaggaatgttgcgctcagtggatggctggctaagccaacagattggcttancgagagggtgaaaatc

SEQ ID NO: 89722 - DNA, 358 bp, Glycine max
agcttcatacttttatttgatatttgttgttcattgacgagaagagacacaagaggcgctgaaagtgaaaagataaagagcaataaagatatactcttctctgtttctaaactaccttcagctcaagatttgaggagatatgactttctggtagttgtttggataggtaaggttgctcgaaataatgtttgcagtttaaattgaggataagacctatttgactttgagcctgcatttagcagtggtggactatccagatcatcatgatgatgatttggcaactatggagcctaagatggacatgcagtttattctcaatactggaggacttgctcagcaatgacatagtcactggaaa

SEQ ID NO: 89723 - DNA, 312 bp, Glycine max
ctcaagcttcttccacatgttcattcttacaaagttgttttataatacaattgtatgtaaacacattaggcaaaaggttgtaccttctcattttatcaagaaccctgaaagctgattgcacatcatctgcatcacaatatgagtgaataaatattgaataagtaaaagcgtctggctcgactctttttgacaacatatcatgaaaaatatttttagcttcatccacacgacctcctttgcaaagagcctgtaacaaattattatatgcaagcaaatccactggacatccttgttcaagcattgcttgaaaca

SEQ ID NO: 89724 - DNA, 114 bp, Glycine max
  unsure (1)..(114): unsure at all n locations
tcaatcttttttaaaaaaanngacnntttaagtcatagaaatatgagcgcgataggctatccactagccgctcacttttatgcacttaacctagctttctcaacgctaggacat

SEQ ID NO: 89725 - DNA, 309 bp, Glycine max
  unsure (1)..(309): unsure at all n locations
ccccttttaatactagcctaggatggaacacttacttgtgggattttcattttcaaaacggaatcaagaaatgcgaaaaaggatgaccctagggctgcaaactcgtcaatcccgtgggtatggcttttgaaaggggggaaaagaagtttttgaatgcaaaaacgtcccccctttcgtcattcttataatttggtgcaggggtggctcgcccagaccagctaacctgcacatttttttttttttaggggaacattaaccatgttccctcccttctcatggatnaacatcttgcctaacttgaacttactt

SEQ ID NO: 89726 - DNA, 358 bp, Glycine max
agcttgcagcttggcatgtccacattatatatagcttttatgacgtgatgagaggaaaatggctaccaagaacatgagttacatggctcccggaagcagtaatacaatagaaagtatccaaataactggaagtccagcaagaacgcattattagaaagtgagtcctagccaaaagagaagtcagcagcaaggacagtaaatagcatccctttttcccccaagaattcatcaagaacattgaaatctttaactgcagaagaagttgatcatagagcttggaatcgttatttttactgtcctgataagttcaccaaggactggtatttccctcactgcagaaggatgcaattgcagatga

SEQ ID NO: 89727 - DNA, 302 bp, Glycine max
gcttggttagtccttatgaaaaggaagaagcttggaacctatcctattattgaaatacaactccaccatatgaaagtttggaggtagcacttcctccccatgcacatggacatttcatgcagctgatttgcgggccttggtttcattgcattggaatcataaaccaaggctgcaagaaggccatagagacatgaacctaaaggaatgttagtgatgaagatattgtggttcacaccaacactgtttgggccaaatagctctgaggtaatagacactgctgcagaaaacacaaagcctgaact

SEQ ID NO: 89728 - DNA, 351 bp, Glycine max
agcttgtacacccctcatacaggggtttcttataatcactttccaaaacgacatacaaaggtgcatgtgcttgtttaaagttgtcttgtccaagaatgagaatcatgttttctatatgatctctgatgtcttcatcaacccgctcagtgcgagaaacaattggcatgttgggcaattccccatgccatatccattttatgtaattccgaatgatgtcgtcatgtataagatgtgatcttatttcatttagtgacggtcatcttcaattgacacatttaacacatgggcagaaaaatttgcccccaaaactttcaacattttgttttggaatggtaggaattgttcaccctc

SEQ ID NO: 89729 - DNA, 298 bp, Glycine max
tgaatctctctctaaaaaatcacacccacgcccacattttcatttcactaacaatctctcacaaataaaccttcaaccatcacatagttttctgtgacaccctctaccccaacatgcatataaatgggaaaaaatataaaatgtggaatctaattaaatcaattttattcaataaaatcgcaagtaaatccatgtgggtaaaaggtgtacatttgtttcactgttaccaaataaagcttctcagaaacattttcggctcaaaaaaaggtcatttaagattacaaaagaactcaagtta

SEQ ID NO: 89730 - DNA, 311 bp, Glycine max
taaacccttaagtcttctgttaaagtgaagcaacacttttcctttttgttaaactggaaacagcgccggttttaacgtataattacaagttcctatctatcaataatcctaacgaggattatgaactcctggacgtaaatatggccatcgctgtaaccatggaacgagaaaccaagccggctcgatgagcgaacaccgcctagataaactccatgagctttagtgggaccctaaattgagcccaagctctggagagaggaaattaatgacgctcgtgtgcatggaatgattttatctgtgcacttttatgt

SEQ ID NO: 89731 - DNA, 354 bp, Glycine max
  unsure (1)..(354): unsure at all n locations
agcttgccgccacggagnttttcttttttgtcttgcgcggcggaacaagctacaaaaggagagagcnntaaatgaagagccaatggttgatacatggacggggatnaaaaagatcatgaggaagcggtttgtgccggcttatttactcagggacttgaaattcaagctccaaaaactaacccaaggcaacaagggggttgaggagtatttcaaggaaatggatgtgctcatgattcaagcaaagattgaagaagatgaggaggtaactatggctcgatttcttaatggtttgactaatgatatccgngattttgttgagctgcacgagtttgttgaaatggatgatttgcttcc

SEQ ID NO: 89732 - DNA, 294 bp, Glycine max
  unsure (1)..(294): unsure at all n locations
tgacaccacactctaacccaaaactttaagtctcaggtnnangggtctactccttacctatatggtgctcaacctttccacttctacccaatgtccatccgcggggcacgttgcgccgccatcttactcatctgagccggtcaccaagtcgaaccattggctctgataccaattgttggggagatttgaggggtacacctgtggatcacgagccaccacataaggaaacctgacaccacactctaacccaaaaccttaaggctcaggtttatgggtcttcttattacttatatg

SEQ ID NO: 89733 - DNA, 353 bp, Glycine max
agcttgagatgaggaagtgttttttttttaaacttcctgcttttattggtgaccacagagtggtacctggagatatgtctcgggggtcaagaaaccttggggacgtcaggtggggtgctattgcccaaaaccaagcttgaccaatcccgacccaacccgggcatagtcggtcagtgagaacctgtgatgtacctaagcaggcgagctcctggcagtcaacagataaaaggaaaacaagaccacaaagcaaggaggcttgtggtggctggccagctgtgaattttgtgtaatatgtggattgtggcctctggtaatcgattaccaagggtgggtaatcgattacaaggcttaaa

SEQ ID NO: 89734 - DNA, 298 bp, Glycine max
tgcttgtggagcttctatggaggctggatttttgatcttcaatggggtcctttaatggtgattttccaccatggagatgcagcggaagacaaaggaaaataggtgagaggaggcgccatccattaaggaataagccatggaagaaggagcttcaccaccaagatgagccttggataagaagcttggagaagatgcttcaatggaggaaaagaaagagggagagaaagagagaggggggagcacgaaattgaaggaataaaagaggtatagaagtggaactttgaagtatgtctcacaa

SEQ ID NO: 89735 - DNA, 275 bp, Glycine max
agcttgccaaagggttacatgttacttttagctttattcaagacaaagatattcaagatggatgatcaagacagtttctagagtcttagaaagagtatattaaaataggaaaggaaatcctattgaagtagcaaaaagtctggcctagaaatttaagttaaaaagtcttttttcaagagatttacttttttgggaatcgattacccaagggatgaatccattaaccatgggccaaaactgatttacaacagctattaaaatttgaattcaaaatt

SEQ ID NO: 89736 - DNA, 292 bp, Glycine max
tgaagaagttttagaaaagttttggctttttcatgcccaactcctttcactggcatttgtattggttgttaacttgattgctgcatattaatacatttgatatttgttttgcatcatgcatcatcatgtgaagaaagttttctaagttagaaaattttcttcaaaggcaaaaacattttctaaggctcatattggattaatcgattatgggagaactttgatcgattacattgttgtttgagacaatgactgattgttcaagagtctttgctttaatcgattaccagatgga

SEQ ID NO: 89737 - DNA, 353 bp, Glycine max
agcttgaaggtaaactagatgccttgtttaacctgaaataaaaaatctgcacctgtcgccagactctgtggtttatgctcctctgccgaccaccacacagacctttgcccttctgtgcaacaatctgaaccaattgaacaacatgaagcttatgctgcaaacatctacagcagacctcctccacctcaatagcaaaatcagccacaaaataataattatgacatctctagcaacaggtacaatctcggatggaggaatcatcccaaccttagatggtcgaatccttcacaacagcaacaacaacagccttattttcaaaatgttgctggcccaagaagaccatacattcctcc

SEQ ID NO: 89738 - DNA, 301 bp, Glycine max
tcggaagaaagtgatgagatacaagccctaatggtagagcttgaaagagcccgggtagtcaaagagaagttcaagtccatagccatcaaagtctgaagagagtatgatgaactaagggacgtcaatatggccatcgctgaagccttggaacgagaaaccaaaagggcccgcaaggaggaacatggccgagataaattccgaggagctttgtggggtagcaaaaatgagctcaagctctggagagaggaaatagatcagtcacgggtgcatggcatgattttaaaggaagagttagttgctt

SEQ ID NO: 89739 - DNA, 345 bp, Glycine max
  unsure (1)..(345): unsure at all n locations
agcttaaaggagagtatttttgacttttgttgctgntgccccccagtttcggtttgaaaaaatatataaatttaatggactgtcttataatgctgctttgatccaagtgcatacctttctattcatctgatgaaaaacaatgaattacgtttatttctactgagtgagtgttaaaatcttttgccagagatttctctttagagtacacacacaataactcctttttatatcctatccttctggtaaaaattgcagaagtccttctcacatagttgagctttcagtattaaagacacataaatgctaatttgtataggaaactcttccaagtggattacgattgta

SEQ ID NO: 89740 - DNA, 293 bp, Glycine max
taatcaattgaaaattgacggtgtgggattttccctggactctactaggggcaatattccttggcacccttaatcatgttcaatttgttggtaagtttaggtcttttaatccaaaaaaggaaacttggttaccatgtgagagtaatttggataaatgaaaatagttttggatgttatatgcatgagtatttcaatgcttgcactactacgaaagtgtgttttttatgacaggcgttctacttttgtaattatgtgtctgaaaaatccttttatgatgcacattctaagacggg

SEQ ID NO: 89741 - DNA, 344 bp, Glycine max
agcttagcagctctaatttccgaattttaatggctcaagtcccttcttactgaattgcatatcatccaaacaaagcctcctttattgtggtttgataatcatggtgttgtaatgataacagctaatacagtgttgcattcaaaatcaacacattttgaagtggacctctggtttgtccgtgaaaaggctgcaaatggagaaatagttgtcaagcacatacgctcataatttcaagtagctgatcttctaaccgaggctccctcaagtagtacttttttgagccttcgacccaaactgaatgtttatcaattacccactatcagtttgcgggggatgtaaaggat

SEQ ID NO: 89742 - DNA, 289 bp, Glycine max
taagcaagaaacataagagtattatagctttttatgtaattaactaattatgcttgtttatatatcataactacttgatgcatgaaatgctggctagtagaacgctgatgcctgagaagcattttttttttccttttttttttcttctccttaccattcttatacaattgaaaaagaacatgaaagtaattggtaaattatctttttagtccttaaatatttttaattttttatttttagtctttaatagttttatatttatttttagttacgttctttaacttctttt

SEQ ID NO: 89743 - DNA, 305 bp, Glycine max
gcttggagaggatgcttcaatggaggaaaagattgagggttagatttagagagggggcgacacgaaattgaaggaagaaaaagggagagaagttgaactttgagttgtgtctcacaagactcttattcatcaaagttacaacaagtgttacatatgcttctatttatagactaggtagcttccttgagaagcttctttgagaaaacttccttgagaagctagagcttagctacacacacccctctcataactaagctcacctccttgagaagcttcctttaaaagatttctaaagatgcttgagc

SEQ ID NO: 89744 - DNA, 308 bp, Glycine max
tcaaccttttaaggaattccatataagtttcgcctatttaaatttgtttaatgcgagggtaattattaatgttgatctcttcttgaaggcaactttggaagactagcggttagtctttgatgctgtctataggctaagaagaaccagattgttgaaagaagcggatgctgcaggagcaataactgtgggtggggtagaaatgttcctaaggcaggccattggtcagttcaatcttttcactagcctagaaggtataatcttcactttctgctttcacctttgtatcatcaaacttaagtaaatagaat

SEQ ID NO: 89745 - DNA, 369 bp, Glycine max
cccccgcggcatgcaagcttttaccaattcagaatacatattcatttttaatttataaaggaaatgatatttgagttctgaaatgcttgaatgcattcgaaactctcatcagaaaagaaatccatatctatgaacttagggtcaatgatagaatgagaggagaagaggtttgtgtatcgtgtacgttgttcttccgatgagaacaatgaggaggaggaattggagtatcctaagcctcagagtgctgttggcttctactcgaagaacctttgcgcttctttgatggttctgccatttgagagacttaatcgaaatttcaatcggttgaaatgaaagagaatgaaaaaagatgaattttgggctttgtgg

SEQ ID NO: 89746 - DNA, 294 bp, Glycine max
  unsure (1)..(294): unsure at all n locations
aatacatttcgtttgatacattgggatctatggtgaccttatagaatnccttcttcttgtgttgcttcatattttcttaccattgtcggtgattgcttgcgtgcagtttaggttttttttttgctgatagataagaaagaagtatcaccggtattgacaaatttttttgttatggcagagaggcaatataacaaaaaggttaaaactgtgagaagtgataacagaacaaaattcatttgcatgaaaaagtattttcttgagcatgggatagttctccaaacttcttgtatagga

SEQ ID NO: 89747 - DNA, 296 bp, Glycine max
  unsure (1)..(296): unsure at all n locations
ggaaagaataatgctnctatatcnnncgttaatgtttatttaaaagancagaaatatggcatatatttgttactatgacttaatacttggtttacaatgattaggccaaagaagaaacgattgatctattatatgattcagaatatttcgtgccttgcgagattgttctttctacctctatgatcgacacctcgttgatttctacatgtatatattttttttttctttaatttgaatttgtgcttcaactttcaatctagctatgattaggccaattcactttttggtgatcaata

SEQ ID NO: 89748 - DNA, 356 bp, Glycine max
agcttagtcaactcaactaagatttttctatgcaaaagctgcaatgtgtctaatgtctatgctcgagccaaagcttcttattagaaacttttgtgaggtttatagatacaatacaatttacaaacgtttgtatagaataagttacttaaagtactgacacgtatcctaatgtgatatcgatactccaccaatatgaatatgagaagtatccaagcctttaaaaaaaataaaatccttgggctccttagataagaggcaaagtgaacaggatgaagcatcttggatagaacttttggagtgtgtttctaaatcaaagagacatttagatcgtgatcttgataatcctaaaccatgca

SEQ ID NO: 89749 - DNA, 311 bp, Glycine max
taagcttctcccccaattttctataaatagggggagtagtgatgtagataagggttcagccccttaggcacttctctctttctcaaaatagctgaggaaaattaattccgtgaaaaaaatccaagccaaagcgcttccgtaacgtttccgagagtgatttcgcgaaggttttcgaccgttctttgaccttcttcattcgctcttcatcgttcttcaggcttcagtgggtaagtacctcaaaccaagctttttaattcattctatgtacccgtggtggtccacatttggtttcatgtatttttattctcgtt

SEQ ID NO: 89750 - DNA, 351 bp, Glycine max
agcttccatactaaaggggttatttttatcaatccttaaacatgttatgccccttttttatattctgagcacgtttttcttccatacccttacaccagatcagtcaaagtacaatggatactgctcgagaagctttttactgattcccgtgattgcttcaaccatgtatattattatgatatgttgggatgtgccaagagcaggtttcacccaataccatctgcttggttaggctactagttaccaaattcttatgaagcctgccttatcaattcttcttgttaggaaaaatgattaccttccttcatgtgtaactgaagtcaatcaattctcattgtgaaaaatctctta

SEQ ID NO: 89751 - DNA, 303 bp, Glycine max
  unsure (1)..(303): unsure at all n locations
caagcttgacatatagttttgncaanggctttcttcttagtcnccngnaggcaggacatatttacttgctgttccctcaccaaatttcatatggaggcccattttagacccctccccaagcctcttacattgtaggtttcaatcttcatgagtcacctacattgcttcccttcccctgatttatgcccttgtccctttcttccatgttgatcagatttcctataattgttccatcctgtttgctgaaattgactcctatgttttttgccatttccaaggtatttactgcctcttttaataatt

SEQ ID NO: 89752 - DNA, 353 bp, Glycine max
agctttaacataaagagcatactcttttggacatcgaacaaacccattgtcttggaaatacttgtcaatgcgagtatttcatgccctcggtgcttgctttagaccatacaacgccttgttcaatttcaatacttttccttcttgaccttcgatgacaaaacccattggttgttcaacatagacattttcttcaagatagccatttagaaatgctgattttacatcaagctgaaaaattctccacttcatttgagctgccaaggaaataagaagacaaatggtctccatgcgggcaaccggtgcaaacacttcatcataatcaactccatattgttgcttggagcctttagcta

SEQ ID NO: 89753 - DNA, 296 bp, Glycine max
tatatattttttagttgccttatattgggctcatctaattcgagggttgacattaatgtttatctagagcttttgattgacaatctgaagaagttatggagtggcgttttggcatatgatgtgtcaaggaagcaaaatcttatgatgaaggcaactttgatgtggattattaataactttcttgcttatggcatattgtctggttgagggactcatggtagatttgtctgttcacattgcatgaaacataagaagtcatttacattacattatgtgaggaaaatttgttggtttgg

SEQ ID NO: 89754 - DNA, 358 bp, Glycine max
cctgcatgcatgcaagcttgaatataaaaaaacttgttttcttatcatatctaagaatcactcaattcgctcaagtatattttgtccaactaatcttacaacattacaatactttgtatgttttgactcatatgattcttttatgattcgacaaccttaagatgaacatcttcaagtattatataaactctcaagctttgatctgttgaaaaatcccaactagctgttgtctaatagcttgggcactttacatgaggttgttattgtgtatagagtgtgtggggaccacaaacattttctgcaacatatcttcaaagaagtatagcttatcagtgtcgcattgcactcaaagatgact

SEQ ID NO: 89755 - DNA, 304 bp, Glycine max
cctcaagcttaaactccttattattatatgatgtcccaatttattaaacttgaagcattcactgtcaaagagttatataagacttgcatttccagttaatattaaaaaaaggacacagacacaaagttcccgaaatccaaattcaccttctacttgatgagctggctttagcagaaccatctaatttagacaagatatccccatctattttcttcacaagcttatccaaattcttgaactgctgagaataattgctgactccatcctctccagcataatccccaacactgcatatatcaaaaac

SEQ ID NO: 89756 - DNA, 340 bp, Glycine max
agcttgcccagagaaggaatccacttatgaaattcttaccacctcgaaagactggaaagcggtttctaatgactcttctgcggcctccacataaggcatagaggatgggcagcttaccaagatgtcttcctcgcctgatacgatgaccagatgcccttccactacgaatttcaatttttggtggagtgtagagggaacaactcccaccgagtggatccaaggacgccccaacagacagctgtagggggggttaatatccattatttggaaggtaacttgacaggtgtgagggcctatctgtactgggaggtcgatctctcccctaacctctcggcgggtg

SEQ ID NO: 89757 - DNA, 294 bp, Glycine max
taataaagtccttaggatccacattgtatgtatattatttcatggaatgagatgaagtgcaaaattgggaattgattgctagttgtttggaggaattgacacttgcctgaaacacttgtgtgcttgagagaaacactggcttgtgagtaaagaagcttagtcaatcttccttgatgcctgtcatgcttgctaaccaatttcatttccttagcacattatcacattcttctatcttgaaattatgacaaatgctaatttggtggagatgatgatttgtgaaatgttgcaatcatt

SEQ ID NO: 89758 - DNA, 348 bp, Glycine max
agctttataagtgcgggtttgtgtatatctaggtcaagcgttcgcgatatgcgaagatgatattccgagtactttggatttggtacgaccatgctctcctgatttccagctgggaaattggcgagtggaggaacgccccggcatttacgcaacaagcataatgtaaacctttacggctttaaaagctctatagttgggcctaggctttagagtttttattttgttaaggctttgggtcttttgtttttgaatttataatacaaggatctttcttcatctggtcctggtctctacccattctcattcatttgcatgtttacttctttttctaaaacggcagattcgatg

SEQ ID NO: 89759 - DNA, 300 bp, Glycine max
ttgtgggcgtaaccggcaccccatataactgttagagacccgggatcaagggtagaaaacctagtgctctgttggactttttcgggtccactatgtgtctgggaggtgcgatccctgcaaattggtaagttttgtctgagattagctaggccacatgaatactaacttgagtaaaaacggtgtagaccagctggcatttcggcaggggaagatcgaaattatgatcgttggggaggatattactgagaagcagcgtcatccagatctgtgtcatggtggtcatgctagtgttcatgatcc

SEQ ID NO: 89760 - DNA, 344 bp, Glycine max
agcttgacacagttcttttacagttctcatctccacccgcagcacaaaagaaattaggtggaaaaatgaagataaactgtgttaagcaagaccaaaaaacatacaagaagatactgtcagtttgtttcactaattaaatcaaataacaggtttttgtagcttatatatatcattaagaaaccagtacggcagtacctgaaggaagtgaattgtcttttaatcgagtcagaaaccagtatatatcatttaagatatgtaagtgagtgttgtcttttcagacaaatgaagcattagcgaagcgaagacacatcatcatgttgtgcatgtggaggtggcaggagctg

SEQ ID NO: 89761 - DNA, 292 bp, Glycine max
taattcatcaatctgatctcttagacgctttaactcttctcttttgcttgcattgaggttcaatccatttcggtcaaagtctctcacctgtcattggttaaaaaagaatcaaatctgcatttcatactgatcatggaaaagtatattaatcactttattaaggccattacttttccaggaaagtctctcacccacagtaagtattcaataaaatgtttacaactcaaatcagacagtctacctaaagttaaattgccacacccttcttacttaccttagaatgaaaatcttc

SEQ ID NO: 89762 - DNA, 345 bp, Glycine max
  unsure (1)..(345): unsure at all n locations
agcttgtccttggtttatacatgatttatacataanntaggacttgtaggatccaatttgggcaattttggatgagggcaagggtgatttcgaaaatctgcacttatatgcagaattttgctgttaaagtgtgcagcataattttgtgtttgtgcagaaaatgcttatgcatggctggttgtggaaaaggttgtacatattgggttctggacgtttcctagtagatcccaacggttaaaatatagatttatgtactagggacctccagtaaaattttcgagtcgatccaacggtgaacgaattggaacgaagagaatgttactgggatatttgaataagaaaagt

SEQ ID NO: 89763 - DNA, 291 bp, Glycine max
tgtgcctcaaaacaaagtgtttccaagagtttatgactctggtaatcgattaccagtcagtgtaatcgattaccagaaaacaattttgaaaaacagctttttaaaagggttttgaatttgaattttgaatcatgtaatcgattaccagatgtttgtaattgattaccagcaacggaactttagaaaacactttgaaaagtcatgacccttcaaaatataactgtataatcgattaccagaaacctgtaatcgattaccagtgaagaatttcagaaaaaactttttgaaaag

SEQ ID NO: 89764 - DNA, 358 bp, Glycine max
  unsure (1)..(358): unsure at all n locations
agcttatttcatgtatgaaggaagttcatttataactctagtatcaagtctcttgtaatcttgtgcgattggagaacgagttacaggaaaattacaatgaaactctaacccaagaggaaatcttttggttccaaaaatcgtgtgagaaatggattaaatttggaaataaaaataccaagtttttccatacttaagctgtgatcagaaggagaaagaatagggttacaagccttgtgattgatgggatttggtgcttagattatgacatgttgaaaagggaagccctgaagtacttcaaagaccttttacaaaangctctgagatttattataccttgtcacttatggatgagacttgt

SEQ ID NO: 89765 - DNA, 305 bp, Glycine max
acgctattacgagctatatattttcttcttgcctatgtgcttatgtcatcgcatgaacaatactgttccttgaatggactcaaacactacatcttatctgagaccacaggaccatatgtcctggacagagccctcacaactgggaatagcatgggcggctgcggacttactcctaattgtgaagcccacgcactgcaaaggcaatatgtgagatataaagtctgaaggctctggtaaattgagaagagcactcggctatcacaatcaatctcgtgtataacccaatattggacctcatgttgtga

SEQ ID NO: 89766 - DNA, 315 bp, Glycine max
agcttgttgctgtgtgctaaatgtttgatctagtcgtgtagagtggttcgttggaacctatatttatattagttgagcgagggtgctagtccttgtttgtaggggttgttgtatccttgtaaataattcacgacttatatataatagccgggagcttaaagataatgttagagataaacatttcaattatagataaagtagaagataatcataccatgtaggtaatgtgacgttatagataatttaatacctgccaaatagataagatattcaaatacatttgagtattagttaggttagagataacctatttgt

SEQ ID NO: 89767 - DNA, 300 bp, Glycine max
ttgaaggtgtgtagcccacctttttccatattagaatactggtaatgtgtctactatcattgtcatcgtttttcgtcattgaggtgccactttgagctgccaggttctccacctttgggtgtattctttgaaagatttgtgcccccccttttgcacatgttctgtagttgcatcctatccgaagacattatactgacactgcctaacgaaggccaccactaggtccttccaagaatggactcaagaaggttcctaagttagtataccaggcgacagttgtcctagtaagactttctcagg

SEQ ID NO: 89768 - DNA, 300 bp, Glycine max
  unsure (1)..(300): unsure at all n locations
cttaagctangatctaaaatgttgaaaaaacaaattatattttttttatttnaacccgggaacgaatatatatgtgaggggtcgagggcgtcacatattataaccctgaaaatgcattttcgaaaggaaatgtatttttagaattgcttaaaattacattccttgtcatcgcgttttcattttacccaaaatgatattcctggcttcaactgaaaacgagattttattgtttccagttttaagttggtttgagaaaatattttcactgaaaatgaaaacagaaatccaaccaaacacatt

SEQ ID NO: 89769 - DNA, 346 bp, Glycine max
  unsure (1)..(346): unsure at all n locations
agctnaaggtattgcccaaanacttttactttttttgcagnncccaacttcagtgtgcttggttctaataatcaactgtgttttacaggatccggaaaaaggcagcattcgagctgtgaccctttgtcatactcgtgaattatctgttcaaacatatcgagagngcnaaaagcttgctaaaagaaaaaaattttgcattaagttgatgactaataatcttttaagaaatgctgatttttcaaaatttccatgtgatgtactaatatccacaccactttgaatacgcttggctttctagaggaagaagattgatctcagcatgtgtgtgatgatgaatattgtctca

SEQ ID NO: 89770 - DNA, 306 bp, Glycine max
  unsure (1)..(306): unsure at all n locations
aagcttaatctcccttaaaagatcgacgctatagttttttttttttatacgangcccaactgttttggtctgaagatgtgtttcacgaaaaaaaaaaatgtaatgtttcgcataaacttggggggtcatttctaaatatgaatcacatgaagtaacggtccttccatttatactaggctagcaaaatatataacatccaaacattagaacaaacaaagcttaaaataaattacagggtaataatacaacaaaaagtaaagagttccctccacatccagccctacaaatgtacaattccgaattttg

SEQ ID NO: 89771 - DNA, 308 bp, Glycine max
caagcttaaaggtgtggttgggacatggtttaccattccagcagagaatcaatcttcacaagggaaataacaatgaatagtagctctagttgtctccatgaggtttttcttgtctgaacaatgccttttgcaaattttacttatttctaaattagtcgattgtattcttttaccatacttctctgactaattcttttgttactcttcacattctgcttgagttttacagctagacaaacatattttgtatcgatattaaaattgattttctctctatatggctaatatatgtgtcttgcgacattttt

SEQ ID NO: 89772 - DNA, 303 bp, Glycine max
aacccccaagcttgccaacgatttggacactgcgtgtttaattattttttgaggaagagcctaatttacatttgtcaaactaatcattatttgactgtttgcatttctggagagtaattcgatttgggcacgatcttttctcactttagaaaaagtaagcaggcaactaaagagtgggcgattagcttttactcttttgtattaaaaaaaaagaagacttgtaataataaaaaaatgtttttatagatcgtgtgcgaagatttataataattcatgttttctttctaaaaaaaaagagatttc

SEQ ID NO: 89773 - DNA, 327 bp, Glycine max
  unsure (1)..(327): unsure at all n locations
agctttacagcagattttagttatgtcccactaacctagaattaaaataactgaatgccattaacctagggaattaaaaaaacttaatggctgagtataactgagantgtggcaaccaaaagtcacccccaacagccaacaagtcagccaccatttggtcttccaaaaggctgatgcctaagttgctnnttgggcccttattacaacttgaactaaacctaactaaagccctcttatttaattaacccaaaacatatttttggtcagccaactttacaaagattgggccattnnnnnacaaactaaacactcttaaattgagacaaa

SEQ ID NO: 89774 - DNA, 294 bp, Glycine max
taacaaaaggcatgcgaagtgggtggaatttttatagcaattcccttatgttatcaaacataaaaagggaaaaggtaatattgtagccgatgctctttctcggcgtcatgcattactttctatgcttgaaacaaaattgattggtcttgaatgtttgaaaagcatgtatgaaaatgatgaaacttttggagaaatttttaaaaattgtgaaaaattttcagaaaatggtttctttagacatgaaggctttcttttcaaagaaaacaaattgtgtgtgcctaaatgttctactag

SEQ ID NO: 89775 - DNA, 351 bp, Glycine max
agcttatgcatcctagaaaatccattatttttgttttccagcctcattacaagccaataaaagtccttctgattcaatttgtgtatttctgactttatggcatgagatgaagtacaaagattggacctcttgttagctattattgctaaatagcttaaacacttgtgcgtgagtgatataatggccgtgagaatttggttaagtatctttccatgaaatctgtcacctgcctagctttatttaattgtgttgctaactaacatgttcttttctctgaaaaactgcatgtcttgtgaaaatcaattggtaaaggcatttttgtttcatttgttataatgcaactaatatttt

SEQ ID NO: 89776 - DNA, 293 bp, Glycine max
  unsure (1)..(293): unsure at all n locations
tctagccaaatggacttacctngttttaatttctttgatagcccttttgagccttgtttccctttccttgttttgaagctcactacaagccttaaataaaaaaaaccatgatatcaccatatccttaaggaattttggagctttggaattgttttgggaataagtgtgggggtttttgtttcattggataacatgttttgttggctatgcttcatgatgtattttgggccatacttgatgtacattgtatattggttaaatgttggaaatgttgaatgagatgttgtttctca

SEQ ID NO: 89777 - DNA, 348 bp, Glycine max
agcttctaaaccctgaatttgtctgttctggaacttcaattaaaaacttattgataaacttctgaaaacaactctatcaaaaatctataaaaataattgaaaagtgcagataggctactaaaataatcaaattagttaagcaatggaagaccttttctatacagagataatctataacaattttttctagaaattgttgtgatttcttaatgttaccatgctgggtagatggaagttgacgagtccattaaaacctgaaacagtggaaaaaatgtctgtgacaccctctaccccaacatacgtatttatataatatcatacatgaaaatgcgaaattaattaaaatga

SEQ ID NO: 89778 - DNA, 298 bp, Glycine max
tgccacccagctcgcccaggcgagcaaggttgcttcctccagaagcaacagccttctggaggaatctctggagggcccatttttgcctggttgctatttgcacccccatttttactaaatacacccccctgcccttttttggtgattcttttttcgtaaagttacggaaacttacgaatttcgtaacgatacttggtttctttccgtaatgttacggaaccttgcggattacataatcatcccctttttgacttacggaatgttacggaacctcactatttgtgcaacgatgcttcct

SEQ ID NO: 89779 - DNA, 289 bp, Glycine max
ttgtgggcgtaaccggctccccatataactggcagagacccgtgatcaagggtagaaaacctagtgctctgttggactttttcgggtccactaggtgtctgggaggtgcgatccctgcaaattggtaagttttgtctgagattagctaggccacatgaatactaacttgagtaaaaacggtgtagaccagctggcatttcggcaggggaagatcgaaattatgatcgttggggaggatattactgagaagcagcgtcatccagatctgtgtcatggtggtcatgctagt

SEQ ID NO: 89780 - DNA, 307 bp, Glycine max
aaaagtaagtagcctaatgaaccaacactttattcacttgggcggctgtagcatcgggtaatggaatggcatatcaatatttggtcaatttcacatggctcaattggtaagaaaatatggaagggtttgaaatgatttttgtttgacaatgaaagaaaaagttattatggttatatgtaatccatttaagttcaaaaatttatatttattttggggctaactagatccttcatatttatatggaataagggtgaacaaataccatcatgtgttatacaagatatctggaatatgctttgattgaata

SEQ ID NO: 89781 - DNA, 291 bp, Glycine max
tgttaaagaacttagaaaaatcaagaacattcttgttcgcacatcgttcacgtgtatgatatccactccacaaggtttgaagtagaggagaccttcaaccctataacgcaacgtggcggacaaaagtgggcagttaacttgaatggtcatcattgtcaatgcggaaggtattctgcgcttcactatccatgttcacacattattgcagcttgtggttacgtgagcatgaactactaccaatatatagatgttgtttacacaaatgagcacatcttaaaagcttactccgca

SEQ ID NO: 89782 - DNA, 211 bp, Glycine max
tggtggagacaaaaatgttttgtctataaaccattttatttcatctatgagcatgacaggagctaaatctgacaagtggtgagttatctctgaaatatactctgccacatgaatactaacatgagtgaaaaatgggtataccagattggatattcggcagggaagatccaatataaaccgtcgtggatggaattacatgtataatgacaat

SEQ ID NO: 89783 - DNA, 353 bp, Glycine max
agcttatagagcttaagcttgaattttgtgttacaatatctagaaacatatataatatttttattgaatcatataaagtttagagtatcttagatgatcacttatgagtcatttccatatatcattacatttccttatttaattagtattagaacttacgagcatagaataagtataattaacgttagagctttgcattttgtaccacatggtatgccaccaatatagataagagaatgttattcttattcatggtctcttctatctctatttatctccattataatattattatcgatgaacacatttgaaaatgcaaaaatagttctttgacactaggagtttgtcataaa

SEQ ID NO: 89784 - DNA, 309 bp, Glycine max
aatcctcaagcttgaggaacacaaaaaaatttaagcttttgttttgtgagaaacaaagaaacaaagaaaacgaacctgtagacagagaaacaaagaaaacgaactagtaatctatcgaacatactatgatctgtggcttttgtcttgcaaaggaagaacaatactcaaccacggtcaaataaggctgaggaacacaaaaaaattcaatcttttgtaccgacagaacccaaaaatcaaaggagaaatcaaatacatcacaaacttgtactccaaatgttggacactatttgtcatcttctttgttggtct

SEQ ID NO: 89785 - DNA, 355 bp, Glycine max
  unsure (1)..(355): unsure at all n locations
catgcaagcttggaggatcatggggtacccattatatgtggtacttagtggcggnccggcgatggtgcacaacaagttttccacatccacaatgcgcgcataaacccaccatcccctggtgcccacctgcaactgagcttacgtactcccacgtagcccatatgctcggtaatctcaacaccgggtacccatcaatcctctcaagctatcacaacatccaagcagaacaacattcaaacagcacaagctatcacagccaagcaaaacagagcaaaggcaaaaaactctgcttaacaccaaccaagatcacagctttttctcgcttaaagaccccagaaacaatgtctttgatcca

SEQ ID NO: 89786 - DNA, 298 bp, Glycine max
tataatatatcgagatgctcttaggataaatatcattcccatttcaaatacaaacggccataacatttcctccggatcttcgaataacgaaagtaacctatcgcgacgctcaaaatttaacatggaaaactcgggtgaattccgacgggctaaagttttgactcggatgtccaattgaggcccataatatatcatcgcccttgaaagtagtaatggactgaccacgcaaattcggacagccataacgtttgactcggattcccgattgaagctcataatatatcgagaagctcttagg

SEQ ID NO: 89787 - DNA, 238 bp, Glycine max
  unsure (1)..(238): unsure at all n locations
actctacacatacaataaataaatttaatagagaaggantttgatgcatcatcgcacaccngatcctataaataaaactccacgcatgcaaacatcgtaagcaaccatcacccaacctttttatgaacccgaaacggacccacaaaaccacagcaatcatgattaagacagactctcatatgctacaaaatcgcgtgcctatgaaggcgcataacattaaagaaaaaacccactcccc

SEQ ID NO: 89788 - DNA, 318 bp, Glycine max
tataaaatcctccagcttgccatctataaaagcaatatataacaatttttaatttttatagatgtacaacataaaccgaaattgtaaaatgctcatatcatacaaatataccaaggataaagattgataccatgttttgttgaccctaaagtttcaacattttcccataaattttgaggaatcaaagaaatatcttcagctggtgagtacaagcaggcataagcaataagtgctaatgaaagttgcaggataggaccatcttgcgatggttgcgcattacacaaacagcaaatgctatcagctgccacaagaaaagat

SEQ ID NO: 89789 - DNA, 297 bp, Glycine max
gcgctctataattgacagcgcttagtttgatattttgacgaaaacgataacggaccttattgcttgcgttctcttcttgatgctttgtttgacttgtttcggtggtgtcatcactgtatcccagctttgaagctacaacatttttggcagtgatggctttgttagctattgctgtggttgctgaggagattttatctgtgtaactgctctcaattgatggctcttagtgtggctcctcaacttgggtggtggagtacgttagtcgggcaatggttttagtttgacatctctttccac

SEQ ID NO: 89790 - DNA, 324 bp, Glycine max
aaacccaaaaacacgcaagcctagaaaaccagtagaggcacacgaggaaaagttgcaaagaccaacaacaccaaccgcgcagagcgaaacgcccaaaggccaaataatacaccacggacaaagagcagacaccacggggaggaggaccaacaaagccgcaccagaaaagccgacaaagccagccgaaccagagaagaatcggaagacggcgagaacaaaaccgcacaaccaacaagaacgaaacaaacacgagcgaaaagaccaacaagcgacggggggacataacgcaagcaacagaggctaccaaacaggcgcaaaaaaaga

SEQ ID NO: 89791 - DNA, 291 bp, Glycine max
  unsure (1)..(291): unsure at all n locations
tcaagcttaatattttgccggaagaacagcttatttttaccgcaanaaagcaaaggggcatttggaaaaatattaatccaccataccccgtatgtggggatggagagggaggaagttaccgttacctattctgctaagagttactcctcgtaacgaggcccagtgtcctagctgcaaaaagtgttaatatttcttccatatgtgactatctttcttacaatcaagtcgttccatgaaattagtccactcatctggtaaaaatactacgaattatccagtcctttttctact

SEQ ID NO: 89792 - DNA, 293 bp, Glycine max
  unsure (1)..(293): unsure at all n locations
tgagattcttataaaannnatnatttttattttatgttaaacggatattttgatgaactggaaatgtgaaagaatattcagttagtctttcagattatactgtatttgattgaaatgatttggaattcatatagatatctggaatgtatcatacattggtcttagtaacacttatttttttgtgccttttcaggtgaaactgatgaagattttgtgcaaactgtcaaccttattgaagagtacaagttccctcaagttcacatttcacaattttatcctcgaccaggtttctg

SEQ ID NO: 89793 - DNA, 370 bp, Glycine max
  unsure (1)..(370): unsure at all n locations
ccccgagatccanaaagtcacctgcatgcatgcatgcttttatgaggacaacatttattgttttcattatctgaacacattgtacctcctttttatgcatcattgcaagacttgaacgctttaatatatacctattttttgggtactatacatagaggccaaacaaactgtttttgtgtacaacagtgtaggactttgtgtgaatattccaaattctcctaccactatactgatcctagtggtggttgaacaaactctttgagtcccagcttgaacacccctcttgcaacttaaaacacctactctgccacttaaaattttaattttgctcgtaaaacctataaaaatgagtaacaaggcacaactaaat

SEQ ID NO: 89794 - DNA, 296 bp, Glycine max
taagctttccttttaacccaattcaacaatcttaaagtatattcatgcaccaagaggaggatctcaaatggatgtacaaagccaacatcatttctatagctgtcactaaaagccaaattttatctatattgtgcaatgcaaagaaaaaggggtgtaactcaccgaattcattggaaagcttaatcttcattggacaagtgcactgcaaatggaagcatactgatattggagcaaccaatgtaggttttgcctcggtttcatcaatttcatataagctggtatctccttcattccct

SEQ ID NO: 89795 - DNA, 351 bp, Glycine max
agcttatgcattgctgcttaataatttaagatattgatggtaagccttggtgcttctatatcaaatgatatagcaaaaacaaggaatacccgcgggaggcctctggctatgacaagagaacattgctaatgttggcggttggcggttggcttctttctaagtgggaatatcctatacaagaggaaccatgacatggtgctatttcgatgtatggacgtcgaataggctaagcaaatgctggtagaggtgcatgaaagatcatttggaacacatgccatgtaccggaaaattctgagagcgaggtattattggctcactattaaaagtgattgttgcattcattttagaaaa

SEQ ID NO: 89796 - DNA, 294 bp, Glycine max
tctagacactccagacatcttcttatagattccaacggttagatcatggaacagtgtcttgtgaagttgcaaaccaaatttcgagaatatccaacggttaacaaaggctgggcagcgttgttaccgaggcatctgcatgtagttttctctagaagcttcattaagaggcttcctccaaaagcttcattaagaggcttctaacacactccaaacctcttctcaaagatcccaacagtcagattatggacaagtatcttgtgaagttgaagaccaaatttcgagaagatccaacgg

SEQ ID NO: 89797 - DNA, 350 bp, Glycine max
agcttggttccctaaaggtttcactttcttcgctaccggttttcccggtggtattcatcatgatcctagcaccaatctatgaccacatcatcatcccctacacaaggaaagcaaccaagtcagaaatgggaatcacacacctccaaaggattggttttggattggtactctccatagttgccatggcagtggctgctattgttgaaatcaaaaggaaaagagtggcaactcagtcagggctacttgatgatccaaccaaaccacttcctatcacattcttgtggattgcttttcagtacttgttccttggatctgctgatcttttcaccttggcaggattgttggaattt

SEQ ID NO: 89798 - DNA, 316 bp, Glycine max
atagaatcctcaaccttcccaagttctcaaagttggcctctcctgattaatttttgactcaaaaaatattcgtgatctctatctagtaaaaatgatattatttcgtaattcaaaatttatagtatattataatggtataactaattacttacctctcttaatttccattttttgaatgtacagaatgtccaaatattttatttccttttattttattttatgcaagactatttaccaaggcatagcttaaggagatgcacccttgattcattcgtttactcacgaaaagagccaaatcagagttgcatggacacaa

SEQ ID NO: 89799 - DNA, 345 bp, Glycine max
agcttgcctcaaagaggtccaggatagacaaggcggccgaaggaactagttccgctcctgagtatgacagtcaccgctttaggagcgttgtacaccagcagcgcttcgaggccatcaagggatggtcatttctccgggagcgacgcgttcagctcagggacgacgagtatactgatttccaggaggaaatagggcaccggcggtggacatcactggttactcccatggccaagtttgatccagaaatagtccttgagttttatgccaatgcttggccaacagaggagggcgtgcgtgacatgagatcttgggtaaggggtcagtggatcccgtttgatgccgacg

SEQ ID NO: 89800 - DNA, 287 bp, Glycine max
taacaaaaggcatgcgattgatgataattatgaaactggccaaatacaggctaaaggcccaagtggagaaggacagaggcctaagtggagaaggacaaagcccccaagtggagaaggatgaaggctcaagtggagatggatgaaggcccacaggcagagacactatcaagacaattaattgttgctgaaggcccaaactatttgaaggcccaagttaaatatgtttttagttataatttttatttattgtagttttggcccaacctatttagaaggcccatgtctat

SEQ ID NO: 89801 - DNA, 278 bp, Glycine max
cagcttctacttatgtggcagggcgtgtcttcttcactttcttgtctccaacgcgagctctgaccactggtctttcttcccgcgatgcctcttttcatgtccgcctgagtgggcttataacctaaaccatactttccacgatttccttggggttttataaggctaattattcccccatttgtctttgcctaaacccattccgggttcataaccggtccccaacataactcgggccattattaccgccgcatctgacaaacaaagttgccccaaaaagg
